United States Patent Application Publication US 2014/0259212 A1 - sequence listing, part 19

SEQ ID NO: 59919 - DNA, 1905 bp, Rhodopseudomonas palustris CGA009
  CDS (1)..(1905): transl_table=11
atgacggcaccgaataaaccgcagagctccaactccgacgcgtcggcgatcagtttgtcgctggacgcgatcgcggcgaccgagaacgtcgggccgcgcaccggcaccttgcgggccgatgccgatccgagccaggtcgaggaggtcgcggccgtcgtcaagcgcagccggctgaagccgctgctctcgctgatgccgtatgtggcccgctaccgcggccgcgccacgctggcgctgatcgccctgatcgtcgcggccgccacgaccctggtggttcctgtcgcggtgcgtcggctgatcgatttcggcttcagcgccgaaggtgtcgagctgatcaacggctatttcagcgtcatgctcggcgtcgtggtggtactcgcggccgccagcgcggcccggtattacctggtgatgacgatcggcgagcggatcgtcgccgacgtccggcgcgacgtgttccggcatctcacggcactgtcgccggcgttcttcgattccgcccgcagcggcgagctgatctcgcggctgaccgccgacaccacccagatcaaatccgccgtcggcgcctcggtgtcgatcgcgctgcgcaacatgctgctgttcgtcggcgcgatctcgatgatggtgatctcgagcccgcgtctgtccggcttcgtgctggcggcgattccgctgatcgtgattccgctggtggcgttcgggcgctgggtgcggaggttgtcgcgcaacgcgcaggacacgctggcggacgcttcggcctatgcggccgaactggtcggcgcgatccgtaccgtgcaggcctacaccaacgaacgcgtcgccaatgcgcggttcggcggcgcggtcgaagagtcctacgaggcggcgcgcagttcgaccggggcgcgggcgctgctcaccgcgatcatcatcttcatcgtgttcgccagcgtggtggcgatcctgtgggtcggctcgcacgacgtcgccatcggcgccatgtcgcccggtcggctcggccagttcattctgtatgcggtgtttgccgcctccagcctcggccagctcagcgaagtgtggggcgaagtctcggcggcctcgggcgcggccgagcggctgttcgaaatcctgcgggtgaagcctgagatcgccgcgccggcgaagccgaaggcgctgccgatgccggtgcgcggcgacgtgctgttcgacaatgtcagcttctcctatccaacccggccggacttcctggcgctcgacggcctgtcgctgagcatcaaggccggtgaaaaggtggcgatcgtcggcccctccggcgccggcaagagcacgctgtttcatctgttgctgcggttctacgatccgacctccggcacgattgcgctggacggtgtcgccatcaacgccgccgatccgcaggcggtccgcgagcggatcgctctggtgccgcaggactcggttgtgttcgccgcgaccgcgcgcgacaatatcagtttcggccgcgacgacgccagcgagctcgacgtcgagcgcgccgcccagcaggctcacgccaccgaattcatctcacgtctgccggaaggcttcgacaccaagctcggcgaacgcggcgtgacgttgtccggcggccagcgccagcggatcgccatcgcccgtgcgatcctgcgcgacgcgccgctactgctgctggacgaggcgacctcgtcgctcgacgccgaaagcgaagtcctggtgcagaccgcgctgcagcagctgatgcgcgaccgcaccacgttggtgatcgcccatcggctcgccaccgtgctgtcgtgcgaccgcatcgtggtgatggagcacggccgcatcgtggagcaaggcacccacgcccagctcgtcgcccgcggcggcctctacgcccgcctcgccaagctgcagttcgaggcggcgtag

SEQ ID NO: 59920 - protein, 634 aa, Rhodopseudomonas palustris CGA009
MTAPNKPQSSNSDASAISLSLDAIAATENVGPRTGTLRADADPSQVEEVAAVVKRSRLKPLLSLMPYVARYRGRATLALIALIVAAATTLVVPVAVRRLIDFGFSAEGVELINGYFSVMLGVVVVLAAASAARYYLVMTIGERIVADVRRDVFRHLTALSPAFFDSARSGELISRLTADTTQIKSAVGASVSIALRNMLLFVGAISMMVISSPRLSGFVLAAIPLIVIPLVAFGRWVRRLSRNAQDTLADASAYAAELVGAIRTVQAYTNERVANARFGGAVEESYEAARSSTGARALLTAIIIFIVFASVVAILWVGSHDVAIGAMSPGRLGQFILYAVFAASSLGQLSEVWGEVSAASGAAERLFEILRVKPEIAAPAKPKALPMPVRGDVLFDNVSFSYPTRPDFLALDGLSLSIKAGEKVAIVGPSGAGKSTLFHLLLRFYDPTSGTIALDGVAINAADPQAVRERIALVPQDSVVFAATARDNISFGRDDASELDVERAAQQAHATEFISRLPEGFDTKLGERGVTLSGGQRQRIAIARAILRDAPLLLLDEATSSLDAESEVLVQTALQQLMRDRTTLVIAHRLATVLSCDRIVVMEHGRIVEQGTHAQLVARGGLYARLAKLQFEAA

SEQ ID NO: 59921 - DNA, 1722 bp, Bdellovibrio bacteriovorus HD100
  CDS (1)..(1722): transl_table=11
atgatgtcacctgaaatcaagaagctcctgggcgaacttaaacagtacaaaagcaccctttacatcgtcgccgccacagggattctgaacgcgctggcaaccacacagctggcttatatgatcaaagggctgttcgatggactgtctgcaaatcagcagcaggccatggccaccctggtgccgatggccttgggtttggcgctggttcaagcgacttctcgttacttccacatttatctgatgaactacaccgccgagcgcgtggttcagggactgcgccaaaaacttcagcagaagttcatgcgcctgaatctgtccttccataacaactatgccgcaggctccggtggcttgatcagccgcatcctgaatgacattcgcatcatccaggatggcctgcgtgtggtggccgacattttcctgtatccgctgatgctggtaggtttgctgatcaatttgatccgcatcgattggaagctgacattggccactttcctgattgcaccggtgattgcggttattctgaaaaacatcgcccgcagcatgcgcaagtatattcctcaagaacgtgacgtgatggagtacatgacctccaccatcaaagaaagtctggacggcgttcgtattatccagtccttcaatcttgaaaaagacatgggtgagcgcctgattaaggaatccgacaagtaccttggcatccgcaagaccatctacaaacgccaggaagccagcggtcctgtcaccgaattcctcgcaactgccattgttctttgtgtgttcatgtatgtgagctatgaaatcgccgctggtcgcagcactccgggaactttcgtgggctttgtggcttccttgttgatgatcaatcagcctatcaagcgtgttcaagaagcttacgttcgcattcaggaagtgaccatttccctgcgtcgaatctttgagatcattgaaaatgaatcggaagttcctcaagttgccaatccagttccatttccaaaagactggaagaagatcacttataaaaacgtgagcttcagctatggcaaagaaatgattctgaagaatctgaacctagaaatcaaccgcggcgaagtggttgctttggtcggcgccagcggcagtggtaaatccaccatcgtgaacctgctggaaagattctttgaccccacctccggcgaaattctgattgatggcgtgaacattcatgatatcggcctgaaggatctgcgtcgcaatgtcgccctggtgactcaggatgtgttcttgttcagcgataccatcgaaaagaacatctgggctggtgactacaaccgcacccgtgaagacatcccggccatggcaaagctggcgaacgcccatgacttcatcatgaaaacaccgcatggctatcaaagccgcgtgggcgaccgcggaaatcttctttccggcggcgaaaagcagcgcatcagcattgctcgtgcgatgtttaaagatgctccagttctgattttggatgaagcgacaagcgccttggacactgccagcgaaatcgaagttcaaaaggggattgatcatctgatggagggccgcacggctctggtgattgcccaccgactgtcgacaattcaaaaagccgacaagattgtcgtcatgaagtcaggagagatcgccgagatcggcactcacaaagacctcatgtcaaaagagggcgagtacttccgcttccacagtttgcaacacacttag

SEQ ID NO: 59922 - protein, 573 aa, Bdellovibrio bacteriovorus HD100
MMSPEIKKLLGELKQYKSTLYIVAATGILNALATTQLAYMIKGLFDGLSANQQQAMATLVPMALGLALVQATSRYFHIYLMNYTAERVVQGLRQKLQQKFMRLNLSFHNNYAAGSGGLISRILNDIRIIQDGLRVVADIFLYPLMLVGLLINLIRIDWKLTLATFLIAPVIAVILKNIARSMRKYIPQERDVMEYMTSTIKESLDGVRIIQSFNLEKDMGERLIKESDKYLGIRKTIYKRQEASGPVTEFLATAIVLCVFMYVSYEIAAGRSTPGTFVGFVASLLMINQPIKRVQEAYVRIQEVTISLRRIFEIIENESEVPQVANPVPFPKDWKKITYKNVSFSYGKEMILKNLNLEINRGEVVALVGASGSGKSTIVNLLERFFDPTSGEILIDGVNIHDIGLKDLRRNVALVTQDVFLFSDTIEKNIWAGDYNRTREDIPAMAKLANAHDFIMKTPHGYQSRVGDRGNLLSGGEKQRISIARAMFKDAPVLILDEATSALDTASEIEVQKGIDHLMEGRTALVIAHRLSTIQKADKIVVMKSGEIAEIGTHKDLMSKEGEYFRFHSLQHT

SEQ ID NO: 59923 - DNA, 1668 bp, Treponema denticola ATCC 35405
  CDS (1)..(1668): transl_table=11
atgtttaaagaaaaatataaaccgcttattaaaatgtctaaatacataagcttttataaaaaagaatttatcatttcgattatttacggaatatttaacagtgtttttgctttgctcaccgttttaacgggtgcatatatagcttcagcggctctgtttaaaatgagcacaggaaaaatactttatctttttataccgctgattatttttattatcggcaaaggactttttgcttttttggaaatgtacgaatgtcatttggtttcatacggtgtaatcgaaaaaataagaaaccttttatatgattcgatttccaaaacagcaccgcaatccacaggcaaaaaaagaagcggaagtattacctccgtgtttgtcgaagatgttgaagccactgaagttttttatgctcataccgcaggatcttacataattgcagttgtctgcactgttctttatcttactgcattaagttttctttcatttaaaataagtgcagccgtttttgccgcctgtattcttgtcgcagccgttccgtatttttttaatcctattacaaaaaaaatcggagaagagatacgcgacggtttggctgaggtaaatgccgaagctgtagatacggttcaaggtttacgtgagattttaattttcggcaaagaaaaaaaatacattgaaaaagttactgccgataccttacgcttaaataaaaaagaaatacgggatgggagatttaagggcttacacagtttagtaataaacttaattacctccgcagttttaatttcaacaatattactcgctcattcggaagtaattgcaggctcgttaaaacctgaaatggtttcggttgttataatattttctctttttgcctttgtgcctataatgagcgtttcggttacggcaggagctatgaatatttcaaatggagcggcaaaaagaattttggatatattagaagaagaaccggccgttaaagacagggttccatatattccgcaaaacaaatcttcagttaagggaaacatagaatttaaggacgtaaaattttcttacgaaaaaggtaccgaagttttacacggagttaattttacggttaaggccggtgaaagcattgcccttacgggtgaatcgggagcgggaaaatctacaatagcaaatttacttatgcgcttttacgaacctgacagcggagcaatttatattgacggaaaaaacataaaagatatacaccaaaattccctgagggatataatcgcctatgtaccgcaggatgtttatctctttaacaaaaccataaaagaaaacatttcccttgcctgtcccgatgcaagcgatgaagaaattaaacaagctgctaaggttgcgatggctgatggctttattaaaaggttggaacaaggctacgataccaatgtcggtgagcggggtgttcagctctcaggcggagaaaaacaaagaattgctatagcgcgcgccgtcttaaaaaattctcccatattgctgatggacgaagccgtttccaatttggatagtgaaagcgaagcactcttccggcaagccctaaataatatccgcaaaaataaaaccataataacgattgcacatcgtccttctacaataaaagaggcagacagggttgtaaaaatcgaaaacggaaaaatagtttaa

SEQ ID NO: 59924 - protein, 555 aa, Treponema denticola ATCC 35405
MFKEKYKPLIKMSKYISFYKKEFIISIIYGIFNSVFALLTVLTGAYIASAALFKMSTGKILYLFIPLIIFIIGKGLFAFLEMYECHLVSYGVIEKIRNLLYDSISKTAPQSTGKKRSGSITSVFVEDVEATEVFYAHTAGSYIIAVVCTVLYLTALSFLSFKISAAVFAACILVAAVPYFFNPITKKIGEEIRDGLAEVNAEAVDTVQGLREILIFGKEKKYIEKVTADTLRLNKKEIRDGRFKGLHSLVINLITSAVLISTILLAHSEVIAGSLKPEMVSVVIIFSLFAFVPIMSVSVTAGAMNISNGAAKRILDILEEEPAVKDRVPYIPQNKSSVKGNIEFKDVKFSYEKGTEVLHGVNFTVKAGESIALTGESGAGKSTIANLLMRFYEPDSGAIYIDGKNIKDIHQNSLRDIIAYVPQDVYLFNKTIKENISLACPDASDEEIKQAAKVAMADGFIKRLEQGYDTNVGERGVQLSGGEKQRIAIARAVLKNSPILLMDEAVSNLDSESEALFRQALNNIRKNKTIITIAHRPSTIKEADRVVKIENGKIV

SEQ ID NO: 59925 - DNA, 1764 bp, Bacillus cereus ATCC 10987; identical to SEQ ID NO: 7439
  CDS (1)..(1764): transl_table=11

SEQ ID NO: 59926 - protein, 587 aa, Bacillus cereus ATCC 10987; identical to SEQ ID NO: 7440

SEQ ID NO: 59927 - DNA, 984 bp, Strongylocentrotus purpuratus
  CDS (1)..(984)
atgacggttctctataatggtggtctgatgatgacagagtcacagattaccgtaggtgatctctcggcattcctgctctatgctgcttatgtgggcatatcaataggaggattgagtaacttctatgctgagctgatgaaagggattggagccagcaccagactatgggagcttgttgataggaaacctgcaataccactctcaagtggccttagattggacacaactcaactcagaggagcaatagactttcacaatatacagttttcctatccgatgcgtgctgatgtgcctatcttcaaagatctgagtttgtctgttgaggcgggttcagtgatggctgttgtgggggccagtggatcagggaaatctagccttggttctctcctactaagatattatgaccctagtgcaggatctattacgttagatggaaaggacaccacctcattgagccctgaatggctgagacatcaaattgggactgttagtcaggagccgacgctcttctcatgcagcatcaaggagaacatagcctatggagccatcgatcctgataatgtttctatgacgatgatagaagaggcagctaggacagccaacgctcattacttcatcaagtctttcccaaatgagtatgacacggttgtaggagagaggggcctcatgctctcaggtggtcaaagacagagaatagccttggctcgagcagtcttgaagaatccaaagattttactccttgatgaagctacaagtgccttggatgctgagagtgagtacttggtccaagaagccctggagagattgatggtaggaaggacagccatcaccatcgcccatcgcttgtcaaccatcaagaacgcagacatgattgcagtcctggactctggtcggatagcggagacaggtacctatgaggagctgatgaggataccggaggggatgtttaggaaactggtggagaggcagactgtcatgaactga

SEQ ID NO: 59928 - protein, 327 aa, Strongylocentrotus purpuratus
MTVLYNGGLMMTESQITVGDLSAFLLYAAYVGISIGGLSNFYAELMKGIGASTRLWELVDRKPAIPLSSGLRLDTTQLRGAIDFHNIQFSYPMRADVPIFKDLSLSVEAGSVMAVVGASGSGKSSLGSLLLRYYDPSAGSITLDGKDTTSLSPEWLRHQIGTVSQEPTLFSCSIKENIAYGAIDPDNVSMTMIEEAARTANAHYFIKSFPNEYDTVVGERGLMLSGGQRQRIALARAVLKNPKILLLDEATSALDAESEYLVQEALERLMVGRTAITIAHRLSTIKNADMIAVLDSGRIAETGTYEELMRIPEGMFRKLVERQTVMN

SEQ ID NO: 59929 - DNA, 1950 bp, Strongylocentrotus purpuratus
  CDS (1)..(1950)
atggtgagagtgttcctgctcttgagcgctgctgttggaatccttgtcaactctcaggaaagtgtgcagtgcatcaagaaagccagataccctatcggagtcctgaacatcttcttggtcttgtacaccttggcaaagatcatgttgtacacggagtacgtggatggcaaccatgatgatgatgtatggttcttgactctaggagcctggacaatggtagcatcacttgctatattgataacttactcaaagcaggactggcccttctgggtcgttggcctcattgctctaataagtgccactatttgtaaaacatttcttcctctgctagcagggcaggttctcgatggggttattcatggaaaggaaacggctaggtttaatgaatccatcaccctgatggggattatttcttgtgcaattgctatatgtggtggagttcaagatggctgcattggcgtggcaatggcaagtctcaaccgacgcatcactaaccgcctctttgattccatcctcaagcaagatatagcattctttgataaaaatggaaccggagcaatattgtcgcgtttgacatcggacataaccaccatgagtgatatgctcggaggcagcgtcaacaaatgtcttcgcagaacattacagattgcctccaacaccgtcgcaatggttgttctctcctggagactctctgtggtcactgtaatcacttttgttctcctagcagttatcacagacatcgtcggaaagtactttgagaagctgtcaaggaagatccagagcgctctggccgatgccaacattgtggccgaaaagaatgtctccaacatgaaggctgttcgaagctttgccatcgaagcgggtcagaaaagcacctaccgcaataagctagacactgtttaccacttgcgtaagaaagaggcagtggtcttagggttatcaaaggtgatggtctctgtttgtgaactgttggcgtttgtagtggctctcttttacggaggtcatcttgttcttaatgacaagataagtggaggaatgctattttcttacgtgtggtatcagcagaaaattggaggaaacatagaaaaggtttccgatgggtttgttcgcttcatgaaggcagcaggagcttccaggaaggtgttcgaactgattgacgtaagccctgcctttaggaacgatggccgactggcaccaaaagagtttgagggtcacttggaattcaagaatgtaacttttgcttatccaaccagaccatctactccagtgctcagaaatataagctttaccgcatctcctggagaagtgctagccattgtgggtccaagcgggggaggcaagagttcatgcatcagcctcatagagcatttatatgagcctacatccggggaaatcctgatagacggagttaacgtcaaggattacgatcatacctacctacataaaaaagttgccctcgttggtcaagaaccagtcctttatgcaaaaactatcaaggacaatatttcctacagccttgagggttgcagcatggcgcgtattcacgatgcagcgaaacaagccaacgcccacaacttcattcttggtttgcagaagggttatgcgacggacactggtgagaagggtgttgcgttatcgaggggtcagaagcagcgagtggctatagcccgagccttggtcaggaatcctcagatgctgctcctggatagggctaccagcgctctggatgctgagagtgaacatctgattcagcaggcggtctttgagcgcttcagaagccgtaccgttgtgattgtcggcaatcgtctgcggaccatcgagaaggctgaccgcatcttggtcatcgatcacgggacagtggtcgagcaaggtagccatcatgaactcattagctcaaacggactttatgctcggcttttacgacgtcaactccaaggctctgcaaaatga

SEQ ID NO: 59930 - protein, 649 aa, Strongylocentrotus purpuratus
MVRVFLLLSAAVGILVNSQESVQCIKKARYPIGVLNIFLVLYTLAKIMLYTEYVDGNHDDDVWFLTLGAWTMVASLAILITYSKQDWPFWVVGLIALISATICKTFLPLLAGQVLDGVIHGKETARFNESITLMGIISCAIAICGGVQDGCIGVAMASLNRRITNRLFDSILKQDIAFFDKNGTGAILSRLTSDITTMSDMLGGSVNKCLRRTLQIASNTVAMVVLSWRLSVVTVITFVLLAVITDIVGKYFEKLSRKIQSALADANIVAEKNVSNMKAVRSFAIEAGQKSTYRNKLDTVYHLRKKEAVVLGLSKVMVSVCELLAFVVALFYGGHLVLNDKISGGMLFSYVWYQQKIGGNIEKVSDGFVRFMKAAGASRKVFELIDVSPAFRNDGRLAPKEFEGHLEFKNVTFAYPTRPSTPVLRNISFTASPGEVLAIVGPSGGGKSSCISLIEHLYEPTSGEILIDGVNVKDYDHTYLHKKVALVGQEPVLYAKTIKDNISYSLEGCSMARIHDAAKQANAHNFILGLQKGYATDTGEKGVALSRGQKQRVAIARALVRNPQMLLLDRATSALDAESEHLIQQAVFERFRSRTVVIVGNRLRTIEKADRILVIDHGTVVEQGSHHELISSNGLYARLLRRQLQGSAK

SEQ ID NO: 59931 - DNA, 4032 bp, Nasonia vitripennis
  CDS (1)..(4032)
atggacggcaaggtacacgcacagaggccaaagaacccaagagaaggggctaatccactaagcacactaacttttggttacatccttcgactattttgggtaggctaccgcagggatcttgacattcaagatctctacgagccgctgaaagagcacacgagcaatcgattgggcgagaaaatagcaagactatgggagcaggagtgtcagcgcgtcaagaagaaacaggagacaaaggcgaagaacggcaaaaatgataagaaactcgagcccagtttacttcgagtcctcttgagatgtttcggtttcaagctgatgctctacggagtcctactggcgtttatggagatcgtcctcagggtttctcagccactgctcctggcgcgtctgctcaagtacttcaaaagtgacagcgaaacgacggccgaagaggcctacctctacgccggtggtgtcgtcctctgctctgccttaaacgtcctcgtgatccatccgtacatgatggccattcttcacatgggcatgaagatgcgagtggcctgctgtactctgatctaccgcaagtctctgaagctctcgcgcacagctctgggagagaccaccgtaggtcaggcggtgaatctcctctcgaacgatgtgaaccgcttcgacgttgccacgatctttctccactacttatggataggtccattggagaccatcatcgttatgtacgtcatgtttaacgaggttcaggaatcagcgatcatcggagtcgccacgctgcttatgttcataccgctgcaaggcttccttgggaagaaatccagttctctcaggttaaaaactgcgattagaacggacgaaagggtcaggctgacaaacgaaatcatctccggaatacaggcgatcaagatgtacacctgggagagaccgttcagtgcgttgatcgccaaagctagatacaacgaaatcaaggtcatcaggggcatgtcgtacatcagaggagctataatgtcgttcattatattctcaacgaggctgtcattgttcatcaccatcctggcatatgtgctattcggaaaccacattaacgccgaaatcgtattcatgttgacagcctattataatattttgaggacgaacatgactgtattcttcccacaaggaataacccaggtagccgaggtgatggtttccatccgtcgtctccagcgattcatgttgtacgaagaggtctcaacccgagccgatcgtagtttaatttaccgaaagcctcgctcggacgacgctgcgaaaaaggctaagaaagacaagaaagacaaagccaacggtaaaaccatcgaggagttcacccctgttgatgaccccgatgccgacgacggctccgtcaagttggaacacgcttcggccaaatggctcgacttcgtgaaagaggacacgctgcacgacatcaacctggaggtgaagcccggagagctaatcgccgtcgtgggtcaggtcggctccggcaagtccagtctgctcaacgttattctgaaggaactgcctctcacttctggcacagttcaggtcaatggccagatcgcgtatgcgagtcaggagccttggctgttcgccggctcggtgcgacagaacattctgtttggccggaaaatggatcagcacaagtacgagcacgttgtgaaagtgtgccagctcaagagggacttcaggctgttaccttacggagacaaaactattgtcggcgaaagaggcattagcctttccggcggtcagcgcgcgagaataaacttggccagagctgtttactccgacgcgccgatttatgccttcgacgatccgctgagtgccgttgacgctcacgtaggaaagcacatgttcgatgagtgtatcgcgaagtacttgaagaacaaaacgaggattttagttacccatcaactgcagtacctgagaactgtcgataggatcattgtattaaaggatggggagatcaaagccgaaggatcctttgattcacttgtcgcacgaggcgtggacttcggtcgcctgcttgaaagccaaactgacaaaccccacgctgacgataccggctcgctacccccaagccgtggaacttctcgtcaaggcagtatcacttctctcagctccttcatgaccaatgagaacaacctttcattcgacgacccgaaggaggaggatgagatgcgcagctctggtaacgtcggcggctgggtctacaagggctattttagcgccggtggtaattgctgcattattgtcactattttcgtcctcttcatcctcgcccagtttttcgccagcgctggcgatttcttcatttctgaatgggtcaagatggaggaaaaatcaccggtaagtacagcgatgattcaattacgtcgctcttttcctgaacataatatgcgcccgatctcccgcgacaactgcatctatatatacagtggcataaccatattgacgattgtcgtgacgctggtccgttcctcagccttctttgatatgtgtatgcgcgcctcacgaaacctccacgacgcgatgtttacctcgatcagtcacgctaccatgcgattcttcaacacaaacacgtctggtcgtatcctcaatcgattctccaaggatatgggtgcggtcgacgagctcctgcccattgccctcatcgactgtctgcaaattggactaacactcgttggtatcattgtcgttgtggcgatttccaatccatggctcctcatacccaccgtcctgatcagcatcgtcttctactaccttagggttatttatatagcgactggaaggagtgtgaagcgactggaaggagttactcgatcaccggtattcggacacttgagcgcaagtcttcaaggattggcaacgatccgtgcattcgacgccgacgagactctcatcaacgaattcgatcaacaccaggatctgcactcgtcagcttggttcatcttcatcgccacatctcgtgccttcggcttctacctcgacgtattttgcctactctacatagctgtagtaacaatgagcttcttcatattaggagacgaaaaggctgatggcggatccgtgggtctagccataacccaaagcattggtcttactggcatgttccagtggggaatgagacaaagcgcagagttggaaaaccaaatgacttctgtggaacgtatgttggaatacagcaatctcccaagcgagccaccactagagagcatcccagagaagaaaccgaaacccgactggccctcagaaggcaagattgagttcaagtcggtctttttacgctactcaccgttagacccgcctgttctcaagaacctcaactttgtcattcaaccaaaagaaaagatcggcatcgttggacgtactggtgccggaaaatcttctcttattcaatcgctattcaggttggcggacgtacagggtcgcattgaaatcgacgaaattgagacaagtgaaatcggtctccacgacctacgtggaaagatctccatcatccctcaggaaccgttcctgttctcgggcactctgcgcaagaatcttgacccgtttgatagctacgaggattcagtgctctggcaggcacttgaggaggttgagctcaaggagatgggcctgacagcgcatatcaacgaaggtggcagtaacatgagtgtcggtcagagacagctggtctgtcttgctcgtgccattgtcaagaataaccctattctagtgttagacgaggccacggcaaacgttgacccaagaaccgacgaactcattcaaaaaaccattcgaaccaagtttgagaagtgtacggtgctcacaatagcccatagacttaatactgttatggatagcgatcgcatattagttatggacgccggaactgctgtggaatttgaacatccttatatcctcctgcaaaaggaatctggttatttaaggagtatggtcaatgagacgggaaagaacatggccgaagctctcatgactgtcgccgaaaacgcttacaactccaccagtaacacagctctttag

SEQ ID NO: 59932 - protein, 1343 aa, Nasonia vitripennis
MDGKVHAQRPKNPREGANPLSTLTFGYILRLFWVGYRRDLDIQDLYEPLKEHTSNRLGEKIARLWEQECQRVKKKQETKAKNGKNDKKLEPSLLRVLLRCFGFKLMLYGVLLAFMEIVLRVSQPLLLARLLKYFKSDSETTAEEAYLYAGGVVLCSALNVLVIHPYMMAILHMGMKMRVACCTLIYRKSLKLSRTALGETTVGQAVNLLSNDVNRFDVATIFLHYLWIGPLETIIVMYVMFNEVQESAIIGVATLLMFIPLQGFLGKKSSSLRLKTAIRTDERVRLTNEIISGIQAIKMYTWERPFSALIAKARYNEIKVIRGMSYIRGAIMSFIIFSTRLSLFITILAYVLFGNHINAEIVFMLTAYYNILRTNMTVFFPQGITQVAEVMVSIRRLQRFMLYEEVSTRADRSLIYRKPRSDDAAKKAKKDKKDKANGKTIEEFTPVDDPDADDGSVKLEHASAKWLDFVKEDTLHDINLEVKPGELIAVVGQVGSGKSSLLNVILKELPLTSGTVQVNGQIAYASQEPWLFAGSVRQNILFGRKMDQHKYEHVVKVCQLKRDFRLLPYGDKTIVGERGISLSGGQRARINLARAVYSDAPIYAFDDPLSAVDAHVGKHMFDECIAKYLKNKTRILVTHQLQYLRTVDRIIVLKDGEIKAEGSFDSLVARGVDFGRLLESQTDKPHADDTGSLPPSRGTSRQGSITSLSSFMTNENNLSFDDPKEEDEMRSSGNVGGWVYKGYFSAGGNCCIIVTIFVLFILAQFFASAGDFFISEWVKMEEKSPVSTAMIQLRRSFPEHNMRPISRDNCIYIYSGITILTIVVTLVRSSAFFDMCMRASRNLHDAMFTSISHATMRFFNTNTSGRILNRFSKDMGAVDELLPIALIDCLQIGLTLVGIIVVVAISNPWLLIPTVLISIVFYYLRVIYIATGRSVKRLEGVTRSPVFGHLSASLQGLATIRAFDADETLINEFDQHQDLHSSAWFIFIATSRAFGFYLDVFCLLYIAVVTMSFFILGDEKADGGSVGLAITQSIGLTGMFQWGMRQSAELENQMTSVERMLEYSNLPSEPPLESIPEKKPKPDWPSEGKIEFKSVFLRYSPLDPPVLKNLNFVIQPKEKIGIVGRTGAGKSSLIQSLFRLADVQGRIEIDEIETSEIGLHDLRGKISIIPQEPFLFSGTLRKNLDPFDSYEDSVLWQALEEVELKEMGLTAHINEGGSNMSVGQRQLVCLARAIVKNNPILVLDEATANVDPRTDELIQKTIRTKFEKCTVLTIAHRLNTVMDSDRILVMDAGTAVEFEHPYILLQKESGYLRSMVNETGKNMAEALMTVAENAYNSTSNTAL

SEQ ID NO: 59933 - DNA, 4023 bp, Nasonia vitripennis
  CDS (1)..(4023)
atggacgccagtaaaaagtacgatagtccaaatcctaggctcaaagctaacatagtcagcaaagtattcttttgcaaagctattgttaaaaaaatattctcaattattttttctttttcttacagttggctgattccaatattttggtatggcagaaaaaatgacattgaaccaaaggatattcacaacgttttgccaaaagatgtgagcgaaacactcggggataaattagaaagaaattggaaaaaagaagtggaaaatgcccaaaagaacaaaagaaaaccaaacttccgtaaagccatccagaggaccttcggctggcccttcatgcatcttgggatctacgctttccttctgaccgttgtgatcaaactgttgcagccgatcgctctgggccttttaattggacacttctctccgagcgctacgtcgagtacgaacgaagcttatgcctacgcctccggcgttatactcatgaccgtgttggagtccgtaatgttttgtcacgttgtataccagtgccgagaactcggcgtccaattgagggtcgcgtgctcgtctttgatctacagaaaaattatgcgattgtcctgtgcagcggcgagtaaagcatcgggcggactcgtgattaacctgttatccaacgatgtagtcagattcgaacaagtgttcacatttttgcactacatttggataatgcctattcaggcggcagtggttgcttacctcatttggaggagcgtcggtgtagcctcgctagccggggtatttttcatgattctgcagacgataccgtttcaaatttacttcggcaagctgatacactcgtaccgcaagaaagtcgcggtcaggactgatggcagagtactgctgatgaacgagataatcaacggaatacgggtgatcaagatgtacacctgggagccagttttccagaagctcgtctgcactgcgaggaggaacgagctcaaacagattgtagcatcaaactacttgaaaggtgccacttgggcatcgttttcttacgctcagcgcacggccttattcttttgcatattggtttacgtcctgcgagataacgttatcacggctgacaaggtattcacgatagcacagcttttcagtgtgatgcaattgactatggcagccttgtttcctcgaggcttgcatttttacgcagaggcgaaagtatcgataaatcggattcagaactttttactatctgaggaaattgaggccaccgatcggaaacaggtcaagagcgatgatagcaacgccaatatctctataacaaaagtgaccgcttcgtggaccaaggactcgattacggatactcttcgagatgtcaatgtcactgtgccgtggaagagtttgtgtgctgtcgtcggccccgtcggtgcaggcaagagctcttttctaaaattgatcttaggcgagtttcggccaagcattggccgggtgaacacccagggcagtgtatcgtacgctagccaggaaccttggctgttctctggatctgtgagaaacaatatcctctttggccagccctatgatgaggaaaagtacaacaaggtagccaaggcttgctgtctcgtagacgatttcgagcagcttcctcatggcgatcggactttcgtgggcgagaaaggagcttctctcagtggtggtcagtgcgccagggttaatttagctagagctgtgtacagggacgctgatatctacctgctagacgatcccctttcagcagttgatactcgtgttggtaaacgcctcttcgaagactgcatcaacggatacctaaaagataaaactcgcattctagtgacccatcaaatacaatttctcatgatggcggactcgatcgtttatctcgaaaacggtaaagtcgaattccaaggagattttcaaactttccgaaagcacgacaagcacttttcgcatatggaaaaaaacgattcaagtgagaaacagccagctgaagaaaaagaagccgataacgatgctgatgcacctctagatctgactacttctaatgacgaggacactcgtgaagagccaaaggagactcaagagctggttgcgaaaggaagcgtctcgaacgctttgtattggaaatatttcaaaactggtaactcgtacttcatactccttctgtatgccataattttcattgtggcacaagtgtttagcagtggtggtgactattggatagcttattggactagacaagaagaagcccgcctagcaagttcaattgctcaagaaaggaacaatattaccaatgaaacagacacattcacgaatcaaactaataatcagaacattacagttacgaagatcatggatgcatcacaatatctcgacaccgaattagcactttatatttttgcaatattagttttcgccagtgtcataatgtcaactgcgagaaatgttataatttacagaatttgcaggaattccagtttacaaattcataataaaatgattgactgtatactcaaagcacccatgcgatttttcgatgccaatccctcaggtcgcatccttaatcgtttttctaaagatctcggagctgtagatgagattctctcgctagctataatggaatcctttcaagtggtatctattcttctcggagttatgatacaagtacttatcatcaattggtggatggtttttccaatgtgcatcatgctgtttttccacctgaacataaagaatatgtatctctctaccgctcgtagcataaaaagactagaaggaaatgctaaaagccctgtattttctcatgccaattcgtccctaaatggactactcacgattcgctcgtgtcaagctgaatcaatggtctgcaaagaattcgacggtcaccaagacgtccacactgccacattttccctcgttctttctaccagtacagctttcggattctggattgacttggtttctgtagcattcgtcgctgttgtcacgtatagtttcattttactcgacagcgtatcaagtgatagagtaggtctggctattactcagacattagtcattactggagtgcttcaacatgggatgaaaatggctgctgaaatggtcacacaaatgatcggagtcgagagacttttccaatttacgaagctagaacaagaaggcccatttgaaagtgaacctggaaaggaacctccaaaatcatggccgagtaaaggagaggttcagtttgaaaagttgtacctcaggtacaacgctgcggtggatcctgttttgaagaaccttaatgtgaagattgagccaggaatgaaggtgggaatagtcggacgaacgggcgctggaaaatcgtcgctcatagctgcgctctttcgactcacaaaagttgaaggtgggctgtatgtcgatggcatcgacactaacaggattggtctgaaagacttgcgcagcaagctgtcgattatccctcaagaaccgatgctgttttcggcatcgcttcgagacaacctagatcctttccacgagtttaccgatgatgttctatggtcagctttacaagacgttgaactgaacaaagcttttgtttctctcgatcaatcggttgatcagagtggcagcaatctcagcgctggtcagcgacaactgctgtgtttagcaagggcgattgtaaagaggaataaggttctcgttttggacgaggctactgccaacgtggatccagccacggatgctttgatacagaaaactattagaatcaatttcaaggactgtactgtattgacgatagcgcacagattaaatacaattatggacagcgatagagttttagtgatgaattttggagaagcagtggagttcgatcatccgcacattttacttcaaaataacaatggatattttactaagatggtgcagcaaactggtaacaatatggccgagcacctatgtaatatcgccgagaaagcttacaaaaaagagacgacagtacccgaagctgaaaatcgaacaattgaaaatggagtgaacaaaaaaagtaattaa

SEQ ID NO: 59934 - protein, 1340 aa, Nasonia vitripennis
MDASKKYDSPNPRLKANIVSKVFFCKAIVKKIFSIIFSFSYSWLIPIFWYGRKNDIEPKDIHNVLPKDVSETLGDKLERNWKKEVENAQKNKRKPNFRKAIQRTFGWPFMHLGIYAFLLTVVIKLLQPIALGLLIGHFSPSATSSTNEAYAYASGVILMTVLESVMFCHVVYQCRELGVQLRVACSSLIYRKIMRLSCAAASKASGGLVINLLSNDVVRFEQVFTFLHYIWIMPIQAAVVAYLIWRSVGVASLAGVFFMILQTIPFQIYFGKLIHSYRKKVAVRTDGRVLLMNEIINGIRVIKMYTWEPVFQKLVCTARRNELKQIVASNYLKGATWASFSYAQRTALFFCILVYVLRDNVITADKVFTIAQLFSVMQLTMAALFPRGLHFYAEAKVSINRIQNFLLSEEIEATDRKQVKSDDSNANISITKVTASWTKDSITDTLRDVNVTVPWKSLCAVVGPVGAGKSSFLKLILGEFRPSIGRVNTQGSVSYASQEPWLFSGSVRNNILFGQPYDEEKYNKVAKACCLVDDFEQLPHGDRTFVGEKGASLSGGQCARVNLARAVYRDADIYLLDDPLSAVDTRVGKRLFEDCINGYLKDKTRILVTHQIQFLMMADSIVYLENGKVEFQGDFQTFRKHDKHFSHMEKNDSSEKQPAEEKEADNDADAPLDLTTSNDEDTREEPKETQELVAKGSVSNALYWKYFKTGNSYFILLLYAIIFIVAQVFSSGGDYWIAYWTRQEEARLASSIAQERNNITNETDTFTNQTNNQNITVTKIMDASQYLDTELALYIFAILVFASVIMSTARNVIIYRICRNSSLQIHNKMIDCILKAPMRFFDANPSGRILNRFSKDLGAVDEILSLAIMESFQVVSILLGVMIQVLIINWWMVFPMCIMLFFHLNIKNMYLSTARSIKRLEGNAKSPVFSHANSSLNGLLTIRSCQAESMVCKEFDGHQDVHTATFSLVLSTSTAFGFWIDLVSVAFVAVVTYSFILLDSVSSDRVGLAITQTLVITGVLQHGMKMAAEMVTQMIGVERLFQFTKLEQEGPFESEPGKEPPKSWPSKGEVQFEKLYLRYNAAVDPVLKNLNVKIEPGMKVGIVGRTGAGKSSLIAALFRLTKVEGGLYVDGIDTNRIGLKDLRSKLSIIPQEPMLFSASLRDNLDPFHEFTDDVLWSALQDVELNKAFVSLDQSVDQSGSNLSAGQRQLLCLARAIVKRNKVLVLDEATANVDPATDALIQKTIRINFKDCTVLTIAHRLNTIMDSDRVLVMNFGEAVEFDHPHILLQNNNGYFTKMVQQTGNNMAEHLCNIAEKAYKKETTVPEAENRTIENGVNKKSN

SEQ ID NO: 59935 - DNA, 3843 bp, Nasonia vitripennis
  CDS (1)..(3843)
atggaaaccagtgaaaaatttgacagtccgaatccgaggctcaaagccaacgtaatcagcaaaatatttttctgttggctgatcccattgttttgctatggtagacgtaatgaaatcgaaccaaaggatattcacaaagttttgccgagggaagttagcgaaacactcggtaatcagttggaaagctattggaaagaagaattggaatatgccaaaaataaaaaaacaaaaccaaactttcacaaagctatcctcagaacttttttctggcccttcatatacattggaatctactctttcgtcctgaccgtcgtcatcaaactgttgcagccgatagctctgagtcttttaatccgacacttctctccaggtgccacctcgactacgaacgaagcttacctctacgcttccggggttgtactcatggggttcatggagtccataataatatgccacataacatatagtggccgagaacttggtatgcaagtcagggtcgcttgctcgtctttgatctacagaaaagttatgcgattgtcctgtgcatcggcgagtcaaggaggacacgtgcttaccctattgtctaacgatgtgaccagatttgaacaagtttacgcatttttaaactacgtctggataacgcctattcagctaatagtggtagcttaccttacctggatgagcgttggagtagcctcgttggctgggatagtttgtatggtccttcagacaataccgttgcaaatttacttcgggaggctaacacacgcgttccgtcacaagatagcggtgcaaactgacggcagagtatcgttgacaagcgagataatcaatggaatacgcgtgatcaaaatgtacacctgggagccaattttcaagaagcttgtctgtaccgcgagaaaactcgagctggcagagatatcagtattgaactacttgaaaggtgttgtttgggcctcaggaatgtactctgagcgcacgtcagttttctgctgcattttggtctataccctgcaaaacaacattttgtcagcagataaaatatactcagtggttcagcttttctgcgtgctgcaatttacttttggttccttggttcctcggggcttgcatttttatgcagagtctcaggtatcggccatcaggattcagaattttttactatctgaggaaattgagaccaccgatcgaaaacgggtcaagagcggtgaagccaatatctctatttcgaaagtgacggcttcgtggactaaggagtcgattacggatactcttcaagaggtcaatgccactgtgccggcgaagagcttgtgtgctgttgtcggccctgttggggcaggcaagagttctcttctaaaattgatattaggcgagttacggccaagcattggtcgcgtggacatccaaggtagtgtttcctacgctagccaggaaccctggctgttttctggatctgtgaggaacaacatcctttttgggcagtcctacgacgaagaaaagtataacaaagtgactaaagcatgctgtctcaccgaagacttcaagcagcttccttacggagatcggaccctcgtgggcgagaaagggtctgctctcagtggtggtcagtgtgctagagtaaatctagctagagctgtatatagagacgctgatatctatttgttagacgatcctctatcagcggttgatacccgggttggtaaacgcctcttcgaagactgcatcaacggatacttaaaaggtaaaattcgcgttttggtgactcatcaaatgcaatgtttaatcaaggcagatgtggttgtttatctcaaaaggggtatcgttgagttccaaggagatttcgagaatttccaaatgcacgaccaacaatttttgtacaagcagaaaaatcacgctaacaagaggcagctttccgtagaaaacatggtcgaaacagaagataatggacttgttggcttaagcaaatccgatgttgacaacaaacaggaagaaccgataaaaaatgaagaacaggtggcgaaaggaagcttatccttgtctctctattggcagtattttaaagcgaatggctcatactgcttgctttttgtgtacctcgttgtaactatatcggctcaagtatttaccagcggctccgactattgggtgtcgtattggattaatcaagaccaaactcgtatgagagtacattatgctgccgaaggacaaaatagtgatgcgaatgtatcgccataccttgaccgaacgttcgcacttaatgttatggcaatactagtgtttggttgtgtcatctttgcaacagcgaaaaatgttttattttatattatttgtaaaagatcgagttacaacatccacaatagaatgatcgattccgtattgaaagcgaccgtgaattttttcgacgccaactcgtcgggtcgtatcctcaatcgcttttccaaagatcttggcgctgtagacgaggttctttcgttagctatgatggattcgtttcaggtattttccctagtaactggagttgtggttcaaataattataatccattggtggatgatcgttccaatgtgcatcatgcttattatcaacatcaacatacacaatgtttatctccaaacggcacgctgtgttaaaagattagaagggaacactaaaagtcttgtattggctcacgttaattcaaccctcgacggtcggctaacgatcagatcgtgtcaagctgaatcaatggtctgcaaagtgttcgatcatcaccaagacgcccacaccgcgacgttttcgctcgttcttacaaccagtacagccttcggattttgggtggacttgattgcaatgttcttcgttgctctcgtcacctacagttttgttgtacttggtacaaacgatttctcaggaagcgctgtgggtctagccatcactcagatactttccattacgattctactacaacatggtatgaagatgagtgctgagatggtcacgcaaatggtcggagtcgaaaggcttttccaattcactcatctcgaagaagaaggtccattagagagtaagcctggaaagaaacctccaaaatcttggccatgtaaaggagaacttgaatttgtgaaactaaatctcaggtacaacgatggcgcggatactgtcttgaagaatctcaatctaaagattgagccaggaatgaaggttggaatagttgggcggacaggtgcagggaagtcttctctcatatcagcgctctttcggctcgtaaaagtcgaaggcgggttaatcatcgatggtgtagataccactagtatcggcctcagggacttgcgcagcaaactctcgatcatccctcaagaaccgatactgtttaccacgactctccgtgacaacctggacccttttcatgagattcccgatgatgcgctatggtcagctttacaagacgttgaactgaacaaagcttttgtttctctcgatcaatcggttgatcagagtggcggcagtctaagcgctggtcagcgacaactgctgtgtttagcaagggctattgtgaagaggaacaagattctcgtcttggacgaggctactgccaacgtggatccagccacggatgctttgatacagaaaaccattagaatcaatttcaaagactgcactgtattaactatagcacacagattaaatacaattatggacagtgatcgagtcctagtgatgaattttggagaagcagtggagttcgagcatccatacattctacttcaaaatcacaatgggtatttttacaagatggttgagcagactggaagtatgatggccaagcgactggagaaaattgcagagaaagcttacaaaagttaa

SEQ ID NO: 59936 - protein, 1280 aa, Nasonia vitripennis
METSEKFDSPNPRLKANVISKIFFCWLIPLFCYGRRNEIEPKDIHKVLPREVSETLGNQLESYWKEELEYAKNKKTKPNFHKAILRTFFWPFIYIGIYSFVLTVVIKLLQPIALSLLIRHFSPGATSTTNEAYLYASGVVLMGFMESIIICHITYSGRELGMQVRVACSSLIYRKVMRLSCASASQGGHVLTLLSNDVTRFEQVYAFLNYVWITPIQLIVVAYLTWMSVGVASLAGIVCMVLQTIPLQIYFGRLTHAFRHKIAVQTDGRVSLTSEIINGIRVIKMYTWEPIFKKLVCTARKLELAEISVLNYLKGVVWASGMYSERTSVFCCILVYTLQNNILSADKIYSVVQLFCVLQFTFGSLVPRGLHFYAESQVSAIRIQNFLLSEEIETTDRKRVKSGEANISISKVTASWTKESITDTLQEVNATVPAKSLCAVVGPVGAGKSSLLKLILGELRPSIGRVDIQGSVSYASQEPWLFSGSVRNNILFGQSYDEEKYNKVTKACCLTEDFKQLPYGDRTLVGEKGSALSGGQCARVNLARAVYRDADIYLLDDPLSAVDTRVGKRLFEDCINGYLKGKIRVLVTHQMQCLIKADVVVYLKRGIVEFQGDFENFQMHDQQFLYKQKNHANKRQLSVENMVETEDNGLVGLSKSDVDNKQEEPIKNEEQVAKGSLSLSLYWQYFKANGSYCLLFVYLVVTISAQVFTSGSDYWVSYWINQDQTRMRVHYAAEGQNSDANVSPYLDRTFALNVMAILVFGCVIFATAKNVLFYIICKRSSYNIHNRMIDSVLKATVNFFDANSSGRILNRFSKDLGAVDEVLSLAMMDSFQVFSLVTGVVVQIIIIHWWMIVPMCIMLIININIHNVYLQTARCVKRLEGNTKSLVLAHVNSTLDGRLTIRSCQAESMVCKVFDHHQDAHTATFSLVLTTSTAFGFWVDLIAMFFVALVTYSFVVLGTNDFSGSAVGLAITQILSITILLQHGMKMSAEMVTQMVGVERLFQFTHLEEEGPLESKPGKKPPKSWPCKGELEFVKLNLRYNDGADTVLKNLNLKIEPGMKVGIVGRTGAGKSSLISALFRLVKVEGGLIIDGVDTTSIGLRDLRSKLSIIPQEPILFTTTLRDNLDPFHEIPDDALWSALQDVELNKAFVSLDQSVDQSGGSLSAGQRQLLCLARAIVKRNKILVLDEATANVDPATDALIQKTIRINFKDCTVLTIAHRLNTIMDSDRVLVMNFGEAVEFEHPYILLQNHNGYFYKMVEQTGSMMAKRLEKIAEKAYKS

SEQ ID NO: 59937 - DNA, 3951 bp, Nasonia vitripennis
  CDS (1)..(3951)
atggacaatacgaaagttactcataatcccaatccgagggaaaatgccaacacgttttcagttctattctggtggtggacggttggcttgttcaaaaagggctacagcaaggttctcggaccggaggacctctacgatccagtgagcactgacagacgatggctggccgaagtttcgaacgcgaggaaagtgcaaaggcgaccgaacctcttgaaaacagtctttcgaacgttccttttcgagtattttatcctgggattgattcagatactcaacgagtttgttttgaggttgggcacaccaatactactcggcgctctgctcaggcacttcaaaccagagccgacgactacctacgaggcggcgctatgttacgccggtggaatatcaatcgccatagccataaacgctattaccatgaaccagggtcttttcgatgcgtttcacattggaagcaggatccgcattgccgtctgctccattgtttatagaaaggcactgaagctaaatctcactgctctcggcgagacggctccaggcaaggtggtgaacctcgtggcgaacgatgtcaaccgattcgacctggtctcgattacccttcaccacatgtggtcggcgccgatatccgccgtcatcatctcgtacttcctctaccgcgaagctggttgggctgggccaatcggcatgatcgccgtcttcatagtcgctcctatccagtcttacaccggcaagctgtcctcgaagttccgtctgcaaacggcgataaaaaccgacgagcgagtcagactgatggacgagataatctccggcgttcaagtgatcaaaatgtacgcctgggagaaacccttctgcgcactggtgggtctggctcgtaagctcgagcttagggtcgtccggaaggcttcctacatccgaggcatctacatgaccttcaatctgttcacgacacgttgcgcgctcttcatgaccctactgacgctgatgctgtccggtgaaaacctcaccgctgataaggtcttcgtcttctcgtcctacttcaacatcctcgcgcagaccatgaccggtatgtttgtgcgtggcttcgccgagatagccgagtgtctcgtcgcgttgaggcgactccagaccttcttgactttcgaggagttccagaccggtaactacaattcgaccaggagtcttaagcaggatctgccgtacatcgacgaggatcaggccaatggcgatgcgaaagatggttatcacgttaacaatatcaggtgggttgagagatttggtatccactcatcggagacgaccctcgaggacgtcaacctggaggtggaaaaaggcaagctctacatagtcatcggaatggttggctcgggcaagagttcccttctttccactgtcctcggcgagatcaacctgatcgagggtaacgtcagggtcaagggtggcatcagctacgccagtcaagaggcctgggtctttggctccagcgtcaggcagaacatcatcttcggccaagagttcgacagacagagataccagaaggtggttaaggcttgtgctttgcagaaagattttaaacagtttcctcacggtgatcagaccatcgttggagagagaggaggctcgttatccggaggacagaaagctaggatcaatttggcgaggtcgatctacaggcaggcggatatctacctactggatgatccgttgagtgcggttgacacccacgtcggcaagcacttgttcaaagactgcattcagaagtacctgtatggcaagactcgcattctggcgacgcatcagcttcagttcatcaaaggcgctgatgcaatcatccttatagaccagggtaaaatcaagcagtacaccgactatcacaaactgctcactgcacacccagaatacggtactctcattgccgaggaaaaggctggagatacgagcgatgactcctccattgaaagatctcacatcagacggcagttctcttcgtccagtaccagaagtcgaacaccgaatcccagcggtggggagacggacggagaagacgaggaggcggaccaagagcagttggctgacaagatcgagggaacgtctcgtggtgccgtaaagggtagtcttctggtggaatactttagagttggatcgaacatcatgtacttgggcgtgataatattcttgtttctcattacccagtgcgtaactagcttcaacgattacttcgtcacaatacttgtaaccgccgaagaatcccgagcctactacaaagacctccacgagcaggagcaaaatggcacagagttaatagtgagacgtaacgccacagttctggacgaggcggacctgtacccgcgaaataactacatctacgtatactcggctgtcgtcttctcgattttcttcataggcatgatccgttccattaccttttacaacatctgtttgagctgtaaccagcgtattcacgacctcgttttcggtgctctcattcgtgcgaagatgcgattcttcgatactaaccccagcggtagaatcctcaacaggttctcgaaggatatgggagctatcgatgagttactgccaaaagcgatgctggacgcgggccagatcatcctcgcgatggttggtgcgatcgtggtagcctgcgccgtcaaccctatcttcctggtgcctctttgtgccatcgcgattgtgttcttctttatcagaagggtctacctgaagactagcaagaacgtgaagaggcttgagggaatgactcgatccccagtgttcacacaccttaacgcaactctcaacggcctgtccactataagagcctataacgctgaaactattcttaagaaggagttcgataagttccaggacgtgcacacttcctcttggtacatgttcatcgcgacgagtagtgccttcggcttctccctcgacatctgctgcttcatcttcaccactttggtgaccttcagctttcttcttttagaagacaacttctcgggaggtcaggtgggtctggcgataacgcaggtgatggcgttgacgggtatggtccagtggggaatgcgtcaaagcgccgaggtgacgaaccagctgatgtccgttgagcgagtcctcgagtacaccgacctgacgcctgagcctaatctaagagacaaaggctggcccagtcatggttgcattgaatttaagggagtttacatgaggtacgccgaggaagaacccccggtgctcaagggacttacgctcaggatcaagcctacggagaaggtcggaatcgttggaagaacgggagccggaaagtcgtccctcatttccgctctgttcagactagccatggtcgatggtgtcatagagatcgacggaatcgataccgggaccatcgcgttagaggacttgcgcaaaaacatctcgatcattccccaggatcccgttctgttctcgggaactctacgtcgcaatttggatcctttcaacgaattctccgaccagcttctgtgggcagttttggaagaggtcgaactgaaagacgccgtgatagcaagcggtcacggcctagataatcgagttctcgaccgcggctcgaattacagcgtcggacagcgtcagctgatctgtttagctcgagctattttgcgaaacaatcgcgtactgatgctggacgaggcgacggccaacgtcgacccgcaaaccgacgccctgatccagcgtaccattcgtaccaaattcgcgccttgtaccgtactgacggtggcgcatcgattgaataccattatggatagtgataaagtgcttgttatggatagaggacgacttgtggaatacgatcatccgcacattttactgcaaaaatcacacagccaattcacatcgctggtgaggcaaaccggccgtgccatgttcgagcagctgtgcaaagtcgcgcgtgaggcttacacagccaagcacaaaaacgactga

SEQ ID NO: 59938 - protein, 1316 aa, Nasonia vitripennis
MDNTKVTHNPNPRENANTFSVLFWWWTVGLFKKGYSKVLGPEDLYDPVSTDRRWLAEVSNARKVQRRPNLLKTVFRTFLFEYFILGLIQILNEFVLRLGTPILLGALLRHFKPEPTTTYEAALCYAGGISIAIAINAITMNQGLFDAFHIGSRIRIAVCSIVYRKALKLNLTALGETAPGKVVNLVANDVNRFDLVSITLHHMWSAPISAVIISYFLYREAGWAGPIGMIAVFIVAPIQSYTGKLSSKFRLQTAIKTDERVRLMDEIISGVQVIKMYAWEKPFCALVGLARKLELRVVRKASYIRGIYMTFNLFTTRCALFMTLLTLMLSGENLTADKVFVFSSYFNILAQTMTGMFVRGFAEIAECLVALRRLQTFLTFEEFQTGNYNSTRSLKQDLPYIDEDQANGDAKDGYHVNNIRWVERFGIHSSETTLEDVNLEVEKGKLYIVIGMVGSGKSSLLSTVLGEINLIEGNVRVKGGISYASQEAWVFGSSVRQNIIFGQEFDRQRYQKVVKACALQKDFKQFPHGDQTIVGERGGSLSGGQKARINLARSIYRQADIYLLDDPLSAVDTHVGKHLFKDCIQKYLYGKTRILATHQLQFIKGADAIILIDQGKIKQYTDYHKLLTAHPEYGTLIAEEKAGDTSDDSSIERSHIRRQFSSSSTRSRTPNPSGGETDGEDEEADQEQLADKIEGTSRGAVKGSLLVEYFRVGSNIMYLGVIIFLFLITQCVTSFNDYFVTILVTAEESRAYYKDLHEQEQNGTELIVRRNATVLDEADLYPRNNYIYVYSAVVFSIFFIGMIRSITFYNICLSCNQRIHDLVFGALIRAKMRFFDTNPSGRILNRFSKDMGAIDELLPKAMLDAGQIILAMVGAIVVACAVNPIFLVPLCAIAIVFFFIRRVYLKTSKNVKRLEGMTRSPVFTHLNATLNGLSTIRAYNAETILKKEFDKFQDVHTSSWYMFIATSSAFGFSLDICCFIFTTLVTFSFLLLEDNFSGGQVGLAITQVMALTGMVQWGMRQSAEVTNQLMSVERVLEYTDLTPEPNLRDKGWPSHGCIEFKGVYMRYAEEEPPVLKGLTLRIKPTEKVGIVGRTGAGKSSLISALFRLAMVDGVIEIDGIDTGTIALEDLRKNISIIPQDPVLFSGTLRRNLDPFNEFSDQLLWAVLEEVELKDAVIASGHGLDNRVLDRGSNYSVGQRQLICLARAILRNNRVLMLDEATANVDPQTDALIQRTIRTKFAPCTVLTVAHRLNTIMDSDKVLVMDRGRLVEYDHPHILLQKSHSQFTSLVRQTGRAMFEQLCKVAREAYTAKHKND

SEQ ID NO: 59939 - DNA, 1920 bp, Nasonia vitripennis; identical to SEQ ID NO: 7443
  CDS (1)..(1920)

SEQ ID NO: 59940 - protein, 639 aa, Nasonia vitripennis; identical to SEQ ID NO: 7444

SEQ ID NO: 59941 - DNA, 3357 bp, Magnaporthe grisea 70-15
  CDS (1)..(3357)
atgtcgattagcggacctacagagaacgacccccaagtaatccagtggtcatggtcgatcactctattcccttggcactccggctccggcatcgcgaccggcagcatcgcgtcgcgggactttgaggctgagctcgtcaggtatgtgctgtattttgtctacaccggcatcggcgagttcgtcgccgtgtacgtgtcgaccgtcggcttcatatacaccggggagcacatcacgcagcgcatccgggcccggtacctgcaggccgtgctgcgccaaaacgtcgcgtactttgacaacctcggcgcgggcgagatcacgacgcgcatcacggccgacaccaacctcgtgcaggatggcatctcgcacaaggtgtcgctcaccctgacggcggtcgctacgtttgtcacgggcttcctgatcgcctacatcagattctggaagctcgcgctcatttgcacgtcgaccctggtcgccttcgtgacggtcatggggggcgggaccaaggtcattgtcaagtacggcaccaggtccatgcagcactacgccgagggcaacaatgtcgtgcaggaggtgctcggcaccatccgcacggccacggcgtttgggacccaggaccggctggcggagcgctacgagtcgcatctccgggtggtggaaaggtacggcatcaagatgcaggtcgcccaggcgctgatggtcggggccctgtacagcatcacctttctgacctacgggctcggcttctggcagggggcgcgcttcctggggacgggcgagatggacgcggggggtattttgacggtgttgatgaccatcatgacgggttcggcggccgcctccaagatatacagcaccatcgaccgcccgtcgccgctcgacccggcctccaagcatggccagcagctcgagcgtgtccaaggcgacattgagttgcgcggtgtcacacacgtctacccatcccggcctgatgtcgtcgtgctggacgacgtaagtctgcgcatacccgccggtcgcaccacggcgctcgtgggcccgtcgggttcgggcaaaagctctattatcggcttgattgagaggttttacagcccagtggccggagatattttattagacggccgatcggtccgggatctcaacctgcgatggctccgtcagcaaatgtcgttggtgagccaagaaccgagcctcttttcgacaaccatttttgagaatatccgcttcgggctgatcgggacgcctctggaaaacggaccggaagaactcgtgcgcgagagggtcgaaaaggccgccgccatggccaacgcccacaacttcatcacctccctgcccaaggggtaccagacgcacgtggggaagaaggcctggtgctgtcgggagttgatagctcttggtggcgagtattacaggcttgtagaatctcaggagtttagtgatgacgaggttgactcggaagcctcgaacgaactcaaaggtgcaaaggctgaacttgaggcaacaactcccactgacaaacatgccttggccaaagtgtcttttctcggatcaaataccccgacagggccgacaggggatgagagcaacacggtctattcgttgggcaccctggtgcgctttgtggcctcgttcaacaagccggagctcaagctcatcctcctgggcgtggtgttcgtcgtgctggccgggtgcacacagcccacgcaggccgtgctgtacgccaaagccatcgcggccatcaccacgtcggcgaaccgcgaccagctccggcgcgacacggacttttgggcactgatgctgctcgccctgggcctggcgcagctgctcttttacgccgtccagggcacctgtctcggagtcgggtccgagaagctcacgagccgcgcccgcggcacggcctttcgcgtcatgctgcgccaggagattgcctttttcgaccgcgaggacaacaccaccggctccctgacctcgttcctgtcggccgagaccaaacacctctcgggcatcagcggcatcatcttgggcagcatactgatgacggtgacgacgctcacggcctcgctggtggtggcgctggcggtcggctggaagctggcgctcgtgtgcatctccgtggtgccgtttttgctagcgtgtgggttctggcgcgtctccatcctggcccggttccaggtgcactccaagcgggcctacgaggcctcggcgacctacgcctgcgaggccaccaccgccatccgcaccgtcgccgccctgaccaaggaggaggagatactggcccagtacgaccgccagctcggccgtcaagcccgggacagcctggcctggaccctcaaggcgtcggccctgtacgcgctgtcgcaggccgtgacctttttctgccaggccctggccttttggtacggcgggacgctcctcgccagccgcgagtacagcatcttccagttctttgtgtgcttcagcgagatcatgtacggcaccaacgccgccggctccatcttccaccacgcgtccgacatgggcaaggccaagaacgccgcggccgactttaaacggcttttcgaccgccgcccggatatagatgtgtggtccgaggagggcgaaaaggtgtcgagcgctgccgttgaagggatggtcgagttccgggacgtgcactttcggtatcccacgcgcccagaacacgccgtgctttcggggctgagcttcaaggtcgagccgggccagtatgtggcgctggtggggccgagtggctgcggtaaaagcacgactatcgctctactggatcgcttttacaacgtgacttcgggcggcgtgtacctcgacggcagggacatttcgcagctcaacgtcaactcgtaccggaacctgctggctctggtcagccaggagccgacgctgtaccaggggacggttcgcgagaatatcctgctggggagccaggatcgggacgtgagcgaggaggctctggtggcagcttgcaaggaggccaacattcacgactttatacagtcagtgcccgacggctacgatacgcaggtgggcagtcgagggagcatgctgtcgggcgggcaaaagcagcgcgtggcgattgcgcgggcgctgatccgcaacccgcgcgtcctgctgctcgacgagtcgacctcggccttggattccgagtcggagagggtcgtgcaggcggctctggacgccgccgccaagggccgcaccaccatcgccgtcgcgcaccgcctgagcaccgtgcaaaaggcccatgtgatctttgtgttggaccagggccgcgtggtggagagcgggacgcaccaggagctgatgcgcagcaaggggcactattatgagctggtcaacttgcagcggcttggatag

SEQ ID NO: 59942 - protein, 1118 aa, Magnaporthe grisea 70-15
MSISGPTENDPQVIQWSWSITLFPWHSGSGIATGSIASRDFEAELVRYVLYFVYTGIGEFVAVYVSTVGFIYTGEHITQRIRARYLQAVLRQNVAYFDNLGAGEITTRITADTNLVQDGISHKVSLTLTAVATFVTGFLIAYIRFWKLALICTSTLVAFVTVMGGGTKVIVKYGTRSMQHYAEGNNVVQEVLGTIRTATAFGTQDRLAERYESHLRVVERYGIKMQVAQALMVGALYSITFLTYGLGFWQGARFLGTGEMDAGGILTVLMTIMTGSAAASKIYSTIDRPSPLDPASKHGQQLERVQGDIELRGVTHVYPSRPDVVVLDDVSLRIPAGRTTALVGPSGSGKSSIIGLIERFYSPVAGDILLDGRSVRDLNLRWLRQQMSLVSQEPSLFSTTIFENIRFGLIGTPLENGPEELVRERVEKAAAMANAHNFITSLPKGYQTHVGKKAWCCRELIALGGEYYRLVESQEFSDDEVDSEASNELKGAKAELEATTPTDKHALAKVSFLGSNTPTGPTGDESNTVYSLGTLVRFVASFNKPELKLILLGVVFVVLAGCTQPTQAVLYAKAIAAITTSANRDQLRRDTDFWALMLLALGLAQLLFYAVQGTCLGVGSEKLTSRARGTAFRVMLRQEIAFFDREDNTTGSLTSFLSAETKHLSGISGIILGSILMTVTTLTASLVVALAVGWKLALVCISVVPFLLACGFWRVSILARFQVHSKRAYEASATYACEATTAIRTVAALTKEEEILAQYDRQLGRQARDSLAWTLKASALYALSQAVTFFCQALAFWYGGTLLASREYSIFQFFVCFSEIMYGTNAAGSIFHHASDMGKAKNAAADFKRLFDRRPDIDVWSEEGEKVSSAAVEGMVEFRDVHFRYPTRPEHAVLSGLSFKVEPGQYVALVGPSGCGKSTTIALLDRFYNVTSGGVYLDGRDISQLNVNSYRNLLALVSQEPTLYQGTVRENILLGSQDRDVSEEALVAACKEANIHDFIQSVPDGYDTQVGSRGSMLSGGQKQRVAIARALIRNPRVLLLDESTSALDSESERVVQAALDAAAKGRTTIAVAHRLSTVQKAHVIFVLDQGRVVESGTHQELMRSKGHYYELVNLQRLG

SEQ ID NO: 59943 - DNA, 4002 bp, Magnaporthe grisea 70-15
  CDS (1)..(4002)
atggaaccttcagaaaagcgcctcggggacgcccccgaagctgttgtagcctctcagactccttccaaccgcagccgcggtggctcagaatccagcagtaaacaacaaaaggatgatctcaccaaggccgactccaaagtgttaaaaccaaccgcagacgccgtcgccgatcccgatgacatatacaagcatctgcctccgcatgtggccgaaatcctcaagcgccaggtcgacacgccgtccgtcaaggtcggcctcgcgaccctctaccgctatgcatcgcgtaacgatctgatcatcctgagcatctcgctcatctgcgctgtcgcatccggtgctgcgcttcccttgatgactgttatctttggtaacctccagggcagtttccaggaccggttcctgggcgttacctcctacgacgagttcatgcagaccatgacaaacttggtcttgtactttgtctacctggccatcggcgagttcatcacaagctacatcgccactgtgggcaccatctacacaggtgaacgcattagcgcaaagatccgggcgcactacttggaaagctgcatgcgccagaacattggttttttcgacaaactgggtgctggtgaggttaccacacgcattactgccgacaccaaccttgttcaggagggtatctcggaaaaggtcggcttgacaattgcggctgtggcgacttttgtttctgcctttgtcatcggtttcgtcatgtactggaagttgaccctgatcttgacttcgacctttttcgccctcattttcgtcatgggtggtggctccgcgtttatcgtcaagttcagcaagcaaactatcgactcctatgccgagggtggcagcgtggctgaggaggtcatcagctccgtccgcaatgccgttgcctttggtacccaggaccgcctcgcgcgccagtacgactcccacctggtcaaggctgagggtactggattcaaagtcaaggcctctatcggcataatggttgcaggtatgatgtcagttttgtacctgaactatggtctggccttctggatgggtagccggtatctggtcgacggcgtcattcctctctctaaggtccttactgtcatgatgagtgtcatgattggtgccttcaacattggcaacgttgcgcccaacgtccaggcctttaccacagctctaggtgcggccgccaagatttacaccaccattgaccgccagtctgtcctggatcccacttcagacgaaggcgagaagatcgagaacctcaagggcactatttttttggaaaacgtcaagcacatctacccctcgcggcccgaagtcgttgtcatggaggatgtgaccctcgagatccctgctggcaagacaactgctttggttggagcctcgggcagtggcaagtctaccattatcggccttgttgagcgtttttatcaacccgtgggaggcaaggtttacctggacggtaaagacattagcacgttgaacctccgctggttgagacaaaacatttcgctagtatcccaggagcctatcctgtttagcgtatcgatttacgagaacattaagcacggtctgatcggcaccaagcacgaaaacgcggaacccgaggtccaaaaggagctaatcatcgaggctgcgaagaaggccaacgcccacgagtttatcagcacccttcccgaaggctacgacaccaacgtcggcgagcggggtttccttatgtctggaggccagaagcagcgtatcgccatcgcccgcgccatcgtttctgaccccaagattctgctcctcgatgaagccacatctgctctggatacccgctccgaaggcgtggtgcaagccgctctcgaggtcgccgccgagggaaggacaaccatcacgatcgcacacagactttctaccatcaaggatgcgcacaacattgtcgtcatgtctgagggccgtatcgtcgaacagggcaaccacaacgacttgcttgagaagcgtggagcatactacaacctcgtcacagctcaggagattgccaaagtcaccgagctgagtccagaggaagaggaggccatcaacgagaaggaggaggttctgatccgcaaggctaccagcaacaaggagagcggcagcttcatccccgaccccaacgacaagctggctaccaagatggaacggacaaaatcggcttcgagcgtcgcgcttcagggccgctccaaggacgcccccaagaagtacaccctgtggaccaagatcaagcttattgcctcgttcaacgcgcccgagtggaagctcatggttattggcctactcttctctattatctgcggtggcggtaaccctacgcaggccgtcttttttgccaagctgattacatccatgtcggtccccgtcaacgagcagacgatccctggcatccaaagggacgtttctttctggtgtctcatgtaccttatgcttgccattgttcagttcatcgccttctcgatccagggcattctctttgccaagtgctcggagcgtctgattcaccgtgtcagagaccgggccttccgcacgatgcttcgcatggacattggcgagttcgataaggaggagaacactgccggagccttgacgtcgttcctctcgaccgaggccacgcacgttgccggtattagcggtgtcacactcggcacaatcctcatggtcatcaccactctggtcagcgccttcacgctgagtttggctattggctggaagttggctcttgtgtgtatctcgaccgtccccgtccttttggcttgtggtttcctcaggttctggatgttggcacactaccagcgccgcgccaagcgcgcctacgacaactcggcctcgtacgcatccgaggctatcaccgccatccgaaccgttgcctccctgactcgtgaaaacgacgttcttaagcgttaccagaactctcttgacgagcaggggcgtgcatcgctccagtcggtcctcaagtcctccaccctgtatgccgcctcgcagtcgcttacattcctggtgatcgccctcgcattctggtatggtggtagccttctgggtcgtggagagtacggcatgttccagttcttcctcgtcttcagcgccatcatctttggtgcgcagtcggcgggtaccatgtttgccttcgcccctgacatgggcaaggctgcacacgctgcggagctgctcaagacgctgttcgaccgcaagccgaccattgacacctggagcaccgacggcgagcggatcggcgaggtcaatggcaccatcgaattccgcgacgtccacttcagatacccgacccgccctgagcagcccgtgctcaggggtttggacctcacggtgctgcccggccagtacgtggcgcttgtgggcgcctctggatgcggcaagtcgacgaccattgcgctgctggagcgcttctatgaccctctcgttggtggcatctacgtcgatggacgcgagatcagctcgctcaacgtcaacgattaccgcgcacggatcgcgctcgtgtcgcaggagccgacgctctacagcggtactatcaaggacaacattctactcggcacctcgggtcaggtcacggacgaggcggtcgagtatgcctgccgtgaggccaacatctacgacttcatcctgagtctgcccgagggcttcaacacggtcgtcggtagcaagggtgcgctgctgtctggtggacagaagcagagaattgcgattgcgagggcgttgattcgcgatcccaagattctgctcctcgatgaggcaacctctgcccttgacagcgagagtgaaaaggttgtccaggcggcgctggacaaggccgccaagggccggaccaccatcgcggtcgcgcaccgtctcagcacaatccaaaaggccgacgtcatctatgtctttgaccagggccggatagtcgagcggggcacgcactcggagctcatgaagaagaacgggaggtacgccgagctcgtgaaccttcagagcttggagaagaggtag

SEQ ID NO: 59944 - protein, 1333 aa, Magnaporthe grisea 70-15
MEPSEKRLGDAPEAVVASQTPSNRSRGGSESSSKQQKDDLTKADSKVLKPTADAVADPDDIYKHLPPHVAEILKRQVDTPSVKVGLATLYRYASRNDLIILSISLICAVASGAALPLMTVIFGNLQGSFQDRFLGVTSYDEFMQTMTNLVLYFVYLAIGEFITSYIATVGTIYTGERISAKIRAHYLESCMRQNIGFFDKLGAGEVTTRITADTNLVQEGISEKVGLTIAAVATFVSAFVIGFVMYWKLTLILTSTFFALIFVMGGGSAFIVKFSKQTIDSYAEGGSVAEEVISSVRNAVAFGTQDRLARQYDSHLVKAEGTGFKVKASIGIMVAGMMSVLYLNYGLAFWMGSRYLVDGVIPLSKVLTVMMSVMIGAFNIGNVAPNVQAFTTALGAAAKIYTTIDRQSVLDPTSDEGEKIENLKGTIFLENVKHIYPSRPEVVVMEDVTLEIPAGKTTALVGASGSGKSTIIGLVERFYQPVGGKVYLDGKDISTLNLRWLRQNISLVSQEPILFSVSIYENIKHGLIGTKHENAEPEVQKELIIEAAKKANAHEFISTLPEGYDTNVGERGFLMSGGQKQRIAIARAIVSDPKILLLDEATSALDTRSEGVVQAALEVAAEGRTTITIAHRLSTIKDAHNIVVMSEGRIVEQGNHNDLLEKRGAYYNLVTAQEIAKVTELSPEEEEAINEKEEVLIRKATSNKESGSFIPDPNDKLATKMERTKSASSVALQGRSKDAPKKYTLWTKIKLIASFNAPEWKLMVIGLLFSIICGGGNPTQAVFFAKLITSMSVPVNEQTIPGIQRDVSFWCLMYLMLAIVQFIAFSIQGILFAKCSERLIHRVRDRAFRTMLRMDIGEFDKEENTAGALTSFLSTEATHVAGISGVTLGTILMVITTLVSAFTLSLAIGWKLALVCISTVPVLLACGFLRFWMLAHYQRRAKRAYDNSASYASEAITAIRTVASLTRENDVLKRYQNSLDEQGRASLQSVLKSSTLYAASQSLTFLVIALAFWYGGSLLGRGEYGMFQFFLVFSAIIFGAQSAGTMFAFAPDMGKAAHAAELLKTLFDRKPTIDTWSTDGERIGEVNGTIEFRDVHFRYPTRPEQPVLRGLDLTVLPGQYVALVGASGCGKSTTIALLERFYDPLVGGIYVDGREISSLNVNDYRARIALVSQEPTLYSGTIKDNILLGTSGQVTDEAVEYACREANIYDFILSLPEGFNTVVGSKGALLSGGQKQRIAIARALIRDPKILLLDEATSALDSESEKVVQAALDKAAKGRTTIAVAHRLSTIQKADVIYVFDQGRIVERGTHSELMKKNGRYAELVNLQSLEKR

SEQ ID NO: 59945 - DNA, 2475 bp, Magnaporthe grisea 70-15
  CDS (1)..(2475)
atggtttcgggagcggtgcggcgcaccgtgctgctcccgcacctcggagctgccggttcagcacaactactcctctccgcgcgtcctcacttaatacccctccatgagccactgctaccaagtgcagccatttggacatggtcaaagattccggttcaggctgctcgaagtttcgctgcagctacatcgacctcttttacgtgcgcgaacaacactgccccagcggcatcgcgtctcagcacgctaccggcgaaggcgcccacgtcatttttaggcctggggaaccggttcagctcgccatcgggcgtcctgcgacgattctcgacgactcaaacgccatggaagcagtctgttaaggagacgagcctgcaagatgattcgcgggaagatggcaaggcgctggagaacgcggaagctaagaaggatggagatgtggcatcacccaacgcgaacctcaacgatgacgggctcgagtctctaggtttcaaaaagagcgagaaggcgctcaaggcttcccagatcaacatgagcgcgcgactatccaaggaaagcaaggcacagccctccagggccggcatgggtgagatatggagattgctcaagattgcgcgaccagagctcaaatggctcgcagttgcatttgttttccttctcatctcatccagcgtgaccatgtcgattcctttctcggtcggacggatccttgacctggcaaccaagggcgatgttgaaagcacccgcattttcggcctcaccttgacgcagttcttcatggccttcggtgccttcctgaccctgggtgctgtggccaactttggccgcatcatcctgctacggatcgtcggcgagcgtgtcgttgcccgcctgcggtcacagctttaccgccgcacgtatactcaggatgccgagttctttgatgccaaccgtgttggcgatctcatctcgcgtctcagctcggacagtgtcatcgtcggaaaaagcatcacgcagaacgtgtcggacggcatgcgctcaatagtcagcggttgtgctggtggcgttgcaatgctctggcttagccccaagctgacgtcgatcctgctgctcatgttcccgccaattgctatcggggccttcatatacggtcgcatgatccgcaacataagtcggcagatccagcgaaacttgggaaccctgaccaagatcgccgaggagcgtttgggaaacatcaagacaagccaggcttttgccggtgaggttcaagaggttcacagatacaacacccagatcaggaaaattttctcccttggcaagagggagtcttttgtcgctgcaaccttctatggatctacgggttgggcgggcaacatgaccatccttgccttgctggttgttggaggaggtttggttcggtcgggatctatgtctcttggtgacctcacttcttttatgatgtacacggcctttgcgggatccagtctcttcggagtctccgggttttactcagaactcatgaagggtgtcggtgccgcaagccgtctatttgaacttcaggatcgcacgcctactattcctcagacggttggactgaaggtcaagtcggcacagggacccatcaaattctccaacgtgtgctttgcctacccaacccgcccagccgtttcaatcttcaatggcttggacttcgaaataccgtccggaagtaatgtctgcgtggtcgggccttcaggtggtggcaagtcgaccgttgcaggtctactgctacgattctacaaccctacgtctggtaccatcaccatcaacggcgttgacatctccaagatgaacgtcaagtctctcagacggcgcatcggcatggtggcccaggagccagtactgttctccggcaccgtcgcggagaacattgcctatggccggccagaagcctccagggccgaaatcgtagccgcggctcagaaggccaactgcggatttatcagcgatttccccgaaggcctcgagacgcaagtcggtgcccgcggcgcgcagttatctggtggccagaagcagcgcatcgccatcgcgcgcgctctgctcaaggacccggatattctaatccttgacgaggcaacatcggcgctcgacgccgagtcggagactttggttaactctgcgctcgcacagctgctgaagggacgcaacaccaccataagcatcgcccaccgtctgtcgaccatcaagaggagcgacaagatcattgtcctctccagcgagggtaaggtcgccgagattggaagctacacggagctgagcgccaaccccgacagtgcctttagcaagctcatggagtggcagatgagtggcggtgacattccgacccagcagaggcccccgcccatcatcaccgaggcggaggcgatctcggaggagcttgagggcgacgaggcggcggcggccgaggaggaggatgttgagggcgagcacaaggatgcgaagaagacatcagagaagcagtaa

SEQ ID NO: 59946 - protein, 824 aa, Magnaporthe grisea 70-15
MVSGAVRRTVLLPHLGAAGSAQLLLSARPHLIPLHEPLLPSAAIWTWSKIPVQAARSFAAATSTSFTCANNTAPAASRLSTLPAKAPTSFLGLGNRFSSPSGVLRRFSTTQTPWKQSVKETSLQDDSREDGKALENAEAKKDGDVASPNANLNDDGLESLGFKKSEKALKASQINMSARLSKESKAQPSRAGMGEIWRLLKIARPELKWLAVAFVFLLISSSVTMSIPFSVGRILDLATKGDVESTRIFGLTLTQFFMAFGAFLTLGAVANFGRIILLRIVGERVVARLRSQLYRRTYTQDAEFFDANRVGDLISRLSSDSVIVGKSITQNVSDGMRSIVSGCAGGVAMLWLSPKLTSILLLMFPPIAIGAFIYGRMIRNISRQIQRNLGTLTKIAEERLGNIKTSQAFAGEVQEVHRYNTQIRKIFSLGKRESFVAATFYGSTGWAGNMTILALLVVGGGLVRSGSMSLGDLTSFMMYTAFAGSSLFGVSGFYSELMKGVGAASRLFELQDRTPTIPQTVGLKVKSAQGPIKFSNVCFAYPTRPAVSIFNGLDFEIPSGSNVCVVGPSGGGKSTVAGLLLRFYNPTSGTITINGVDISKMNVKSLRRRIGMVAQEPVLFSGTVAENIAYGRPEASRAEIVAAAQKANCGFISDFPEGLETQVGARGAQLSGGQKQRIAIARALLKDPDILILDEATSALDAESETLVNSALAQLLKGRNTTISIAHRLSTIKRSDKIIVLSSEGKVAEIGSYTELSANPDSAFSKLMEWQMSGGDIPTQQRPPPIITEAEAISEELEGDEAAAAEEEDVEGEHKDAKKTSEKQ

SEQ ID NO: 59947 - DNA, 4047 bp, Gibberella zeae PH-1
  CDS (1)..(4047)
atggctgccgaggctgagaaggcggccacagaggagccgaagaagagtatcttctcttccctcaagtctttcaaaacctgcttctcctacctcgaactcctttttgccgctggcccaacatgggttgactacgccctcatagcattgggtactctctgtgcagttggagctggtgttccattccctcttatgggtgttcttttcggacagctcatcgacaacttcaacggtgcgacatgcgcggcggacggcagcaactcaggcgcaagcgaagctgcctcggatcctctccaatatgagaatgctatcaacgacaaggttataaaaacagcttggattggcgcaattgcacttgttctcatctatggccatcttacatgctggaacatcattagccaacgtctcgcacagcgtctacgaacacgttatgtgtcggctcttttgcgacaacccccagagttctttgacactcgcggcgcttctggccaagtctctagccgacttcaaggcgacattacggccgtccaggctggtacatctgagaaagtcggtaatattatcactaccttgagcttctttgtcactgtcttcatcattgccttcacgaaacaacccagacttgccggtatccttatatgtatgcttccggcattcctgctctctggaatcttgggaggaagataccttggaaagtatgtggtcaaacagttggaagcctctagtgcagcctcgtctattgcttccgaggctttgtcgcatgtcactgtcgttcaagcttttggcgctgcgcctcgtcttgaagagaagtttgcggaacacatggcccgctctcgcaagtacgcgattgctaaatcttccattgctgccgtgcaaacgggtcttctctactttattgcctactccggcaatgctttggccttctggcaaggtagcaagaagatcgtggagtccgtggcaagaaatgacggaaacaccactgtcggtgagatttacgctattgtgtatcttctcgtagatgcatgcgtcatgcttggtggaatggcgcctactctacctttcttgggagcagctgtgggtgcgttccagcgactgaaggaagacatcgatgccccatcttctattgacggcacctcaagtgaaggtactgtgcttcctgcgactggggcgaagtctcttgctttccgtaacgtctcattcgagtacgcatcccgtcccggtcaacctgttcttaagaacgtgaaccttgagttccctgctggaaaatacacagccatcgtcggcctctctggtagtggaaagtccaccattgctgcactgattgcccgtctacatgaccctactgaaggcaaagttgaacttgagggtcatgacttgcgggaactcaatgtcaaatctcttcgaagtttcatcagttttgtccagcaggaaccatcacttcttgatcgctctattcttgagaacatcgcccttggcctgatcaactcacctaaggaatcgcatcaacatttgaaaccccttctcaagggtcatgaacttgaaaagatggctgcacagggcaaagaagcactccatttagccgcatctcttgggcccgaggttgctgaaatcgctgagttgatccgtcacgctacagaacaggccgatgcagacggctttatcaatcgtctagaacttggttacggaacatccgctggacccaagggatcactcgtcagtggtgggcaaagacagagaattgcacttgctcgagccttgattcgcgaccctgagatccttgttcttgatgaagcaaccgcggctctcgattctgctagtgaaaagagaattcagcttgctgttgaacgagctgctgctgagaagcggaccattatatcgattgcccatcggctgtcgactatccgaaacgctgataacattgttgtcatgcaggcgggacaggtggtcgagcagggtacctacgacgagctcatggccaaggaagatggtgaattcgcaaacatggccagactccagactgtcggtaacaacaagagcggctcagcatctgttgacggcgattcgattgatgcttccactctccgagcagacactcagctaaatgagaaggtcgacttctccgagacccatcagtcactagatgctcagtcgcctgaaaaggacaaggaacaagcgcccaagaaggaagcagaagtaaaggatcacgaactagatgaagtgaaacctttcagctccgtcatgaagggtattgtctggttgatccggccatctttgggctggtttgcgattgccatgattgctgcagtctttgttggagccactttctccggctcaggtatcatctttggttttaccgttggggcactcaacccatgtgccaatactctcgaccatattcgatccatgggaaatatgtttgctggcttgttcttcatgcttgctggagttgagctaattgcaaacttcttcgcctggttgggttttggtattgtcgccgagagacttctttacaacctgcgcgtgttgtctttccgatctctgctggagcaaagtattcactggcatcaatctgaaggccgcactcctactagcttgcttggcattatcaccaaggacagtatgtctgtgggtgctttcagtggatcaacttttggtaccgtctttgccattctgatcaatgtcctaattgctatcatcatctcacacatctttgcgtggaagattgccttggtctgtcttgttacgctccctatcctacttggctccggtttcatgcagctacgcatgttggcgcgttacgaggaacgacatcaagcggccttttcgactgccacttcgcttgctacggaggccatccagtcgattcgtactgttgccgttttatcgctcgaaaatgagtacatggagggtttctcacgccttctcaaaccaccaaagaaggaggttgtcaaggcctcagtaacgaccaatatctggctagccatatcgtacacaactggcacgttcatcaacgccctcgcatattggtggggctcgcagctcatcatgaagggagagtacacccaaaaagacttcctcattatcttggtggctatgctgacaagcgcccaactctggagtggtatgttctcccttgctccagagttctcacgtgctcatcttgctttgtctcgtgttatgaccgtcgtcaacatgggtagcagcactcacaccgggaggccggggcaagacccgtccaaggtaggagatgatcctgagtctgtaggaggagaaaagtcacttagtcctgcggaaaggcacagccgtggcggcgcaagggtaacattcaagaatgtttcgttctcttatccaagccggccagatgccactgttctcgatgatgtctccttcacgcttccacctaaccagttctgcggccttgttggtccttctggggccggaaagtctaccatcatgaacattgttcaacggctgtacgagcctactgctggcacagtccttatcgacgaccaagatatcaccaagctttctacatcattccgtgacagcatcgctctggttccccaagagcctgccctgtttgatggcagtgtgcgtttcaatgtcggtctgggagcacctcccggccacgaggctacagatgctgagattgaagaggcttgtcgcttggcaaacattcatgatgttatcgcagcccttcctgatggttacgatactgaatgcggcccctctgcttctcgtctgtccggtggccaaaggcaacgtctcgcgatcgcccgtgctcttgttcgtcgtccacgcctattgcttctcgacgaaagtaccagcgctctcgatgctgccagcgaagcagcccttcaagaaggtctcgagagggcatcgagaggcacaactgtattggcaattactcatcgattgcatactgttcagaaagctgatgtaatctttatcgttgaaggagggcagatcgttgacagcgggcgacactctcagttaatggaacgaagggagagctacagagtgaatgcgatgcagcaaatgttgcaataa

SEQ ID NO: 59948 - protein, 1348 aa, Gibberella zeae PH-1
MAAEAEKAATEEPKKSIFSSLKSFKTCFSYLELLFAAGPTWVDYALIALGTLCAVGAGVPFPLMGVLFGQLIDNFNGATCAADGSNSGASEAASDPLQYENAINDKVIKTAWIGAIALVLIYGHLTCWNIISQRLAQRLRTRYVSALLRQPPEFFDTRGASGQVSSRLQGDITAVQAGTSEKVGNIITTLSFFVTVFIIAFTKQPRLAGILICMLPAFLLSGILGGRYLGKYVVKQLEASSAASSIASEALSHVTVVQAFGAAPRLEEKFAEHMARSRKYAIAKSSIAAVQTGLLYFIAYSGNALAFWQGSKKIVESVARNDGNTTVGEIYAIVYLLVDACVMLGGMAPTLPFLGAAVGAFQRLKEDIDAPSSIDGTSSEGTVLPATGAKSLAFRNVSFEYASRPGQPVLKNVNLEFPAGKYTAIVGLSGSGKSTIAALIARLHDPTEGKVELEGHDLRELNVKSLRSFISFVQQEPSLLDRSILENIALGLINSPKESHQHLKPLLKGHELEKMAAQGKEALHLAASLGPEVAEIAELIRHATEQADADGFINRLELGYGTSAGPKGSLVSGGQRQRIALARALIRDPEILVLDEATAALDSASEKRIQLAVERAAAEKRTIISIAHRLSTIRNADNIVVMQAGQVVEQGTYDELMAKEDGEFANMARLQTVGNNKSGSASVDGDSIDASTLRADTQLNEKVDFSETHQSLDAQSPEKDKEQAPKKEAEVKDHELDEVKPFSSVMKGIVWLIRPSLGWFAIAMIAAVFVGATFSGSGIIFGFTVGALNPCANTLDHIRSMGNMFAGLFFMLAGVELIANFFAWLGFGIVAERLLYNLRVLSFRSLLEQSIHWHQSEGRTPTSLLGIITKDSMSVGAFSGSTFGTVFAILINVLIAIIISHIFAWKIALVCLVTLPILLGSGFMQLRMLARYEERHQAAFSTATSLATEAIQSIRTVAVLSLENEYMEGFSRLLKPPKKEVVKASVTTNIWLAISYTTGTFINALAYWWGSQLIMKGEYTQKDFLIILVAMLTSAQLWSGMFSLAPEFSRAHLALSRVMTVVNMGSSTHTGRPGQDPSKVGDDPESVGGEKSLSPAERHSRGGARVTFKNVSFSYPSRPDATVLDDVSFTLPPNQFCGLVGPSGAGKSTIMNIVQRLYEPTAGTVLIDDQDITKLSTSFRDSIALVPQEPALFDGSVRFNVGLGAPPGHEATDAEIEEACRLANIHDVIAALPDGYDTECGPSASRLSGGQRQRLAIARALVRRPRLLLLDESTSALDAASEAALQEGLERASRGTTVLAITHRLHTVQKADVIFIVEGGQIVDSGRHSQLMERRESYRVNAMQQMLQ

SEQ ID NO: 59949 - DNA, 4089 bp, Gibberella zeae PH-1; identical to SEQ ID NO: 7447
  CDS (1)..(4089)

SEQ ID NO: 59950 - protein, 1362 aa, Gibberella zeae PH-1; identical to SEQ ID NO: 7448

SEQ ID NO: 59951 - DNA, 3792 bp, Gibberella zeae PH-1
  CDS (1)..(3792)
atggatgctgcaatcgaaaagagaaagacttcggtcgacgattcaatagcaacaaaacaaaatgaggtcgagaagcaagcacagctgagtgatctatggcgcgcctttcaattcgccgaccgcctcgactgggtgttgaacgtcatctcccttatttgttctatcgcgagcggagcagctatgcccgtcatggctatcttattcggaaaggccaccggtcgtctggcagacttcggtggaggctctgtcgaccctgacgagttcaaatccgaggtcaactcgtttgtgctctggttcacctacctcttcgtaggcaaattcgtcctcgcctacgtcgctaccacagcgatcaccatatccggcgtccgaacaacacgagtccttcgacagcgagtcctcgaaaagctgctgaggacagagatatggtatttcgataccgccaatgttggatcccccgcgactcagctcacaaccaacgtgacacgcattaaccagggcatcgccgagaagttatcacttctagtccagggactcgccatgtttgcatcggcctttgtggtagccatcgctgtccaatggaagctggctctcatcaccctcaccgttgtgccccttttcttcctcatcatgggcgtctttatgtcgctcgatgctcccatagaagcaaaggtcacgggtattcactcgcaagccaacgtctttgcacaggaagtcatggcttctattcgaactgtccacgcattctgggcacatggcagaatgagcgagcgatacgacaactatctcaaggaagctcatacccatgggaagaagaagtcactactatatggtatcatgagctcatcgacgtacttttgtatgtactctggaaatgctttggctttctggcaaggctttcgtatgtatcgaagcggagagattgactccgtcggtactgtctttaccgtcgttctatctgttcttcttgcctcgtcctccattggtctcctgtaccctcagatcccagctctggtcaacggtgcagcagctgcatccgagctctttcaaatctttgataagccttccttactcgatcctctttcaaacgaagggcaagttcctgaggcgtgcaacggaaatattcaggttgagaacatctcgttttcctacccttcacgaccgaacacacaggtgctgaaggatatcagcttggatatcccagctggcaagactacggctttcgttggcgcgagtggttcaggtaagagtacaattatcggactcttggagagatggtatttgccatccagcggccgcttactactcgatggcgtggatatatcgacactcaatgtgaagtggtttcgatcccagatggctcttgttcaacaggaaccagtgctcttccgaggtaccgtatttgagaacgtttcaaagggctttaccgacagccagaaagcccttcctctcaaggaacagagaacgcttgtccaagaagcgtgcgaggccagctacgctcatgattttattcagaaccttgagcatggctatgacacttatcttggcgagcgaggtggcactctaagcggcggtcaaaagcaaagaatcgctattgctcgtagcgttgtttccaaccccaagattctccttcttgacgaagctaccagtgctcttgatcccaacgccgaacgtatcgtgcagaaggcgttgtcacgcgtttctcaacagcggacgacacttgttatcgcccatagactttccactatcagggacgctgatagcatcgtggtcctctctaatgggcaggtcgttgagcagggcacccatgatgacctccttgcgcttgactcccattacgctcggcttattcgtgcacaaaacctttctgttgttggaagagagatcaaggctggcataagtgctgacgagaatcccgatgcatttgatacagaggatgaggtgcgtcgtgttatcacagcgcagactcacaagtacagggacgtcgaaggccaggagtcgaagcccaaggaccgatctatcctatcaagtatattcctcgttgtcaaggaacagaaggctcttcgtctttacatcatcacgtctgctctttgctgcactattgctgcggcgacatggcccggtcaagctcttctattttcgcgaatcattacagccttctcagccgacacctctgcttcggatgtcaacttctacgctcttatgttctttgtcatcgcgcttggaaaccttgtttgctatggtatcattggctatatcgccaaccatgtttcgcaaaccatctcataccagtaccgcttggaactgttcactcgtatggttggactggacattgaattctttgaccgtccagagaactcatccggcgccttggcgtctactttgtcatcgattcccacacacctacaggagcttctcggtttaaacatattcgtcatcgtggtgatgttcgtcaacatcactgccagttcgattctggcaatcgcgtatgggtggaagctcgcccttgtcatggttttcgctgctttacctcttcttatgggatctggatacttcaaagtccgccttgagtctaaactacatgctggcaatgaggcccgattccgagaaagcgccagtctcgccagcgaagcagtttcttctttgcgaactgtcgcatccttgaccgccgagaccgactttatcacgcagtattccgatacactttctagcatcgtcatgaagactatcaagtcgctgtctgtttccatgattgcatacgcattctcacaatcgattgagtttcttgtcatggctcttggattttggtacggctcacggctcatggcgtctggcgagtatacttccgagcagttcttccttatcttcatgggtgttttgttcgcaggacaggctgccagccaactgtttgccaacttgactagtctcaccatggccaagggcgccgccaattacttattcaacttgcgagaggagaaggccgtcattcgtgagaccaatgacaataaggacaagtgccctgatttcgatcaacctatcggcgtgaccgatgtgcactttcagtacaagagcagaagcacaaaggttcttcaaggtctgtcaatggatattagtccttctcagttcgtcgccgttgttggccccagtggctgcggcaagtccactctgatctcactgttggagcgttactacgacgcgaccactggtaagatttgtgtgggtgagcaagatatcaaagatatgtctcctcgacagttccgctcccagatgtccatagtccagcaagagccaattctctacgaagggtctgtgcgtgaaaacatcttgatgggtctggaaggtgatgccacagacaaaaccgacgaaagactcaacgaagctgctcgacaagccgatatcctcgaatttgcatcgtccctgcccgaaggattcgacactccctgtggtcctcgcggcacagccttttccggtggccagcgtcaacgtatcgccattgcacgggcccttatccgcaagccgaagctacttcttctcgacgaggctacttcagcactggatacccattctgagaagctggttcaagaagctctggagcaaacgaggaaggagagtggctgcagcgtgatagctgtggctcacagactgtcaactattcgagatgcagacatcatatttgtccttgttggtggaaaggtggctgaggttggaacgcatgaggatctccaggccaggaggggtgtttatgcggacatgtgccaggcccagtccctagatagagagactaacgattcataa

SEQ ID NO: 59952 - protein, 1263 aa, Gibberella zeae PH-1
MDAAIEKRKTSVDDSIATKQNEVEKQAQLSDLWRAFQFADRLDWVLNVISLICSIASGAAMPVMAILFGKATGRLADFGGGSVDPDEFKSEVNSFVLWFTYLFVGKFVLAYVATTAITISGVRTTRVLRQRVLEKLLRTEIWYFDTANVGSPATQLTTNVTRINQGIAEKLSLLVQGLAMFASAFVVAIAVQWKLALITLTVVPLFFLIMGVFMSLDAPIEAKVTGIHSQANVFAQEVMASIRTVHAFWAHGRMSERYDNYLKEAHTHGKKKSLLYGIMSSSTYFCMYSGNALAFWQGFRMYRSGEIDSVGTVFTVVLSVLLASSSIGLLYPQIPALVNGAAAASELFQIFDKPSLLDPLSNEGQVPEACNGNIQVENISFSYPSRPNTQVLKDISLDIPAGKTTAFVGASGSGKSTIIGLLERWYLPSSGRLLLDGVDISTLNVKWFRSQMALVQQEPVLFRGTVFENVSKGFTDSQKALPLKEQRTLVQEACEASYAHDFIQNLEHGYDTYLGERGGTLSGGQKQRIAIARSVVSNPKILLLDEATSALDPNAERIVQKALSRVSQQRTTLVIAHRLSTIRDADSIVVLSNGQVVEQGTHDDLLALDSHYARLIRAQNLSVVGREIKAGISADENPDAFDTEDEVRRVITAQTHKYRDVEGQESKPKDRSILSSIFLVVKEQKALRLYIITSALCCTIAAATWPGQALLFSRIITAFSADTSASDVNFYALMFFVIALGNLVCYGIIGYIANHVSQTISYQYRLELFTRMVGLDIEFFDRPENSSGALASTLSSIPTHLQELLGLNIFVIVVMFVNITASSILAIAYGWKLALVMVFAALPLLMGSGYFKVRLESKLHAGNEARFRESASLASEAVSSLRTVASLTAETDFITQYSDTLSSIVMKTIKSLSVSMIAYAFSQSIEFLVMALGFWYGSRLMASGEYTSEQFFLIFMGVLFAGQAASQLFANLTSLTMAKGAANYLFNLREEKAVIRETNDNKDKCPDFDQPIGVTDVHFQYKSRSTKVLQGLSMDISPSQFVAVVGPSGCGKSTLISLLERYYDATTGKICVGEQDIKDMSPRQFRSQMSIVQQEPILYEGSVRENILMGLEGDATDKTDERLNEAARQADILEFASSLPEGFDTPCGPRGTAFSGGQRQRIAIARALIRKPKLLLLDEATSALDTHSEKLVQEALEQTRKESGCSVIAVAHRLSTIRDADIIFVLVGGKVAEVGTHEDLQARRGVYADMCQAQSLDRETNDS

SEQ ID NO: 59953 - DNA, 4074 bp, Apis mellifera
  CDS (1)..(4074)
atggataaaaatcagaggaaagaagtgaataatccgcgtcaaaatgccaacccactgtccattcttacattttggtggatcctcaagctgttcattattggttataaaaaagaattggaagaagatgatctgtattcgccattacgagaagacaggagtaattatttggggcaacgaatcgtgaaaaattgggaaaatgaggtgaaacgatgtgagaagaagaaagacaattcaaaaccgagcttatttagggtactctacaagtgctttggtagactagtcatgaacactggactagtgctatttgttctagaattcggcatacgactcgtgcacccgtttttactcgctagattattacgttacttctcagggaacagaaaagactggagcaacgacatacaatattatgccgcgggtttttgtattttacctctaatagatattataattcttcattgggccttacaaaatcttatgcacgtaggaatgaaagtcagagtggcatgttgtactttaatttacagaaagatacttaaactatccaattctgttctcgaaaatgaaacatctgctggacagatggttaatttcttaagcaatgacgttaataggcttgattatttcgtatttggtattcattatttatggattggtccacttcaaatctttgtaatagcgtatcttatctttcgtgaaattggatggggagctattacaggaatgacgacatttttattatgcatacctttacagatgtatcttggaaaaaaagtatcgcgtttaactcttgtgacagcacaaaaaattgataatagattaagcttgatgaatcagattatagctggagtagaaataattaagatgtatgtttgggaaataccatactcgcttcttgtggaaaaagctagaaagaaagaagtggatgtaatgaaaaaatattcgatcgttgaacaaattggtttaacgttcgatatctatgttcctcgagtctgtttatttattactatattaacatatgttttacttggaaacaatattgatgctgaaaaagtatttatgacttcggcattttatactgttttaaaaagttctatgactattggttttgctttaagtgttcatcaattagcggaagcattagtatccatcaagcgtttggagaaattcatgatgcatcccgaaatatctaaatcacagaaaattcagaaccaagtggcctcacaatctattcccatttacttaaaaaacgtcactgccagatgggacgaatctagagagtatgatactttacgaaatattgatctatctgtacaagctggtagtttcatagctgtcattggtcagataggttcgggaaaaagtagtttattacaaattatacttcgtgaattggcattaaaagacggagttctagaaaccaatggaaaaataagtttcgctgatcaacgaccatggattttcgcttcctccatcagacagaacattctatttggacaaccgtggaacgaaatccgttacaacgaagtaattcgtgtttgtcaattaaaacgtgatatagatatgtttacgcataaagatagaactatggttggagaaaggggaatcaatctaagcggtggtcaaagagctagaattaatttagcacgggcattgtatgctgatgccgatatttatcttctagatgatcctttatcagcggtcgacacacatgtcggtagtcgcattgtggacgaatgtatatgcggttttcttaaagacaaaactcggatcctagtcactcatcagatacagtacttgaaagttgccgatgaaataattgtaatgaacaatggtagtattcaagcaaaaggtagctttgaggagctacaaaatatgaatttagatttcataaagatcttccaagaggttgaagataagcaagaatctaacgaagctgaaattaaaattgaaaagaggaaaacaatggaggaaataaagaaaagagaaaatacagacgcgactgatgaaccggtcgaagtgtcagagatgagaacggtgggaaaaatttctagtaaaattttttttgcctactggaaggctagcaaaaatccgtttttacttcttttaatgataattctatttatattaagtcaaataatggctagcggtagtgattatttgctcgcattttgggtaaattcagaggtggcgtcgcgaattttaaaggataatggtacgattgttttcgaatgggttggtccgttgtctcgtgatggaattatttatctttatagtggtttaaccgtgggcatcgtttgtatctatgtggttcaaacgttcacttattatggagtttgtatgcgatcttcaaaaaatctgcacgcacaaatgtttcgtagtattgtacgtgctgcaatgtatttttacaacacgaatcctgctggccgaatattaaataggttttccaaagacatcggtattattgataaaaaactaccttttaccatgttcgatgttatcataatgttcttaaattttattggaaccatagtaatccttggtgaagtgaatgcttggttattaatacccacgggcatcgttatacttcttttctattatatgcgagttgtgtatatttcaactagtcgtgcagttaaacgtatggagggtataactcgatcaccagtatttgatcatgtgggagcaactttacaaggtttaactacaattagagcgttcaaagctgaaaaaatagtaacaatggattttgataatcatcaggatcttcatagttccacgtggtacatattcatctctatttcacgagctttcggtctttatatcgaaacattttgtttgatttacgtagcagtgatcacaatcatgtttttgatatttgataatcttgccactgctggaaatattggtttagtaatcacacaaatttcttcaattactggaatgttacaatggggtatgagacaaaccgctgaattggaaaatcaaattacttctgtcgaaagagtattagaatacagtaatttagaagaagaaccatttttggatagtataccggaaaagaaaccaccggaagaatggcctacgaaaggtctagttgaattcaaaaatgtcagattaaaatatggacctaaaagtccttatgttttaaatggtatcaattttgtgattaatcccaaagaaaaagtaggagttgttggaagaactggtgctggaaagacatctttaattagtgctctctttcgattagcatatatagaaggagaaattattatagatggtgtgcctacagatacaattgcattgcatgacttccgttcgaaaatcagtattatacctcaagaaccagttttgtttggaggcagtcttcgacgaaatttagatccttttgatgaatattccgataacactttatgggaagctttacaagaagtagaattaaaagaaacgatctcagaaatggcggcaggtttaaacagcaaagtatcggaagaaggatcaaatttcagtgttggacaacgtcaattattatgtcttgttcgagcactcgttagaaataataaaattatggtccttgatgaagctactgctaatgttgatccccaaactgattccttgattcaacaaactgtcagaaagaaatttatagattgcactgtcttcactatagcgcatagattaaatactataatggatagtgataaaatacttgtgatgaaccaaggttatttagtagaatttgatcatccatatattttactgcaaaagaaaggatatttttacgatatggtacaacaaacgggtacttcaatggcaaatagtttaacagaaatagcaaagaacgtaatgtttttacaagaacaaagaagcgtcgtcttgatgatggcccaaattttagcaacgttcaaggactttcctcagagcaagttgagagtcactaacggactccgattgtggctccgcggtgttgcacgagggaactcctcgaagagctatggtatggaattctcttataaagcaacgaaggctgaaacgaccacttgcgagaaaggtatcagtggtactcaaccataa

SEQ ID NO: 59954 - protein, 1357 aa, Apis mellifera
MDKNQRKEVNNPRQNANPLSILTFWWILKLFIIGYKKELEEDDLYSPLREDRSNYLGQRIVKNWENEVKRCEKKKDNSKPSLFRVLYKCFGRLVMNTGLVLFVLEFGIRLVHPFLLARLLRYFSGNRKDWSNDIQYYAAGFCILPLIDIIILHWALQNLMHVGMKVRVACCTLIYRKILKLSNSVLENETSAGQMVNFLSNDVNRLDYFVFGIHYLWIGPLQIFVIAYLIFREIGWGAITGMTTFLLCIPLQMYLGKKVSRLTLVTAQKIDNRLSLMNQIIAGVEIIKMYVWEIPYSLLVEKARKKEVDVMKKYSIVEQIGLTFDIYVPRVCLFITILTYVLLGNNIDAEKVFMTSAFYTVLKSSMTIGFALSVHQLAEALVSIKRLEKFMMHPEISKSQKIQNQVASQSIPIYLKNVTARWDESREYDTLRNIDLSVQAGSFIAVIGQIGSGKSSLLQIILRELALKDGVLETNGKISFADQRPWIFASSIRQNILFGQPWNEIRYNEVIRVCQLKRDIDMFTHKDRTMVGERGINLSGGQRARINLARALYADADIYLLDDPLSAVDTHVGSRIVDECICGFLKDKTRILVTHQIQYLKVADEIIVMNNGSIQAKGSFEELQNMNLDFIKIFQEVEDKQESNEAEIKIEKRKTMEEIKKRENTDATDEPVEVSEMRTVGKISSKIFFAYWKASKNPFLLLLMIILFILSQIMASGSDYLLAFWVNSEVASRILKDNGTIVFEWVGPLSRDGIIYLYSGLTVGIVCIYVVQTFTYYGVCMRSSKNLHAQMFRSIVRAAMYFYNTNPAGRILNRFSKDIGIIDKKLPFTMFDVIIMFLNFIGTIVILGEVNAWLLIPTGIVILLFYYMRVVYISTSRAVKRMEGITRSPVFDHVGATLQGLTTIRAFKAEKIVTMDFDNHQDLHSSTWYIFISISRAFGLYIETFCLIYVAVITIMFLIFDNLATAGNIGLVITQISSITGMLQWGMRQTAELENQITSVERVLEYSNLEEEPFLDSIPEKKPPEEWPTKGLVEFKNVRLKYGPKSPYVLNGINFVINPKEKVGVVGRTGAGKTSLISALFRLAYIEGEIIIDGVPTDTIALHDFRSKISIIPQEPVLFGGSLRRNLDPFDEYSDNTLWEALQEVELKETISEMAAGLNSKVSEEGSNFSVGQRQLLCLVRALVRNNKIMVLDEATANVDPQTDSLIQQTVRKKFIDCTVFTIAHRLNTIMDSDKILVMNQGYLVEFDHPYILLQKKGYFYDMVQQTGTSMANSLTEIAKNVMFLQEQRSVVLMMAQILATFKDFPQSKLRVTNGLRLWLRGVARGNSSKSYGMEFSYKATKAETTTCEKGISGTQP

SEQ ID NO: 59955 - DNA, 2406 bp, Candida glabrata CBS 138
  CDS (1)..(2406)
atgaagtactctggaatagcggtgctgaggggagtgcgagtgacgcctctggcgttgcccagggctgggagcaggtatctctccctgctcgcaagaccgcccacaagacagataattcataacacaggcgctggctatggcgtttgggtgagtcataaagtgctgactagtagcactataaggaggccgttcactgcgcaccgagcactgaacaatgaatataacaccactgccggtaatgccagtgtaaagtcccaatctgctactaaggagaaaaacgaggaggacagaaagtatagcaagaaggagaaggaggagcaatccgagaccaaggagaatcactccgaatttagggatatagtacgactgatgctactggtgagacgagattggaagctgctgctaactgccgtgggtctactgacaatctcatgctctataggtatgacaatacctaaagtcattggtcttattctagatcaattgaagaacgcactggctgctaattccgtggatggacagccggtaagtatagataaactaccacccattgtgtttggcctctcattttatgagttcctaggcgggtttgcattggcattactggttggtattgccgccaactacggaagaattatcttgctaagagtcctaagtgaaagattggttgctagattgagggctacagttattaaaaagacgatacatcaagacgccgagttctttgacacccacaaagtaggcgacttgatatctagactaggttcagatgcttatgtggtatctcgttcgatgactcaaaaagtgtccgatgggtttaaggctttaatatgtggtagtgtgggtattggtatgatgctggcactatcaccccagctttcatgcctactacttgttttcacaccaccggtgatactgagtgcatctgtctttggtaaacagattagcacaacttcgagggaattacaagaagccaccggtcatttgaccaaagttgccgaggagcaattatcgggcataaaaacagttcaatcatttgttgctgaacagagagaaataaacagatacaactttgcaatccgtgatatattcaatattggtaagaaggctgctgttataaatgcaaaattctttagttctacctctgcaatgggtgatttgagttttttaacggtgcttggttttggatcttatcttgttttacaaaattccctgactattggtgaccttactgcttttatgatgtataccgagtacacaggaaattcgatttttggtctatctacgttttactcagagattatgcaaggtgctggtgcggcttcaagattatttgaattgactgatagagttcccagcatatcaaccactaaaggtgtgaaatataaacccggcaatggtgaaattgagtttaaaaatgtttcctttgcttatccaacaaggccatcaaatatgatattcaaaaacttgaatttcaagattgaagctggatctaatgtctgcattgtggggccatctggacgtggtaaatctactgtagcattgcttctagagaaatactataaaccatcatctggtgaaattttaatcgatggacaaaatatcaacgatctgaacagcaaatctttgagaagacacattggactcgttcaacaagaaccaatactgatgtcaggcacgatccgtgataacatagtatatggtctaactgaaatgcctactaaggatgagattagacaagtagccaaacaatgcttttgtcacaatttcattaccagattccagtcttcctacgatactgtaattggtcctcatggtacattactgagcggaggtcagaaacaacgtattgctatagcgcgtgctctgataaaaaaacccagaatactaatattagatgaagctacgtctgcattagatgttgaaagtgagggtgcaattaattacacatttggccagttaatgaaaaagaaagaaatgaccatagtcagcattgctcacagattgagtactatccgtaggtcagaaaatgtcattgtattggggcatgatggtagtgtagttgaaatgggtaaattcaaagaattatgggatgatcctacaagtgaattatcgcaactgttgaatgaaaaatcaactccacatcagacgactaatataactgtaacaccaccacctacaacaatggcagaaaaggtagttgaagaagttgtcgagaatgctgaacctgaaacagtcatagaagaccctggtagcccaccaatgtacatcagtactgtatcagaagtatctgcagaaggccatgagttgataaatgagcagattgaagatactattgaaaatgtaatgaaggatgttactagtgaacgcaagccattaaagctacaaaaagatgaaaacctctag

SEQ ID NO: 59956 - protein, 801 aa, Candida glabrata CBS 138
MKYSGIAVLRGVRVTPLALPRAGSRYLSLLARPPTRQIIHNTGAGYGVWVSHKVLTSSTIRRPFTAHRALNNEYNTTAGNASVKSQSATKEKNEEDRKYSKKEKEEQSETKENHSEFRDIVRLMLLVRRDWKLLLTAVGLLTISCSIGMTIPKVIGLILDQLKNALAANSVDGQPVSIDKLPPIVFGLSFYEFLGGFALALLVGIAANYGRIILLRVLSERLVARLRATVIKKTIHQDAEFFDTHKVGDLISRLGSDAYVVSRSMTQKVSDGFKALICGSVGIGMMLALSPQLSCLLLVFTPPVILSASVFGKQISTTSRELQEATGHLTKVAEEQLSGIKTVQSFVAEQREINRYNFAIRDIFNIGKKAAVINAKFFSSTSAMGDLSFLTVLGFGSYLVLQNSLTIGDLTAFMMYTEYTGNSIFGLSTFYSEIMQGAGAASRLFELTDRVPSISTTKGVKYKPGNGEIEFKNVSFAYPTRPSNMIFKNLNFKIEAGSNVCIVGPSGRGKSTVALLLEKYYKPSSGEILIDGQNINDLNSKSLRRHIGLVQQEPILMSGTIRDNIVYGLTEMPTKDEIRQVAKQCFCHNFITRFQSSYDTVIGPHGTLLSGGQKQRIAIARALIKKPRILILDEATSALDVESEGAINYTFGQLMKKKEMTIVSIAHRLSTIRRSENVIVLGHDGSVVEMGKFKELWDDPTSELSQLLNEKSTPHQTTNITVTPPPTTMAEKVVEEVVENAEPETVIEDPGSPPMYISTVSEVSAEGHELINEQIEDTIENVMKDVTSERKPLKLQKDENL

SEQ ID NO: 59957 - DNA, 1827 bp, Candida glabrata CBS 138
  CDS (1)..(1827)
atgtttgctagaggatcgagattatttttatacaggcctgttatacataggaattcctccacaaaaaccgatctaaagaagacacagacatggactcaagtgaagcagttattgcgattagctaagccggagagaaagtacatagcaggagctgtagggcttatagcggtttcaagtgcagttagtatgagtcttccttctgtgattggaacgttgatagatcatgcatccacgccagatgcgcctatttatggcttgactaggaatcagtttctgctggcactgggatcggtttttgttgttggagccattgcaaattcgggtcgaataattatactaaagattacaggtgagaagttagttgctcgattgaggacaaagacaatgaaatccatgctttcacaggatgctacctttttagataaacatagagtgggcgacttgatctcccgactctcatctgatgcatcaattgtctcaaaaagtgtaacttccaatttgtctgacggttgtagagcaacgttacaaggtgttgtaggcattggtatgatgacatatatatcattgaaactaactactgtaatgacaatgatggtaccacctctgggaattctggccatgctatatggtggcaagatcaagaaaatatccaggcaattacaggataaagtgggtcaactatcaaaaacaagtgaggaacaattgaactccctaaaaactgtgcaagcgtatgcaggtgaaaggaaagaactacaaagatattcgaatgaggttaggagtgttttcaacattggagtgaaagaagcagtggcctctgctttgttttttggaagcacaggtctaattggtaatattgctatgataggcctacttctcgtggggacggcagatagttcgattacccttggcgagctgtctagtttcatgatgtatggtgtttatacgggttcatcagtgtttgggttaactggattttattcggagctaatgaaaggttgtggtgctgcagaacgtgtattggaattacaaaatatgaaaactaaaatctctccaacaaaaggtatctctcctccaaaaactttgaaggggttacctatcacattcaacaatgtgtcatttgcgtattcgaatggaaaatcggtactgtcagagatgaactttcaaatacatcccggtgaacatgtttgttttgtaggtggttcgggttgtggtaagtctactatcagttcattgctactacgttattataggactgggtcagggaatattagcattggtaactatgatatatcagcgtttaatttaagaaaataccgtcgtatgctaggtgttgttcaacaggagccattacttttcaatggtactatactggataatattacctacgggcttcatgacaaatccttaactgacctaaacatggcgttaaaagcagccaattgtgatcaatttattaaagagtctcacatgggactagataccttggtaggtcctagaggtgctcaattgtctggggggcaaagacagcgtatagcccttgcgagagtgttcctgcaaaatccagatatcttgatcctggatgaagcaactagtgcattagatacaaaaagcgaggatatcataaataaggaactacagaggagacaagaggctgggatgactaccatttccattgcacacagattgtcgaccattcgtcatagttctagagtcatcgttatcgaggatggtagagttgtcgaaagtggctcattcgatcaactaaggtctacaagagatagtgagttaaataaactgttaaaagagggtctggaacatcataaatag

SEQ ID NO: 59958 - protein, 608 aa, Candida glabrata CBS 138
MFARGSRLFLYRPVIHRNSSTKTDLKKTQTWTQVKQLLRLAKPERKYIAGAVGLIAVSSAVSMSLPSVIGTLIDHASTPDAPIYGLTRNQFLLALGSVFVVGAIANSGRIIILKITGEKLVARLRTKTMKSMLSQDATFLDKHRVGDLISRLSSDASIVSKSVTSNLSDGCRATLQGVVGIGMMTYISLKLTTVMTMMVPPLGILAMLYGGKIKKISRQLQDKVGQLSKTSEEQLNSLKTVQAYAGERKELQRYSNEVRSVFNIGVKEAVASALFFGSTGLIGNIAMIGLLLVGTADSSITLGELSSFMMYGVYTGSSVFGLTGFYSELMKGCGAAERVLELQNMKTKISPTKGISPPKTLKGLPITFNNVSFAYSNGKSVLSEMNFQIHPGEHVCFVGGSGCGKSTISSLLLRYYRTGSGNISIGNYDISAFNLRKYRRMLGVVQQEPLLFNGTILDNITYGLHDKSLTDLNMALKAANCDQFIKESHMGLDTLVGPRGAQLSGGQRQRIALARVFLQNPDILILDEATSALDTKSEDIINKELQRRQEAGMTTISIAHRLSTIRHSSRVIVIEDGRVVESGSFDQLRSTRDSELNKLLKEGLEHHK

SEQ ID NO: 59959 - DNA, 2259 bp, Candida glabrata CBS 138
  CDS (1)..(2259)
atggctagtattggaacgcaggttaggaagacctgtacatcggttgatcctattgttactgattatgctgttggttatttcaaccatttgtcggggttgacctttgatgctgttatgagtaagcagcttgatctagattctgaagtgcagtttgtcagtgagatgttggtcagtgccggtgctgataaagaaaaggtgaaggatttgtcggcaaatatacttgaacaattgaatacacaattaaaggagaacgcctctaagctagaattgaccggtgatacgtcaaagagattgttggacatcaacgttttgaaaagtcataacaataaggctaacctaaatgcctcattgagtttgttaggtgttggtggtgacattgagcatgctggtagacagatggagaccagggttgatttgaagaaattggcaaaggctgaagagaagattgcaaagaaggttgcaaagagaaacaacaagtttgtgaaatacgaggcatcaaaacttattggtgaaaggaaagacgaagattatgattctttcttcttggagatcaacccattggactttggttcgtcagctggtaagtctaaggatattcacattgatacatttgatctttacgttggtgatgggcagagaattctttcaaatgctcaattgaccctgagttttggtcatagatatggtcttgttggtcaaaatggtattggtaaatctactctattgagagcgctatcgagaagagaattgaatgttccaaagcatatttcgattttgcatgttgaacaagaactaagaggtgatgaaactaaagctttgcaaagtgtcttagatgcagacgtttggagaaagcagttactgaccgaagagaacaagatcaacgaaaggttgaaagaaattgagaaattaagagaagagtttgatgaagacagtttggaagtgaaaaaactagataacgagagagaagatctagatgcacatttaattcaaatatcagaaaagctggttgatatggaatcagataaggcggaagctagagcggcctctattctatatggtcttggtttcagtaccgaagcccaacagcaaccaacaaattccttttccggtggttggagaatgagattatctttggcaagagcattgttctgtcaacctgatcttttgttgctggatgaaccttccaatatgttggatgttccgtctatcgcctatctagcagaatacttgaaatcatatccttctactgttttgacagtgtcgcacgaccgtgcattcctaaatgaggttgcaacagatattatttatcaacacaatgaacgtctggactactacagaggtcaagatttcgacactttttacacaacaaaggaagaaagaagaaagaatgcacaaagagaatacgacaaccaaatggcatacagaaagcatttacaagagtttattgataagttcagatataacgccgccaaatcatctgaagcacaatcaagaattaagaagcttgaaaaattgccagtattagaacctcctgaacaagaaaagagtattgatttcaaattcccagattgtgagaaattatctccaccaattattcaattacaagatgtcagtttcggttatagtcctgacaaactactgttaaaggatgtcaatctagatattcaaatggactccagaattgcactggtcggtgcaaacggttgtggtaagactacactgttgaaagtcatgttagagcaactaaggccactaagtggttacgtttctagaaacccaagattgcgtatcggttactttacacaacatcacgttgactccatggacctatctacttctgcagttgattggatgtctaagacattccctggtaaaacagatgaggagtatagacgtcatttgggttcatttggtattacgggtactctaggtttacaaaaaatgcaattgttatccggtggtcaaaaatctcgtgttgccttcgcggctctgtgtctgaataacccacacattttgattcttgatgaaccttccaaccatttggatactacaggtattgatgcattggttgatgcaatgaagaacttcactggtggtatcctgatggtatcgcacgacatatctgtcattaacaatgtctgtaaagaaatttgggtttccgaaaagggtacagttaatagatttaacggtactatctatgattacagagattatatattatctgcagctgacgccgctggtgttgttaagaggcattga

SEQ ID NO: 59960 - protein, 752 aa, Candida glabrata CBS 138
MASIGTQVRKTCTSVDPIVTDYAVGYFNHLSGLTFDAVMSKQLDLDSEVQFVSEMLVSAGADKEKVKDLSANILEQLNTQLKENASKLELTGDTSKRLLDINVLKSHNNKANLNASLSLLGVGGDIEHAGRQMETRVDLKKLAKAEEKIAKKVAKRNNKFVKYEASKLIGERKDEDYDSFFLEINPLDFGSSAGKSKDIHIDTFDLYVGDGQRILSNAQLTLSFGHRYGLVGQNGIGKSTLLRALSRRELNVPKHISILHVEQELRGDETKALQSVLDADVWRKQLLTEENKINERLKEIEKLREEFDEDSLEVKKLDNEREDLDAHLIQISEKLVDMESDKAEARAASILYGLGFSTEAQQQPTNSFSGGWRMRLSLARALFCQPDLLLLDEPSNMLDVPSIAYLAEYLKSYPSTVLTVSHDRAFLNEVATDIIYQHNERLDYYRGQDFDTFYTTKEERRKNAQREYDNQMAYRKHLQEFIDKFRYNAAKSSEAQSRIKKLEKLPVLEPPEQEKSIDFKFPDCEKLSPPIIQLQDVSFGYSPDKLLLKDVNLDIQMDSRIALVGANGCGKTTLLKVMLEQLRPLSGYVSRNPRLRIGYFTQHHVDSMDLSTSAVDWMSKTFPGKTDEEYRRHLGSFGITGTLGLQKMQLLSGGQKSRVAFAALCLNNPHILILDEPSNHLDTTGIDALVDAMKNFTGGILMVSHDISVINNVCKEIWVSEKGTVNRFNGTIYDYRDYILSAADAAGVVKRH

SEQ ID NO: 59961 - DNA, 3816 bp, Kluyveromyces lactis NRRL Y-1140
  CDS (1)..(3816)
atgttagacatctatcagaattttaggttcaagaatgattgtttcgttttgattgtcactgcagtttcaacggtcgctaatggtttagttccagttgtgatatcgattttaactgggagagtatttaacctgttacaatctctcggaactgatacttacaaaacgaaatctgaatttgttcacgaacttacggtaaggtcattctcaattgcagctgtggcagcttgtgtgattccaatatcatgggtctccttatcgacctggatgactttaggagaacgacagggtttcagaattagaaactctctcatcatgttttacttcgagaaagatctaaaatggtacgattcgaatgaaaacctggaaggagatttcatccagattaacagatgcatagaagaagttagggcaagttctgccgaagcttcagcaattttctttcaaaatgtcatctcaattatcgctctaatcgctacttcaatgtactattcgtggtctttaacattgataattttatgcagtttaccactactggcaactctagccgttttcctctctatgaaagtggagaaattctcaaaacttgagaacttggaatcttcaaaggcctcgtcagttttggcatggtctcttgatgcatttcaaatgatacggctattcaacacgtcttactgggagcagaagaagttcgagacgctagtatccaaatgtaacaaacactttgtcaaatcttgcttatactcagctttgaatgcatcgagtttaaggtttctaacactatgcatgtttgtgcaaggtttttggtttggtaatacacaaatcaaacgtgggaagatgaaagctggggatgtaattacatgtttttcctcttgtttattgttggggtcttccttatcaagtacgttgcagcagatcgttacaattcaaaagggtaaggcagcaatacaacgtatcaaccagttccttgttcccaattctaagtccgccgttggtgaatgggaaaaacgaagttctctcatatcaacatcttcttcaatagggttagcacccatcttttgtgacggtgatattgaatttagggacgtatcatttgcgtatcctactagaccagatgattatgtactaaaaaatgtttccataaagattaaatctggagctacatgcttcattgttgggaagtcagggtcagggaaatcgacgttagccagtcttttactgaaaatgtatggcgaatacaccggtgagatcaagttcggtgaatacgaaatagactcacttgatgactcctggttagtagagaacattacattagtggaacaaaggtgcacattgttcaatgggacattaaaagataacttgacgattgtcaataaatacgcatcatgtaccgaggtaaagcaagcatgtcaatttgctttactaaacactgtcctgttaaatctgccgaatggtattgatacacttttgggcagacacggtgtgacattgagtgggggtcagcaacaaagagtagctctagccagggcatacctgagaaatactccagtactgattctggatgaatctttgtcagccttggacataatgtctagagagttaatagtggaagctatcagacattggcgaaaagggaaaactactataatcctaactcatgaatacactcagatcaaagatgatgaatatgtatatttgatgagcgaaggaacggtggtcgaaagtggattcaaatatgatcttctagaaaacccagattcgtactttgcacaattaaacagtctacaggagacaagatatgaagtaccagtaagtccagatgtagaactaccttattctcctgatagtgctacctataatcatcaaccaatatcaagattttcacggtttttcttcgacgcgagtgcgcttgaaccgcatcttcccaacacatcaaaatcaacagatcagttagataacaaacgcgttgtgtccagagttcaacccttagacatagagaaagccttacaagaaagagaatgcgatttagaagaacaaggcataccaaaaatcttgacgctttctgctattatgaagaaaatgaataattcaataccgaagaggcggtatttggtactgggattgctattctctgttattgctggtatgtctaatccacttttctcctatacattctccaagttgttgacaggaattgcaccacaagatacaggcaccagttcctcatattatctgatgaagtggtcactaattgtgatcagcatatcagctgtagacggtatatcaacatttttgaaagactttatacttggatattgtagtgaagtctggattgagcggttgcgagtcgacgcaatggcaaaaatatcatctaaatctctagactggtttaaattacctacgaataactcatctgaactcaattccctcatgatgaatgatcttcgagatctaagaggccttgcctctgaatttttgagtgctattactacactggtttttgtagcatctattggtttgatctgggccttagtctctgggtggaaactcagtcttgtatgcatctcgctatttccagcctttattttattctccggtatttatggttcattgcttcaagtctacgagactgcctataagacagaaatcgcagagcttgagacaagggttcatgaacttgtcatatccatgaaaactatcaaactccttcaactacagcaacattttgagggctccttcaaaactcaactggcgaaagttagaatagtatgcaagaaaagatcagttgctgtcggatttgggatagctgttacaaatgcattagctatggttgtccaagctattttattctttttcggaataaaattagtaattcaaggtgagtattctgtagcacaaatgttcgaaacgtttacgttacttcttttctccattatgacttgtgtttctttgatcaaccaagttcctgaaattagcagaggacaaagggctgctacatacatatttaaggttctagaagattctggctctgttgatacatcaaaacctgatccctcacagaaccaaagcttctttagcacagcgggcaacagagagacgattaagatatctaatctatcttttgccttctcaagcgcaccgatgaataaaatattcaactcgttaagttgcgagatctgtcttaatgaaactgtcgggattgttggcgaatctggttctggaaagtctaccctatcattattgctaacaagactctaccctgtacctagtgggaaagtttatattggtggtattgatatcaataaatgggatgagtatgctttaagaagaaccatttcaattgtggaacagaagccaaaattctttgatggtacagtaagagaaaacctggtatatggtctcaaacgtaacgtttcaaactctgaattaagatcagttttaaagtcagttgatttactatcatttgtacaaaccctaccgaatgacttgaatacgcgcgttcatgatgggttaatgtccggaggtcaagcccaacgattatctatcgcccgcacgttgttacgccagccgaaaatcatcatactagatgaatgcacatctgcactggatgcagctaattcatttgcaattgcagagctcatcaggactgttctgaagaatgttacggtgattgttattactcattcagagcaattgatgcaaatttgcgatagggttcttgttttgaaaaaagggaaagttaaagaagagggatcctatgcagagctcttcgaatctagaggcgaactataccggatagtttcgtgcactagatattaa

SEQ ID NO: 59962 - protein, 1271 aa, Kluyveromyces lactis NRRL Y-1140
MLDIYQNFRFKNDCFVLIVTAVSTVANGLVPVVISILTGRVFNLLQSLGTDTYKTKSEFVHELTVRSFSIAAVAACVIPISWVSLSTWMTLGERQGFRIRNSLIMFYFEKDLKWYDSNENLEGDFIQINRCIEEVRASSAEASAIFFQNVISIIALIATSMYYSWSLTLIILCSLPLLATLAVFLSMKVEKFSKLENLESSKASSVLAWSLDAFQMIRLFNTSYWEQKKFETLVSKCNKHFVKSCLYSALNASSLRFLTLCMFVQGFWFGNTQIKRGKMKAGDVITCFSSCLLLGSSLSSTLQQIVTIQKGKAAIQRINQFLVPNSKSAVGEWEKRSSLISTSSSIGLAPIFCDGDIEFRDVSFAYPTRPDDYVLKNVSIKIKSGATCFIVGKSGSGKSTLASLLLKMYGEYTGEIKFGEYEIDSLDDSWLVENITLVEQRCTLFNGTLKDNLTIVNKYASCTEVKQACQFALLNTVLLNLPNGIDTLLGRHGVTLSGGQQQRVALARAYLRNTPVLILDESLSALDIMSRELIVEAIRHWRKGKTTIILTHEYTQIKDDEYVYLMSEGTVVESGFKYDLLENPDSYFAQLNSLQETRYEVPVSPDVELPYSPDSATYNHQPISRFSRFFFDASALEPHLPNTSKSTDQLDNKRVVSRVQPLDIEKALQERECDLEEQGIPKILTLSAIMKKMNNSIPKRRYLVLGLLFSVIAGMSNPLFSYTFSKLLTGIAPQDTGTSSSYYLMKWSLIVISISAVDGISTFLKDFILGYCSEVWIERLRVDAMAKISSKSLDWFKLPTNNSSELNSLMMNDLRDLRGLASEFLSAITTLVFVASIGLIWALVSGWKLSLVCISLFPAFILFSGIYGSLLQVYETAYKTEIAELETRVHELVISMKTIKLLQLQQHFEGSFKTQLAKVRIVCKKRSVAVGFGIAVTNALAMVVQAILFFFGIKLVIQGEYSVAQMFETFTLLLFSIMTCVSLINQVPEISRGQRAATYIFKVLEDSGSVDTSKPDPSQNQSFFSTAGNRETIKISNLSFAFSSAPMNKIFNSLSCEICLNETVGIVGESGSGKSTLSLLLTRLYPVPSGKVYIGGIDINKWDEYALRRTISIVEQKPKFFDGTVRENLVYGLKRNVSNSELRSVLKSVDLLSFVQTLPNDLNTRVHDGLMSGGQAQRLSIARTLLRQPKIIILDECTSALDAANSFAIAELIRTVLKNVTVIVITHSEQLMQICDRVLVLKKGKVKEEGSYAELFESRGELYRIVSCTRY

SEQ ID NO: 59963 - DNA, 2370 bp, Kluyveromyces lactis NRRL Y-1140
  CDS (1)..(2370)
atgttgaaacctgttttggggttacgtggcagcataggacgaggacgaggattgcttgctctttctaatccgcttttatccatcacaaggcggtttgatgatagattgtcactgcccatatccagtatacggactttaaactatgccgtgaaccggtttggtgaaatgaaagggaatcaaaggttcccttcagctggaatacggagttttagtatcaccttacgcaatcgtaacgaagcttctgatgtagggggaaatggtaagcatcaggaaggtgaggacaaaactcctgataaaaagaccaacaaaccgtcatctacagtttctggtgggctagctgatgttaaacggttgttttacttggcaaggcatgattggaaaatgctagtattggcggtgtcattattgaccgtctcctgtaccattggtatggcagtaccgaaggtgatcgggttagtattagatgctaccaagaatgcactaagcggcagtaataccaataacggcaatggagggttggaagattcgaaaagtcttactttggatgatcttcccccaattgtgggagacatacagctatatgactttttccttttattcggtggggccttgttgataggaaccatggctaattttggaagagtagtactccttaagatattaggggaaagacttgtggccagattaagatcaaacgttatcaagaagactatgcatcatgatatggaattttatgacagaaacaaggttggtgacttgttatccagattaggtgcagatgcgtacatagtgtctagatctatgactcaaaatatttcagatggtttcaaagctttgatttgcggtggtgttggtattggcatgatgttccatatatcgagtacattagctagtgtactcttcctatttgctccaccgctacttgttggcgcaaccatttacggtaacaagattagagcaatctctagagaattacaacaggcctctggtaatcttaccaaagtcgcagaggaacaactaagcgggattaaaactgtccaatcctttgttgcagaagggaaagaagtgcatcgctataacaacgctgtaagacaggtatttaatgttggaaagaaggaagctttcacaaatgcgacttttttcagtagtacaaatgtgttgggtgatttctcatttttgctggtattggcctatggatcgcatcttgttttacaaggaaaccttacaatcggtgatttaactgcgttcatgctctatactgaatacactggaagtgcagtatttggtctttccaccttttactcggaattgatgaagggtgctggtgcagctacgagattgtttgaattgcttgattacaaacctactattaaatcaactaccgggaaggcgtttaaaccgttaaatggtaaagttgagtttcagcatgtttctttcagttacccaacaagaaaaacaaatcaaatctttaaggatctcaactttacaatagagccaggttctaatgtatgtattgtaggtccatcaggaagagggaaatctacaattgcctcgttattgttgaggtactacaatccaacatccggtaaaatcttggttgatggccaagatattacaaaattaagttcgaaatcccttagaagacaacttggtgtggtacaacaagagccaatattaatgtctggtactataagagagaatattacatatggtgtctctaggcaaccttcaatggaagaaatcagatctgtagcaaaaaagtgcttctgtcatgctttcatatctaaattccctaatggttacgaaactatcattgggcctcgtggtgctttgctcagtggaggacagaaacaacgtattgctatcgctagagcgttattaaataaacctaaaattttgattctcgacgaagctacatctgccctagacgttgaaagtgagggcgctatcaactacactttggggaggttaatgaagagcaaagaattaactattatcagcattgctcatagattgagcacaatcagaagatccgagaatgttattgtacttggcatcgatggttcagttgtggaaatgggtaagttcaaagatctttacgccaaccatgatagtgctttacacaaattattgacagaaccttcagaacagcagcattcccagcaccaacaatacgctccacctgccataactcaagaatctgagccacaaacagaagaaaatggcaaagatgattctggtgaagatcaaaattctgaccacgaagaaaactcacaagatcagaacgagaagagactgcaagaagaagttatacatcaagttttagaagatatcagtcacgatcaaaaaacttcaacgctcaggccatga

SEQ ID NO: 59964 - protein, 789 aa, Kluyveromyces lactis NRRL Y-1140
MLKPVLGLRGSIGRGRGLLALSNPLLSITRRFDDRLSLPISSIRTLNYAVNRFGEMKGNQRFPSAGIRSFSITLRNRNEASDVGGNGKHQEGEDKTPDKKTNKPSSTVSGGLADVKRLFYLARHDWKMLVLAVSLLTVSCTIGMAVPKVIGLVLDATKNALSGSNTNNGNGGLEDSKSLTLDDLPPIVGDIQLYDFFLLFGGALLIGTMANFGRVVLLKILGERLVARLRSNVIKKTMHHDMEFYDRNKVGDLLSRLGADAYIVSRSMTQNISDGFKALICGGVGIGMMFHISSTLASVLFLFAPPLLVGATIYGNKIRAISRELQQASGNLTKVAEEQLSGIKTVQSFVAEGKEVHRYNNAVRQVFNVGKKEAFTNATFFSSTNVLGDFSFLLVLAYGSHLVLQGNLTIGDLTAFMLYTEYTGSAVFGLSTFYSELMKGAGAATRLFELLDYKPTIKSTTGKAFKPLNGKVEFQHVSFSYPTRKTNQIFKDLNFTIEPGSNVCIVGPSGRGKSTIASLLLRYYNPTSGKILVDGQDITKLSSKSLRRQLGVVQQEPILMSGTIRENITYGVSRQPSMEEIRSVAKKCFCHAFISKFPNGYETIIGPRGALLSGGQKQRIAIARALLNKPKILILDEATSALDVESEGAINYTLGRLMKSKELTIISIAHRLSTIRRSENVIVLGIDGSVVEMGKFKDLYANHDSALHKLLTEPSEQQHSQHQQYAPPAITQESEPQTEENGKDDSGEDQNSDHEENSQDQNEKRLQEEVIHQVLEDISHDQKTSTLRP

SEQ ID NO: 59965 - DNA, 2400 bp, Debaryomyces hansenii CBS767
  CDS (1)..(2400)
atgttgctacctatacaacgagtgaaaccgtcgtttttgtttctgtatagttcgaatgttgggatttttaggactctacatacaagaataccgacaaggctatctacattaaatacgagtgtgatatacagaagaacttatccaaacatatctaatgcatgtaatgtatttctagggaaaacgaatattatttatggaagactgagatacttctcagactcactggtcgttaggaatacctcagatacaccaagtaaacaagaattaataaaatccctacaaaagtctaactctttgaagaaccatttggagtttactaagataaggaaacgcgagttgagagaagaagagaaggagcaacaaaagaaagacaggaaaccatttcgtgaaaatataaaaaccatattacgtatattaaaattgggaaggcctgatttgaagctttttctatatgctttggggtttattttgtttgcagttttatatccaacaacagcagtcaaattagttggttcggctattgatgcttttaataataacatgaaagatagtgacggcactttattgatttggggatacaagtattctacagttttcggttttatggtgcctttcatgtgcttaagtgctgtttgcttttgggctagaatttgggttttgaaagtattgggtgaaagattagttgcaagattaagattgagagtaatgaaacatttattgagacatgatgccaaattctacgatcatgaaaaacataaagtaggtgatttgatatctagattatcaagtgatgcatatgttgtttcaagatctattacaaataatttacctgacgggttgaagaatgtcttgttcggtataattagttcttacatgatgttttctattaatcctatgttgtttggtattatgttattaatttctcctccaataacatttggatcagtatggtatggtgaaaagattcgtgctttatctacgagattgcagaatgcaacagcaggccttactaaggtgagtgaagaaactcttaattcagttaaattggttcaagcgtttactggtgaacaaaaagaattgacgaaatattctgatcagctcaggaacgttattaacgtagcgaaaaaagaagcgcttgcacagtcaaattacctggtttcaatttatagtttgtaccatactggttatttgtcatgcgttgcaatcggtgtctacttgataataaatggacagatgacaaccggtgacgtggttgctttcacaatgtacctggaattattcaatctggcattgtacagtttgacaacaacttatatggaattgatgaaaggttcaggtgccggcattaaattgttcgagttaatcgactacgataatgatgttcctcctgtaaaaggaaataaattacctccagggttatcgaacggtattgaatttaaagacgttgttttcagctacgccagcagaccatatgataagatttttaatgaatgttcatttaatataccagcatcatcgaccacatgtattgttgcaccttcaggatgtgggaagtctaccgtggcatcattgttattaaggtcatataatattaatagtggtgagatccttattggaggcagaaatattaataactttcaagttcgtgacttgagaagatcgattattggaattgtgcaacaagaaccagtattgttatcaggaactatcttagagaatattgtatacggattaactccgtctcaaataagtcagatgacaatggaagatgttaaatttgctgccagacaggctaattgtcatgacttcattatgtctcttccagatggatatgaaacaataattggttctcgtggtgcatccttatcagggggtcaaaagcagcgagtggctattgctagagcattgattaagaagccgtcaattttgattttagatgaagcgacatcggctttagattctagactggaaagtcttattaacgaaacattgaaagaattaacgtctcagggtaaaatgactatcatatcaattgcccatagattatctactatttcaaaatccgagaatattattgttttgggcaaacatggaaaggtggttgaacaaggcagattcgtcgaattgtacagtgatccaaactctgaattatctaagttgttagatagcccaggcctcgacgaatccgaagagactcctgagcagaccgaagccgaagaaacggaaagaatcacagaagagaataaggcaaatgaacttgaaataatcagatccatgattgatgatttaccagttgagatgcgtgctcaacttgcagatcaaatatcccaagaaataaacgaagataagaacgctgccatctcagaatcaaagatctcgtccgacaagattgtttcatag

SEQ ID NO: 59966 - protein, 799 aa, Debaryomyces hansenii CBS767
MLLPIQRVKPSFLFLYSSNVGIFRTLHTRIPTRLSTLNTSVIYRRTYPNISNACNVFLGKTNIIYGRLRYFSDSLVVRNTSDTPSKQELIKSLQKSNSLKNHLEFTKIRKRELREEEKEQQKKDRKPFRENIKTILRILKLGRPDLKLFLYALGFILFAVLYPTTAVKLVGSAIDAFNNNMKDSDGTLLIWGYKYSTVFGFMVPFMCLSAVCFWARIWVLKVLGERLVARLRLRVMKHLLRHDAKFYDHEKHKVGDLISRLSSDAYVVSRSITNNLPDGLKNVLFGIISSYMMFSINPMLFGIMLLISPPITFGSVWYGEKIRALSTRLQNATAGLTKVSEETLNSVKLVQAFTGEQKELTKYSDQLRNVINVAKKEALAQSNYLVSIYSLYHTGYLSCVAIGVYLIINGQMTTGDVVAFTMYLELFNLALYSLTTTYMELMKGSGAGIKLFELIDYDNDVPPVKGNKLPPGLSNGIEFKDVVFSYASRPYDKIFNECSFNIPASSTTCIVAPSGCGKSTVASLLLRSYNINSGEILIGGRNINNFQVRDLRRSIIGIVQQEPVLLSGTILENIVYGLTPSQISQMTMEDVKFAARQANCHDFIMSLPDGYETIIGSRGASLSGGQKQRVAIARALIKKPSILILDEATSALDSRLESLINETLKELTSQGKMTIISIAHRLSTISKSENIIVLGKHGKVVEQGRFVELYSDPNSELSKLLDSPGLDESEETPEQTEAEETERITEENKANELEIIRSMIDDLPVEMRAQLADQISQEINEDKNAAISESKISSDKIVS

SEQ ID NO: 59967 - DNA, 2106 bp, Debaryomyces hansenii CBS767
  CDS (1)..(2106)
atgattgggtcaactcaactcatgatacctcgattaacttcaaggctaaacaatgatatagcgaggagaagtctttcttcgagaataagttttattaatttttcacacaattttcatgtacatagggtggaaaataatagatcacaaacaatacatttcaatgctaataggctacattggaactttcagaggcgtaactcgacgtcttctacaactactaacgtccaaatgtcagaagttctgactcgtgatgtcaaaacaagtacattaagaaaggatataagcaagttatttcgattagcaaagcctgaagttaagataataattgcagcattggtatgccttattttgacttcggcagttagtatgtcgttaccgttgtttattgggaagattatcgatacagctaaatctccggattccagaatgactgatgcggactccgaaaaaggcgataataatgatgacgatgatgataaaaagatttttggtttagaaccatttgaattctatggagctcttggtgtgttcttttctataggagcagtggccaatttcggacgtacctatttattacggtcagcgggtgaaagattggttgcaaggttaaggtcacgtctatttctgaaaattttatcacaagattcatacttttttgagggtggacctagtgataagggaatgaaaacaggcgatttgatatcaagattgtcgaacgatacgcaaataatttccaaaactttgagtggcaatatatcagacggggcaagatcgttgataagtggttgcgttgggctctcaatgatgtgcgttgtactgtggaaacttacactttgtatgagttcaatatttccccctttaattataatgtcggtagtttatggtagacgaattaaactgttgtctcgtacaattcaagaaaatctaggtgatatgacgaaagttacagaggaaaaattgaatggattgaagacaatacaaagttttgctcagcaacgaatgattgttcatggttacaatcaagaaattaaaaatatatttagttcatcgatgcgtgaaggaaaattgagcggtatttactacggtatcaatggattcttgggcaatatgacattaatcggactacttgtaattggaaccaaattaattggtaatggtgaaataacagtaggtgatttatcgagctttatgatgtatgccgtttataccggtagttcagttttcggacttggtaatttttattcagagttaatgaaaggggttggggctgcagaaagagtatttgaattgatagaactgaagccaaagattactacaaccttaggtaaaaaagtagacgatttgcacggtgacatagaatttcgtaatgtgaaattcagctatccttcaagaccagactcacctatatttggtggatcagaattaaacttaacaatcaccaaaggtgagcatgtttgtttcgtcgggccatctggtagcgggaaatcaagtatatctcaattactattgaggttctatgatccaactgaaggtacaattacggtgaataaccataatatcaaagatctcaatttgaatttctacagatctcaagttggatacgttcaacaagagccattgctattcagtggaaccatacgagataatatagtatttggtagaatggatagtaacgaagacgaaataaaagaggcttcaattctaagcaatgcctataaatttattgaggaattcccagataagtttgatacagtcattgggccttcaaccagtggtgctgctcaattaagtggaggccagaaacaaagagtatctttagcaagaacattaataaagaagcctgacattttaattcttgacgaagctacgtctgcattggactctcagctggaagagatagtcatgaagaatttaaaaagactatcaaaagatatgcatgtgactattatactgattgcgcatagactatcgactattaggaacagtgaaagaataatagtagttaactatcgaggtgaaatagtagaggatggtaaattcaatgaattatactataattctaatagtgaattgaacaagttattgaaagcccatgaattgcaataa

SEQ ID NO: 59968 - protein, 701 aa, Debaryomyces hansenii CBS767
MIGSTQLMIPRLTSRLNNDIARRSLSSRISFINFSHNFHVHRVENNRSQTIHFNANRLHWNFQRRNSTSSTTTNVQMSEVLTRDVKTSTLRKDISKLFRLAKPEVKIIIAALVCLILTSAVSMSLPLFIGKIIDTAKSPDSRMTDADSEKGDNNDDDDDKKIFGLEPFEFYGALGVFFSIGAVANFGRTYLLRSAGERLVARLRSRLFLKILSQDSYFFEGGPSDKGMKTGDLISRLSNDTQIISKTLSGNISDGARSLISGCVGLSMMCVVLWKLTLCMSSIFPPLIIMSVVYGRRIKLLSRTIQENLGDMTKVTEEKLNGLKTIQSFAQQRMIVHGYNQEIKNIFSSSMREGKLSGIYYGINGFLGNMTLIGLLVIGTKLIGNGEITVGDLSSFMMYAVYTGSSVFGLGNFYSELMKGVGAAERVFELIELKPKITTTLGKKVDDLHGDIEFRNVKFSYPSRPDSPIFGGSELNLTITKGEHVCFVGPSGSGKSSISQLLLRFYDPTEGTITVNNHNIKDLNLNFYRSQVGYVQQEPLLFSGTIRDNIVFGRMDSNEDEIKEASILSNAYKFIEEFPDKFDTVIGPSTSGAAQLSGGQKQRVSLARTLIKKPDILILDEATSALDSQLEEIVMKNLKRLSKDMHVTIILIAHRLSTIRNSERIIVVNYRGEIVEDGKFNELYYNSNSELNKLLKAHELQ

SEQ ID NO: 59969 - DNA, 3741 bp, Debaryomyces hansenii CBS767
  CDS (1)..(3741)
atgagagcgaaagatagaacttttgaactatcggaatgcctgagtgattttgaccaagagaagttcaaaccctacagaattgaccacaacgagaaactcatgcaagatgatacagaaaagcgtcattatggtatatttatgtttgttgtaaagaaggatttcctattcattttgatggcatgtttttttatgtgtgtttcgtctgtgggaattccattgcagactataatttatggcagggtgtttagtaaactcagcgatttctataaaaccaattattcaggacttgaaggttttatgtcagatgtgaggttgttgtgtggattaatcatgctaataggattcgttaaaatgattgttacctggatagggatcattgcttggatgaaatttggagagaaacagtccactagagcaagaattagaacattgaatctgatgttaaataaggaagttgcatggtttgaaaacaatgaaaatttaatgggagaaatttcccaaactaataggtgcattgaagaattacgatgtggtacttctgaggtagtaggcttattggtacaaactgtagcttcaataacagctctttttattacggcaatggtactgtcttggtccttaacattagtaattattgctagcgctcctcttatggggctatttggctggctatttggtagattaacttataaggctgcagagttggagaatgatttaacagcacaggcttccaaaatattggattggtcatttgtttgcagtgctgaaattagaatatttaatggaaaatactatgaaatggtcaagttcaatagactcgtggatttatcagcaaaagcatactacaagctagctaatgccatagcttgtaatacgggtatgttaaaatgcttaaccttgttgatgtttgtacaaggtttttggtttggaaactacatgatcagcatcggtaaattaaaaataaacgaagtatttacttgttttagttcatgtcttatgttaggttcagaaatttcggaaatttctatgttattggcgactttgaataaagcacaagctgcctcattgaaaatcggcaagatgattgagagtaatgaaaacccaaatgattcaggcatttatccaaaactgtgcgagggcgatatagaattggagaatattgaattcgaatacctgtcaagacccgaaagggttttgaaagatgttagcttttcatttagatcaaaagaattgaattttatcatagggccatctgggtctggaaaatctacgatttctcaattactattaaacttttaccaaccccagagtggcataattagaattgatggactcaacatttccaacttgagcaaaaaatggcttactgataacattactttagtacaacaagatccaatcatttttaatgaatcaatacgaaataacattggaatggctgcacttaataggtttgtctctcttagtgatattcctgatttgttaatcgaagatgctgctacatttgctttattaacaagcgtaatagacgactctcgtgatggaatcaatacaagtgtctcgttgaccagtctatctggagggcaattgcaacggattgcaattgcaagagctaaaataagcgacactccaattttaattttggatgaagctttaaatgcattggatattaaaaacaagcaattattatttcagaacatcaaagaatggagaaaagggaagaccactataataataactcatgaatttgatcagattagtgatgacgattatgtaattctaatggagaatggcaatgttaagaacaaagggtatatgtttgagttatctcacgaggatctaatacttcaggacagatctggattaagcaacaagtcttatgttgatagtcgatgtcgttcgaaattttataaagagaaagcgaccagtaacaattcgttgatttaccattatctaaagaacccagctgtattgaaggatcttgagaaacacccccaaataagacaccccttaggtgagagacctatggaactattgtcagtcgtatctatattaaactattgtaagaagacaattgataataaggtgttgatcataattggaataatcttatccgtaataggaggtgcagcaagtcctgtattttcatactgcttttccaaaattttggtcactatggtcaatgcttctattgggatgaatataaacagggaattgataacatggtcttgtatagtcgcagggatttccgtagggagtggtgtaattcattatttgtcactgtttacaatgtctttcgctagtgagaagtggattgtcaacctaaggaagttagtttttaagaaattgaatgaacaagagttgtcgtattttgattcaaaaactacgaaaccatcagaattaactgctttgctaatgaatgacgctagagatttaaggagcttagtgtctgaatttgtaataatcgcttctaatttaatagcaatgttatcaataggaatcatatggtccattgccacaggatggaaactagctttggttggtgttgcatttgttccattaattctaatgatcacgcatgcatactcgtttgtattagaattgtctgagaataactacaaaacaaaagtagccattttagaaaattataaccatgaaattgtgagtggaataaagctaataaaaactctaaatttaaaaaacttttttataaatgagtttgtacttaagttgaacgaagtcaataacgtaggatctgtaagagctgtgtgtacgggttttgggatttcattatccgatttatgtacttcgttggctactggtactatattatattatggtatggaattagccggaaaaagggaatactcacaatcacaattaatacaagtaataacggttctttcattttcaatgaccaatgcagcgagcttattaacagaactacctgatattgcaagaggacagagagcaggtacttatattatcaacctattaaaattaaaaccgtctgaaattgaaaacgatggtatcattaagccattcaaactttacgacgatgaagtggttagcttccgaaatgttaatttccaatatcctaattcacgaaattcggcacaattagttttaaatagcctttcgtttcatgttaataaaaatgaaattgttgctattgttggagaatcaggttcagggaagtcaactattggcgcattactatctaggctttacagagttactgacagatccatatttatagcaaactgtgacattaataaacttgacattgactggttgagagatacaatatctgttgttacgcaggttccaaagttttttgaaggcacgatttatgacaatctagtttatggaatggagaaaagcaagatatcaccagttggaattgatcattgtttaaaattggctaacatttattcgtttatagtttcgttaccagaaggaatacacacaaggttaggtgaaggtcaacattgttcaatatctggtggtcaattgcaaaggttatctattgcaagagcgttgattagaaaaccaaagatattgataatggatgaatgtacctctagtttagaccctactaatactaatttgataattgaattagtgagaaataacttggtaatgcaaaacataactatcatcataataactcataatatagaaatgatgaaaatagccaacagagtaattaccataaatcagggtgaagctagggaatga

SEQ ID NO: 59970 - protein, 1246 aa, Debaryomyces hansenii CBS767
MRAKDRTFELSECLSDFDQEKFKPYRIDHNEKLMQDDTEKRHYGIFMFVVKKDFLFILMACFFMCVSSVGIPLQTIIYGRVFSKLSDFYKTNYSGLEGFMSDVRLLCGLIMLIGFVKMIVTWIGIIAWMKFGEKQSTRARIRTLNLMLNKEVAWFENNENLMGEISQTNRCIEELRCGTSEVVGLLVQTVASITALFITAMVLSWSLTLVIIASAPLMGLFGWLFGRLTYKAAELENDLTAQASKILDWSFVCSAEIRIFNGKYYEMVKFNRLVDLSAKAYYKLANAIACNTGMLKCLTLLMFVQGFWFGNYMISIGKLKINEVFTCFSSCLMLGSEISEISMLLATLNKAQAASLKIGKMIESNENPNDSGIYPKLCEGDIELENIEFEYLSRPERVLKDVSFSFRSKELNFIIGPSGSGKSTISQLLLNFYQPQSGIIRIDGLNISNLSKKWLTDNITLVQQDPIIFNESIRNNIGMAALNRFVSLSDIPDLLIEDAATFALLTSVIDDSRDGINTSVSLTSLSGGQLQRIAIARAKISDTPILILDEALNALDIKNKQLLFQNIKEWRKGKTTIIITHEFDQISDDDYVILMENGNVKNKGYMFELSHEDLILQDRSGLSNKSYVDSRCRSKFYKEKATSNNSLIYHYLKNPAVLKDLEKHPQIRHPLGERPMELLSVVSILNYCKKTIDNKVLIIIGIILSVIGGAASPVFSYCFSKILVTMVNASIGMNINRELITWSCIVAGISVGSGVIHYLSLFTMSFASEKWIVNLRKLVFKKLNEQELSYFDSKTTKPSELTALLMNDARDLRSLVSEFVIIASNLIAMLSIGIIWSIATGWKLALVGVAFVPLILMITHAYSFVLELSENNYKTKVAILENYNHEIVSGIKLIKTLNLKNFFINEFVLKLNEVNNVGSVRAVCTGFGISLSDLCTSLATGTILYYGMELAGKREYSQSQLIQVITVLSFSMTNAASLLTELPDIARGQRAGTYIINLLKLKPSEIENDGIIKPFKLYDDEVVSFRNVNFQYPNSRNSAQLVLNSLSFHVNKNEIVAIVGESGSGKSTIGALLSRLYRVTDRSIFIANCDINKLDIDWLRDTISVVTQVPKFFEGTIYDNLVYGMEKSKISPVGIDHCLKLANIYSFIVSLPEGIHTRLGEGQHCSISGGQLQRLSIARALIRKPKILIMDECTSSLDPTNTNLIIELVRNNLVMQNITIIIITHNIEMMKIANRVITINQGEARE

SEQ ID NO: 59971 - DNA, 3765 bp, Yarrowia lipolytica CLIB122
  CDS (1)..(3765)
atgtcgaccaaagacccctacgaggggctatctgaggagagcatcgccattctcaaggcccaaaccaccagtgagcccgtcaacgtcaactaccgcaccttgctacttcggtatgccacacctctggacaaggcggagattctggtttcgtacgtcttttcggcctgtgcgggagcgtgtctgcctcttttcaccctgattttcggctccatgaccaacgagtttgtccggtactttgtggagggggccacgccggctgaattcggccaccagatcaactacctggcgcggtatttcatctatctttttgcaggcatcttcgccttttctttcctcgaaacgtacatgcacgtccagatgggcgagaagctgaccggccggatccgagcacattatctggaggccattatgcgccagaacattggcttcttcgacaaggtcggagccggagaaatcaccaaccgaatcaccacagacaccaacctgatccaggagggcatcagtgaaaaggctggcctgattgtttcctccattgccgccataatttcggccttcattattgggttcatcaagtcgtggaagctgacgctgatcatgatgtcgtcgtttttcgccctactgttcgccatgactacagcagtctattttgtggtcaagtttgccaaactggccattgtttccgacgccaaggcgtcttcagtcgcggaagaagttcttggagccatcagaaacgtggttgcgtttggaacccaggacagattgacccaaaagtacgatgaccggctggtggtgtccatgaagtaccacattttccgtggccggggctcggcggcggctattgcttcggtgtggaccattgcctatctcaactacgctctctccttctgggaggggtctcgactcgtgtcttggggacaagtcaatgtcggaaacatcatgaccgtgctgtttgccgtcatgattggagctgtcatggtcggcaatgtggctccaaacttgcaggccatgggctctgccattgcctctggccagaagatctttgagaccattgaccgggtccctcccatcgacagcttctccgacaagggtcagaagctggaccaggttcacggccacattcagctggagcacgtcaacttccggtatccgtctcgaccggatgtttctgttctgcacgacttctctttggagatcaaaccagggcagactgtggcgcttgtgggcgcttctggcagcggaaagtccaccattattggcattctcgagcgattctacgaaattctcggcggaaaagtgacgattgacggagtagacatttcttcgctcaacgtgagatggctgcgacaacagctggctctggtgtcacaggaacccactctttttggcgtcagcatctacgaaaacattgcctacggtttgattggaactccccatgagaacgctgaccccgagaagaaacgtcagctggtggaggatgctgcccgtcaagccaacgcctacgacttcatccaggacttgactgacgggtttgaaaccaatgttggagaccggggctttctgctgtcaggaggccagaaacagcgaattgctattgcccgggccattgttagagagcccaagatcttgttgctggacgaagccacttctgcactcgacaccaagagtgaaggcattgttcaggacgcactggacaaggcagcggcggacagaaccaccattgtcattgcccatcgtctcagcacggtcaagaacgccgatctcattgtggtcatgaacaagggcagcattgtggaacagggcacccatcatgagttgattgagcaaaagggcatgtacttttcgctggtcaactcgcagactatcatgaaacagaatgacgacggctcagacacggccgctgacgacaaactcgaggaagacgtggtggcaatccagtctctgactatgagctccttcagtgaagatgaggaggaatacaacaccaaggagcagggaatcattgagatgattcgattcgtgtactcctacaacaaggaggagaccactttgctgctgattggaggagcgtgtgcctttgtggggggcattggctatcctggaatggccgtcattttcgccaaatgtatcgaggccttcatgactccgccctcaggctatccccacatgcggtctctgatcaacacctacaccggtctcttctttatgattgccatgatcgaaatggtggccttttacgtggagatttccattctcactcttgcgggagagcgactggtgcgaaaactgcgtctggcggtctttaagcagtttctcagaatggacattggcttctttgaccgagaggagaacaccactggcagtctgacttcgaatctcggaaaagacgcccacaacgtccgaggactctcgggaacaacgtttggccagattctcgtgtccattgtgaccgtggtggccggattcgtggtctcggtcgtcttcaactggagaatgggtctcatttgcggcgcctgtatccccattctcattggatgcggtttctgcagatactacgtgctcacatggctcaacaaccgggccaaactcgcctacgagcagtccggctcctacgcctgcgaaaacaccaacgccatccgaaccgtcaccactctgacccgtgaataccaagtctacaagacttacaaggaatcagtggagggacaggttcagggctccaaacggcccattttcttctcgtccattctctttggtctgtcccagtccctgtcgcctctcatcatgggtctggccttctggtacggcggaattctgctcaagcaccacaccatttcgcccttccgtttcttcgtggccttcattgccattgtctttggctcacagtccgcgggctcaatcttcacctttgcgccggacatgagcaaggccgccggaagcacgcggaacatcatgaacgtgctggcggtggagcccgagattgactggtggtccgaccaaggcaccaagatcgaccccaaggacgtcaaaggcaacattgagttccaaaacgtgcacttccggtaccccacgcggatgcaggtgccggttcttcgaggtctcaacctatccatcaaacagggccaatatgtagccctggtgggctcgtcaggatgcggaaaaagcaccaccgtcggtcttctcgagtgcttctaccggcccacgtccggcaagattcttctggacggcctagacctcgcagacttgaacatcaactcctatcgcgaggcggtggctctggtgcagcaggaacccattctgttctcgggcaccatcaaagagaacattttgctgggaacacaggatccggacgtgactgacgaggtggtatacgaggctgctcgaaaatccaacatccatgacttcatcatgtctttgcccgaaggctacgataccgtgtgtggctccaagggttctctgttgtctggaggccagaaacagagaatagccattgctcgagctctcatccgcaatcccaagattcttctgctggatgaggcgacctcagctctggactcggagtccgaaaaggtggttcaagctgctcttgacgccgctgccaagggacgaactaccatcgccattgcccaccgactgtcgacgatccagaacgccgacgtgattttcgtgtttgaaaacggagtcgttcttgagagtggaactcatcagcaacttctggcaaacagatcaaagtactacgagctcgtcaaattgcaggccttggaaggttag

SEQ ID NO: 59972 - protein, 1254 aa, Yarrowia lipolytica CLIB122
MSTKDPYEGLSEESIAILKAQTTSEPVNVNYRTLLLRYATPLDKAEILVSYVFSACAGACLPLFTLIFGSMTNEFVRYFVEGATPAEFGHQINYLARYFIYLFAGIFAFSFLETYMHVQMGEKLTGRIRAHYLEAIMRQNIGFFDKVGAGEITNRITTDTNLIQEGISEKAGLIVSSIAAIISAFIIGFIKSWKLTLIMMSSFFALLFAMTTAVYFVVKFAKLAIVSDAKASSVAEEVLGAIRNVVAFGTQDRLTQKYDDRLVVSMKYHIFRGRGSAAAIASVWTIAYLNYALSFWEGSRLVSWGQVNVGNIMTVLFAVMIGAVMVGNVAPNLQAMGSAIASGQKIFETIDRVPPIDSFSDKGQKLDQVHGHIQLEHVNFRYPSRPDVSVLHDFSLEIKPGQTVALVGASGSGKSTIIGILERFYEILGGKVTIDGVDISSLNVRWLRQQLALVSQEPTLFGVSIYENIAYGLIGTPHENADPEKKRQLVEDAARQANAYDFIQDLTDGFETNVGDRGFLLSGGQKQRIAIARAIVREPKILLLDEATSALDTKSEGIVQDALDKAAADRTTIVIAHRLSTVKNADLIVVMNKGSIVEQGTHHELIEQKGMYFSLVNSQTIMKQNDDGSDTAADDKLEEDVVAIQSLTMSSFSEDEEEYNTKEQGIIEMIRFVYSYNKEETTLLLIGGACAFVGGIGYPGMAVIFAKCIEAFMTPPSGYPHMRSLINTYTGLFFMIAMIEMVAFYVEISILTLAGERLVRKLRLAVFKQFLRMDIGFFDREENTTGSLTSNLGKDAHNVRGLSGTTFGQILVSIVTVVAGFVVSVVFNWRMGLICGACIPILIGCGFCRYYVLTWLNNRAKLAYEQSGSYACENTNAIRTVTTLTREYQVYKTYKESVEGQVQGSKRPIFFSSILFGLSQSLSPLIMGLAFWYGGILLKHHTISPFRFFVAFIAIVFGSQSAGSIFTFAPDMSKAAGSTRNIMNVLAVEPEIDWWSDQGTKIDPKDVKGNIEFQNVHFRYPTRMQVPVLRGLNLSIKQGQYVALVGSSGCGKSTTVGLLECFYRPTSGKILLDGLDLADLNINSYREAVALVQQEPILFSGTIKENILLGTQDPDVTDEVVYEAARKSNIHDFIMSLPEGYDTVCGSKGSLLSGGQKQRIAIARALIRNPKILLLDEATSALDSESEKVVQAALDAAAKGRTTIAIAHRLSTIQNADVIFVFENGVVLESGTHQQLLANRSKYYELVKLQALEG

SEQ ID NO: 59973 - DNA, 2178 bp, Yarrowia lipolytica CLIB122
  CDS (1)..(2178)
atgctcccgagagtggcccgactgagtcctctgtggcacgctagatcgccattacggcctctgcctgtccgatccctctttctgcgaccctcttcgccctccgtctaccctacacttgccgctcgacccttctcttcgtacctcccaatcctcaatcagaacaagtccaaaggtatctccgacgatgacgcgactcccgtgaacgtgtctccttccgagcgagccaaggctgctggcgacatcaatctccaagcaaaactcacgtcccgtaattctgacaagaaccagggagttggagacattttccggctcttccgactcgtgaaggacgaggtgtggccgctcattggagctttcacgctgctgttcctgtcggccgctatctccatgaccgtgcccctctccattggtaagatcatggatgttgtttccgaggacgaaaaggacccagaggatgccgaccaacgaaaggttttcggactgccgttgaagcagttctacattgcccttggaggtctgttcatcatcggagccatgtgcaatatgggccgagtctactgcctgcgagtcatttccgaacgtctgtctgcccgtcttcgagctcagctgtacaagcgaaccgtgactcaggacgcagagtttttcgatgccaaccgagtcggagacctgatttcgcgtctgtctacggacgcccaggtcgtggccaaatctgtcaccaacaacatgtccgacggtgtacgatctatcatctccggtgtcgttggactcggaatgatgtcctacgtctctctcaaactcgccacgttcatgatgctggtagcccctcccgtggctattatcgcggttatctacggaaagaagcttcgacatatctctcgagagctccagaccgccgtcggtggtctgactaaggtatcagaggaacgtcttggtaatattagaacggcccagtcctttggaggagaaatccaggaggtacggctgtacaactccaagattcgtgccgtgtttgacattggtaagaaggatgctatggccaacggaatgttccatggcttcttctctctgtctggaaacatgaccattttggctcttctagttatgggttctcaaatggtatctactggccaactatctctgggagacctcacctccttcatgctgtatgctggatacacaggaggagccatgcactccgtctcgtctttctactcggagctcatgaagggtgctggtgctgcctctcgtctgtttgaactgaacgaccgagagcctgccatcaacgccactaagggcccccatctggagtctgcccgaggcaacattgacttcaaccatgtcgcctttgcctaccccacccgtccctctctgcctattttcaccgatctcaacttctccatccccgctggttccaacgtctgtattgtcggtccttctggaggaggaaaatccaccatcacctccttgctgttgcgattctacgaccccaccaagggttacattagcattggaggcaacaacattcgagatttcaacgttagatcgttgcgaaaacagattggtgtggtgtcccaggaacctgttctcttttctggcacaattgcctccaacatcagatacggaaagccggaggctacccgagatgagatcattgaagctgctcgaaaggctaattgcacgttcctggccgacttcccccagggtattgacacccaggttggagctcgaggaacccagttgtctggaggccagaagcagcgaattgccattgcacgagctctgattaagaacccagctattctgattttggacgaagccacctctgctctggataccgattccgagtcctctgttaacgaggctctgcagcgactcatggatggcaattccactaccatctccattgcccaccgactgtccaccatcaaacgagctgatcgagtcatcgttctctccaacgaaggtactgtcgctgagcagggcaagttcaccgagctctacgccaaccacgactctgccctgtctaatctcctgcgagccaaggaggaggaggaggttgctgagcccaagatcaccgagggagaaaaggccaccattgagggcgagattgagtccgagatttccgaggaggaagccaaggatattgaggaaaacagaggcaatcttatcaagaactag

SEQ ID NO: 59974 - protein, 725 aa, Yarrowia lipolytica CLIB122
MLPRVARLSPLWHARSPLRPLPVRSLFLRPSSPSVYPTLAARPFSSYLPILNQNKSKGISDDDATPVNVSPSERAKAAGDINLQAKLTSRNSDKNQGVGDIFRLFRLVKDEVWPLIGAFTLLFLSAAISMTVPLSIGKIMDVVSEDEKDPEDADQRKVFGLPLKQFYIALGGLFIIGAMCNMGRVYCLRVISERLSARLRAQLYKRTVTQDAEFFDANRVGDLISRLSTDAQVVAKSVTNNMSDGVRSIISGVVGLGMMSYVSLKLATFMMLVAPPVAIIAVIYGKKLRHISRELQTAVGGLTKVSEERLGNIRTAQSFGGEIQEVRLYNSKIRAVFDIGKKDAMANGMFHGFFSLSGNMTILALLVMGSQMVSTGQLSLGDLTSFMLYAGYTGGAMHSVSSFYSELMKGAGAASRLFELNDREPAINATKGPHLESARGNIDFNHVAFAYPTRPSLPIFTDLNFSIPAGSNVCIVGPSGGGKSTITSLLLRFYDPTKGYISIGGNNIRDFNVRSLRKQIGVVSQEPVLFSGTIASNIRYGKPEATRDEIIEAARKANCTFLADFPQGIDTQVGARGTQLSGGQKQRIAIARALIKNPAILILDEATSALDTDSESSVNEALQRLMDGNSTTISIAHRLSTIKRADRVIVLSNEGTVAEQGKFTELYANHDSALSNLLRAKEEEEVAEPKITEGEKATIEGEIESEISEEEAKDIEENRGNLIKN

SEQ ID NO: 59975 - DNA, 3981 bp, Yarrowia lipolytica CLIB122
  CDS (1)..(3981)
atgacatggtcaagagaggagcctgcccatactccacaacctactcaatcgcgccgatacacacccacttacggtcctgcaaaagatgactatcgaggtgatagcggaggcaacagacacagtggtcatggtggaaacaggaggattgagatacccatcacaacaattattcaacgcccttttgagcactaccgttcccacaataagtctcctatagagttttccaccagtccttctgggccgtcagacagcgatgaggatttcggagacttgactgaggcagagattgaagttctacgacgtcaaatctcgacggataaagtcaaggtaaactttcttacactgttcaggtacgctaccaaacttgatatcttcattctgttcattggaatggtcacagctgccgcagctggtgtttgcatgcctctcttcactgtcattttcggtcagatgaccaatgagttcttagctttcattgtgcttggttcatcagctgaccgtttccagcatcagattaaccattatgctctgtattttgtctacattgctgtggctacgttttgcttaacgtcaatcaagacatacattactgtcgaaagaggagaacggttgagtgctcgaatccgagagaattatttgaaggctatcatgagacagaacattggctacttcgacaaactgggagctggagaggtgaccaacagaatcaccactgatacaaatctgattcaggaaggcatttccgagaaattgggacttattgtgtcggctgtttcctcgttcattacctcactggtgataggattcatcaaatcggctcgactcactggaattatgatctccactgttgtcgctcttgtcctggccatgggaatctgctccactttccttgttagatacgttagatgggcaattgaagacgacagcgagtgttcgtctattgcggaggagtgttttgcatcaattaccaacattgtggcatttggaatgcaggtgaagatggacaagcggtacgagaagcctctcaactcgagtctgaagaattacctgcttaaggcacgagttcttggagccatggtaggcatcctttggtgcatcacttattgcatgtatgcccttgcactctgggagggttctcggcttgtcaacaagggtgagaccagcatcggtcatgtcatcactgttcttatggctctcatgattggtgcttttcagttaggaggagtcgctcccaatatggaatctcttggatctgcagtcggggcgggtaagaagatctttgagaccattgatcgagttccagatatcgattctctcagtggaggagaaactctctcaaatcttcgaggcgctatctcgtttaagaatgtccatttccggtacccttctcgccctacggttcctattttgcgagagttcaacctcgatattccctccggagctaccgttgcattggttggagcttctggatcaggtaagtcaaccatcgttgcattattggagcgcttctaccagcctctaggaggctccatcacagttgatggtgtgagcattctgtctcttgatgtaaagtggcttcgtcaacaaatgagtcttgtttctcaggagccgactctgttcaattgcactatctttgaaaacatttctcacggtttgattggaaccgagtatgagaatgcagagagatctgttaagatgaaacttgttgaagacgcatgtgagcaggccaactgttcagagttcatcaaaactcttactgacggtcttgacacacaggttggtgagaaggggtatctcttatcgggtggacaaaaacagcgagtagctattgcccgagccatcatttctaaccctcctattctactgcttgatgaagctacgtcagctctagatactcgcagtgagaagctggttcagcaggctctggacaaagctgccaaaaaccgaaccactattgtcattgcacaccgtctgagtacaatcaagaatgccgacaagattgtggtcatgtccaagggtgagattcttgaacagggctctcatgacgagttgattgctgcaagaggaacttactatggattggttggagctcagagaatcgaagacggaggtccagaaaccgcatcgaccacagaaaagggctactactgggaaagcggttctggatccgattttgacgttggtagtaatgtgtctgtcgaaaagacgactcctctcaacacctggggaatgatcaagcttctagctcgtttcaaccgaaatgagcgacttcctcttttgcttggatcgggattcgcagtcatctgtggagccggatacccttctcttgctcttctctatggatctgtgatgcaagcatttatggtcgaccctttggcttacaaacatatgctccacgagattgacaagttctctggtttcttcttcatggtgggaatggtccagctgggatcctacttcatgcaggtttactatctgggtgtggcctcagagactctagtgaggaacctcaagcgaaccatcttctcacatcttcttaaccaggacctgcgcttctttgacaccaccaccaccggcaagttgacttcttccctgtctaaagatacacaaaatgttcagggactaggaggagctacctttggacagattctgtcgtctattgtcactgttataatctcagtgattctctcctgttgctacacctggaagcttggacttgtctgttccgcctgtattcctctcattctatcctctggcttcttccggttctacattctgacccagctcaaccagcgaggacgaaaggtgtacgaatcttcggcgggatacgcctgtgaagcaacaaacaatatccagacggtgatggcgttgactcgagaagacgatgttctcaatttttactcttccaaggtcaacaatgtggtgtatcactctgccaagagtaacgccatcagtagcatgttgtttggtgcttcgcagactctcatcattcttatcaatgcccttggattctggtatggctcaacattgattcgaaaacgggaaattgacatcaaccagttctttgttgcctttgtcactgttgtctttggtgtccaatcagctggatccatcttctccttcactcctgatatgggtaaggccaaggtagctactcaaagcattcatgaaattctcaaggtgaaacctgagattgggggagacaaggagtcaggtctttctcttgatcctgaaaaggttgtgggcaatatttcattcgacaatgtgagattcagataccctgaacgacctaaaattcctgttcttcagggtctgagcctgtccatccctgctggctcatatgtcgctcttgttggctcttctggctgtggcaagtcaactactatttcgctgattgaacggttttacgatgtgcttcaaggaagtatcactatcgatggcattgatattcgagatctcaatcttggatcgtatcggtctctcatctctctggtgcagcaggagcctattctgttcagtggaactatccgagagaacatcttgctgggtgctgaaggagatgtcgacgatgctaccttgcattctgcagctatccaggccaacatccacaactttgtcatgtccttgcccgatggatacgataccttctgcggaaacaagggcacgttgctttcgggaggacagaagcagcgagtggccattgcacgggctctgatacgagaccccaagattctgttactggatgaagccacttctgccctggactctgaatctgaaaaggttgttcaacaggctttggacactgcagctcaaggaagaaccaccatcgcggtggctcacagactatccacaattcaaaatgctgattctatttatgtccttgaagatggaaaagtcttggagcaaggtactcattctcacttgatggcgaagaagggacgatactacgagctggtcaagttgcaagctttggagggctga

SEQ ID NO: 59976 - protein, 1326 aa, Yarrowia lipolytica CLIB122
MTWSREEPAHTPQPTQSRRYTPTYGPAKDDYRGDSGGNRHSGHGGNRRIEIPITTIIQRPFEHYRSHNKSPIEFSTSPSGPSDSDEDFGDLTEAEIEVLRRQISTDKVKVNFLTLFRYATKLDIFILFIGMVTAAAAGVCMPLFTVIFGQMTNEFLAFIVLGSSADRFQHQINHYALYFVYIAVATFCLTSIKTYITVERGERLSARIRENYLKAIMRQNIGYFDKLGAGEVTNRITTDTNLIQEGISEKLGLIVSAVSSFITSLVIGFIKSARLTGIMISTVVALVLAMGICSTFLVRYVRWAIEDDSECSSIAEECFASITNIVAFGMQVKMDKRYEKPLNSSLKNYLLKARVLGAMVGILWCITYCMYALALWEGSRLVNKGETSIGHVITVLMALMIGAFQLGGVAPNMESLGSAVGAGKKIFETIDRVPDIDSLSGGETLSNLRGAISFKNVHFRYPSRPTVPILREFNLDIPSGATVALVGASGSGKSTIVALLERFYQPLGGSITVDGVSILSLDVKWLRQQMSLVSQEPTLFNCTIFENISHGLIGTEYENAERSVKMKLVEDACEQANCSEFIKTLTDGLDTQVGEKGYLLSGGQKQRVAIARAIISNPPILLLDEATSALDTRSEKLVQQALDKAAKNRTTIVIAHRLSTIKNADKIVVMSKGEILEQGSHDELIAARGTYYGLVGAQRIEDGGPETASTTEKGYYWESGSGSDFDVGSNVSVEKTTPLNTWGMIKLLARFNRNERLPLLLGSGFAVICGAGYPSLALLYGSVMQAFMVDPLAYKHMLHEIDKFSGFFFMVGMVQLGSYFMQVYYLGVASETLVRNLKRTIFSHLLNQDLRFFDTTTTGKLTSSLSKDTQNVQGLGGATFGQILSSIVTVIISVILSCCYTWKLGLVCSACIPLILSSGFFRFYILTQLNQRGRKVYESSAGYACEATNNIQTVMALTREDDVLNFYSSKVNNVVYHSAKSNAISSMLFGASQTLIILINALGFWYGSTLIRKREIDINQFFVAFVTVVFGVQSAGSIFSFTPDMGKAKVATQSIHEILKVKPEIGGDKESGLSLDPEKVVGNISFDNVRFRYPERPKIPVLQGLSLSIPAGSYVALVGSSGCGKSTTISLIERFYDVLQGSITIDGIDIRDLNLGSYRSLISLVQQEPILFSGTIRENILLGAEGDVDDATLHSAAIQANIHNFVMSLPDGYDTFCGNKGTLLSGGQKQRVAIARALIRDPKILLLDEATSALDSESEKVVQQALDTAAQGRTTIAVAHRLSTIQNADSIYVLEDGKVLEQGTHSHLMAKKGRYYELVKLQALEG

SEQ ID NO: 59977 - DNA, 4047 bp, Apis mellifera
  CDS (1)..(4047)
atggacacaaccaatttaaaatcgaaaccaaatccacgagaaaaagcaaatttattatcagtgttactttggtggtggacaatagatttattcaagataggctacagaaagattctgcaaaccgatgatttatatactcctttgaagacggatcgatcgaatgtgcttggagatcgattggaaaagcgatggaaaattgagatggaaaattcgaaaaaatataaaagaaaagccagtttgttgagagcaatttttcgtaccttttggtgggaatataccgtgcttggtttaatgcaaatattaaacgaatttattatacgattaggaacaccaatacttctgggtggacttttacgttatttcaaaaagagtatgaatgaaacttacgaaactgcattattatacgcggctggaatttgtatagcaacagctataaacgtaatcactctcaatcaagcaattttcggtgcatttcatattggtgcaaaaatcagggttgccacgtgttctgtagtgtatcgaaaggcgttacgacttagcaaaacagcacttggtgaaacagctccagggaaagtggttaatttagtagctaatgatgtaaatagatttgatcttgtttccatctttatacatcatatgtggtctgctccaatttcgatgttaatcatagcatactttctttatactgaagctggatattctggtttaattggtattgctgcagtttccgtcgttgtgccaattcagtcatatacaggaaaattgtcttccaaatttcggctacaaactgctataaaaaccgacgaaagagttcgtttaatggacgaaattatatcaggtgttcaagtaattaaaatgtatgcctgggaaaaaccattctgcgctttgatcgaaactgcacgtaaattagaattacaagtggtcactaaaagtgcctatattagaggtatctatatgaccttcaacttgtttaccacaagaatggctctttatgctactctaattagtatcctcttatttggcaatgaattatctgccgataaagtgtttgttttttcttcttattttaatattttggcgcatactatgtctggaatgttcgtgcgaggttttgcggagattgccgaatgtatagtggctgtaagaagattacagcattttctaatgtatgaagaatttcaagataataattatacttcaaataatttcactgctagtcttaatggtattgttgctagtgatttgttggaaaatacagcaaatcttatgggagaaaaaaaacattcttcaatgtcaattgaagagatatatgcaataaaaatgaccaatttaacagccaaatgggaaccaagtcaatctgagaatactcttgaaaatataaatttagaaatgcaaaaaggaaagatatatgccgtaataggtatggttggagctggaaaaagttcttttctctctgctattcttggagaaatagatataacgggaggtcacgtgaaagtaaatggaagtctgagctatgctggacaagaagcttgggtttttggttcaactattagacaaaatattctttttggacaatcttatgatcgtcatcgatatcagaaagttgttaaagcttgttctctttcaagagatttcaaacaatttccacaaggtgatcaaacagttgttggagaaagaggcagttccttgtcaggaggacaaaaagctagaatcaatttagctagatctttatatagacaagcagatatttatttgttagatgatccattgagtgctgttgatactcatgttagtaaacatttatttgaggaatgtatgcaaagatatttagctggtaaaacgagaattttagctactcatcagttacaatatgtgaagaatgtagatgctattatacttatggatcaaggaaaaattacagtattctctaattttcaagatttattgaagcaacgaccagagtatgctgaattacttgcagcagaatcagaatcgaatgaagatagttctttagaaaagagtactatgagaagacaattttcatcatcaagtactagaagtcgaactccagaagcaagtagtggaggaacagatgatgaggaagaagatgaagatcctcaaagattaaatgatggtctagaaggaacttctcgtggagcagttaaaggttcactattcattaagtacttccaaactggtgctaatttatgtttagcatttacactactcctattatttataagtacacagtttatagccagtctcaatgattattttgttcctattttagtaagtgcagaagaaacgcgacattattatcttatacaagctaagtctaatattaccaatgatactttgattgaaaacttggatatttcatccatgtataaatatctatatatttatacaattatagttgtgggaattttttgtattggaattaccagatcattgtctttttacaaagtatgcatattatgcagtcaaaaattacatgatatggcctttagcgctttaattagaacgggtatgagatttttcgatatcaatcccagtggtcgaatacttaatagattttctaaagatatgggagctattgatgaactattaccaaaggctatactcgatgctggtcaaatatgtatgatgatggttggatcgttaacagtatcgtgtatcattaatcctcttttcttaatccctatagtatttttgggcacagtattttattggataagaaaagtatttttgaagactagtaaaaatattaagagaatggaaggaataactcgatcacctgtatttactcatttaaatgctactttaaatggattgtctaccataagagcttattgtgcacaagatatattaaaaaaagaatttgataaactgcaagacgtccatacttccactgtttatatgtacgtaacagcgagtactgcttttggattttcgttggatgtcttttgtttcatctttatatctgtagttaccttcagttttttgttattggaacaatcattttccggtggagaagtaggcttagctatcactcaagtaatggctatgactggaatgattcagtggggtatgaggcagaatgctgaagtcgcgaatcaattaatgtccgtggagcgtgtgttagaatacacgcaagtcatacctgaaccgaatttacgcgatagaggaaaatttgccaaaaaaacagaaaaacaaattgcacttcctgctaatgcaccaaaaaattggcctacagatggaatgatcagatttagaagcgtatatttgaaatacgtagaggaagatcctccgatattaaaaggattgaatcttatcattaatcctggagaaaaaataggtatagtgggaaggacaggagcaggaaaatcctctttaatagcagctttatttagattagctaaaatcgaaggagttttagaaatcgatggtatagacactgggtctatttgtttagaggatttacgacgtaatatatctattattcctcaagatccagttttgttttctggtactttgagacgcaatttagatccttttaacgaatttacagataaagctatatgggaagtacttgaagaagtagaattaaaagacgctgtagttactactggaacaggtttggaaagccgtgttttggatagaggtagtaattatagcgttggtcaaaaacagttagtttgcttggcaagagctattttaagaaacaataaaattctgatgcttgacgaggcgacagctaatgtagatccgcaaacagatgccttaattcaacatacgatacgaaaaaaatttgccaaatgtaccgtacttactattgcccatcgattaaatacaattatggatagtgataaggttttagttatggataaaggtcgtatggcggaattcgatcatccatacatattacttcaaaatagctacagtcaattcaaatcattagtaaaagaaactgaccgtgctatgtacgatcaattagttaaagttgcaaaacaatcttatattgccaaatatggagaacgatga

SEQ ID NO: 59978 - protein, 1348 aa, Apis mellifera
MDTTNLKSKPNPREKANLLSVLLWWWTIDLFKIGYRKILQTDDLYTPLKTDRSNVLGDRLEKRWKIEMENSKKYKRKASLLRAIFRTFWWEYTVLGLMQILNEFIIRLGTPILLGGLLRYFKKSMNETYETALLYAAGICIATAINVITLNQAIFGAFHIGAKIRVATCSVVYRKALRLSKTALGETAPGKVVNLVANDVNRFDLVSIFIHHMWSAPISMLIIAYFLYTEAGYSGLIGIAAVSVVVPIQSYTGKLSSKFRLQTAIKTDERVRLMDEIISGVQVIKMYAWEKPFCALIETARKLELQVVTKSAYIRGIYMTFNLFTTRMALYATLISILLFGNELSADKVFVFSSYFNILAHTMSGMFVRGFAEIAECIVAVRRLQHFLMYEEFQDNNYTSNNFTASLNGIVASDLLENTANLMGEKKHSSMSIEEIYAIKMTNLTAKWEPSQSENTLENINLEMQKGKIYAVIGMVGAGKSSFLSAILGEIDITGGHVKVNGSLSYAGQEAWVFGSTIRQNILFGQSYDRHRYQKVVKACSLSRDFKQFPQGDQTVVGERGSSLSGGQKARINLARSLYRQADIYLLDDPLSAVDTHVSKHLFEECMQRYLAGKTRILATHQLQYVKNVDAIILMDQGKITVFSNFQDLLKQRPEYAELLAAESESNEDSSLEKSTMRRQFSSSSTRSRTPEASSGGTDDEEEDEDPQRLNDGLEGTSRGAVKGSLFIKYFQTGANLCLAFTLLLLFISTQFIASLNDYFVPILVSAEETRHYYLIQAKSNITNDTLIENLDISSMYKYLYIYTIIVVGIFCIGITRSLSFYKVCILCSQKLHDMAFSALIRTGMRFFDINPSGRILNRFSKDMGAIDELLPKAILDAGQICMMMVGSLTVSCIINPLFLIPIVFLGTVFYWIRKVFLKTSKNIKRMEGITRSPVFTHLNATLNGLSTIRAYCAQDILKKEFDKLQDVHTSTVYMYVTASTAFGFSLDVFCFIFISVVTFSFLLLEQSFSGGEVGLAITQVMAMTGMIQWGMRQNAEVANQLMSVERVLEYTQVIPEPNLRDRGKFAKKTEKQIALPANAPKNWPTDGMIRFRSVYLKYVEEDPPILKGLNLIINPGEKIGIVGRTGAGKSSLIAALFRLAKIEGVLEIDGIDTGSICLEDLRRNISIIPQDPVLFSGTLRRNLDPFNEFTDKAIWEVLEEVELKDAVVTTGTGLESRVLDRGSNYSVGQKQLVCLARAILRNNKILMLDEATANVDPQTDALIQHTIRKKFAKCTVLTIAHRLNTIMDSDKVLVMDKGRMAEFDHPYILLQNSYSQFKSLVKETDRAMYDQLVKVAKQSYIAKYGER

SEQ ID NO: 59979 - DNA, 3945 bp, Apis mellifera
  CDS (1)..(3945)
atgcgcaatgacacggcgaatttgtcagtggacagcaaacccgcgcgagaaggcgcagggtatggaaatggaaccccaaaaaacaaactctcaccgccaggaaaaaatattcttgaagttgaatttgtgccaccacaaacgaaggaggaggagaagtcgccttcggagccatccctaccgccagtgccttacttcaaactctttcgatttgcaacatgcggggagctgatgctgatcttcggcggcctgatcatgggaaccctgacaggcctgtgcatccccatctcgacgatacaatacggcgagttcaccacgttgctggtggatcgaaacatgaagaatcacacgagcacgccgaccctaataatgaagtggttcggtggaggaaaggtcttaggatctaattcgacgtacaaggagaggatggaggcgctttacgacgactcggtcgcgttcggcgtttcatccgcagcgttgtccacgttccaattcgtgtttgccgtgttcacggtcgatttgttgaacgtagctgcatccagacaaatcgttcgggtacgcaagatgttcctccgctctgtcctcagacaggacatgacgtggtacgacatcaacacgtccaccaacttcgccagcaggatcaccgaggatttggacaagatgaaggacggcataggggagaagctgggcgtgttcacttatctgatggtctccttcatttcctccatcatcatatcgttcgtctacggatggaagctgaccctggtcgtgctgagttgcgcgccgatcatcgtgatcgcgaccgccgtggtcgccaaagttcagagctccttgacggcccaggagttgaccgcttacgggcaggcggggagcgtggccgaggaggtgttgggcgccatcaggaccgtgatcgcgttcaacggcgagcagaaggaggtgaacagatacgcggagaagttgatccccgcggaaaagaccgggatcaagcgcggtatgtggtcgggcgttggtggcggagttatgtggttcatcatatacatcagttacgccatcgcgttttggtacggcgtccaattgatattggaggacaggccgaaggaggtgaaggagtacacgcccgcggtgctggtgatcgtgttcttcggcgtgttggcaggcgcgcagaacatgggcctcacgtccccccatctggaggcgttcgccgtggcgcgaggctcggccgcggccattttccaggtgctcgatcgcgtgcccacgatcgacagtttgagcaaggaggggcagaagcttcctgccgtgaacggcgagatcgagttcaagaacgtgcacttccagtatccggccagaaaggacgtgaaggtgctgcaaggcttgaatctgaccatcaatcggggcgagaccgtggccctcgtcggaggatccggctgcggcaagtccacctgccttcaattgatccaacgtctctacgatcctcacaagggacaggttctgctggacggcgtggacgtgtcgaagctgaacgtgcagtggctccgctcgcacataggcgtggtcgggcaggagccggtgctctttgacaccacgatacgggagaatatccggtacggaaatgacagcatcaccgaggaagagatgatcaaagcggcgaaggaagcgaacgcccacgacttcatcagcaaactgcccgaggcgtacgacagccccgtgggagagagggggtcgcagatgtcgggcgggcagaagcagaggatcgcgatagctcgtgccctggtcagacgaccggccatacttctactggacgaggctacttccgcgttggatcttcacagcgaagcaacggtgcagagggctttggacgcggcctcgaaggggaggacgacgatcgtcgtcactcacaggctgtccacgatcaccaacgccgataggatagtgttcataaaggacggccaggtggtggagcagggcacccacgaggagttgctcgccctcggcaagcattattacggattggtgtccgccgacgccagcgccaccgccagaggtaatttttttttgtccctttttgcatctctgctttcaaaaggcaaacgttcggtcgaattttcagcgaaagcgacggcctcggccgcaaagacgacctcggccaatcaattggaggagcacgagaaaccgtacgacgcgcccatgatgaggatattcgggctcaataaaccggaatggccgtacaatatcatcgggtgtctggcggcggcgatggtgggcgcctcgttcccagcgttcgccgtcctcttcggcgaggtttactacgtgctgggtcttcaagacgacgaggaagtgcgccgcgaaaccgtcaacttctccattctgttcctggttgtcggagtggtgaccggcctcggcaccttcctgcagatgtacatgttcgggttggcgggggtgcgaatgaccacgaggatcaggaagataacgttcgccgcgatgctgaagcaggagatgggctggtacgacgaggacacgaacagcgtgggcgccctctgcgcccgactctcgtcggacgcgggggcagtgcagggcgcgaccgggacacgggttggcgccattctccaagccctgtccaccttggtcctggggatcggcctgtccatgtattacacttggaagatgaccctggtctcggtcgtctcgatacccctcgtgttgggcgcggtgttcttcgaggcgagggtgatgagcgggcaggggttgcaggagaagaagaagatggaggcggcgaccaggatcgccatagaggcgatctccaacatccgtacggtggccagcctcggcaaagaggaggcgttcctgcagcgctactgctcggagctggaccacgtggccgaagcgaccaggatcagacagaggttgagaggattggtattctcgtgtggtcagaccacgccgttcttcggttacgctttgagcctttactacggcggcgctttggttgccaccgaggggttgaattatcaggacgtgatcaaagtgtcggaggcgttgatcttcggctcttggatgttgggccaggcgctcgcctttgcgcccaatttcaacaccgccaagatctcggcggggaggatattcaagctgttggacagagtcccggagatcgcctcgccgcccgattccgaggacaaagatctcgattgggtgagttcacgcgcggacgggttgatacaattctccaaggtcgagttccattacccgacgaggcccgagatgcaaattctgcaggggttgaatttgatcgtgaagccgggccagatggtcgctctggttggccagagcggatgcggcaaatcgacctgcatccaattgttgcaacgactctacgacccgatttccgggaccgtgacgatggacaggcgcgacatctcctcggtctcgttgcgcaatttgagatcgcagctgggcgtcgtcggccaggagccggtcctcttcgaccggaccatcgcggagaacatcgcctacggcgacaatttccgcctggtgccgatggacgagattatagaggccgccaagaagtccaatatccacagcttcgtcagctctctaccactaggatacgatactaggttaggttctaaaggcacgcagctgtcaggaggacagaagcaacgtatcgcgattgcgcgcgctttggtcaggaatccacgagtcctgctactggacgaggccacgtccgctcttgatactcagagcgagaaggtggtgcaagctgccctggacaaagcgatggaaggcagaacctgcatcaccatagctcatcggttggcgacgataagaaacgccgacgtgatctgcgtcctggagaagggaaccgtcgcggagatgggcacccacgacgacttgatcgctgcggatggcctctacgcccatctgcacgcactccaagaggccgcgatggagtag

SEQ ID NO: 59980 - protein, 1314 aa, Apis mellifera
MRNDTANLSVDSKPAREGAGYGNGTPKNKLSPPGKNILEVEFVPPQTKEEEKSPSEPSLPPVPYFKLFRFATCGELMLIFGGLIMGTLTGLCIPISTIQYGEFTTLLVDRNMKNHTSTPTLIMKWFGGGKVLGSNSTYKERMEALYDDSVAFGVSSAALSTFQFVFAVFTVDLLNVAASRQIVRVRKMFLRSVLRQDMTWYDINTSTNFASRITEDLDKMKDGIGEKLGVFTYLMVSFISSIIISFVYGWKLTLVVLSCAPIIVIATAVVAKVQSSLTAQELTAYGQAGSVAEEVLGAIRTVIAFNGEQKEVNRYAEKLIPAEKTGIKRGMWSGVGGGVMWFIIYISYAIAFWYGVQLILEDRPKEVKEYTPAVLVIVFFGVLAGAQNMGLTSPHLEAFAVARGSAAAIFQVLDRVPTIDSLSKEGQKLPAVNGEIEFKNVHFQYPARKDVKVLQGLNLTINRGETVALVGGSGCGKSTCLQLIQRLYDPHKGQVLLDGVDVSKLNVQWLRSHIGVVGQEPVLFDTTIRENIRYGNDSITEEEMIKAAKEANAHDFISKLPEAYDSPVGERGSQMSGGQKQRIAIARALVRRPAILLLDEATSALDLHSEATVQRALDAASKGRTTIVVTHRLSTITNADRIVFIKDGQVVEQGTHEELLALGKHYYGLVSADASATARGNFFLSLFASLLSKGKRSVEFSAKATASAAKTTSANQLEEHEKPYDAPMMRIFGLNKPEWPYNIIGCLAAAMVGASFPAFAVLFGEVYYVLGLQDDEEVRRETVNFSILFLVVGVVTGLGTFLQMYMFGLAGVRMTTRIRKITFAAMLKQEMGWYDEDTNSVGALCARLSSDAGAVQGATGTRVGAILQALSTLVLGIGLSMYYTWKMTLVSVVSIPLVLGAVFFEARVMSGQGLQEKKKMEAATRIAIEAISNIRTVASLGKEEAFLQRYCSELDHVAEATRIRQRLRGLVFSCGQTTPFFGYALSLYYGGALVATEGLNYQDVIKVSEALIFGSWMLGQALAFAPNFNTAKISAGRIFKLLDRVPEIASPPDSEDKDLDWVSSRADGLIQFSKVEFHYPTRPEMQILQGLNLIVKPGQMVALVGQSGCGKSTCIQLLQRLYDPISGTVTMDRRDISSVSLRNLRSQLGVVGQEPVLFDRTIAENIAYGDNFRLVPMDEIIEAAKKSNIHSFVSSLPLGYDTRLGSKGTQLSGGQKQRIAIARALVRNPRVLLLDEATSALDTQSEKVVQAALDKAMEGRTCITIAHRLATIRNADVICVLEKGTVAEMGTHDDLIAADGLYAHLHALQEAAME

SEQ ID NO: 59981 - DNA, 1974 bp, Apis mellifera
  CDS (1)..(1974)
atggcgctcccatatgggaatgcacaagattctttactcttatttatatggagacaaaaacgcaaaccgtttgatgtagcaaaaaaaaaatttaatagtagtattaaagaagttgtaataaataacactagcaaatcaaaaaatgtttcatcaattttaaaatttggttttggtgggttaggtagtataataggaacatgcataataaaatctcacgcttcaactgttcaagaatatttatatccatatatttggcaattaataatagctttatcaagtgcaatgattgttgctatattaaatatttggataccacagagtataggaaatgtaataaatgtattaacaaaaatttgccaaagtaaagaagatattgtgaaaactgtgctattgcaattaacaacacctgcatttgcattagcacgtatgtatattgcacaagcattttttacatttgtttatatttatatgctttcacatgtaggagaaaaaatagcaatgaatttaagacaagacttatttaaatcaattatgatgcaagatatcacattctttgataaaaatcatagtggtgaaatagtaagtcgattaacaagtgatattcaagattttaaaagtacttttaaaacttgcatatcacaaggcttaaggagtactacacaaattattggatgtatagtttctgtaatagggatttcgccgcaactggctgcagctacagtgttatctttgcctaccataattcttattggtacaatgcttggaaaaggcttaagaaaattatctatggaggcacaaaatcaacttgctaagtctacacatgtttgtgaggaagccatacaaaatattagaacggtaaaagcatttgcagctgaagaaaaagaaatagaaatgttttgtaaagaaactatgttaggatcaacattatttgaaaaactaggtttaggaattggtttatttcaaggaggaacaaatctatttcttaatggtattttactttgtactttatatttcggtggacatttattgtctactggacaattatctccgggagatttaatggcatttttaatggccacacagactatacaaaaatctttatcgcaattatcattgttatttggagcatatgttaaaggtattagcgctggtgctaggatttttgagtatctagaaatgtcaccttcaccaatgatagttagtggagaaattattaaaaatcaatcattagcgggaaatattacctttaaggatgtggaatttagttatcctaccagaccagatcatgttattttaaaaaattttaatttacacattcctgctggaaaaacagtagctattgttggttctagtggtaatggaaaatcaactatagctgctttactagaaagattttatgatgttaatgatggttcaattataattgatggtaaagatttgaaatcactcaatgctagttatcttcgaggtaatgttttgggatatatagatcaagaacctattttatttgctactagcattatggaaaatatacgatacggaaaaccggatgctacaaatgaagatattattgaagctgctaaagaagcgaatgctcatgaatttattatgaaattcccaaataaatataatacacaagtgggtgaaaaaggtgcacaactttctggtggccaaaaacaacgtattgcaattgcaagagctttattaaaaagaccatctattttaattttggacgaagcaacaagtgcattagattatgaaagtgaaagaattgtacaaaaagcattagataatgttagtcaaggaagaacagttttaataattgctcatagattaagtacgattaaaaatgctgacattatcgttgtattacaacggggaataattgcggaaatgggtactcatacagaacttattaaaaagaaaggtttatattacaccttaataaatgaacaagacagagaaaatacatga

SEQ ID NO: 59982 - protein, 657 aa, Apis mellifera
MALPYGNAQDSLLLFIWRQKRKPFDVAKKKFNSSIKEVVINNTSKSKNVSSILKFGFGGLGSIIGTCIIKSHASTVQEYLYPYIWQLIIALSSAMIVAILNIWIPQSIGNVINVLTKICQSKEDIVKTVLLQLTTPAFALARMYIAQAFFTFVYIYMLSHVGEKIAMNLRQDLFKSIMMQDITFFDKNHSGEIVSRLTSDIQDFKSTFKTCISQGLRSTTQIIGCIVSVIGISPQLAAATVLSLPTIILIGTMLGKGLRKLSMEAQNQLAKSTHVCEEAIQNIRTVKAFAAEEKEIEMFCKETMLGSTLFEKLGLGIGLFQGGTNLFLNGILLCTLYFGGHLLSTGQLSPGDLMAFLMATQTIQKSLSQLSLLFGAYVKGISAGARIFEYLEMSPSPMIVSGEIIKNQSLAGNITFKDVEFSYPTRPDHVILKNFNLHIPAGKTVAIVGSSGNGKSTIAALLERFYDVNDGSIIIDGKDLKSLNASYLRGNVLGYIDQEPILFATSIMENIRYGKPDATNEDIIEAAKEANAHEFIMKFPNKYNTQVGEKGAQLSGGQKQRIAIARALLKRPSILILDEATSALDYESERIVQKALDNVSQGRTVLIIAHRLSTIKNADIIVVLQRGIIAEMGTHTELIKKKGLYYTLINEQDRENT

SEQ ID NO: 59983 - DNA, 1830 bp, Apis mellifera
  CDS (1)..(1830)
atgacacttatttggaaatattatggaacaaatactttagaaactaaaactttaaattccactgtacgatttattgcaaaaaaaaaagaaacttcagaattgaaaaacctaattgtgctagcagtacctgagaaatggaggttattcagtgctattacttttttactaatttcatctactataacaatggcagtaccattttgtttaggaaaattaattgatatcattaatacaagtgataaaaaggatatgaagaaaaatcttaatcaattatgtatcattttatttggaatatttgctcttggaggtctatgtaatttttgcagagtatatttaatgtctactactggacatagaattactcaatctttaaggaaacaattatatgctgctattcttcgacaagaaatagcaatttttgataaatgtaatacaggagaatttgttggtcgattatctggagatacacaacttgttagcaatgctctgacaagcaatatatcagatggattacgttttgccttcatgagcatttctggaatatctatgatgttttatacttctcccaaattggctatagttagtctagcaattgttccaccagttgctggtttagctatagtatgtggtcgttttttaaagaagatttccagagacatacaaaacaatttagcatcattaaatataatatctgaagaaagaattagtaatataagaacagtaaaagctttttcaaaagaaataaatgaaaccaattattataattctcaattagatgatatgcttaaagtttgttataaagaaagtttatgtagaggaatgttttttggattaactggtttctctggaaatatgattattttatcagtgttatattatggtggagctatgatttcggattcctctcttacaattggaagcttaagtgcattcttagggtatgctgtatatgttgcaatttctttgaatgggttatcttcattttatagtgaattaaataaagcattgggtgcaaatatacgtttagtcgaattgattgaaaaagaatcagcaataccaatttatggtggtgaaattctgaaaaatcaactatcaggtgatattgaatttcgcaatgtcagttttgcttatcctacaagagagaatatatgggttttgaaaaatttcagtttaaaaatcccttcatgtacattagttgctattgttggagcatcaggttctggaaaatctacaatagcttcactcttattaagattttatgatcctaatttaggatctatacttttagataattatgatcttaagtttcttaatccagcatgggtaaaatcacagatcagtattgtttctcaggaacctattctctttagtggaacaataagagaaaacatactgtatggagcaatagactcaataaaatatgatgtagaagagattgcaaaacgtgcacacattttagaatttacagaaaatatgccaaatggtttagatacagtagtaggagaacgaggcattacccttagtggaggacagagacagagagttgctattgctagagcattgataaagaatcccagaatcttaattttggatgaagccacaagtgcattagatgcagagagtgaacattatgtacaaaaagctttagaaaaagctgttcaaggaagaacagttctcactatagctcatagattgagtacaataaaaaacgcagataaagtcattgttttgaaacaaggacaaatgatagaaactgggagctataaagaacttatgaatttgaaagatagttattttaacaagttaattcaacatcaaacttttacttaa

SEQ ID NO: 59984 - protein, 609 aa, Apis mellifera
MTLIWKYYGTNTLETKTLNSTVRFIAKKKETSELKNLIVLAVPEKWRLFSAITFLLISSTITMAVPFCLGKLIDIINTSDKKDMKKNLNQLCIILFGIFALGGLCNFCRVYLMSTTGHRITQSLRKQLYAAILRQEIAIFDKCNTGEFVGRLSGDTQLVSNALTSNISDGLRFAFMSISGISMMFYTSPKLAIVSLAIVPPVAGLAIVCGRFLKKISRDIQNNLASLNIISEERISNIRTVKAFSKEINETNYYNSQLDDMLKVCYKESLCRGMFFGLTGFSGNMIILSVLYYGGAMISDSSLTIGSLSAFLGYAVYVAISLNGLSSFYSELNKALGANIRLVELIEKESAIPIYGGEILKNQLSGDIEFRNVSFAYPTRENIWVLKNFSLKIPSCTLVAIVGASGSGKSTIASLLLRFYDPNLGSILLDNYDLKFLNPAWVKSQISIVSQEPILFSGTIRENILYGAIDSIKYDVEEIAKRAHILEFTENMPNGLDTVVGERGITLSGGQRQRVAIARALIKNPRILILDEATSALDAESEHYVQKALEKAVQGRTVLTIAHRLSTIKNADKVIVLKQGQMIETGSYKELMNLKDSYFNKLIQHQTFT

SEQ ID NO: 59985 - DNA, 4032 bp, Aspergillus nidulans FGSC A4
  CDS (1)..(4032)
atgtccccgctagagacaaatcccctttcgccagagactgctatgcgcgaacctgctgagacttcaacgacggaggagcaagcttctacaccacacgctgcggacgagaagaaaatcctcagcgacctctcggctccatctagtactacagcaacccccgcagacaaggagcaccgtcctaaatcgtcgtccagcaataatgcggtctcggtcaacgaagtcgatgcgcttattgcgcacctgccagaagacgagaggcaggtcttgaagacgcagctggaggagatcaaagtaaacatctccttcttcggtctctggcggtatgcaacaaagatggatatacttatcatggtaatcagtacaatctgtgccattgctgccggtgctgcattgcctctattcacggcaccgtcgactttccagaggataatgttatatcaaatctcgtacgacgagttctatgatgaattgaccaagaacgtactgtacttcgtatacctcggtatcggcgagtttgtcactgtctatgttagtactgttggcttcatctataccggagaacacgccacgcagaagatccgcgagtattaccttgagtctatcctgcgccagaacattggctattttgataaactcggtgccggggaagtgaccacccgtataacagccgatacaaaccttatccaggatggcatttcggagaaggtcggtctcactttgactgccctggcgacattcgtgacagcattcattatcgcctacgtcaaatactggaagttggctctaatttgcagctcaacaattgtggccctcgttctcaccatgggcggtggttctcagtttatcatcaagtacagcaaaaagtcgcttgacagctacggtgcaggcggcactgttgcggaagaggtcatcagctccatcagaaatgccacagcgtttggcacccaagacaagcttgcgaagcagtatgaggtccacttagacgaagctgagaaatggggaacaaagaaccagattgtcatgggtttcatgattggcgccatgtttggccttatgtactcgaactacggtcttggcttctggatgggttctcgtttcctggtagatggtgcagtcgatgtgggtgatattctcacagttctcatggccatcttgatcggatcgttctccttggggaacgttagtccaaatgctcaagcatttacaaacgctgtggccgcggccgcaaagatatttggaacgatcgatcgccagtccccattagatccatattcgaacgaagggaagacgctcgaccattttgagggccacattgagttacgcaatgtcaagcatatttacccatctagacccgaggtcaccgtcatggaggatgtttctctgtcaatgcccgctggaaaaacaaccgctttagtcggcccctctggctctggaaaaagtacggtggtcggcttggttgagcgattctacatgcctgttcgcggtacggttttgctggatggccatgacatcaaggacctcaatctccgctggcttcgccaacagatctctttggttagccaggagcctgttctttttggcacgacgatttataagaatattaggcacggtctcatcggcacaaagtacgagaatgaatccgaggataaggtccgggaactcatcgagaacgcggcaaaaatggcgaatgctcatgactttattactgccttgcctgaaggttatgagaccaatgttgggcagcgtggctttctcctttcaggtggccagaaacagcgcattgcaatcgcccgtgccgttgttagtgacccaaaaatcctgctcctggatgaagctacttcggccttggacacaaaatccgaaggcgtggttcaagcagctttggagagggcagctgaaggccgaactactattgtgatcgctcatcgcctttccacgatcaaaacggcgcacaacattgtggttctggtcaatggcaaaattgctgaacaaggaactcacgatgaattggttgaccgcggaggcgcttatcgcaaacttgtggaggctcaacgtatcaatgaacagaaggaagctgacgccttggaggacgccgacgctgaggatctcacgaatgcagatattgccaaaatcaaaactgcgtcaagcgcatcatccgatctcgacggaaaacccacaaccattgaccgcacgggcacccacaagtctgtttccagcgcgattctttctaaaagaccccccgaaacaactccgaaatactcattatggacgctgctcaaatttgttgcttccttcaaccgccctgaaatcccgtacatgctcatcggtcttgtcttctcagtgttagctggtggtggccaacccacgcaagcagtgctatatgctaaagccatcagcacactctcgctcccagaatcacaatatagcaagcttcgacatgatgcggatttctggtcattgatgttcttcgtggttggtatcattcagtttatcacgcagtcaaccaatggtgctgcatttgccgtatgctccgagagacttattcgtcgcgcgagaagcactgcctttcggacgatactccgtcaagacattgctttctttgacaaggaagagaatagcaccggcgctctgacctctttcctgtccaccgagacgaagcatctctccggtgttagcggtgtgactctaggcacgatcttgatgacctccacgaccctaggagcggctatcattattgccctggcgattgggtggaaattggccttagtttgtatctcggttgtgccggttctcctggcatgcggtttctaccgattctatatgctagcccagtttcaatcacgctccaagcttgcttatgagggatctgcaaactttgcttgcgaggctacatcgtctatccgcacagttgcgtcattaacccgggaaagggatgtctgggagatttaccatgcccagcttgacgcacaaggcaggaccagtctaatctctgtcttgaggtcatccctgttatatgcgtcgtcgcaggcacttgttttcttctgcgttgcgctcgggttttggtacggagggacacttcttggtcaccacgagtatgacattttccgcttctttgtttgtttctccgagattctctttggtgctcaatccgcgggcaccgtcttttcctttgcaccagacatgggcaaggcgaagaatgcggccgccgaattccgacgactgttcgaccgaaagccacaaattgataactggtctgaagagggcgagaagctcgaaacggtggaaggtgaaatcgaatttaggaacgtgcacttcagatacccgacccgcccagaacagcctgtcctgcgcggcttggacctgaccgtgaagcctggacaatatgttgcgcttgtcggacccagcggttgtggcaagagtaccaccattgcattgcttgagcgcttttacgatgcgattgccgggtccatccttgttgatgggaaggacataagtaaactaaatatcaactcctaccgcagctttctgtcactggtcagccaggagccgacactgtaccagggcaccatcaaggaaaacatcttacttggtattgtcgaagatgacgtaccggaagaattcttgattaaggcttgcaaggacgctaatatctacgacttcatcatgtcgctcccggagggctttaatacagttgttggcagcaagggaggcatgttgtctggcggccaaaagcaacgtgtggccattgcccgagcccttcttcgggatcccaaaatccttcttctcgatgaagcgacgtcagccctcgactccgagtcagaaaaggtcgtccaggcggctttggatgccgctgcccgaggccgaaccacaatcgccgttgcacaccgactcagcacgattcaaaaggcggacgttatctatgttttcgaccaaggcaagatcgtcgaaagcggaacgcacagcgaactggtccagaaaaagggccggtactacgagctggtcaacttgcagagcttgggcaagggccattga

SEQ ID NO: 59986 - protein, 1343 aa, Aspergillus nidulans FGSC A4
MSPLETNPLSPETAMREPAETSTTEEQASTPHAADEKKILSDLSAPSSTTATPADKEHRPKSSSSNNAVSVNEVDALIAHLPEDERQVLKTQLEEIKVNISFFGLWRYATKMDILIMVISTICAIAAGAALPLFTAPSTFQRIMLYQISYDEFYDELTKNVLYFVYLGIGEFVTVYVSTVGFIYTGEHATQKIREYYLESILRQNIGYFDKLGAGEVTTRITADTNLIQDGISEKVGLTLTALATFVTAFIIAYVKYWKLALICSSTIVALVLTMGGGSQFIIKYSKKSLDSYGAGGTVAEEVISSIRNATAFGTQDKLAKQYEVHLDEAEKWGTKNQIVMGFMIGAMFGLMYSNYGLGFWMGSRFLVDGAVDVGDILTVLMAILIGSFSLGNVSPNAQAFTNAVAAAAKIFGTIDRQSPLDPYSNEGKTLDHFEGHIELRNVKHIYPSRPEVTVMEDVSLSMPAGKTTALVGPSGSGKSTVVGLVERFYMPVRGTVLLDGHDIKDLNLRWLRQQISLVSQEPVLFGTTIYKNIRHGLIGTKYENESEDKVRELIENAAKMANAHDFITALPEGYETNVGQRGFLLSGGQKQRIAIARAVVSDPKILLLDEATSALDTKSEGVVQAALERAAEGRTTIVIAHRLSTIKTAHNIVVLVNGKIAEQGTHDELVDRGGAYRKLVEAQRINEQKEADALEDADAEDLTNADIAKIKTASSASSDLDGKPTTIDRTGTHKSVSSAILSKRPPETTPKYSLWTLLKFVASFNRPEIPYMLIGLVFSVLAGGGQPTQAVLYAKAISTLSLPESQYSKLRHDADFWSLMFFVVGIIQFITQSTNGAAFAVCSERLIRRARSTAFRTILRQDIAFFDKEENSTGALTSFLSTETKHLSGVSGVTLGTILMTSTTLGAAIIIALAIGWKLALVCISVVPVLLACGFYRFYMLAQFQSRSKLAYEGSANFACEATSSIRTVASLTRERDVWEIYHAQLDAQGRTSLISVLRSSLLYASSQALVFFCVALGFWYGGTLLGHHEYDIFRFFVCFSEILFGAQSAGTVFSFAPDMGKAKNAAAEFRRLFDRKPQIDNWSEEGEKLETVEGEIEFRNVHFRYPTRPEQPVLRGLDLTVKPGQYVALVGPSGCGKSTTIALLERFYDAIAGSILVDGKDISKLNINSYRSFLSLVSQEPTLYQGTIKENILLGIVEDDVPEEFLIKACKDANIYDFIMSLPEGFNTVVGSKGGMLSGGQKQRVAIARALLRDPKILLLDEATSALDSESEKVVQAALDAAARGRTTIAVAHRLSTIQKADVIYVFDQGKIVESGTHSELVQKKGRYYELVNLQSLGKGH

SEQ ID NO: 59987 - DNA, 3855 bp, Aspergillus nidulans FGSC A4
  CDS (1)..(3855)
atgaagtccacggctgagagtaaagagactccgtctcaggacgagtcgaccaccagtgtaccatgcacggaggcgcctctggtcgaggaaggggaggaagcaagctttggcgcatacaagaggatctttacattcgccggcaggacagaacttatccttcaggccgttgctatccttgctgcatgcgcctctggagcaggaattgcgcttcaaaacctcatcttcggccagttcgtcaccgtcatcaccgatttcaccaacggaatctcaacgccggcagactttcgtgacaatgccgccgagttggccctctactttgtatacctgggcatcgcgcggctcgtcctctcctacacctacaacaccctcctaacctacgcggcctaccgcatcgtccgcaatatccgacacgcctatctcaaagcggcgctgagccaagaagtggcatactacgatttcggtagcgggggctccatcgccgcgcaggcaacttcgaacggcaaactgatccaggccggcgcctcggataagatcggtcttctcttccagggcctcgcagcattcgtgacggctttcattatcgcgtttgtggtgcagtggaaactcactctgatctgcatctgcatccccgtagccacgatcggcacgacgggggtggtagctgcggtcgaggctgggcacgagacgaggatcttgcagatacatgcgcaggcgaattcgtttgccgagggtattctggcgggtgtgaaggctgttcatgcttttgggatgcgggatagtctggtcaggaagtttgatgaatatctggtggaggcgcataaggtcggtaagaagatctcgccgctgcttggtcttctcttctcggcggagtatacgatcatctaccttggatatgggctggcgttttggcaggggatccatatgttcggcaggggggagattgggactgctggggatatctttacggttttgctctctgtcgtcattgcgtcaatcaacctgactttactggcgccgtattcaattgaatttagcagggctgcttcagcggctgcgcaactgttccgactcatagatcgagagtctgaaatcaacccatacgggaaggaaggcctcgagccggaacgggtattaggcgacgtcgagctcgagaatgttacgttctcgtatcccacgaggccggggattaccgtcctcgataacttcagtctcaaggtcccagcgggaaaggtgactgccctggtagggcaatctggatcggggaagagcacgatcgtgggattgctcgagcggtggtataacccgacctctggggcgatcagactcgacgggaacctgatcagtgagctcaatgttggctggctgcggaggaatgtgcggctcgtacagcaggagccggtgctcttccagggaagcgtgttcgataacatcaggtacggcctcgtcgggacgccgtgggagaatgcctctcgggaagagcagatggaacgggtgcaggaggccgcgaagttggcatatgcgcacgaattcatctctgagctgaccgacggatacgatacgctgatcggcgaacggggtggtctgctttctggaggccagaagcagcgggttgcgattgcccgcagcgtcgtttctcaaccgaaggtccttctgctggatgaagcaaccagtgctcttgatccgcatgcagagacgattgttcagaaggctctggacaaagcagctgaggggcgcacgacgattgtcattgctcacaaacttgctacgatccgcaaggcggacaatatcgttgtcatgagcaagggtcacattgtcgagcaaggcacacacgagtcactgatagccaaggacggcgtctatgccggtctggtcaaaatccagaacctggcagtgaatgcttcagcacatgacaatgtaaatgaggagggtgaaggcgaagatgtcgctctcctggaggtcaccgaaacagcagtaacccgctacccaacctccatccgcggtcgaatgaactccataaaggaccgcgacgattatgagaaccacaagcacatggatatgctggccgccttagcttatctcgtccgcgaatgtccagaactgaaatgggcctatctcgtcgtgctactggggtgtcttggtggttgcgccatgtaccccggccaagctatcttgatgtctcgcgttgtcgaggtcttcacgctctcgggagacgctatgctagacaaaggagacttctatgccagtatgctgatcgttctcgcggccgggtgtctgatctgttacttagctgtcggatatgcaaccaacactatagcccagcatcttagtcattggtttcgacgcctcattctgcacgacatgctgcgacaggatatccagttctttgaccgtgaagagaacactaccggtgcgctggtaagccgtatcgattcgtacccgcatgcaattctcgaactgatgggctacaacatcgccctggtcgtgattgctgtcctgcaggtggtaacctgtggcatcctggccattgcattctcctggaaactagggctggtcgttgtctttggcggtattccaccccttgtcggtgctgggatggtacgaatccgcgtcgactcccgcctcgatcgccagacatcgaagaaatatggcaccagctcgtccattgcctctgaagctgtaaacgctatccggaccgtttcgtcccttgcaatcgaagagacggtgctacgtcgatacacggaggaactagaccacgctgtctcgtcttcggtgaaacccatggctgccacgatgatttgtttcgggctgacgcagtgcattgagtactggtttcaggcgctgggattctggtatgggtgtcgtcttgtgtcgctgggggagactagcatgtatagtttctttgtcgcattcctcagtgtgttctttgcgggtcaggcgtcagcgcagctgttccagtggtcgaccagtattacaaagggaatcaatgcgacgaactacatcgcttggttgcaccagctccaaccaacagtgcgcgagacgccggagaaccacgataaaggccctggatctggggcgccgattgctatggacaatgtgcgcttctcgtaccctctacggccagacgcccctatcctgaaaggggtgaatctgaagataaacaaaggccaattcatcgctttcgtcggctcctccggctgcggcaaatccaccatgattgccatgctcgagcgcttctacgatccaacaacagggagcatcacaatcgacgcttccaccctcaccgacataaaccccatatcctaccgaaatattgtggcactggtgcagcaagagccaacccttttccaagggacaatacgggacaacatctcgcttggcgtcttcaacccgaatacgcagcctttcttttctgataaggatgcagtgaagtccgtgtctgatgagcagattgagtcggccctccgcgcagctaatgcctgggactttgtctcctcattgccgcaggggatctacacgcccgctggctcaggcgggtcccaactctctggggggcagcggcaacgcattgccattgcccgcgcgctcatccgagatccaaagatcttactccttgacgaggctacgagtgccctggatacagagagtgagaagatcgtgcagaaggctctcgagggggcggccagggacggggaccggcttacggttgctgttgcgcatcgattaagcacgattaaggatgctaatgttatctgtgtattctttggaggaaagattgcggagatgggaacgcatcaagagttaatagttaggggggggctgtatagacggatgtgtgaggcgcaggccttggactaa

SEQ ID NO: 59988 - protein, 1284 aa, Aspergillus nidulans FGSC A4
MKSTAESKETPSQDESTTSVPCTEAPLVEEGEEASFGAYKRIFTFAGRTELILQAVAILAACASGAGIALQNLIFGQFVTVITDFTNGISTPADFRDNAAELALYFVYLGIARLVLSYTYNTLLTYAAYRIVRNIRHAYLKAALSQEVAYYDFGSGGSIAAQATSNGKLIQAGASDKIGLLFQGLAAFVTAFIIAFVVQWKLTLICICIPVATIGTTGVVAAVEAGHETRILQIHAQANSFAEGILAGVKAVHAFGMRDSLVRKFDEYLVEAHKVGKKISPLLGLLFSAEYTIIYLGYGLAFWQGIHMFGRGEIGTAGDIFTVLLSVVIASINLTLLAPYSIEFSRAASAAAQLFRLIDRESEINPYGKEGLEPERVLGDVELENVTFSYPTRPGITVLDNFSLKVPAGKVTALVGQSGSGKSTIVGLLERWYNPTSGAIRLDGNLISELNVGWLRRNVRLVQQEPVLFQGSVFDNIRYGLVGTPWENASREEQMERVQEAAKLAYAHEFISELTDGYDTLIGERGGLLSGGQKQRVAIARSVVSQPKVLLLDEATSALDPHAETIVQKALDKAAEGRTTIVIAHKLATIRKADNIVVMSKGHIVEQGTHESLIAKDGVYAGLVKIQNLAVNASAHDNVNEEGEGEDVALLEVTETAVTRYPTSIRGRMNSIKDRDDYENHKHMDMLAALAYLVRECPELKWAYLVVLLGCLGGCAMYPGQAILMSRVVEVFTLSGDAMLDKGDFYASMLIVLAAGCLICYLAVGYATNTIAQHLSHWFRRLILHDMLRQDIQFFDREENTTGALVSRIDSYPHAILELMGYNIALVVIAVLQVVTCGILAIAFSWKLGLVVVFGGIPPLVGAGMVRIRVDSRLDRQTSKKYGTSSSIASEAVNAIRTVSSLAIEETVLRRYTEELDHAVSSSVKPMAATMICFGLTQCIEYWFQALGFWYGCRLVSLGETSMYSFFVAFLSVFFAGQASAQLFQWSTSITKGINATNYIAWLHQLQPTVRETPENHDKGPGSGAPIAMDNVRFSYPLRPDAPILKGVNLKINKGQFIAFVGSSGCGKSTMIAMLERFYDPTTGSITIDASTLTDINPISYRNIVALVQQEPTLFQGTIRDNISLGVFNPNTQPFFSDKDAVKSVSDEQIESALRAANAWDFVSSLPQGIYTPAGSGGSQLSGGQRQRIAIARALIRDPKILLLDEATSALDTESEKIVQKALEGAARDGDRLTVAVAHRLSTIKDANVICVFFGGKIAEMGTHQELIVRGGLYRRMCEAQALD

SEQ ID NO: 59989 - DNA, 5598 bp, Aspergillus nidulans FGSC A4
  CDS (1)..(5598)
atggagaatacttctgtttcaaaacctagtcctggggcagaagtgccggtcgaaacacaaaaggaatcggcgacagggatggcaacgccctcgccgtcgacggccagcgagaacgacgacggctccaatgataaagagaccaagactcccttgttcgcaagctacgctgtatgcttaggctcttgtttgcatatgctcaactggcgttctgacagctatctagcgaatcctctcgtacgggaccggtcaccatggttggcttctcttgatcctcggccttggatgtgcaatgggatcaggaacggcaggtctcatttccacatgtgcaccgctattcctaacaagtcgcagaccctccccctaatgaatgtcatctttggcaaactcgttggcgacttcaatgcatatttcattccagactcgggagtgacagacctctatctcatctatctcttcatcggcaagtttgttttgacgtacgtctacatgctctgtttccgtatgatcagcctgaaagcgtcctcgtccctccgactgtcctacatgtcctccctcttcagccagcccgtcagcaaactcgacgctatctccgtgggtagcgtaacaaacaccatcacctccctctcaaatacgatgcagcagagcgtttccgatcgcctggcaatgctcttccagtcggtcgccctgctgatcgccgcatacgcagtagctttccggtactcctgggcactgacgctcgttgtctcctcagccatcctcttcgtggtgctagcattcagcgtcacgctcccgatcatgatttctggccagcggagtgttgatctcgcggatgagcagcatgcctcgatcgcgagtgaggtcttcggttctatccggacagtgttctctctcggcgcggacggccccctgtcacgaaagtacagcgagtgggtcgatgaggcgcggaagcgcgggcggcgcatggcatttgtcacgggcattcatctggcgatacttttcttcagcatgtactgcagttttgcgcttgccttctggtttggcatcaagctattccgcgagggcaatattcctaatgtcgggacagtgataactgtcttcttctctgtccttctggtggtgacgatcatgggcggcattatctcacctctaatggccatctcaaaagccgtcagcgcctcggcggcattcttttccgttatcgatgccgagaaactaccgagcggcggtttcaaggagcccgaggtatcgagccagtcggatattgtctttgagaatgtgacgtttgcgtatccttcgagacctagcgtgtctgtcttgaagggctttagtgctgtgtttcaacgtgggaagacaacggcaatcgttgggccttcgggatcaggaaaaagcacgattgtcacgttgctggagcggtggtatcaactcgacccatccggtgacggagaaaaaatgtctggggagatcaggatcaatgaccgaaacattaacagtttagacctcaagtggtggaggacacagatcggcctcgtgcagcaggagccctttatgttcaacgacacagtctacaacaacgtcgcctttggactaatcggatcacaatgggaagatgcttctgaagaggtcaagagaggcctcgtcgaaaaagcatgcaaggaagcatttgttgacgaatttgttcagcgccttccttcaagatactccacgctcatcggggaaaatggcttaacgctaagtggcggccaacgccaacggctaacaatagcgcgcggcatcgtttctaaccctccgatcttgatactggacgaagcaacgagctctattgatgtgagaggagaaaggatcgtgcaggcggccctaaaccgtgtctcaaaggaccgcacgacaatcatgatcgcccatcgactgtcgactgtgaggaacgccgatcggatcattgtgcttagggatggggagaatgttgaggagggaagccatgaagagttactaaagagagaaggagtttacagtggccttgtcaaggcgcagctattagggacattttacggcgcggatggctttgaggacagtgagcacaatgagtgggcggcaagtgaggaaaagaacgaaggggagctcaactccataccagaggaagctccggcgaagaagatgggcggtttcatgagcttgagtgccattctctacgaacaacgggcctactggatgctatacatcgttatcctcgcggcggcggccggctctggatccggcttcgctctccaaagctacctctttgcgaaactgatcgaggtcttcaatttcaccggtcagaggctgatcgatgccgccaacttctgggcattgatgttcttcgtcctagccctagctgtgggagcctgttactttatactagggtcctgctctgtcattgtctcgcattttattgcatccttctaccgaaaagactacttcacgagcctcatccgaaaaccggtccccttcttcgactctgcttccaacagcagcggaaccctaacatcgaatctctcaagttcggcgaagcaactccaagaactcttcagcgtcaacggtgtctttccgctagtgtccatctttgtcatactcggctgtatctccatctcgttcgcctttgggtggaaactcgctgccgtcgccatcttcgcggcattacctttcatcgccaccgcagcaaatctacgtattcggtacgagacgcagttcgagcttatgaatgctaaagtctatgcggagagctcggctttcgcgaccgaggcaatcaaggcgtttcgcactgtgtctgcgtgcacgatggagggttttattctggaaagatacaaagtcctactcaccgagcaacgagagaaagcactgaaaaaagcctggcttgcgtgcgcggtgtttgccttttcggacagtgtagatttctgtgcgatggcgctgacgttttggtacggcgggaaactccttggttcaagagagtacgacctcgtccagttcttcgtcgtctacattgctatcattcagggcgggcagatggctgggatgatgttcagctcaggcgcggatctcgcacaggcaaaggcctctgctgccaggattttcatggcgcggacgccgtctgcaaccatcagtactcaagatcctgcaatcacacctccagacgcaagagcaccatcagatgcgagtcttgaattctgcagtgtttccttccgctatcccttccgcaaagcgccagtctttgcagacctcaatcttcgaatcgaaagcgggcaatttgttgcattcgtcgggccttcggggtgcgggaaatcaacactcatatccctgatagagcggttctacgagcccactgagggcagcatactgtttggaggagtgccgatcaacacgcttgatattgtatcctaccgcaggaacctatctctcgtcgcgcaagacccgaagctgttcaacgccactatacgcgagaatctctgtctgggaattgacccagacaatcatgaacaggaccatgaccgtgatctcgaggagaggatgatatccgcctgtacttccgccgagatccacccattcattctctccctgcccgatggctacaacacagcgctcggaacaaacgcctcctcgtcggcatctctaagcggcgggcagaagcagcggctctgtatcgcccgcgcgttactccggaacccacgagtattgctcctagacgaagcaacttctagtctggactcgcagagcgaaaagcttgtgcagcaggcgatggagaaactagctgagagtcgagatttgacgatcattgctgttgcgcatcggcttgccactgtacaaaaggcagatgtcatttttgtttttggcgaggacgggactaaagctgggtcgagggtattggagaaggggactcattcggagctgctggagatgaggggggtatattggcagatgtgtcaggctcaggcactggatcgatgtcagcatttagcgtccatagcgggtcagagacatcaaagggcgggttgggtgccgtcactctatataaacaccagagaaagtgtcgaatggcttctcaatcaagatattctacccacatcttcagactctatttcgcctaaacgcaatggtgagcgtcgcagtcgccggcggactggaggtgtcggccgcactatcgtcgaatccctaagtcgatctcgtcataagacattcgtcttctgcgaaagagccgttaaagacccgccacaattaaaggactatctcgctgccattgaaaccttgcttgggtccgatctcgaattcacagtctttcataacagaatcttcctcgattacttcatttcgtcaaagacgagattaaagtcatccctgagaccgaatgtcttcgtcattgatattgccaacagatttacagctatccctggtgacgagaatgctcctctgagcctcacgtacaccttcgaccttgcgggattcgtttttcagagtgtgatcctcgaggatggccagtgggaggagcagagtcgggttattgatgacgagatcaactggaatgagttcgtcgatttggcagaggaaatattgggctgcaaattcagagtccactacgacccgatcgagaaactggagaccttgaatatcacagagttgccttgccacaaagccctgtacgaacacttccccaaggagaggtttcgctggttcaaggcgatctttgaactgttcatggtggatgggggatcaaggcttgagagacaaggaagcttgaatgagaggtttccagaggttatacctgtctcggttaggaatgtgctaagccagcgtttgcgagcactgcgctctcacagtcccaaggggagagctacgattctgatggggcatactacagcgaatccgagtccgactcagactcttcagactcaacaaccggtaacgcccacctatctgcggcgagaagccctagtccgcctccatcacaccgtctctaacaagcaaccatcatctaccaggtcagccgcgttctcggtctgggtctatacggatgatgcttatggtgggtatgggacgtatgttgaccaggtgcttttgcagggggttgcgaccgcgacagaggcgccgacgacggtcacccatacggtcgacgttgaggcgacgccgacggcggaaacggtgggtgaagagggaatagttcagacacagcagtcggacggagacgacgggctctcaacaggcgcaaaggcaggaataggggttggagtcggggctggcgctctcatcctcgtagcgataatcggcttcttcctgtaccgtcgccgaagacgacctgagaaccaaccgcccaagacaatccgcgagatttcaacaattggaccggggtctgtgtctgctgaatttgcgagtgcgaatgcgaatggaggaaacccggcagtttacactgggaatgcatttgcttcggagttgcatgctgacagtgatacgaggcctgctagtctgcctatgcgttcgccgctctccgatgcgggctccaactcggtgtctggaatggggtcggtatctgcgaggcattcgggggaaagggagagggagaggtacgagttggggggttga

SEQ ID NO: 59990 - protein, 1865 aa, Aspergillus nidulans FGSC A4
MENTSVSKPSPGAEVPVETQKESATGMATPSPSTASENDDGSNDKETKTPLFASYAVCLGSCLHMLNWRSDSYLANPLVRDRSPWLASLDPRPWMCNGIRNGRSHFHMCTAIPNKSQTLPLMNVIFGKLVGDFNAYFIPDSGVTDLYLIYLFIGKFVLTYVYMLCFRMISLKASSSLRLSYMSSLFSQPVSKLDAISVGSVTNTITSLSNTMQQSVSDRLAMLFQSVALLIAAYAVAFRYSWALTLVVSSAILFVVLAFSVTLPIMISGQRSVDLADEQHASIASEVFGSIRTVFSLGADGPLSRKYSEWVDEARKRGRRMAFVTGIHLAILFFSMYCSFALAFWFGIKLFREGNIPNVGTVITVFFSVLLVVTIMGGIISPLMAISKAVSASAAFFSVIDAEKLPSGGFKEPEVSSQSDIVFENVTFAYPSRPSVSVLKGFSAVFQRGKTTAIVGPSGSGKSTIVTLLERWYQLDPSGDGEKMSGEIRINDRNINSLDLKWWRTQIGLVQQEPFMFNDTVYNNVAFGLIGSQWEDASEEVKRGLVEKACKEAFVDEFVQRLPSRYSTLIGENGLTLSGGQRQRLTIARGIVSNPPILILDEATSSIDVRGERIVQAALNRVSKDRTTIMIAHRLSTVRNADRIIVLRDGENVEEGSHEELLKREGVYSGLVKAQLLGTFYGADGFEDSEHNEWAASEEKNEGELNSIPEEAPAKKMGGFMSLSAILYEQRAYWMLYIVILAAAAGSGSGFALQSYLFAKLIEVFNFTGQRLIDAANFWALMFFVLALAVGACYFILGSCSVIVSHFIASFYRKDYFTSLIRKPVPFFDSASNSSGTLTSNLSSSAKQLQELFSVNGVFPLVSIFVILGCISISFAFGWKLAAVAIFAALPFIATAANLRIRYETQFELMNAKVYAESSAFATEAIKAFRTVSACTMEGFILERYKVLLTEQREKALKKAWLACAVFAFSDSVDFCAMALTFWYGGKLLGSREYDLVQFFVVYIAIIQGGQMAGMMFSSGADLAQAKASAARIFMARTPSATISTQDPAITPPDARAPSDASLEFCSVSFRYPFRKAPVFADLNLRIESGQFVAFVGPSGCGKSTLISLIERFYEPTEGSILFGGVPINTLDIVSYRRNLSLVAQDPKLFNATIRENLCLGIDPDNHEQDHDRDLEERMISACTSAEIHPFILSLPDGYNTALGTNASSSASLSGGQKQRLCIARALLRNPRVLLLDEATSSLDSQSEKLVQQAMEKLAESRDLTIIAVAHRLATVQKADVIFVFGEDGTKAGSRVLEKGTHSELLEMRGVYWQMCQAQALDRCQHLASIAGQRHQRAGWVPSLYINTRESVEWLLNQDILPTSSDSISPKRNGERRSRRRTGGVGRTIVESLSRSRHKTFVFCERAVKDPPQLKDYLAAIETLLGSDLEFTVFHNRIFLDYFISSKTRLKSSLRPNVFVIDIANRFTAIPGDENAPLSLTYTFDLAGFVFQSVILEDGQWEEQSRVIDDEINWNEFVDLAEEILGCKFRVHYDPIEKLETLNITELPCHKALYEHFPKERFRWFKAIFELFMVDGGSRLERQGSLNERFPEVIPVSVRNVLSQRLRALRSHSPKGRATILMGHTTANPSPTQTLQTQQPVTPTYLRREALVRLHHTVSNKQPSSTRSAAFSVWVYTDDAYGGYGTYVDQVLLQGVATATEAPTTVTHTVDVEATPTAETVGEEGIVQTQQSDGDDGLSTGAKAGIGVGVGAGALILVAIIGFFLYRRRRRPENQPPKTIREISTIGPGSVSAEFASANANGGNPAVYTGNAFASELHADSDTRPASLPMRSPLSDAGSNSVSGMGSVSARHSGERERERYELGG

SEQ ID NO: 59991 - DNA, 2058 bp, Candida albicans SC5314
  CDS (1)..(2058): transl_table=12
atgattggaatgaatagattgatattttctaaagcttttacgagttcttgtaaaagtatgggaaaagtaccttttacaaaatctataactagagccaatacccgctatttcaaaccaacatcgatactacaacaaattagattcaattctaaactgtcaacgacaccaaacacagaagccaattctaatggctcaacaaattctcaatcggatacaaaaaaaccacgacccaaattaactagtgaaatcttcaagcttttaagattagcaaagccggaatcgaaattgattttttttgccttgatatgtttagtaacaacttcagctacaaccatgactttacctttaatgattgggaaaattatagacacaacaaaaaaagacgacgatgatgacaaaggcaaagacaacgacgataaagatgacacacaaccaagcgataaattaatatttggtcttcctcaaccacagttttattcggcattaggggtgttattcatagttagtgccagtactaattttggtaggatatatttattaaggtctgtaggggaaagattagtggcacgattgagatcacgtttatttctgaagattttagctcaggatgcttatttttttgacttaggaccctcgaaaactggtatgaaaacgggtgatttgatatcaagaattgcaagtgacacacaaatcatttctaaaagtcttagtatgaatatcagtgacggaataagagcaattataagtggatgtgtgggattatccatgatgtgctacgtttcttggaaattatctttgtgcatgagtttgattttcccaccattaattaccatgtcatggttctatggtagaaaaatcaaggcattgtccaaactaatccaggagaatattggagatatgactaaggtgactgaagagaaattgaatggtgtcaaagtgatacaaacattttctcaacaacaatctgttgttcattcctataatcaagaaatcaaaaatatttttaatagttcaatgagagaggctaaattagcaggatttttctactcgactaacgggttcattggaaatgttaccatgattggattattgataatgggtaccaagttgataggtgcaggagaattaactgtgggagatttgtcaagttttatgatgtatgctgtatatactggtacgtctgtttttggacttggaaatttttatactgagttgatgaaaggtataggggctgctgaaagagtttttgaattagtggaatatcaaccgagaatttccaatcatttagggaaaaaagtggatgagttgaatggagatattgagttcaagggaattgatttcacatatccatctcgtccggagtctggtatttttaaagacttgaatcttcatattaagcaaggagaaaatgtttgtttggtaggaccatcgggaagtgggaaatctactgtgagtcaattgctcttgagattttatgaccctgaaaagggtactattcaaattggcgatgatgttattacagatcttaacttgaaccattatagatcaaaattgggatacgttcaacaagaacctttgttgtttagtggtactatcaaggaaaatatcttgtttgggaaagaagatgctactgatgaagaaatcaataatgctttaaacttaagttatgcttctaactttgtcagacatttaccagatggtctagataccaagattggtgcttcaaattctacgcaattgagtggaggacaaaaacagagagtgtcattagcaagaacattgatacgtgaccccaaaattttaattttagacgaggcaacctcagcattggattctgtcagtgaagaaatagttatgctgaatttgattcaattgaataagaatagaggtgtgacattgatttcaattgcccatcgtttatcgacaattaaaaatagtgatagaattattgtgttcaaccaagatggccagatagtagaggatggtaaattcaatgaattgcataatgatccaaacagtcagttcaataaattgttgaaaagccattctttagaataa

SEQ ID NO: 59992 - protein, 685 aa, Candida albicans SC5314
MIGMNRLIFSKAFTSSCKSMGKVPFTKSITRANTRYFKPTSILQQIRFNSKSSTTPNTEANSNGSTNSQSDTKKPRPKLTSEIFKLLRLAKPESKLIFFALICLVTTSATTMTLPLMIGKIIDTTKKDDDDDKGKDNDDKDDTQPSDKLIFGLPQPQFYSALGVLFIVSASTNFGRIYLLRSVGERLVARLRSRLFSKILAQDAYFFDLGPSKTGMKTGDLISRIASDTQIISKSLSMNISDGIRAIISGCVGLSMMCYVSWKLSLCMSLIFPPLITMSWFYGRKIKALSKLIQENIGDMTKVTEEKLNGVKVIQTFSQQQSVVHSYNQEIKNIFNSSMREAKLAGFFYSTNGFIGNVTMIGLLIMGTKLIGAGELTVGDLSSFMMYAVYTGTSVFGLGNFYTELMKGIGAAERVFELVEYQPRISNHLGKKVDELNGDIEFKGIDFTYPSRPESGIFKDLNLHIKQGENVCLVGPSGSGKSTVSQLLLRFYDPEKGTIQIGDDVITDLNLNHYRSKLGYVQQEPLLFSGTIKENILFGKEDATDEEINNALNLSYASNFVRHLPDGLDTKIGASNSTQLSGGQKQRVSLARTLIRDPKILILDEATSALDSVSEEIVMSNLIQLNKNRGVTLISIAHRLSTIKNSDRIIVFNQDGQIVEDGKFNELHNDPNSQFNKLLKSHSLE

SEQ ID NO: 59993 - DNA, 1686 bp, Candida albicans SC5314
  CDS (1)..(1686): transl_table=12
atgataatattaccgtctgtaaggaatttgttattcctttctagtaggaaaagtataaaggtactacctgctcgacagtatcttcaaaaccttacatttacaagcacaagactcaacttaatacattcaacaccttcatcatatctactaaaaactgcatgcttgtcacaattcagaacgtatgccactacacctctgtctaatttacccccttctcaagttttagtgaaatcacacctcgatgcaactaatttgaaaaagaaagagatcaaacaggaaagatttgaagaatttcaaaaacaagaaaacaaaaaaacgtttaaacagaatcttcgaaccattggaagaattatcaaattggggaaaccagattggaaattgtttgtgttagccattggatttatattatgtgcggttttatacccaactacagccgttaaattagtggggtcagtattagattcatttaacaataacataaaagataaagatggcgatttaattgtctggggatataaagtttctactgtatttgcagtaatgataccgtttatggctgttagtgccgtttgcttctgggccagaatttgggtattgaaattattgggagagagattagtagccagattgcgtgctagagtgatgaaaaacttattgcgtcatgaccaagaattctttgataatgataaacacaaagttggtgatttgatcagtagattatcgagtgatgcatacattgtaagtcgatcaatcacatctaatctacctgatggattgaaaaacttattgtttggattgttaagttcatatatgatgtatctgattaacccgatgctatttggaatgatgttgttaatctcacctccaataacaattggttcagtattttatggtgagaaaatcaggaagttatcgaccaatttacaaaatgccactgctggtttgaccaaagtatctgaagaaactttgaattctataaagttaattaatgcatttactggtgagcaaaaggaattaagaaaatattctacgcgtttgagaagggtagttgatgttgcaaaacaagaagcatttgctcaatcaaactattcagtatctatttattcattgtaccacactggttatttggcatgtgtggccttgggagtttatttgatgacaaaaggtacaatgtcagctggagatgtggtggcattcaccatgtatctggaattcttcaattcagcattatacagtttaactactacatatttggaattaatgaaaggtgccggtgctggtgttaaactttttgcattgatcgattacaaaaacaaggtccctgccatccaaggagaaaaagtaactacatggagacccacttcagtcaaggacgatatacagtttaatgatgtcacatttagttatccaacgcgcccgaatcatacaatatttgaccattgtaatttcaagattgttggaggaactagcacgtgtatagttgcgccaagtggtgcaggaaagtcaacagttgcttcgttattgctcagggcttatgatattcaactgggtgaaattttaattggtggcaaaaatataaaagatattcaagtgcgggatttgagacgttatattgtcgggtattgttcaacaagaaccagtgttattgtcagggactatattggaaaatattggttatggggttga

SEQ ID NO: 59994 - protein, 561 aa, Candida albicans SC5314
MIILPSVRNLLFLSSRKSIKVLPARQYLQNLTFTSTRLNLIHSTPSSYLLKTACLSQFRTYATTPSSNLPPSQVLVKSHLDATNLKKKEIKQERFEEFQKQENKKTFKQNLRTIGRIIKLGKPDWKLFVLAIGFILCAVLYPTTAVKLVGSVLDSFNNNIKDKDGDLIVWGYKVSTVFAVMIPFMAVSAVCFWARIWVLKLLGERLVARLRARVMKNLLRHDQEFFDNDKHKVGDLISRLSSDAYIVSRSITSNLPDGLKNLLFGLLSSYMMYSINPMLFGMMLLISPPITIGSVFYGEKIRKLSTNLQNATAGLTKVSEETLNSIKLINAFTGEQKELRKYSTRLRRVVDVAKQEAFAQSNYSVSIYSLYHTGYLACVALGVYLMTKGTMSAGDVVAFTMYSEFFNSALYSLTTTYLELMKGAGAGVKLFALIDYKNKVPAIQGEKVTTWRPTSVKDDIQFNDVTFSYPTRPNHTIFDHCNFKIVGGTSTCIVAPSGAGKSTVASLLLRAYDIQSGEILIGGKNIKDIQVRDLRRYIVGYCSTRTSVIVRDYIGKYWLWG

SEQ ID NO: 59995 - DNA, 2352 bp, Candida albicans SC5314
  CDS (1)..(2352): transl_table=12
atgataatattaccgtctgtaaggaatttgttattcctttctagtaggaaaagtataaaggtactacctgctcgacagtatcttcaaaaccttacatttacaagcacaagactcaacttaatacattcaacaccttcatcatatctactaaaaactgcatgcttgtcacaattcagaacgtatgccactacacctctgtctaatttacccccttctcaagttttagtgaaatcacacctcgatgcaactaatttgaaaaagaaagagatcaaacaggaaagatttgaagaatttcaaaaacaagaaaacaaaaaaacgtttaaacagaatcttcgaaccattggaagaattatcaaattaggaaaaccagattggaaattgtttgtgttagccattggatttatattatgtgcggttttatacccaactacagccgttaaattagtggggtcggtattagattcatttaacaataacataaaagatgaagatggcgatttaattgtctggggatataaagtttctactgtatttgcagtaatgataccgtttatggctgttagtgccgtttgtttctgggccagaatttgggtattgaaattattgggagagcgattagtagccagattgcgtgctagagtgatgaaaaacttattgcgtcatgaccaagaattctttgataatgatacacacaaagttggtgatttgatcagtagattatcgagtgatgcatacattgtaagtcgatcaatcacatctaatctacctgatggattgaagaacttattgtttggattgttaagttcatatatgatgtatctgattaacccgatgctatttggaatgatgttgttaatctcacctccaataacaattggttcagtattttatggtgagaaaatcaggaagttatcgaccaatttacaaaatgccactgctggtttgaccaaagtatctgaagaaactttgaattctataaagttaattaatgcatttactggtgagcaaaaggaattaagaaaatattctacgcgtttgagaagggtagttgatgttgcaaaacaagaagcatttgctcaatcaaactattcagtatctatttattcattgtaccacactggttatttggcatgtgtggccttgggagtttatttgatgacaaaaggtacaatgtcagctggagatgtggtggcattcaccatgtatctggaattcttcaattcagcattatacagtttaactactacatatttggaattaatgaaaggtgccggtgctggtgttaaactttttgcattgatcgattataaaaacaaggtccctgctatccaaggagaaaaagtgactacatggagacctacttccgtcaaggacgatatacagtttaatgatgtcacatttagttatccaacacgtccgaatcatacgatatttgaccattgtaatttcaagattgttggaggaactagtacttgtatagttgcgccaagtggtgcaggaaagtcaacagttgcttcgttattgctcagggcttacgatatacaactgggtgaaattttaattggcggcaaaaatataaaagatatacaagtgcgtgatttgagacgttatattatcggtattgttcaacaagaaccagtgttattgtcagggactatattggaaaatattgtttatgggttgacttcttctgagatcaacaggttgacaatgcaggatattatcgatgtctccaaacaagccaattgtcatgattttattgttactttccctgatggatatgatactataattgggaacagaggtgcttcattatcgggtggtcaaaagcaacgtatagctattgctagagcattgattaaaagacccaaagttttgattttggatgaagcaacttctgctctcgattccaaatcagaaagtttgataaatgaaacattgaaaaatttgacaaatgaagggtcaatgacaataatttctattgcccatcgattatcaacaatttccaaatcggagtttgttgttgtgctaggcaagcatggccaagtcgttgaaacagggaaatttgttgaattatttagtgatcctgattcagagttgtcgaaattgttagatgaatctgcaacttcacaagcagctgcggatcgacaagaggaagaagaggaattacaacaagagaatcgtcataaaactcaagaagatgaacgagagcatattaatcgagaggcagaagaaatcgaaaatgaacaaattaaatatagtaaagccaagaatctaattgaatcattgccactggatatgaaacaacaattacttacagaaatcaatattgaagaaaaacacgctgattaa

SEQ ID NO: 59996 - protein, 783 aa, Candida albicans SC5314
MIILPSVRNLLFLSSRKSIKVLPARQYLQNLTFTSTRLNLIHSTPSSYLLKTACLSQFRTYATTPSSNLPPSQVLVKSHLDATNLKKKEIKQERFEEFQKQENKKTFKQNLRTIGRIIKLGKPDWKLFVLAIGFILCAVLYPTTAVKLVGSVLDSFNNNIKDEDGDLIVWGYKVSTVFAVMIPFMAVSAVCFWARIWVLKLLGERLVARLRARVMKNLLRHDQEFFDNDTHKVGDLISRLSSDAYIVSRSITSNLPDGLKNLLFGLLSSYMMYSINPMLFGMMLLISPPITIGSVFYGEKIRKLSTNLQNATAGLTKVSEETLNSIKLINAFTGEQKELRKYSTRLRRVVDVAKQEAFAQSNYSVSIYSLYHTGYLACVALGVYLMTKGTMSAGDVVAFTMYSEFFNSALYSLTTTYLELMKGAGAGVKLFALIDYKNKVPAIQGEKVTTWRPTSVKDDIQFNDVTFSYPTRPNHTIFDHCNFKIVGGTSTCIVAPSGAGKSTVASLLLRAYDIQSGEILIGGKNIKDIQVRDLRRYIIGIVQQEPVLLSGTILENIVYGLTSSEINRLTMQDIIDVSKQANCHDFIVTFPDGYDTIIGNRGASLSGGQKQRIAIARALIKRPKVLILDEATSALDSKSESLINETLKNLTNEGSMTIISIAHRLSTISKSEFVVVLGKHGQVVETGKFVELFSDPDSELSKLLDESATSQAAADRQEEEEELQQENRHKTQEDEREHINREAEEIENEQIKYSKAKNLIESLPSDMKQQLLTEINIEEKHAD

SEQ ID NO: 59997 - DNA, 2268 bp, Ustilago maydis 521
  CDS (1)..(2268)
atgtggcgctcggctaccactgtggtcggcatgcgcccttgcgctcgttccgtcgagctcagaagcgtgctgcgatccacatgcctaacatcgcaccaggcgtgctcgacgccaacaaacccgccccgccactcggcttttatggacggatccgcctcgcgctttctctctagcttctcgtcatcgcgtacttttggcacctccagtgtcaagcacgacaagtccaagtcggatgtaccaacgctcgcctctacgcaggcgatcaacaaccgcccagatggcggcacaacaccggccgacaagcacaccacgccacagccaccggctgcttctggtgctcctggtacttctggtgcttctggctccctagcttcgaggctctcgggacgcgtcagggcgctactgcaagcacagctcgccaagtcggcgcgcgattccaaagacggtgcttctgcaccgcctaccaactttccggatctccgacgtctgttttcgcttgcgatgcctgaaaggaaaaacattgtgattgctctggcgctcctgctggtttcttcgtgcatcacgctcactgtaccgttcgcgatcggccggctgatcgactttttcacctcgggccagaacgcgctgttcggtctcgggttcggctcagtggctgcgctgatgcttgtgatctttgccatcggtgcgggtgccaaagcagggagcaacattctgctcgagctttccggggtgcgcgtgatccagggaattcgccaccaggcatatcgatccgcgcttcgtcaggatgtcgaactggcggataaaggtgcaggcgatgtagtgagtcggctgagcgtggataccaacattgtcggcgagtcgctcacctcggacattggagacggtcttcgcgccggcgctaccgtggtgtttgccggtacggccatgtttatgatctcgtccaagttgactctgcttatgatggcggtggtgccaccggctgcaatcggcgctgtcttttacggtcgatacctgcgcgatttgacgctcaagacgcagaatgcggtgggagacatgactcggctcgcagaagaacggctctcaccaccggcgtttcgaaccctgaccgcgttcaatacgcaacgtcaagagttgcgtcgattcgacgagaaaatcggatcgatcgtggatctgcaggtgaaagaggcatacgcatccggcttgttctatggcggtacaggattcgtgggcaactgtgcgattctgaccctgctcacttacggtggacatctggtgagtcgagccgagatctcagtaggtgacctaacgtcgctgctgatgtatacggcgtacttgggaggaggaatggtgagcctcacctcgttttttgcgtcgctcatgaagggactcggtgcaggcgctagggtgtttgatctcattgatcgccaatccaatgtggtgttggggaagggcgaggtgttgcaagtgcgcgctggttcggctggtctaccggttcgatttgaggatgtacactttagctatccgtcgcgtcctgaacagccgatccttcggggtgtcacgctggatatcgaaccgggacagtcgtacgctctggttggagggtccggagcgggaaagtcgtcggtgcactcacttttgctgcgattctacgatcctgtcaagggcaaaatcctggtggcgggacgagatcttgggacgtatcgacccgagagtgttcgcaagcacctggcgtttgtgccgcaagagccgattttgtttgacggaacgttggaggacaacatcaagtacggcaccgactcggcgacgcgagagcaagtagagcatgcagcgcgcatggctggctgtgaatcgttcatctccgagatgccgcgtggtctagatacgctgattggctcgcgtcagctgtctggaggacagcgccaacggatcgccatcgcgcgcgctctggtgcgaaaaccgtcgatccttctactggacgaggcgacttcggctctcgactctgcgtccgagctgatggtgaacgaggcgatccaacacattatccgtcaagccgaaatcaccgtctggatcgtagcacatcgtctgtcgaccatcaagagcgccaacaacatccacgtcctcgaaaacggcaggatcgtagagcacggctcgttccagcagctcgaccgtcccggctcacgattcagagcgctcatggcggctcaactgcaagctgcgccggaccacacggtcgatacgcatccctcgactcgacaggtacgtgattga

SEQ ID NO: 59998 - protein, 755 aa, Ustilago maydis 521
MWRSATTVVGMRPCARSVELRSVLRSTCLTSHQACSTPTNPPRHSAFMDGSASRFLSSFSSSRTFGTSSVKHDKSKSDVPTLASTQAINNRPDGGTTPADKHTTPQPPAASGAPGTSGASGSLASRLSGRVRALLQAQLAKSARDSKDGASAPPTNFPDLRRLFSLAMPERKNIVIALALLLVSSCITLTVPFAIGRLIDFFTSGQNALFGLGFGSVAALMLVIFAIGAGAKAGSNILLELSGVRVIQGIRHQAYRSALRQDVELADKGAGDVVSRLSVDTNIVGESLTSDIGDGLRAGATVVFAGTAMFMISSKLTLLMMAVVPPAAIGAVFYGRYLRDLTLKTQNAVGDMTRLAEERLSPPAFRTLTAFNTQRQELRRFDEKIGSIVDLQVKEAYASGLFYGGTGFVGNCAILTLLTYGGHLVSRAEISVGDLTSLLMYTAYLGGGMVSLTSFFASLMKGLGAGARVFDLIDRQSNVVLGKGEVLQVRAGSAGLPVRFEDVHFSYPSRPEQPILRGVTLDIEPGQSYALVGGSGAGKSSVHSLLLRFYDPVKGKILVAGRDLGTYRPESVRKHLAFVPQEPILFDGTLEDNIKYGTDSATREQVEHAARMAGCESFISEMPRGLDTLIGSRQLSGGQRQRIAIARALVRKPSILLLDEATSALDSASELMVNEAIQHIIRQAEITVWIVAHRLSTIKSANNIHVLENGRIVEHGSFQQLDRPGSRFRALMAAQLQAAPDHTVDTHPSTRQVRD

SEQ ID NO: 59999 - DNA, 2310 bp, Ustilago maydis 521
  CDS (1)..(2310)
atggctgcagcaacgctcattcgcaaggcgctgccacaacttgatgaccccgtggtcgactatctggacgggtacatcaatgatgctgccgacgaccctaccgagaacctctttgagtctgtggtgaaaccgatgctcgaatcggcttgcatctcggatccttcttcctcgaaacaggtacatgatctgcttcccaggctgcttgagctcattcagtcaaagctttcagacgatgctggcgttgccaacgcctctggtctcacccgtctcgacaaggtcgtcgatatgcgcaatacggaaatgtcacgtacatccggcttcgattccgccggcggcgtagatatcgcgctcggaactaccaagcagaaccgttccactgtcgacgtcaagaagctcgaaaagcaggaggccaagacacgtgccaagctcgccaagcgtgcgcaacgcgatctatacgaatcgagtaagctggtggagcaatccaggcagcaggcgagctacgaagagcttttcctcaaagtcaacccgctcgaaagcatcggaaacaagggcaagaacaaagacattcatctacccaacatcgacgtcaactttggcagcaatcgcatcctctccaacgctacgctcacaatcaaggctggacgcagggctggtcttattggtcgcaacggtgtgggcaaatccactctgctgcgcaacatggctttgcgagagatccccatccccacgcagatctcgatcctctacgtcgagcaggagatcgtcggtgacgatacgtcggccattgagagcgttctcaaggccgatgtgtggcgagagaagctgatgcaggaggaagccgaaatcaatgccgagcttcagaagctcgaggaatctgctgcagctgccgttgctgctgccaatgccgccgctgctgcgcaagcaagtggcactgatggcgacgacgacgctgctgctactgctggtctttcacgtggttcggcagtcgacatgccgacgcgacaacgtgagatcaagcgagaagaactctcgtctcgcctcggcgaagtgcaagccaagttagtcgatatggaggctgaaaccggtccagcacgagccgcatcgctgctcaacggtcttggttttaagacggaggatcagtcgcgcgcaacaaaaaccttctccggtggttggaggatgcgtctggcgctcgcacgtgccctgttttgcaaaccggacttgctcatgctcgacgagccttcgaaccatttggaccttaatgctctcgcctggctcgaagactattttgtcaacgactaccaaggcacgctgttggtcgtatcgcacgatcgggcgttcctcaaccgcgtcgccacggacattatccatatgcacagcgaacggctagactactacaaaggcaatttcgaccaattctaccagacgcgcgaagaacgacgtcgcaatcagcagcgcgagtacgaggcggtgcaattgcagcgtgcacagctgcaagcattcatcgatcgatggagggtgaatgccaaccgtgccgcgcaggcgcagagcaagatcaagcagctcgaaaagctacccaatatcgaacctcccgaagacgacgatgtggtacacttccgtctacccgagacggataagttgccattgcctttgctccagatcagcaacgtcacgtttggctaccgaccggaacggctcttgctcaagaatgtcgactttgacattacgcagcaatcgcgtgttgcggtagtcggtcctaacggtgcgggtaagtcgacgctgatgaagttactcatgggagagatcacgcctttgcaaggagaccagaagcgaaacagtcgattgcgtgtcggattcttttcgcagcaccatatcgatcagctcgatctgaacgcgaatccagtgacgtttctcgcgtccaagtatcctggcaagaccgagcaggagtaccgttcgcacctgggcgcttttggaatcaaaggcatgactgggcttcagaaaattgctacgctgtccggaggtcagaaatcgcgtgtcgcctttgcacacatctccatgatgcgtccgcacgtcttgcttctcgacgaacctacgaaccacttggatacagagggtctcgatgcgctctgcgaggctatcaaaaagttcaacggcggcgtcatctgcatttcgcacgacgaaactttcattcataactgtctcgacgagttgtgggtcgtcgacgacggaaaggtcgaaaagttccacggcgatgtcgcagagtacaagcgcatcatcttgtccaagaacaaggatcgcgccgctcgcccttga

SEQ ID NO: 60000 - protein, 769 aa, Ustilago maydis 521
MAAATLIRKALPQLDDPVVDYLDGYINDAADDPTENLFESVVKPMLESACISDPSSSKQVHDLLPRLLELIQSKLSDDAGVANASGLTRLDKVVDMRNTEMSRTSGFDSAGGVDIALGTTKQNRSTVDVKKLEKQEAKTRAKLAKRAQRDLYESSKLVEQSRQQASYEELFLKVNPLESIGNKGKNKDIHLPNIDVNFGSNRILSNATLTIKAGRRAGLIGRNGVGKSTLLRNMALREIPIPTQISILYVEQEIVGDDTSAIESVLKADVWREKLMQEEAEINAELQKLEESAAAAVAAANAAAAAQASGTDGDDDAAATAGLSRGSAVDMPTRQREIKREELSSRLGEVQAKLVDMEAETGPARAASLLNGLGFKTEDQSRATKTFSGGWRMRLALARALFCKPDLLMLDEPSNHLDLNALAWLEDYFVNDYQGTLLVVSHDRAFLNRVATDIIHMHSERLDYYKGNFDQFYQTREERRRNQQREYEAVQLQRAQLQAFIDRWRVNANRAAQAQSKIKQLEKLPNIEPPEDDDVVHFRLPETDKLPLPLLQISNVTFGYRPERLLLKNVDFDITQQSRVAVVGPNGAGKSTLMKLLMGEITPLQGDQKRNSRLRVGFFSQHHIDQLDLNANPVTFLASKYPGKTEQEYRSHLGAFGIKGMTGLQKIATLSGGQKSRVAFAHISMMRPHVLLLDEPTNHLDTEGLDALCEAIKKFNGGVICISHDETFIHNCLDELWVVDDGKVEKFHGDVAEYKRIILSKNKDRAARP

SEQ ID NO: 60001 - DNA, 4776 bp, Ustilago maydis 521
  CDS (1)..(4776)
atgaattgcatcacgaattacgagggtgaaacccacggctcctttgttgttcgtgatgaggaatccttgccctttgttccctactctcagcatagacggcaaagaaattccctttgtccgcctttgcctggtggcacagtgaacaaagctatgatgacttgcatctattctcacgcgaaccggttcagagagaagcacaaaggaacagtaggacaaacggaacagcagcacttggttggcacgtctggcgttactgatccagctggtgacggaagcaaagccaacaccatggcctcagacaaggtcaaagcatgcaagcgtccatcgatatccacatcgtcatcatccaaacgcaccaagccatccatccggcttctcttcagcttcctcacaccacaagatgccgttcttttccttgtacctgctcttctcttgtccatcgtcgtcggcgcattgccaacagtcatgtccaaagtcatcggtaaagcctttgacgaattcaccgcctacaaccccgcgtctttgccaccctcctccatcctgccctcggtgcaccacgatttcctcggcaagatcctcaccagcgtctacgcgcttctcgcgctatcagcagtgacgctggtcatcagcaccgtgtgcgtctcggtatggatctgcttgggcgagcgcaccgcttctcgagtacgtcgttccttgttcgccagtgtcatgtccaagaagatggcgtggtacgacacgggtctcgggctgacctcggaacaagacggagtggaaatctcgcccgctggtctcatgacaaagactgctagggagtgcgatgatctgcgcgtagctgtatcgagagagcttggaaacgtggttcagcatctgaccaccgcgatagcgagtctggtgctggcgctgtatacgtgctggatcttgacattggtgattttggcttcgattcccgtagtgctcatcctcaccattgtaaccgagatcgctgctgcgccttggatgcagcgcgaacgagtcagcacttcgcacgcaacgtcgatggtcgaacgcgcagtcgaggcgatcaacacggtcaaagcgttcaacgcgcaaaccaaggaatccaatcgatttcaggcagaattgaggcaaggctgcacgtcttacagacgaacgctgctttggtgggcgctcagatacggcgctacaggtggaatggtgtttgccacgtttgttcaagggttctggttcggaagccatctggtcagcaagggtaagatcactccaggacaggtcatgacagtcttcatgtcgagcttgttagtgtcatcgacgctcaacgagattgttcaggctctgtcgtacctcgacaagggtaagcttggcgctgccaacctgatcaatctcatcgagtctactgacaccgcgctaagccaagaccgaggcggcgtcgagccatgctcgcataacacagcatcgaagcgttcctcagcatacacggaagataagacatccgctcacacgcgcatccacgactctcgcacgagtctcgccgtctcggtcgctccaacaacatcgatggtcgatatactagagtacaaccctcgcctcgccaaagcggttcccatgccaatcgaagctatcccttccactccatcacccggcatcctgagcccagacaaattcacccaccgtgcctctcctttccattccgccaccagacctgccagacgtggcggtgtacaagggttacgccgcatcataccgtcttactgtcaaggcgagattcacttccgtaacgtcagtttcagctacccgtctcgtcccgacacgtctgccctcgaccgcgtcgatctgtactttgcacctgcagaaatgacgtacgttgttggcggcagcggaagcggcaagagcactattgctcagctgctgctacgtctgtacgagccgacaacaggtacaattcagatcgacgaccagaccatcgaattcctcgatccgcactggtgtcatcaacacatcggagctgttagccaggacgcaatcattttcgacatgagcgttcacgacaacgtggcgctcggtcttgtcggcaagctcgatactcaagtagccgcagatacaggcgtgcctcaagtggaaagggaagcgatcgagtcggcgtgtcgtctagcactgttacacgaattcgtgcgcgatctaccagatggatacgagaccatgttgggtgcaaaagcgacagcgttgtccggaggacagaagcagagacttgccattgcaagggcgagattgcgcgatccatccatcttgatcctcgacgaagccacgtcggctctcgaccctacaacacgacacctcgtatacgaagcaatcaagacttggcgtagaggtaagacgacaatcgtcatcactcacgacctttcgcagatcgatcgtgaagatttcctctacctactcgagaacgggcgtgtggtgcagcaagggtacagaagcgatctcgaggacaagcaaggcttgttcaggactatgtcgctccagcagagtcgtcaacaagaccaagcgcgacaagcgccaaccgagcaagttgagcatccgcacgcacaaggcatcagcatgatggcgacactcgatgagtcatccacccagccaccgagaagaaagtatctctcaaagctaggctgggagcgcgaatcgcgcatcctatcggaacatctctcgttgctcttttctccaaagctcgacggagctccgtcgcatctcaagccattgaagctggccgagagacaggcgatgaatagctactttgagcaagctgaaacactcaaagctttcggatcgagcgctagcaatcgacgtgcacgcaccgctactgttgaacgcaagaaatgggaggccggtgcgttggccaacgtatcaactccatcgacacacctcaaaactgtcttggacgccccggacaatacggatacggagggcttgtcgaataaggcaccgacaatgcggcaagtgtggggcatcctttggcgaaccatcccgagccaagcacttctcatcatcggtatcttactctgtatcatttccggaaccctgactccggtattctcgtaccttctggctcagttgctctccacaatgggtcgacccaaccaagacagcgcggtgctcaaatggagccttctcgtcctgctagtcgcgctccttgaggggattttcgccttcacgcgattcctgctgatggagctgcttgctgacgaatggatctatcgtctgcgctcgtcctcgtacggcaacgttgtctcgcaagaccgaacgttcttcgaccgtcgttccaactcggccgcgcgaatctgccagagcatcatcaaggatgccgaagacgcacgcaacttggttggtcagatcatcggccaactcgcgctcatcacgtccatgatcagcctcggaatcatttgggctcttgtggtcggctggaaacttactctggccggtgtagctttcgggcccgtctttctcgtagctacgctcgtccagtcgagggtggtcgcgttctacgaagcgcgcaacaagctcaagagagaagcggtctcggaacgcttccacgccatggtgctgcacatgcgtgcaatccgatcgatgggtctcgaaaccgttttcgatcgtgcgtatcagttgacggtagaggacgcccaacgaagcggtatgcgctcgtcggtgttttcaggtttcggtcatggattgagcgatgcactgacatacatggccgaagctctcatcttttacgtcggatcaagattgatgatttcaggcgagtacgattttcaaaggatgatgcaggtgtttaacctgatcatctttgcggtgacatttgcggctcagatgttgacgttcctgccagggttcagcaagagcgtcaaggcgctggctgatctggatcggctcttgaagctgaccggcgcaggagtgagtggtacggaagccaagggagacttgaccagccatgtgcgaggtgggatcgagtttcgagatgtcgaatttgcctatgatggtagggccgacgtgaaggtgctcgatggcgtgcaattcgcgatttctgcaggcgaatgcgtggcgatcgtcggagtgtctggatgtggtaagagcacggtagccgctttactacagaagctgtacgaacccgactctggttcgatcctggtggacggtgtgccgatttgtcagctctcgacaccttggcttcgcgaacacataagtgtcgtcggccagaatgccagcctgtttgatctctcgattgcggaaaacattgcgtacggcgtcaactctacgacggacgatcaagcaccacggcgcttgagccaagctttgatggaccaagtcgagcagtccgcgcgcgcagccaacgcgcattcgttcatcagctgtctaccctcggcctactcgacgagcgtcggcggtggctcgagctgcaaactctcgggtggtcaagcgcagcgtcttgccatagcgcgtgcactcatgcgcacccgtgccaagatcctgatcctcgacgaatgcacttcggccctcgacgtagcgaatcagcgcgtgatcgtcgaaaccttgctctcgcccaacgccgagctgaaaaagaggcgcatgacgacgctcgtcatcacgcacaacgtggatatgatgagcaagtgcgacagaatcctcgttctcaagcacggcaaagtggtggaacacggtcgatgggatgacttggtggccatgccccgtggctactttgcttcgctcacccgaggtggtgaatggactggttag

SEQ ID NO: 60002 - protein, 1591 aa, Ustilago maydis 521
MNCITNYEGETHGSFVVRDEESLPFVPYSQHRRQRNSLCPPLPGGTVNKAMMTCIYSHANRFREKHKGTVGQTEQQHLVGTSGVTDPAGDGSKANTMASDKVKACKRPSISTSSSSKRTKPSIRLLFSFLTPQDAVLFLVPALLLSIVVGALPTVMSKVIGKAFDEFTAYNPASLPPSSILPSVHHDFLGKILTSVYALLALSAVTLVISTVCVSVWICLGERTASRVRRSLFASVMSKKMAWYDTGLGLTSEQDGVEISPAGLMTKTARECDDLRVAVSRELGNVVQHLTTAIASLVLALYTCWILTLVILASIPVVLILTIVTEIAAAPWMQRERVSTSHATSMVERAVEAINTVKAFNAQTKESNRFQAELRQGCTSYRRTLLWWALRYGATGGMVFATFVQGFWFGSHLVSKGKITPGQVMTVFMSSLLVSSTLNEIVQALSYLDKGKLGAANLINLIESTDTALSQDRGGVEPCSHNTASKRSSAYTEDKTSAHTRIHDSRTSLAVSVAPTTSMVDILEYNPRLAKAVPMPIEAIPSTPSPGILSPDKFTHRASPFHSATRPARRGGVQGLRRIIPSYCQGEIHFRNVSFSYPSRPDTSALDRVDLYFAPAEMTYVVGGSGSGKSTIAQLLLRLYEPTTGTIQIDDQTIEFLDPHWCHQHIGAVSQDAIIFDMSVHDNVALGLVGKLDTQVAADTGVPQVEREAIESACRLALLHEFVRDLPDGYETMLGAKATALSGGQKQRLAIARARLRDPSILILDEATSALDPTTRHLVYEAIKTWRRGKTTIVITHDLSQIDREDFLYLLENGRVVQQGYRSDLEDKQGLFRTMSLQQSRQQDQARQAPTEQVEHPHAQGISMMATLDESSTQPPRRKYLSKLGWERESRILSEHLSLLFSPKLDGAPSHLKPLKLAERQAMNSYFEQAETLKAFGSSASNRRARTATVERKKWEAGALANVSTPSTHLKTVLDAPDNTDTEGLSNKAPTMRQVWGILWRTIPSQALLIIGILLCIISGTLTPVFSYLLAQLLSTMGRPNQDSAVLKWSLLVLLVALLEGIFAFTRFLLMELLADEWIYRLRSSSYGNVVSQDRTFFDRRSNSAARICQSIIKDAEDARNLVGQIIGQLALITSMISLGIIWALVVGWKLTLAGVAFGPVFLVATLVQSRVVAFYEARNKLKREAVSERFHAMVLHMRAIRSMGLETVFDRAYQLTVEDAQRSGMRSSVFSGFGHGLSDALTYMAEALIFYVGSRLMISGEYDFQRMMQVFNLIIFAVTFAAQMLTFLPGFSKSVKALADLDRLLKLTGAGVSGTEAKGDLTSHVRGGIEFRDVEFAYDGRADVKVLDGVQFAISAGECVAIVGVSGCGKSTVAALLQKLYEPDSGSILVDGVPICQLSTPWLREHISVVGQNASLFDLSIAENIAYGVNSTTDDQAPRRLSQALMDQVEQSARAANAHSFISCLPSAYSTSVGGGSSCKLSGGQAQRLAIARALMRTRAKILILDECTSALDVANQRVIVETLLSPNAELKKRRMTTLVITHNVDMMSKCDRILVLKHGKVVEHGRWDDLVAMPRGYFASLTRGGEWTG

SEQ ID NO: 60003 - DNA, 4413 bp, Ustilago maydis 521
  CDS (1)..(4413)
atgggtgcactttcggctgctactacgctcagcacgccgcctcaagccgctcccgcctcagtcaccgttcctgctcctgctcctgctcctgctcctgctcctgcacagcaactccacgaccagatcatccatctcgagccacaaccagactcggccgccaaaagtgctcaccaagtcattctcagtgacccgcagcctgcccatgctctcgacgacgacaacgacgacaacgacgacaacctcgaggcacagcagcaaagcgtcgcacatgaccctgaaccatccccatctgcccacccacaccaagcgcagccgcagtctcaccatcttcagatcgccatagaaccgaccccgaggcgccaacacacctccacttgccaccgcacctcggagaaaatcgacattggcagcacagactcaacacgatccagctccgatgcgagacagagcgaccagtcgacaacaaagccaagacgcacaaagaggaaaagcaaacatcccgacgatgacgccaccgtcgaccgcgtcggttttcgagagctctaccgctacgccaccgtatgggatcacatctttaacctgattggtctcatcgccgccgccgctgcaggtgccgtgcaaccgctgatgaccatcgtctttggtagtctcaccaccgcctttttggaatactccaacgctctgctctttaacggcgatatcctaaccgcacgcgaccacctcgaccacgagatcgtccacggcgtcctcttcctcgtctacatcggtattgccatgctcgtcgctacctacgtttacatggcagcttgggtctacaccggtgaggtcatcacccgaaggacccgtgaaaaatatctcgaggccatcctccgtcaggacatcgcctactttgaccttgtcggcgccggagagattactactcgcatccagaccgacatccaactcatccaggagggcatcagcgacaagatccccatgtcggtcatgttcatcagcgcctttgtcaccggcttcatcgtcgcctatgtcaagtcctggcagctcgctctcgccttgagctccatgatcccctgcatcatcatcgcaggcgctctcatgaacgcagtcaccgccaagcttcaacaggccgagctcgaccgcgtctccaaggccgcctcgatcgccgaagaggctcttgccaccctccgcaccgctaaagcctttggtatcgaacacgacctcgtccaactctacgaccaaagcaatcgccaagccacccgattcggcatcaagcgctccctctaccaaggcatcggcatgggcgtcttcttctttgtcatctacagcggatacgcactcgcattctactttggcgcaaaactgctcgccagcggtcacattgcctcgggcaccgtcatgaacgtcatcttttcaatcctcatcggcgccttttccatggccatgatggcgcccaacatgcaggctctttcctacgcctttgctgccggcgccaaagtgtttgagaccatcgatcgcgttcctcccatcgacagctccgatcctagcggcttgcgtcccgaagcgtgccaaggccatctcgagtttcaccagatcgactttagctatcccactcgacccgatgtgcctgttctcgaagccttttccctccaggttcctgccggcaaagtcaccgccctggtcggtgcatctggctcgggaaagagcaccatcgtctcgctcgtcgagcgcttctacgatcccgatgcaggcgcagtgctgcttgactgtgtcgacgtgcgtgacctcaacctcaagtggcttcgaacccagatcggccttgtcagtcaggaacccacactcttctccaccaccattcgtgccaacattgctcacggcctcatcaacacacccttccaacacgcctcggagcaggagcagcaaaaactcatcatcgatgcggccaacatggccaatgcacatggcttcatctcgcagctacccaacggctacgacaccatggtaggcgagagaggttttctgctctccggtggtcagaagcagcgcatcgccatcgcccgcgccattgtcaagaacccgagcatcttgttgctcgacgaagccacttcagcgctcgacacccagtcggaagccgtagttcaggatgccttggaacaggccagtcagaacaggactaccatcaccatcgcccatcgcttgtccaccatcaagaatgccgacaagatcgtcgtcatgggcaaaggcgtcatccttgaaaccggacagcacaacgagctgctcgagctcaacggtgcatatgctcaactcgtcgatgcgcaaaacattcgtgccaaggtgggcaacaagattgtcgaagagggcgtcattgacgatgacgatgacgacgacgatcaacaagctgcccagccagccaagtttgtcgcctccaatgccaaagtcccccttgccgtcaccgatgacgcgaaagctgccgtccgacaagaagccaaagccgagatgcccgccggactcgaaaagagcgtcacacatcaaagcgtcgccagtgctattctacatcaacgccaacgcgagcaagccaccagggacgaggagccagaaaaaatcccctcgatcttctacctgctctaccgcctcgccaagatcaaccgcgatcatgttttcaccctctacgtgcccggcgtcatcgcctcgatctgttccggcgctgcctacccgtgcttctcgctcttgttcggccacgcgttgcagaacttttcgctctgcagtgctatcggtggcggagcttgcccggaacctgcacgcagtaccatgttgcacgacgcaaatctctgggcgctctacttttttgtgattgccatcctttgtactttggccatctcgatccagacgtatacgctgatgaaggcatcttgtgtgctcatggagcgcatgcgacggatgtcgcttttcgcctaccttcgagccgacgtatcctaccacgaccaagacgcgcattcttccggagcccttagcaactcgttggctgacaattcgcaaaagatcaacggtctcgtcggagtgacgttgggaaccatcatccagtcgatctcgacgctggtcaccggtgcgatcattgcgcttgccaacggatggaagctatcgctcgtggtgattgcttgcatccctctgacgctctccgcagggtttgtgaggttgcacctcgtcgttctcaaggatgcaaggctcaagacagcctacgagggctcggcggccaaagcatgcgaggcggcgggagcaatgcgggtggttgcctcgcttacacgtgaacaagactgcctcgagatataccgtcgagaactggatgctcctagtcggatatcaagaaacacagcgttctacggcaactttctgtacgctgtttcgcaagcgttgcaattctggatcattggtctcggcttttggtacggctcgaaattgctcatcagtggagagtacacctcgggtcaatactttactattctgaccgcggtggtcttcggatcgatccaagcgtccaacgcgttttcgtttgtgccggacatttcaaatgccaagacagctgcttgggatagcattaagctacttgatatggttcccgagatcgacgtgacgagcgaccaaggagaggtgttggacaaggtcgagggccatgtgaggttggacaaggttcattttagatatccgacgcggccgacagttaaggtgttgcgaggagttgacattgaggtgaagccaggaacgtttgttgcgctcgtaggtgcatcggggtgtgggaagagtacgacggtgcagctgatgcagaggttttacgatccactttcggggagggtgttgatagatggaaaggatattcgcacattgaatctggctgagattcgcaagcacatggcgttggtgtcgcaggaacctacactgtacgatggctcgattgagttcaacatccgattgggggcgttccaagatgcgtcgagcgtgagtatggatgatcttcgtgctgccgctgcatcggccaacatcttagcatttatcgagtctctgccggataagtgggatacgcaggtgggtgcgaaagggacccaactatctggaggtcaaaagcaacgcattgcgattgctagggcgcttatccgcaacccacgcatcttgctgctggacgaagcaacgtcggcgctcgattcagatagcgaaaagctggtccaggaagcactcgataaggcggctgctggccgaaccacaattgccatcgcacataggctcagcaccatctcacgcgctgacctcatctacgtcctcaaagacggcaaagtgcacgaacatggctcccacatcgatcttctgaatcgaaatggcgtctatgcagatctcgtcagaatgcagcacctccacgcacatgattag

SEQ ID NO: 60004 - protein, 1470 aa, Ustilago maydis 521
MGALSAATTLSTPPQAAPASVTVPAPAPAPAPAPAQQLHDQIIHLEPQPDSAAKSAHQVILSDPQPAHALDDDNDDNDDNLEAQQQSVAHDPEPSPSAHPHQAQPQSHHLQIAIEPTPRRQHTSTCHRTSEKIDIGSTDSTRSSSDARQSDQSTTKPRRTKRKSKHPDDDATVDRVGFRELYRYATVWDHIFNLIGLIAAAAAGAVQPLMTIVFGSLTTAFLEYSNALLFNGDILTARDHLDHEIVHGVLFLVYIGIAMLVATYVYMAAWVYTGEVITRRTREKYLEAILRQDIAYFDLVGAGEITTRIQTDIQLIQEGISDKIPMSVMFISAFVTGFIVAYVKSWQLALALSSMIPCIIIAGALMNAVTAKLQQAELDRVSKAASIAEEALATLRTAKAFGIEHDLVQLYDQSNRQATRFGIKRSLYQGIGMGVFFFVIYSGYALAFYFGAKLLASGHIASGTVMNVIFSILIGAFSMAMMAPNMQALSYAFAAGAKVFETIDRVPPIDSSDPSGLRPEACQGHLEFHQIDFSYPTRPDVPVLEAFSLQVPAGKVTALVGASGSGKSTIVSLVERFYDPDAGAVLLDCVDVRDLNLKWLRTQIGLVSQEPTLFSTTIRANIAHGLINTPFQHASEQEQQKLIIDAANMANAHGFISQLPNGYDTMVGERGFLLSGGQKQRIAIARAIVKNPSILLLDEATSALDTQSEAVVQDALEQASQNRTTITIAHRLSTIKNADKIVVMGKGVILETGQHNELLELNGAYAQLVDAQNIRAKVGNKIVEEGVIDDDDDDDDQQAAQPAKFVASNAKVPLAVTDDAKAAVRQEAKAEMPAGLEKSVTHQSVASAILHQRQREQATRDEEPEKIPSIFYLLYRLAKINRDHVFTLYVPGVIASICSGAAYPCFSLLFGHALQNFSLCSAIGGGACPEPARSTMLHDANLWALYFFVIAILCTLAISIQTYTLMKASCVLMERMRRMSLFAYLRADVSYHDQDAHSSGALSNSLADNSQKINGLVGVTLGTIIQSISTLVTGAIIALANGWKLSLVVIACIPLTLSAGFVRLHLVVLKDARLKTAYEGSAAKACEAAGAMRVVASLTREQDCLEIYRRELDAPSRISRNTAFYGNFLYAVSQALQFWIIGLGFWYGSKLLISGEYTSGQYFTILTAVVFGSIQASNAFSFVPDISNAKTAAWDSIKLLDMVPEIDVTSDQGEVLDKVEGHVRLDKVHFRYPTRPTVKVLRGVDIEVKPGTFVALVGASGCGKSTTVQLMQRFYDPLSGRVLIDGKDIRTLNLAEIRKHMALVSQEPTLYDGSIEFNIRLGAFQDASSVSMDDLRAAAASANILAFIESLPDKWDTQVGAKGTQLSGGQKQRIAIARALIRNPRILLLDEATSALDSDSEKLVQEALDKAAAGRTTIAIAHRLSTISRADLIYVLKDGKVHEHGSHIDLLNRNGVYADLVRMQHLHAHD

SEQ ID NO: 60005 - DNA, 2178 bp, Cryptococcus neoformans var. neoformans B-3501A
  CDS (1)..(2178)
atgctgtcaagacaaggcttaggcctggcagcgaacttcatacgtaccccgctccggagacgcttccccgccaacatcccggttcccgcccacgcagcgacattacaaccccaactacgagcgctattgcttcaatcgagactgcgatattactctcaatccagcaagaagcaagagaagatcgataaagagaaggagcctgaggaagaacgcgccccatctcctatccccatacatccacctgcatcaattaaactcccatccgctacagcatctcctactacgtctcccacttctcccggaaaagacgcaaaaccagacacttcttctattctgaagctgctcactctcgcaaagccgcaatggaagcttttaactgtcggcgttgccttcctttcggtctctacagctgtcaacttgtccattccatgggctatcggccgaattatcgatttctttgcgccgggttctgaagaaacgttgctgtttgggttacccctggaacatgctactggagctttggcagtggttctgctgattggtgcggctgccaattcaggtagaagtgtttgccttcgacttgctggacagcgtacggttgctcgcattaggaacaaaacttatgacaagtacctctctatgcctccttcccacatcgaggcctctggggttggtgacgctctttcccgactcggtcaagacacctcgattgtcggccaatcactcagtgaaaatctcggtgaaggtctgaaggctgtcctcggtgctggtgctggtatcggtgccatgtggttgatttctcctactctcacggttgtcatgctttgtatcattccgcctatcgctctcggtacctttttctatggccgatttatccgcaaattatctttgaagactcaagaggcgatgggcggtatgtctaaactcgccgaggaacgtttatctgcccaccgaacgatcacgtcatccaatacccaggctatggagaaaggactttatgcttccaaggtcgatggagtctacaagctccagaaaaaagaaactgtcgccaacggtatcttccaaggtgccaacgaggtcgccggagacattggaatgattggtcttctaatctacggtggtgtgctggtcaagcgaggagaaatctcagttggtgatatgacttcccttttcatctacgtcaactggattgagtggtccctcaacactcttgctggattcttcactggcctcatgaagggtgtcggtgcttctcaacgtatcattggtcttcatgctctcccttctcccatccccctctcatccggtaaactcttgccaaagactgatgccggttcaattgaattgaggaatgtcgacttcgcgtacccttctaggcctgatgccaaggtcctaaatggtctgaacctgaaaatcaataagggagaaagaatcgctcttgttggtggttcgggttccggtaaatcttcgattcaacttcttcttctccgattctacgatcctacttctggctctgtccttttctcggacaacgacattcgaaagtacatccccgagtcctggcgatcgcgcattggtgtggttcaacaggatcccgtattgtttggcggtactattgaagagaacattgcatatggccatcccaatgctactcgaggggacatcaagagagcagcgcaggtcgcccactgtgacttcattgagaagcttcctcaaggctatgacactttgatcaccaaaaacagtttgtctggcggtcaaaggcaaagaatcgccattgctcgtgctcttgttggaaacccctcggttctcctgatggacgaagccacaagtgctttggactctgagtccgaacatgctgtcaacgccgctctcaatgatctcttcgccaactccgacatcactgtcattcttattgcgcaccgtctctcgtccatcgcatccgccaatagggttgtactcttggaagatggtcgggttgtcgaggacggcacttatgaagacttaataacaagaagagacggcaagtttaggaagatggtggatggacagttggccaagatacaggtcggcgaagtggaggaggggcctgaacccgtgtcggaagaagaaggccaacatcaagttgaagaagtcaaagaggatgcagaggtgaaggttgaaaggaagaaggagtag

SEQ ID NO: 60006 - protein, 725 aa, Cryptococcus neoformans var. neoformans B-3501A
MLSRQGLGLAANFIRTPLRRRFPANIPVPAHAATLQPQLRALLLQSRLRYYSQSSKKQEKIDKEKEPEEERAPSPIPIHPPASIKLPSATASPTTSPTSPGKDAKPDTSSILKLLTLAKPQWKLLTVGVAFLSVSTAVNLSIPWAIGRIIDFFAPGSEETLLFGLPLEHATGALAVVLLIGAAANSGRSVCLRLAGQRTVARIRNKTYDKYLSMPPSHIEASGVGDALSRLGQDTSIVGQSLSENLGEGLKAVLGAGAGIGAMWLISPTLTVVMLCIIPPIALGTFFYGRFIRKLSLKTQEAMGGMSKLAEERLSAHRTITSSNTQAMEKGLYASKVDGVYKLQKKETVANGIFQGANEVAGDIGMIGLLIYGGVLVKRGEISVGDMTSLFIYVNWIEWSLNTLAGFFTGLMKGVGASQRIIGLHALPSPIPLSSGKLLPKTDAGSIELRNVDFAYPSRPDAKVLNGLNLKINKGERIALVGGSGSGKSSIQLLLLRFYDPTSGSVLFSDNDIRKYIPESWRSRIGVVQQDPVLFGGTIEENIAYGHPNATRGDIKRAAQVAHCDFIEKLPQGYDTLITKNSLSGGQRQRIAIARALVGNPSVLLMDEATSALDSESEHAVNAALNDLFANSDITVILIAHRLSSIASANRVVLLEDGRVVEDGTYEDLITRRDGKFRKMVDGQLAKIQVGEVEEGPEPVSEEEGQHQVEEVKEDAEVKVERKKE

SEQ ID NO: 60007 - DNA, 2178 bp, Cryptococcus neoformans var. neoformans B-3501A
  CDS (1)..(2178)
atgcttgggaccaccgtcggattccatgtgcatcttcgtcagcagctgttcgcttcggctgtcagagtacggccgatggcaggttcgcgatgcttggacgtcttgccaacgcaaccgcgacttctgctccaacaacgacctcgcctttgtcgtacactgaccaatcgttcatctcaaccgtccatacaacaatcccgatctgacaagtctgcgcaacccgaattagcagagatcgacaccaccactcctgagcggcctgcgaaacgccagtctttaatatcccgcttgacatccaaagtatcccttcaatccaccaagggagcaagctcggagaatggggaaagtgaaacaggggcgagcagtgtaaggaagcttatttctttagcaaaacctgagtccagacatctttccgtggctgtcggcttgttgcttgtatcaagctctgtttccatgcttgtgccattaacaattgggaaacttatagattttttctcaaccaactcatcaacttttcttggcctttcgttccctgttgcggctggactgcttgctgtaactttctgcgttggcgcggctgctaatgctggccgtgctataattatgcgtaccagcggccaaaggatcatcgctcgggttaggaatcaagcttaccactccactttgcgtcaagaacctgaattcgctgaccgatctgctggtgatatcgtctcccgtctgagtgttgacaccaatatcctgggagacagtgttacgagtaacttgtcggatggtttgagagctttgatttcagctactgttggggtggctgccatgttctggatttccgcaaaattgacccttgtgatgctctgtgtcgtccccccggtgtcgttgggtgcagttttctacggtcgctacctccgaaaactttccaacttaactcaagaggctgttggagacatgtccaaagtagctgaagaaaaactcaatgctttcaagactgttgctgcctacaactctcagtctctagaagctaatctattcagccagaaggtggaccgagttttccagctcgcaaagaaggaggcctacatgacaggtatcttttggggtgcaagtgggttgactggaaacttggctatgctgtgtttgctaggctatggtggccatttggtcgccacccaggaaatcactgtcggcgatcttacttcacttttgatgtatagcgcctatgtcggcggctccgtctctgggatgacaggttttttcactggtctcatgagaggtgttggtgctggtggtcgtgtgttctggctcctcgatcgccaatctcatattccccttgaggctggggtcaagttgtctgctgcccgcaatggacctattgtctttgagaacgtgagattccgatatccatcaaggaaggaggtcgaggttctgaagggtatcaacatgaccatcgagcctggtatgagcgttgcgttggttggttcaagtggaagcggaaagagttctatccaagcgttgcttagtcgtttctacgatcctgaagaaggcaaaattacgttcgacggcacagacatccgtgaatttacccccgaatcatggcggtctcggattggtgtcgtcttccaagaccctattctctttgcagggacggtacatgacaacattgcatatgggtcacccgatatcacgcgtgaggacgtggaagaagcagcgagggcggcaaactgcgatttcatctgggacttgcccgacggctttgacactatgatcggcaaggcgagtttgagtggcggacagcgacaaagaatcagtatcgctcgtgcacttgttagaaatccctcgatcttgcttctggatgaagccacctctgcactcgattcaacttcagaaaacgccgtcaacgccgctattgatgatatcattcataaacgcaacatcactgttgtcctcgctgcccatagactgtcaagtattgctatggccgagagggtcgtggttttagagaacggtgtagtgtctgaggctggccggtacgatgttctgtcaaggagagagggtagcagattcaggacccttatggccgcccagctcttggtggagaagaattctggagtcgaagatggtgcgcctgaagaagagggagagggaaataaaagggagctggaagaggcgaggattattgagaagtaa

SEQ ID NO: 60008 - protein, 725 aa, Cryptococcus neoformans var. neoformans B-3501A
MLGTTVGFHVHLRQQLFASAVRVRPMAGSRCLDVLPTQPRLLLQQRPRLCRTLTNRSSQPSIQQSRSDKSAQPELAEIDTTTPERPAKRQSLISRLTSKVSLQSTKGASSENGESETGASSVRKLISLAKPESRHLSVAVGLLLVSSSVSMLVPLTIGKLIDFFSTNSSTFLGLSFPVAAGLLAVTFCVGAAANAGRAIIMRTSGQRIIARVRNQAYHSTLRQEPEFADRSAGDIVSRLSVDTNILGDSVTSNLSDGLRALISATVGVAAMFWISAKLTLVMLCVVPPVSLGAVFYGRYLRKLSNLTQEAVGDMSKVAEEKLNAFKTVAAYNSQSLEANLFSQKVDRVFQLAKKEAYMTGIFWGASGLTGNLAMLCLLGYGGHLVATQEITVGDLTSLLMYSAYVGGSVSGMTGFFTGLMRGVGAGGRVFWLLDRQSHIPLEAGVKLSAARNGPIVFENVRFRYPSRKEVEVLKGINMTIEPGMSVALVGSSGSGKSSIQALLSRFYDPEEGKITFDGTDIREFTPESWRSRIGVVFQDPILFAGTVHDNIAYGSPDITREDVEEAARAANCDFIWDLPDGFDTMIGKASLSGGQRQRISIARALVRNPSILLLDEATSALDSTSENAVNAAIDDIIHKRNITVVLAAHRLSSIAMAERVVVLENGVVSEAGRYDVLSRREGSRFRTLMAAQLLVEKNSGVEDGAPEEEGEGNKRELEEARIIEK

SEQ ID NO: 60009 - DNA, 2073 bp, Strongylocentrotus purpuratus
  CDS (1)..(2073)
atgaagctgtacacaagtgcatcagtgacgctgctcttcagctctgcggatgccttctttggctgcgtcttttacctccatgggaacaattacgagttgttcgataaggatgtacttgactataacttcacacactcaacgtttgaactatggctcttctccatgttgagggtagtgatcctcctgggtgccactataggagtcatcaagaatccaaaaaatggtgccaagggcatcaagatagccaggtatcccgtcggtttcatcaatatcgtcatgatcctgtatgctatagcaaaaatcatgttatatacagagtacagtgatggtaaccatgaggatgacctatggtttttgacattaggtgtgtggacactggtagcatctcttgccatgtacggcctgtgggtatacattctacaagaggcaagaccctctgaggaaagtgaagtaatctggccactattaacaggccgtgttctgaatggagtagtagtagaggcagagcgggcccagttcaaaaatggtatcatattgatgactctgatatcaataggggttgctgctgccgatggagttagaggtgcattcttaaacatggcaatggccagactcaaccaacgtgtcaccaaccatctctttgagtcgattcttaaacaagaactaggcttctttgataagaacaggactggtgctataacatctcgcctcacgtctgacacagttactatcagtgaagcactgagtaatagcatcatcatctttcttcgtagtatcttccaagtgattggttatatcatctttatgatgattatttcctggagactgacgttcatcacactcatctctttccctcttattgctgtcatcactgatgtctttggaagctattatgagaaactgtccaagaaagttcagacttctctggccaacgctaacattgtggctgaagaaaccgtctctagcttgaagacggtacgtagctttgccaatgaagaaggggagaggaagacctactggaataagctccgcatcacctacctgctacgtaagaaggaagctgtagcttatggctttttttcagtcatcaactcgatgtgtgaattgatggtgtttgaattaatgctcttctacggaggccatcttgtcttgaagggcatgctgaatggaggaatgctggtttcttttattctctatcaatttgagcttggagtatgccttgagaaaattgctgatgtgtctactgcgctaataagggctgcaggtgcttctaggaaagtgtttcaactgattgacaggaagcccaccattatgaatgaaggtagggttgcacccaggcagtttgagggtcaattggagttcaaaaatgtcacctttgcctatccaaccagaccgtctattccagtactcaaagatgtaagcttcacggcatcccctggtgaagtgctagccctagttgggcccagtggtggaggcaagagctcctgtatcaatctcatagaacacttctatgagcccacatcaggagaagtgctgatagacggtagaaacgtcaaggactatgatcatgctttcctacatcagaagattgcccttgttggtcaggagccagtactctatgccagatccatccatgataacatctcctacagcctgcaggactgctctaaggaacgtatcgagagtgctgccaagcaagccaatgcacataacttcatcgttcatctcaagaagggttatcagactcagacgggagagaagggacttcagttatcaggctcgggcacagcagttcaaggcttccatgtccaacaagcacttacgaagaactttgacacacgcactgtagtcatcgtagcccatcgtctcagcaccatcgagaaggcagatcgcatcgtggtcattgaccaggggcaggttgtcgagcagggcaggcaccaggaactcatcagctccaatggcctctatgctggacttgtgcgacgccaactttttggacacgataccgatgatgaccatgatgacgatgaggaggagttagagaaaacaatcggcaagaaggaaaaacactga

SEQ ID NO: 60010 - protein, 690 aa, Strongylocentrotus purpuratus
MKLYTSASVTLLFSSADAFFGCVFYLHGNNYELFDKDVLDYNFTHSTFELWLFSMLRVVILLGATIGVIKNPKNGAKGIKIARYPVGFINIVMILYAIAKIMLYTEYSDGNHEDDLWFLTLGVWTLVASLAMYGLWVYILQEARPSEESEVIWPLLTGRVLNGVVVEAERAQFKNGIILMTLISIGVAAADGVRGAFLNMAMARLNQRVTNHLFESILKQELGFFDKNRTGAITSRLTSDTVTISEALSNSIIIFLRSIFQVIGYIIFMMIISWRLTFITLISFPLIAVITDVFGSYYEKLSKKVQTSLANANIVAEETVSSLKTVRSFANEEGERKTYWNKLRITYLLRKKEAVAYGFFSVINSMCELMVFELMLFYGGHLVLKGMLNGGMLVSFILYQFELGVCLEKIADVSTALIRAAGASRKVFQLIDRKPTIMNEGRVAPRQFEGQLEFKNVTFAYPTRPSIPVLKDVSFTASPGEVLALVGPSGGGKSSCINLIEHFYEPTSGEVLIDGRNVKDYDHAFLHQKIALVGQEPVLYARSIHDNISYSLQDCSKERIESAAKQANAHNFIVHLKKGYQTQTGEKGLQLSGSGTAVQGFHVQQALTKNFDTRTVVIVAHRLSTIEKADRIVVIDQGQVVEQGRHQELISSNGLYAGLVRRQLFGHDTDDDHDDDEEELEKTIGKKEKH

SEQ ID NO: 60011 - DNA, 3159 bp, Strongylocentrotus purpuratus
  CDS (1)..(3159)
atgtttgccagagatgacaatgctgagagacgttcgttattggaaaaacacaacggaggagtaaaaaatcaacatgaaggagtcggtacaggaaccaaatctgagaatgttgatgttgtgggagggtcgctggacccggcgagtttgggtgcggctgccggtagtgatggcggcagtggctcagccgtggccgtgccaactatgggacccccgagcgatcgtgctcttgctggcaaatctgtgcttgtagacgaagcttcagatttagttatccattcttctcggttgactgcagcattgtatggttcacaacgtcccgataggccgcaacaaaacagaactaaagtacctcaaaaagttccctttcttagtttgtaccgatatgctacagaacaagactggctcctcctcgtcttgggtgctgtagcggccctagccaatggatcagcatggcctatcctatacctattcctgggactcatgctcgatgattttattatgttcaacacagccaatgtaacgctaacagactttgataatgcaaccatgcacactacaagaacgttattacaatttcctagtggtgctaatgaagatgttcttatagtgtcagatacatttgagcagggcgttcaggagtcttgtatacgttttgccttggttggtctgtctgttatgatctcgtcatacatccagactgcatcatttggactgacgggggaacggcagactaaccgtctcaggaaggcattctttcatgctatcctgcatcaggaaatcagctggtttgattttcatcagacaggagaaatcacctcaaagctttcagatgatgtagagaaagtgaagtcgggttatggagagaatgtaggcatctttcttcagtttttaggacaaatcattgcaggtttcatacttgccttcagtgttagttgggaactaactatagttatcatggcggtactgcctgtcttagtcctatccagtggctttatggctcatgcccaagaggggcgaacgaccctggtgattgcccaccgtctctctacagtccagaatgctgatctcatctttgtgatgaaggaaggtcatgtagctgagtcaggaaaccacaaggagctcatgaacagagagagtatctaccggcaacttgtcacactccagatgttcaaaaagcaagatgaatccattctgagtgatgatgatgtaaggagccttggtcgtcagtcttctcttaatgattcagtgccttcatcaccatcatctgactctgttaagtatagcagtgttaatgatgaactcattgttccagtgaatggcaatgggaaagtacacatgggagaggaggagccttccattaaaaccaagaaaaagaacaagaaacacaagaaagagaaaaccttcacaagtgtgcctaagctctcgtattgggacatcttgagactgaataaacctgagtgtcattacatcatcattggatgcatctttgctgcgttccttggtgcagctctacccaccttggctattcttcttactgagatcattaggatatttagtttgccacccgatgagatggtcgctgcagcttctttctggtccctcatgttcattgtattgggtgtagtgcgagctgttagtatcttcgtcagtatgctcatgttcagtatctcaggagaactccttactctcaggctcagaaagaaagcattctgggcaatcttgagacaagatgcagcgtggtttgatgaacctgagcataacacaggttctttggctaatgtactcgctactgatgcttccaatgttcaaggggctactggtcttcgcatcagcaccctcatgcacgagtttgtgaccgtgctcatcgctgttatcattgcatttatctatggctggcagctggccctgttcacattatgtgctgttcctctcatgacattctggggacgtattcagatggcaatgttaacaggcacccagaaacaagactcacatcttctccaagaagcatcagagattgcaagtgaagcgatagaaaacatcacaacggtatcatccctcaatctggaggaaagaatatatcatttctactgtgaaaaacttcgtgaacctctcaagaaaatccagaagcacaagttcttctttgcctttgcagtttgttgctcccaggcatcagtgttcttcctctttgcaggggcctttaggtttggtggtcatctagtagctatcggtcaaatgtcctcagatgctatgtttaaggtgattattgtgatcacctatgcaggtattgcattaggccaggcagcagcattcatgccagacttcagcaaggctaaaatgtcagcagctaagctcatcacactgattggtctcaaaccaaccatcgataactactccacagaaggactcaagccactaaagattgatggcgccatcaagtgcaataacctgaccttcagataccccaaccgtcctggtagcactattctggacagtctgaatctaaacataaaacctggtcacacaatggctttggttggtgagagtggatgtgggaagagcaccatggttgcgctgatggaacgcttctatgatcctaactgtggatccattcaacttgacgggaatgacctgcgtgacctgaacatcgggtggcttcggtctaatatgagtattgtaagccaggagccagtgttatttgcttgttctatccgtgataacattgcctatggtgtggaagatgagctccctcaggacgaagtggaaagggttgctaagatggctaatatccatgatttcatcatttctctgcctttgggttatgatactctagtaggagagaaaggagctcagttatctggaggtcagaagcaaagagtagccatcgctagagctctggctagaaatcctcgtatccttctgtttgatgaagctacatcagcactggacactgagagtgaacagattgtacagaatgcactggacaatgccatggatggacgaacctcgattgttgttgcccagcgtctcaacaccattcagaattctgaccaaatcgctgttattcgggatggaaacatcgtggagcaaggacgtcatcaggagctggtctcaagaaagggccactactacaccctcacaatgggccaacatagctag

SEQ ID NO: 60012 - protein, 1052 aa, Strongylocentrotus purpuratus
MFARDDNAERRSLLEKHNGGVKNQHEGVGTGTKSENVDVVGGSLDPASLGAAAGSDGGSGSAVAVPTMGPPSDRALAGKSVLVDEASDLVIHSSRLTAALYGSQRPDRPQQNRTKVPQKVPFLSLYRYATEQDWLLLVLGAVAALANGSAWPILYLFLGLMLDDFIMFNTANVTLTDFDNATMHTTRTLLQFPSGANEDVLIVSDTFEQGVQESCIRFALVGLSVMISSYIQTASFGLTGERQTNRLRKAFFHAILHQEISWFDFHQTGEITSKLSDDVEKVKSGYGENVGIFLQFLGQIIAGFILAFSVSWELTIVIMAVLPVLVLSSGFMAHAQEGRTTLVIAHRLSTVQNADLIFVMKEGHVAESGNHKELMNRESIYRQLVTLQMFKKQDESILSDDDVRSLGRQSSLNDSVPSSPSSDSVKYSSVNDELIVPVNGNGKVHMGEEEPSIKTKKKNKKHKKEKTFTSVPKLSYWDILRLNKPECHYIIIGCIFAAFLGAALPTLAILLTEIIRIFSLPPDEMVAAASFWSLMFIVLGVVRAVSIFVSMLMFSISGELLTLRLRKKAFWAILRQDAAWFDEPEHNTGSLANVLATDASNVQGATGLRISTLMHEFVTVLIAVIIAFIYGWQLALFTLCAVPLMTFWGRIQMAMLTGTQKQDSHLLQEASEIASEAIENITTVSSLNLEERIYHFYCEKLREPLKKIQKHKFFFAFAVCCSQASVFFLFAGAFRFGGHLVAIGQMSSDAMFKVIIVITYAGIALGQAAAFMPDFSKAKMSAAKLITLIGLKPTIDNYSTEGLKPLKIDGAIKCNNLTFRYPNRPGSTILDSLNLNIKPGHTMALVGESGCGKSTMVALMERFYDPNCGSIQLDGNDLRDLNIGWLRSNMSIVSQEPVLFACSIRDNIAYGVEDELPQDEVERVAKMANIHDFIISLPLGYDTLVGEKGAQLSGGQKQRVAIARALARNPRILLFDEATSALDTESEQIVQNALDNAMDGRTSIVVAQRLNTIQNSDQIAVIRDGNIVEQGRHQELVSRKGHYYTLTMGQHS

SEQ ID NO: 60013 - DNA, 1941 bp, Tribolium castaneum; identical to SEQ ID NO: 7453
  CDS (1)..(1941)

SEQ ID NO: 60014 - protein, 646 aa, Tribolium castaneum; identical to SEQ ID NO: 7454

SEQ ID NO: 60015 - DNA, 1824 bp, Tribolium castaneum
  CDS (1)..(1824)
atgatactttttggagatgttaccgaagtcattatccaattcgccgagactttgaagtcaaacaattcggaaattaacagaacacaagctgtggacgacttatttaggggcgtaacggactttgcgatttattcctcaagctcagggattgtgatgataattacgacttacttggccgggatacttttcagttcaagtgccttaagacagatcttccatattaggaaattaattctgcaaaagacgttaaacatggacatttcctggtacgaccttaacaagacgggagactttgcgaccactttcacagaaaacttgtcgaaacttgaggaaggaataggcgaaaaagttggcatttttttgtactttgagacgatttttgtcactgggattgtgatggggcttgtgctgggctgggagctggccctaatttgcctcatttcactgccagtgtccttcgctgtcgcgttcttaatctcatggttatccacaaaattctcgaaacaagaactcgaagcctacgctaacgccggtgccatcgctgaggaagttctaagctcggtccggacagttgtagctttcgacggccaaggaaaggaattcgaacgctacgagaagcacctacaagctgccaagaaaaacaacatccgcaaaaacctattcacgggcgtaagtaacgccgttatgtggtttttcgtgttcgcctcctacgccctatcattctggtacggcgttgggttgattttgaaagagaaggaactgccctacgaagagcgagtttacactcctggaaatatggtctccgtgtttttttgtacgttaatggcgtcctggaatttcgggactggcgccccgtatttcgaaattttcgggacggcttgtggcgccgccgccaaagtgttcgagattttggacacaaaacccgacataaacctctccaaaaccaaaggcttgaaaccgaaaaacctgaaaggcgatatcgttttcaaggacgtttccttccattatccttccaggccggacgtcaagattttgcaaaatttcagtattgaaatcaaagccggtcaaaccgtagctctggtcggaagttcgggttgcggaaaatcaacgtgtattcaactgatccaaagattttacgacgctgtgactggcactgtcaaaattgacgacaacaatatcaaagacttaaatttaacatggttgaggagtaaaatcggggttgtaggccaggaaccggcacttttcggggccacaatcgccgagaacataaaattcgggaacgttacagccactcaaagtgatgtcgaacgcgctgccaaaaaagccaacgcccataatttcatccaaaaattgccacgcggttacaataccgtcgttggcgaaagaggggcccaactttccgggggccaaaagcaaagaattgcgatagctagggccttaatacgggaacctaaaatactgttacttgatgaagccacttcggcccttgataccacaagtgaggcggaggttcaagcggccctggacgctgtcagtggcgagtgcaccaccattattgtagctcacagattatcaacaataaggaacgctaaccgaattgtggtcgtttctcacggatcggtgatcgaggaagggacacacagtgagctaatggcgaaaaagggggcttacttcgacttagtacagtcgcaagggttggtcgaaactgaagaaacaaccacagaagaaaaacaaaaacagaacggtgtggtcgacactaaacctaatcaaacggaagttactgaaattatttccactgaaaatgtaagtaatttgctaaattaa

SEQ ID NO: 60016 - protein, 607 aa, Tribolium castaneum
MILFGDVTEVIIQFAETLKSNNSEINRTQAVDDLFRGVTDFAIYSSSSGIVMIITTYLAGILFSSSALRQIFHIRKLILQKTLNMDISWYDLNKTGDFATTFTENLSKLEEGIGEKVGIFLYFETIFVTGIVMGLVLGWELALICLISLPVSFAVAFLISWLSTKFSKQELEAYANAGAIAEEVLSSVRTVVAFDGQGKEFERYEKHLQAAKKNNIRKNLFTGVSNAVMWFFVFASYALSFWYGVGLILKEKELPYEERVYTPGNMVSVFFCTLMASWNFGTGAPYFEIFGTACGAAAKVFEILDTKPDINLSKTKGLKPKNLKGDIVFKDVSFHYPSRPDVKILQNFSIEIKAGQTVALVGSSGCGKSTCIQLIQRFYDAVTGTVKIDDNNIKDLNLTWLRSKIGVVGQEPALFGATIAENIKFGNVTATQSDVERAAKKANAHNFIQKLPRGYNTVVGERGAQLSGGQKQRIAIARALIREPKILLLDEATSALDTTSEAEVQAALDAVSGECTTIIVAHRLSTIRNANRIVVVSHGSVIEEGTHSELMAKKGAYFDLVQSQGLVETEETTTEEKQKQNGVVDTKPNQTEVTEIISTENVSNLLN

SEQ ID NO: 60017 - DNA, 1566 bp, Tribolium castaneum
  CDS (1)..(1566)
atgaataaacccgagtggttccacattttcacagggtgtgtaactgcggttataaacggttcagctttccccatttatgggctagttttcggtgatataatcggtgtgctagccgaccctagagattcttatgttcgcgagcagagtaatatcttttctctgtactttgtgattattgggattgttacagctgtcgctacgtttttgcagatttattattttgccgtcgctggcgagaaactgacgaaacgtctgcgcgcgaaaatgttccgcgcaatgttaaaccaggaaatggcttggtttgaccgaaaggaaaacggggttggggctctttgtgcaaaattgtcaggggaggcggctagtgtccaagggggcgactctcaagtgaatcagaaatatttggaaaactcggcaaagatcgcagtggaagctattgggaacattcgaacgattgcgtccttaggatgcgaggaagtttttcacggctactatgtcaaagagttgactccatacgtggccaatgttaagaagcaaatgcactttagatcggctgttctgggtgttgccagaagcgtaatgctttttgcctacgctgtcgggatgggatatggcgccaaattaatggtggattctgatgtagactacggaacagtcttcatagtttccgaaactgtaatagtcggctcatggtcgatcggtaacgcattttcgttctcccccaacttccagaagggattatccgccgctgaccgaatattctcgcttttgaagcgcgtgcctgaagtgaaaaactcactcgaacctgtctatttaaacgacgtccgagggaacatcgaatactcaaacatttatttctcataccccactcggtcctcagtctcggtactaaacggcctgaacttgaacgtgcttcaaggcaaaaccgtggctttggtgggtgcgagtggttgtggcaaatcaaccatcatccaactgttggaaaggttctacgatccggtctccggcgaggtttccctcgacggagaatcggtcaaaactgtcgacattcaaaacttgcggtcacaccttggcattgtgtcccaagaaccgaaccttttcgacagaacaatagccgagaatattgcctatggggccaacgatcgcacagttggcatgaacgaaatcgtcgaagcggccaaatcggcaaacatccacactttcatatcgtctctaccagggggttatgaaactagtttgggtagcaaaggggcgcagttgtctgggggccaaaaacagcgcgttgctattgctagggctttgattcggaatccgaagattctattgctggatgaagcaacttcagcactcgataacgagagcgaaaaagtcgtgcaagaagctctagataatgcaaagaaaaacaggacttgtatcacaatagcgcacagattgaccacaatccaagacgccgatcttatttgtgtgttaaacgagggagttgttgcagaaatgggaaagcacaatgagttactggacaaaaaggggctctattacgacttctataaattacaaactgggcaaaagtag

SEQ ID NO: 60018 - protein, 521 aa, Tribolium castaneum
MNKPEWFHIFTGCVTAVINGSAFPIYGLVFGDIIGVLADPRDSYVREQSNIFSLYFVIIGIVTAVATFLQIYYFAVAGEKLTKRLRAKMFRAMLNQEMAWFDRKENGVGALCAKLSGEAASVQGGDSQVNQKYLENSAKIAVEAIGNIRTIASLGCEEVFHGYYVKELTPYVANVKKQMHFRSAVLGVARSVMLFAYAVGMGYGAKLMVDSDVDYGTVFIVSETVIVGSWSIGNAFSFSPNFQKGLSAADRIFSLLKRVPEVKNSLEPVYLNDVRGNIEYSNIYFSYPTRSSVSVLNGLNLNVLQGKTVALVGASGCGKSTIIQLLERFYDPVSGEVSLDGESVKTVDIQNLRSHLGIVSQEPNLFDRTIAENIAYGANDRTVGMNEIVEAAKSANIHTFISSLPGGYETSLGSKGAQLSGGQKQRVAIARALIRNPKILLLDEATSALDNESEKVVQEALDNAKKNRTCITIAHRLTTIQDADLICVLNEGVVAEMGKHNELLDKKGLYYDFYKLQTGQK

SEQ ID NO: 60019 - DNA, 3924 bp, Tribolium castaneum
  CDS (1)..(3924)
atggaggacaaacaaagatctcagctcaatcccacaaaacagtcaattcatcctaaacagaaagccagttttttatcaaacgttttcttttgttgggcattacccttgtttgtaaaaggattcaaaaaagacctttccgaggaagatctctacggaccactcaaggcacatgattcaaaacgattaggagaccttttagaagcagcttggattaaggaggaaagtacccgccgtaatccctcattctggcgggctatcatcaaagtttttggacgggagtttggactacttggactatacgttatcgtgatcgaattttttataaaaatgtctcagcccttatttcttggaaaattaatggagtattacacgccaaaccaagagacaatgtccaaaaccaccgcttggtactatgcggtggggattgttgccatgtcctttgctaacgcattattaggccactcttgtgtctttggtctaatgcatctaggaatgaaagtccgagtagcgagttgttcactgatttaccgcaaagctctaagactcagcaaaagtgctttggtcgacaccacagtgggccaaatggtcaatttgttgtcaaacgatgttaaccgtttcgacatgagtgttatccacttgcataatctgtgggtggctccgttccaacttgctgttatggtgtacttgttgtacacgactcttggtttgacctcgcttgttggcgtgggctttttgtgcctttttatacctcttcagatgtacctggccaaaagaatttcagtttataggctccgaacagcactgaaaaccgaccacagagtgcgtctcatgaacgaaatcatttgtggtattcaagtcattaaaatgtacacttgggaaaaaccatttgcaaaattagttcaagtggctaggaagttggaggtacaagaaatcaaggctgcctcctatatccgcgcgatcaacctttccctaaacatattcctaaacagaactgcgattttcctgtgcattttaacgtatattttaacgggtaacacactccattcgcagtacgtctatgtcgtgacttgttattacggcgtcttgagacaatcaatagtcatgtttttgccacaagctatcaccaccttggccgaaactaacgtttccgtgaaaagaatcgagaaatttttaaccgctgaagagctacaagccaggaaacaactcttcaatgggttggaaactcacacgaaagcaaagaacggatccattgctctgattcaggaaaaaccacaaaacgtcggcattcaaatggaaaatgtgtccgtaaaatgggtaactacagcgaccgactacaccttaaacaacatcaccctgagtgtgggttcgcaccagctggtggcaatcgtaggccctgttggaagtggcaaaacaacacttctccacgtgattttgaaagaattatcactgagtcagggaaatttagaagttggggggacaatttcgtacgcctcgcaggaaccgtggctgtttggcggcagcatcaaacaaaacatcctatttgggcaaaaaatggacatgaaacggtacaaagaagtggtgcgggtttgcgccttggagcgcgatttttcgctctttccttatggcgataggacaatagttggggaacgaggggcgatgttgagcggaggccagaaagcccgtatcaacttagcccgagccatatacaaagaagccgacatctacctcctcgatgaccctctctcagctgttgacactcacgtcgggaaacaattattcgaagattgcattaccggttatttgaacagtaaatgcgtagttttggtcacacatcaactacaatatctccgaacagtcaacaaaatttacttactcgacaatggaaaagttgcagctagtgggacacacagcgagttgaaaaactccgatgaagagttccttaaactcctcgaaggcgaaactgaggaagaaatcgacgatgaaaacaaagcttcggtgaaaaaagcaaagtctgtgaagagtctagaaaaattagaaatgccaacggaggtgaaagaacaacgcggaagtggaaacgtgtcgggaaaaatctacaagagctacatgaaagcgggcggaagcattttctcctctttcatctgcatatccctgttcgttttggcacagttgggtgcaagtggtactgattatttcttgtcgttttgggtgaacttggagcaagaccggttgaaaaacaacgaaacgattctcacttctgctgaaattaacgacacgtactacaaagaagaattccgagaactgttttttacttcggagaactgcatgtacatttacactgctttgatcatctttatcattgtcatgaccctgacacggtccttgaacttcttcagattttgtatgaaggcgtcaagaaatttgcacgattggatgttttcaagagttgtccatacttttatgaggttcttcaacaccaattcttctggaaggattcttaacagattttcgaaagatatgggatctattgacgagattctgccacaaactgtggtcgatactttgcaaattggcctaatcgctctttttgtcaatattgttattgccacggtaaacacctggatcctcattcccagtgtgataatatttggattgttttacgcatttcgaatagtatttttggccactagtcgcgatctcaagaggatggaaggaacaacccgcagtccagttttcacacatatgacggcatccctgcaagggttaacgacaataagagcttttggtgctcaagaaatcctccgggctgagttcgaccaacaccaggatctccacagctcggccttttatctgttcttgggatgtaacagaacttttggcttctggttggacatacactgcgtcatctacattggtttagttactcttagtttcctttttgtcggaactgagacttatggaggaaacgtcggtttaggaataactcaagccataactttgacggggatgttccagtggggaatgcgacaatggagcgaacttgaaaaccagatgacttccgttgagcgcgtcgtcgagtacacagaggtcgcagtggaggttgacgatgcctcgaaaaagcctccacaaggttggcccacaatgggagtcatcgaattccgctcggtttcaatgcgatacgcgccagaggagcccttggtgcttaaaaaattaaacttcagagtgaattctggcgaaaaagtgggcattgtggggcggacaggtgccggaaagtcctctttaatctcagctctgtttcgactagctgacattgatggtgccatcctgattgacgacatcgacaccaagcaaatatctctggaatgtctccgctcaaaaatatcaataatcccccaagagcccgttttattctcaggcactctgcggaagaatttggacccttttgacgaattcaacgacgaggagttgtgggatgctttggaagaggttgaattaaagaacgcgatttcggatctcccggccggcttgcactcgaacgtttcggaaggcggaacgaatttcagcgtcgggcaaaggcagctgctgtgcttggccagggctgtggttcgcagtaataaaatattggttttggatgaagctaccgctaatgtcgatccgcaaaccgatgaactgattcagtcgacgatacgcaggaaattcaaggattgcaccgtgttaacaatagctcataggctgcacactgtgatggactcggacaaaatacttgtcatggaggctgggcaagctgctgaattcgatcatccacatgcgcttttacagaacaatgagagcatattttacggactcgtccaacaaacgggaaaagggatggctgagaatcttacgaaaatcgcagaagaggcccatgccagaattcctaaaatgtga

SEQ ID NO: 60020 - protein, 1307 aa, Tribolium castaneum
MEDKQRSQLNPTKQSIHPKQKASFLSNVFFCWALPLFVKGFKKDLSEEDLYGPLKAHDSKRLGDLLEAAWIKEESTRRNPSFWRAIIKVFGREFGLLGLYVIVIEFFIKMSQPLFLGKLMEYYTPNQETMSKTTAWYYAVGIVAMSFANALLGHSCVFGLMHLGMKVRVASCSLIYRKALRLSKSALVDTTVGQMVNLLSNDVNRFDMSVIHLHNLWVAPFQLAVMVYLLYTTLGLTSLVGVGFLCLFIPLQMYLAKRISVYRLRTALKTDHRVRLMNEIICGIQVIKMYTWEKPFAKLVQVARKLEVQEIKAASYIRAINLSLNIFLNRTAIFLCILTYILTGNTLHSQYVYVVTCYYGVLRQSIVMFLPQAITTLAETNVSVKRIEKFLTAEELQARKQLFNGLETHTKAKNGSIALIQEKPQNVGIQMENVSVKWVTTATDYTLNNITLSVGSHQLVAIVGPVGSGKTTLLHVILKELSLSQGNLEVGGTISYASQEPWLFGGSIKQNILFGQKMDMKRYKEVVRVCALERDFSLFPYGDRTIVGERGAMLSGGQKARINLARAIYKEADIYLLDDPLSAVDTHVGKQLFEDCITGYLNSKCVVLVTHQLQYLRTVNKIYLLDNGKVAASGTHSELKNSDEEFLKLLEGETEEEIDDENKASVKKAKSVKSLEKLEMPTEVKEQRGSGNVSGKIYKSYMKAGGSIFSSFICISLFVLAQLGASGTDYFLSFWVNLEQDRLKNNETILTSAEINDTYYKEEFRELFFTSENCMYIYTALIIFIIVMTLTRSLNFFRFCMKASRNLHDWMFSRVVHTFMRFFNTNSSGRILNRFSKDMGSIDEILPQTVVDTLQIGLIALFVNIVIATVNTWILIPSVIIFGLFYAFRIVFLATSRDLKRMEGTTRSPVFTHMTASLQGLTTIRAFGAQEILRAEFDQHQDLHSSAFYLFLGCNRTFGFWLDIHCVIYIGLVTLSFLFVGTETYGGNVGLGITQAITLTGMFQWGMRQWSELENQMTSVERVVEYTEVAVEVDDASKKPPQGWPTMGVIEFRSVSMRYAPEEPLVLKKLNFRVNSGEKVGIVGRTGAGKSSLISALFRLADIDGAILIDDIDTKQISLECLRSKISIIPQEPVLFSGTLRKNLDPFDEFNDEELWDALEEVELKNAISDLPAGLHSNVSEGGTNFSVGQRQLLCLARAVVRSNKILVLDEATANVDPQTDELIQSTIRRKFKDCTVLTIAHRLHTVMDSDKILVMEAGQAAEFDHPHALLQNNESIFYGLVQQTGKGMAENLTKIAEEAHARIPKM

SEQ ID NO: 60021 - DNA, 3939 bp, Tribolium castaneum
  CDS (1)..(3939)
atggatatcaccaaagagtattacaacccgaatccccgggagaaagcgaattttctctcggtgatgtttttcacttacacgattgacatgttcaaaaaaggctacagtaagacccttgacgttgatgacctttacagccccatcgaaagtgacagaagtaccctattgggcgacagactcgagagcaaatggaacaagcacatggacagcataaaaaaatcaaagaagaagcgcaaacccagcttgctcaaagtgctcgtggccaccttctggcccgagtatctcctcctaggtgttattttagtcataatggatttatgcgtgagattaagccagcctatcatgttgggacgactcctggaccatttcaaacccaacagcgatgttgataagaccgctgctctgtggtacgctggagctattgtgggattaaatgccatgagtgcgctgctcattaatcagtacatcatgagggcattccattacgggatgaaggttcgagccgcttgctgcgctcttatttacagaaaggcccttcgcctgagcaagacggcgttagctgacaccgctgccggcaaagtagtaaatctcctctcgaacgatgtaagccgtttcgacgtcgtttccgtcctgatccaccacatgtgggtggcaccaacgtcggctataatcgtagcttaccttctttacgacgcagctggatatgctggccttattggaatagctccagtcttcctcgtagtgcctttgcaaagttacactggcaaactctccgcaatttaccgaaagaaaacggcgcaaaaaaccgacgaaagggtgcgccttatggacgaaatcatctccggagtccaagtgatcaaaatgtacgcctgggagatacctttcgccaaactgatccgttttgcccgaaaggccgagcttagaatcgtgatgaaatcgtcctacgtgcggggactttacatgacgtttaaccttttcacaacccgagctgcgcttttttgtaccttactttgcctggctttgaccaaacaggacataaccgcaagtcgtgttttcgtcttcatgtcgtactacaatattttggcccaaactatgtccagtatgttcgtacgtggcatctccgagatggccgaagtcctggtcgccatcacgcgtctccagagcttcatgacgaacgaagagttcgtcaaagttaaagtcggggacaataatgataataaaatcaactctgacaagacccgcctcgctttgcgcaacgtttgtgccaaatgggacgtttcctcctctgataacaccctgtccaacgtcaatttcagcataaatcagaggaaattactggcggtgattgggcctgttggcagcggcaaaagctcgctgctgcaggcgattctgggcgagttggaggtcacctcaggcgatctgcacatcaacggatcgatttcctacgcgtcgcaagacccttgggtgtttgccgccaccgtccggcaaaacatcaccttcgggctcgattttaacaagaagaggtacaacgaagtcgtgcatgcttgtgccttggagaaggactttaagcagtttcccgacggcgatttgaccattgttggggatcgcggcgcctcgttgagtggcggacagaaggcgaggattaatttggcacgtgctgtttaccgagatgctgacatttacttactcgacgatcctttatcggctgttgatatccatgtgtctaagcatctttacgatgaatgcatcaatggctatctggcgaacaagacgcggatcctcgtcacacatcaagttcaccacttgaaaaatgccgacgagatcatcatcctaaataatggcgccatcgagaacaaaggcacctttgaaaacctagccaacagtgacaccatatacgcgagactgctgacaacagaacccgaacacacggctgaagaaaaacagaaaatgttcgaagcggcgaaattaacccgccaaatctcgactcgaagcaaaacctcctcgttggcaagcgccgttagcgacttaagcatccccgaaagcatcctccaggaggaggcgcaagaacccgaaatcaaagtcaagagtttgcaggaggaatcctccaaaggcaaagtgcacggttccctcttctggcagtatttactagccggaggcaacttcctcttcgtctcagttgtcctgattctgtacgtcctggcccaagctgctgccagtggtgtcgatttcttcgtcagtttttgggtcaatatcgaagaagcgaggaatagtacgagtaacataactgcgattggcgaagccccggattggtcaaccgagacttgcctctacatctacggtggatttatcgcagctgtgtttattattgccttcaccaggtctatgctgttctacaagctggcaatgctaagttcccagaaactgcacgacactttgttcaattgtgtgataaatgcatcgatgaaattctttgatactaaccccagtggtcgcattttgaaccgcttttccaaagatataggggccatagatgaactgctgccaaaggcaatactagatgccggccaaattatcctaaacatggccggtgccttaattttggtagctatagtaaacccgtattttttgataatagttggcatcacaggaatcttcttcatgttactaagagtcgtgtttctgcgatcgtcgaaaaatatcaaacgactcgaaggaatgatgcgaagtcccgtcttcacgcacttgaacgcaaccctaaacggtttgaccacaattcgggcattccaagccgaaaccatccttcgaaacgaattcgacaaacaccaagactaccacactagtgcttggttcatgtatattgcggcaagttcggctttcggcttctatttggacttcctctgtttcatttttgtggcattggtcactttcagcttcctcacatttggcgatagtattggactaaaagggggtgaagtaggactagccataacccagtcagctgccctcacaggtctagtccaatggggcatgcgccaatcagccgaagtcgccaatcagttaatgtcagtggaacgagtcctcgaatacaaagaactgcccaaagaaaaacaaccccaacagcccaaaacacccccgaaatcatggccagctaacgggaaaatcgccttcacagacatgggcttgaaatatgacgagaaggcgcccttggtgctcaaagacctgaacattgttattaaccccaaggaaaaagtcgggattgttgggcgcacaggtgccgggaaatcgtccctgattgcggccctttttcgcctagccaacgtcattggggagattgacattgacgatatcgacaccaaacacttgcaactgcaagttttgaggtccaagatttcgattatcccccaggatcccgtcctgttttcggggactttgcgctacaacctggacccctttgaggattatcccgacgaagtcctgtacaaagctttgaacgaagtggagctcaaagacccggcaaacattattaaccggttggagaaccgtgtcatggatcgaggatcgaactacagtgtgggccagcgacagttgatttgtcttgccagggccataattaggaataataagattttaatgctggatgaggcaactgccaatgtggacccacaaactgacgcactcatccagaagacaatccggcaaaagttcgccgattgtacagttttgacggtcgcccatcgtctcaataccatcatggactccgacaaggttctagtgatggagagcggtaccatggtcgagttcgaccacccccacgtcctcctccagaacccgtcaagcaaatttagcaaaatggtcgcagagacgggaaaatcaacggcggaacaactccggaaaattgcgagaagtagttatttgaagaagcacgccgtccctgaatga

SEQ ID NO: 60022 - protein, 1312 aa, Tribolium castaneum
MDITKEYYNPNPREKANFLSVMFFTYTIDMFKKGYSKTLDVDDLYSPIESDRSTLLGDRLESKWNKHMDSIKKSKKKRKPSLLKVLVATFWPEYLLLGVILVIMDLCVRLSQPIMLGRLLDHFKPNSDVDKTAALWYAGAIVGLNAMSALLINQYIMRAFHYGMKVRAACCALIYRKALRLSKTALADTAAGKVVNLLSNDVSRFDVVSVLIHHMWVAPTSAIIVAYLLYDAAGYAGLIGIAPVFLVVPLQSYTGKLSAIYRKKTAQKTDERVRLMDEIISGVQVIKMYAWEIPFAKLIRFARKAELRIVMKSSYVRGLYMTFNLFTTRAALFCTLLCLALTKQDITASRVFVFMSYYNILAQTMSSMFVRGISEMAEVLVAITRLQSFMTNEEFVKVKVGDNNDNKINSDKTRLALRNVCAKWDVSSSDNTLSNVNFSINQRKLLAVIGPVGSGKSSLLQAILGELEVTSGDLHINGSISYASQDPWVFAATVRQNITFGLDFNKKRYNEVVHACALEKDFKQFPDGDLTIVGDRGASLSGGQKARINLARAVYRDADIYLLDDPLSAVDIHVSKHLYDECINGYLANKTRILVTHQVHHLKNADEIIILNNGAIENKGTFENLANSDTIYARLLTTEPEHTAEEKQKMFEAAKLTRQISTRSKTSSLASAVSDLSIPESILQEEAQEPEIKVKSLQEESSKGKVHGSLFWQYLLAGGNFLFVSVVLILYVLAQAAASGVDFFVSFWVNIEEARNSTSNITAIGEAPDWSTETCLYIYGGFIAAVFIIAFTRSMLFYKLAMLSSQKLHDTLFNCVINASMKFFDTNPSGRILNRFSKDIGAIDELLPKAILDAGQIILNMAGALILVAIVNPYFLIIVGITGIFFMLLRVVFLRSSKNIKRLEGMMRSPVFTHLNATLNGLTTIRAFQAETILRNEFDKHQDYHTSAWFMYIAASSAFGFYLDFLCFIFVALVTFSFLTFGDSIGLKGGEVGLAITQSAALTGLVQWGMRQSAEVANQLMSVERVLEYKELPKEKQPQQPKTPPKSWPANGKIAFTDMGLKYDEKAPLVLKDLNIVINPKEKVGIVGRTGAGKSSLIAALFRLANVIGEIDIDDIDTKHLQLQVLRSKISIIPQDPVLFSGTLRYNLDPFEDYPDEVLYKALNEVELKDPANIINRLENRVMDRGSNYSVGQRQLICLARAIIRNNKILMLDEATANVDPQTDALIQKTIRQKFADCTVLTVAHRLNTIMDSDKVLVMESGTMVEFDHPHVLLQNPSSKFSKMVAETGKSTAEQLRKIARSSYLKKHAVPE

SEQ ID NO: 60023 - DNA, 3558 bp, Tribolium castaneum
  CDS (1)..(3558)
atggaaactaaaaataaacaacagcaaagaagagatcatcccgtggacacgtccaactttctttcaaattggctattttgctgggtattgccagttgttggcaaagcaaccaaaaccgcaatcaccgaagactcactttacgcaacaccgggaaactgtcaggcgagagtttgtgccgaaaaactggaaaaattttggtttcttgagctgaaagggaaaaacccatcgctcacgcgtgcaataatgaaaagttacggttttcgatttttcttttacggttgtttgttctttcccgtggatcttgcatcacgtttgttccaaccatattatttgcaaaaattactcgactactatactctaagtcagaaaggagtgactcaaaacgatgcgcttttctccgcattgatgattgttttgtttccgtttcttcgccttgttacttttcatacatacgtggctgctagcaaaattctgggaatgaaggcaaaagtcgcatgttcttccctcatttatagaaagtgtctccaattgaagaaaaatcatttacaaagagtgaccacaggacagttaattaatcttctcagtaacgatgttcgtaggtttgattgttgtgatcttattaattttgtgtggatcgggccggcggaagttcttattggaattttttacgtggacgtcactataggacgtgctgccacaagtggtgttcttgttttaattttgtgtttcttcctccagttatttatctcgaaacacaattctgtcgttaggagacgtattgccgaaaaaacagaccacagaataggcctaataaatgaccttatcagtggtatgcaaattatcaaaatgtatgcttgggaaaaaccattcacaaaattgatttcaattgctagaagtttagagctcaaggagataaagacagcaacttacatgtttattttaaacgattcgttcaaacacactgtggtcaaaatcattatccttttgggagtgtccttagctgcactgacaggactcccgttaacaccccaatacttcttcgcaatggcgagtactttcgagaatttgaaaatggccataactctgtgcacaccacttgcaatcacccaactctcagaactgaaaactacaatactccgcattcagaaatttttgctaactgagtgccactccaaagagtttcaaatcaaagaagctgcaactcttggcattgaaatcaaaaatttgggcgtcaagtgggataattcacacgattttgtgttaaaaaacctaactttgactgccacttgtgggcaacttaccggtatagttggtcctgcaggtggcggtaagtccacactcttgcaaacaataatcaaagaaacgaaaataatcaatggaactgtttcactgaaaggacgtatttcgtacgcttcgcaagaagcttggattttttcggccagtgtcagacaaaacattcttttcggtgaggcaatggatgaggaaaagtaccgaaaagtgctcaaagtgtgtgctttggaacacgatctagcgttgtttccttacggtgataacacactagttggggaaaggggaattatgttgagtggagggcaaaaagctcggattaacttggccaggagtgtctacagagacgctgatatttatctcctggatgatcccttatcggctgttgatgcccaagtagctcggataattttcaaagagtgcgtgcaaaactatttgaaagacaagtgtgttgttttggtgacccaccaagtgagttaccttcaaaaagccacaaaaatatactccttgacagaggggagacttgaatgtattgaacagttagagcaaagtggtttcgcggaatcaaacccccagtcacactttttgcaaagccaagttgtaccgactgaagttaataaggaagagttcggaaatttaaaaactggacacgtctataaaacgtatttcacagtcgggggaaaattattgtttgtttttgtaatgttaacttttgttctaattcaagtggtggggaactgccaggactatttcctcagtttttggctcaacttacgacaaaattctttgcctgatcatagttgttatactaaaaaagcgtcctctcgcttgcataacaagatgctgacaaatgtagcccatgccgatatgaaattttttcataataatgccagtggtagaatcctcaatagattttcaatggacattggatgtattgatcaagcaatcccactatctttggtgtggttcttaccgtcacttttaatttgtatcgggaattgtttgctagtttgcgttttaaattattggatggttcttccaacaatcattttgattcctagctattactgcctaggggtcgtgtttatgccagttttaaagtcggcaaaaaggactgaaggaataacacgtagcccaattttcagtcatttgactgcgactcttcaaggtctagcaactatcaaagcgttcaatgcgcaagacacacttctgaaagagtttgaagaccaccaaaatcttcacatttctgctcagcacttggtcatcaacatctacgctttgctaagttttatcgctgattttatttgcaatttttacgtcgcgttgattatttttggatttttcttgctgggcgaaggggcgcaggttgctaatgtcggtttggcaatccatttagggatttacgtcgtgtctttaattgcatttgtcatgataactttgagtaatttggatagtgaaataacttcggtcgaacgcgttttggattacacacaattaccgccagagttagacgggacaatacctcccccaaaggcatggccaagtcaaggccgaataacatttcgatcagtctctctcaaatattcacccactgaaccccctgttctcaaaaaagtcagttttaccatcgaaccgggcgaaaaaattggcatagttgggaggacaggtgccggaaaatcctctctggtttccacacttttccgcctgttcccatttgagggaacgattttgatcgacaacatcgataccaaatcgattccactcaaagacctccgttccaaaatctccgtcattccgcaagacccagtgttatttttgggaactttgcggaaaaatttggacccgtttgatgaatttaccgacgctgagttgtggtcggcccttgaggacgttgaactgaaaagtgtggttcgggacttggacagtgaggtttcagaagggggttcgaactttagtgttggacagaagcaactgctttgcctggttagagcaatgctgagaaggaacaaaattgtggttttggatgaagctacggctaatatcgacctcaagacagacgtgttgattcaatcagcaatcagacgcaagtttcataaggcgacagttttaacagttgctcaccggttgaatactgtgatggattcagacagaattttagtgatgaatgatggggttgtcgtagagtttgggagtccaaaagttttgctagaagacgtcaatgggttcttttaccagtactgtgtaaacagcaataaaatgactaaagcttaa

SEQ ID NO: 60024 - protein, 1185 aa, Tribolium castaneum
METKNKQQQRRDHPVDTSNFLSNWLFCWVLPVVGKATKTAITEDSLYATPGNCQARVCAEKLEKFWFLELKGKNPSLTRAIMKSYGFRFFFYGCLFFPVDLASRLFQPYYLQKLLDYYTLSQKGVTQNDALFSALMIVLFPFLRLVTFHTYVAASKILGMKAKVACSSLIYRKCLQLKKNHLQRVTTGQLINLLSNDVRRFDCCDLINFVWIGPAEVLIGIFYVDVTIGRAATSGVLVLILCFFLQLFISKHNSVVRRRIAEKTDHRIGLINDLISGMQIIKMYAWEKPFTKLISIARSLELKEIKTATYMFILNDSFKHTVVKIIILLGVSLAALTGLPLTPQYFFAMASTFENLKMAITLCTPLAITQLSELKTTILRIQKFLLTECHSKEFQIKEAATLGIEIKNLGVKWDNSHDFVLKNLTLTATCGQLTGIVGPAGGGKSTLLQTIIKETKIINGTVSLKGRISYASQEAWIFSASVRQNILFGEAMDEEKYRKVLKVCALEHDLALFPYGDNTLVGERGIMLSGGQKARINLARSVYRDADIYLLDDPLSAVDAQVARIIFKECVQNYLKDKCVVLVTHQVSYLQKATKIYSLTEGRLECIEQLEQSGFAESNPQSHFLQSQVVPTEVNKEEFGNLKTGHVYKTYFTVGGKLLFVFVMLTFVLIQVVGNCQDYFLSFWLNLRQNSLPDHSCYTKKASSRLHNKMLTNVAHADMKFFHNNASGRILNRFSMDIGCIDQAIPLSLVWFLPSLLICIGNCLLVCVLNYWMVLPTIILIPSYYCLGVVFMPVLKSAKRTEGITRSPIFSHLTATLQGLATIKAFNAQDTLLKEFEDHQNLHISAQHLVINIYALLSFIADFICNFYVALIIFGFFLLGEGAQVANVGLAIHLGIYVVSLIAFVMITLSNLDSEITSVERVLDYTQLPPELDGTIPPPKAWPSQGRITFRSVSLKYSPTEPPVLKKVSFTIEPGEKIGIVGRTGAGKSSLVSTLFRLFPFEGTILIDNIDTKSIPLKDLRSKISVIPQDPVLFLGTLRKNLDPFDEFTDAELWSALEDVELKSVVRDLDSEVSEGGSNFSVGQKQLLCLVRAMLRRNKIVVLDEATANIDLKTDVLIQSAIRRKFHKATVLTVAHRLNTVMDSDRILVMNDGVVVEFGSPKVLLEDVNGFFYQYCVNSNKMTKA

SEQ ID NO: 60025 - DNA, 3549 bp, Tribolium castaneum
  CDS (1)..(3549)
atggaccgaggtcactctttcaaaagagagcccaatcccaaggaaacaacaaatataatatctctgctctcattcttctactttatcaaagttttcaaaaaaggatacgcgaaagggattcacagcaatgatttattcgaagttttgcaaaattgccgctcaaaggaattgggggatttgttagaacagcagtggcaggttgaagaaggcagagggaagtcactatgtcgtgccctttggcacgctttcggccaaagattcctaaaattggggctaatgcaactcgtggtcaagctgacaattactatttggtcgcctcaagcattttcgaaattaatttcctacttcagtccagctcaaaccgaaatcagcaagcaagacgccgtttattatgctggcgttgtgattggattaaggataattcacgtgtttttttccaacaattacactctggccttaaccgagctgggccttggggtgaaagcagccgtttgttccctaatttaccgaaaatcacttaggctgaattccgattctttgtccgaagtgactgtggggaaaattaccacgatcataaataaggacgttgatgcttttcaagactttatagcttttgggaacgatgtctggatcgccttcatacagacgggaatcatttgctacctagtttatagcaaaattggagtggcgtcctgggcgggcgtcaccttctttctcgctgttttaccatttcaaatttttatcggaaagttggcctataattttagactcaagtgcaataaaaaaacggacgaacgattagagttgactcaagaagtactgtcagcaatcaaaatcatcaaaatgtacacttgggagaagtacttcgagacgaaaatttgtaaggctcggaaagaagaagtcaagcaactccacaggcttttctatgccgaaatttgtataacaataatcgggagcatttccacgaaagtggcttttttcatcttcctgatgacctacgtctatttgggttacgacgttacagcggaggtagttttctacattttgagttgcttctacgatcttgaatactcgttgagtaacataatcccgtttggtttttcacaagcctctaaactatacgccactgccaaacgatgcgaatctgtactcaactgtaacgaactgcagaaaaaaatcgaaagtggacccaaatgctctcaaataacttttaaagaagttgggacttcaataggtcagaaagaaattttgaaaaacgttaatctagctcttggtcgcggcttgaatattgtaactggttttgtgggcagcggcaaaacagttttcctcaagaccatcatgcaagagtgcccttttattggtgaagttactacttctggccgcatctcttacgcgtctcaagagccttggctctttccctcaacaatcaagaacaacgttttatttggcgaaaattactcaaccgagaggtacaaaaaggttttgcagctttgttgcctggattatgacttggctttgcttcccttcggagataacacagtcataggcgaccgcgggataaacctaagcaaaggccaacaatctcggatcaacctagccagagctgtgtacaaagaaagcgatatttacctcctagacgattgtctagcgtccctggattcgcacgtcaccgacgttatccttgagataaatcaaggatcggtggcgtgcaacatggagagaaaatctgggtttgagtgccttgtccgtgactttgatcaagacactggaagcgatcaagaggaaataaaaaattcggaagtctaccacgagtcgaaaaattccgaaaaagtgagtttgggagattaccacaagtatgtcacgtacggtgggggtcttattgtcttttgcctcatcatggttttgttcacaacggcacaagcgtcggccagctacagtgagaaattgatgacgaattgggttactttggagcaaaatttgtcgactgtttccggcaccaatagcacggactttaacagcctctacagagacaaaacggacagcttgacgatgtattccgtcacatttgtgttgtccattgttttgacaatcatcagcgcattaacgttcttttattttgcaagagttgcttcaatcaatatgcacaaagcaatgctgcacagtgtcataaatactacgatgcattttttcgactcgaactttatcgggaacattttgaccagattttccaaagactgtgtcactgcggatgaacaacttccagttgtgcttgtggagtgtttgaggatgatttttattgctttcgggggcattgttttgatcacaacggtgaattacttgttcctacttgaatgcctggttctattggtggtttcgtatttgatgaagcgattttgccaaccgactagtcgaaatttgcagcgacttcatgtccaagcctctatcccaatgattggtcacgtcaactcgactctcgggggcttgacgaccataagggcttgcaatgcccaggaaatggtaattgacgagttcgacaagcatcagaatttgtttacttcagccagtttcatgctaaacaatagtttatcggccttgtcgtttggcttggatttgttcagtgccctttttgtgtcttcgctcataatccaatttttggtttttgattttgacactgacgttggtgatgtcggtcttgcaataactcagtccttcacaatcacgagtttgataacaattgggatcagcaacgtgtcagactgtgaaaatttgatgacttcggttgaacgaatcttggaatatgtttcactggaacaagagggaacgaacggaataacgatcaaagactggccacggaacggtttaattaatttcaaccaaatcgccttaaactacggcggaagtaaatcaatgctggacgacataaacttcacaattcaagctagggaaaaagttgggattgttggaaggactggagctgggaaatcctcgattatttcaagtttgctgcgtctgtacccaaccacagggaaaatcacaatcgacggcgttgacatcgaaaaagtgtccctgacttggcttcgacgaaaaatctcggtcatcccgcaggacccgttcctcttttcgggaacaattcgggaaaacatggaccctttaagccactacaccgacgagcaaatttggaaagtgctaacaaatctcggactgaataatttaatcgacgatctcggtgccaaaatcgacaaaggctcgactttaagcgccggccaaaaacagttgttttacctcgcacgtgtcatacttcagaaaaataagatcgtggttttggacgaagccactgcaaatgtggacccagagaccgacgttttaatcaacgaagccgtcgcaaatcatttcggcgattcgactgtgatagttatagctcataggttgtcttcggtgatgagttgcaacaaaattattgtgctgagtgacggacgggttagggaactcgacgaacccgagaagttgttgcaaaataaaaacagttttttccacagtattattaaataa

SEQ ID NO: 60026 - protein, 1182 aa, Tribolium castaneum
MDRGHSFKREPNPKETTNIISLLSFFYFIKVFKKGYAKGIHSNDLFEVLQNCRSKELGDLLEQQWQVEEGRGKSLCRALWHAFGQRFLKLGLMQLVVKLTITIWSPQAFSKLISYFSPAQTEISKQDAVYYAGVVIGLRIIHVFFSNNYTLALTELGLGVKAAVCSLIYRKSLRLNSDSLSEVTVGKITTIINKDVDAFQDFIAFGNDVWIAFIQTGIICYLVYSKIGVASWAGVTFFLAVLPFQIFIGKLAYNFRLKCNKKTDERLELTQEVLSAIKIIKMYTWEKYFETKICKARKEEVKQLHRLFYAEICITIIGSISTKVAFFIFLMTYVYLGYDVTAEVVFYILSCFYDLEYSLSNIIPFGFSQASKLYATAKRCESVLNCNELQKKIESGPKCSQITFKEVGTSIGQKEILKNVNLALGRGLNIVTGFVGSGKTVFLKTIMQECPFIGEVTTSGRISYASQEPWLFPSTIKNNVLFGENYSTERYKKVLQLCCLDYDLALLPFGDNTVIGDRGINLSKGQQSRINLARAVYKESDIYLLDDCLASLDSHVTDVILEINQGSVACNMERKSGFECLVRDFDQDTGSDQEEIKNSEVYHESKNSEKVSLGDYHKYVTYGGGLIVFCLIMVLFTTAQASASYSEKLMTNWVTLEQNLSTVSGTNSTDFNSLYRDKTDSLTMYSVTFVLSIVLTIISALTFFYFARVASINMHKAMLHSVINTTMHFFDSNFIGNILTRFSKDCVTADEQLPVVLVECLRMIFIAFGGIVLITTVNYLFLLECLVLLVVSYLMKRFCQPTSRNLQRLHVQASIPMIGHVNSTLGGLTTIRACNAQEMVIDEFDKHQNLFTSASFMLNNSLSALSFGLDLFSALFVSSLIIQFLVFDFDTDVGDVGLAITQSFTITSLITIGISNVSDCENLMTSVERILEYVSLEQEGTNGITIKDWPRNGLINFNQIALNYGGSKSMLDDINFTIQAREKVGIVGRTGAGKSSIISSLLRLYPTTGKITIDGVDIEKVSLTWLRRKISVIPQDPFLFSGTIRENMDPLSHYTDEQIWKVLTNLGLNNLIDDLGAKIDKGSTLSAGQKQLFYLARVILQKNKIVVLDEATANVDPETDVLINEAVANHFGDSTVIVIAHRLSSVMSCNKIIVLSDGRVRELDEPEKLLQNKNSFFHSIIK

SEQ ID NO: 60027 - DNA, 3645 bp, Tribolium castaneum
  CDS (1)..(3645)
atggaccgtgacaacaccctgaaaagggaaaccaatcccagagaaactgcaaatattttctcctttttgtcattcttctactctctccagctttttaaaaaaggttactcaaaaagcttagaaatggaggacatctacgaagtcgtgcctgactgtcgttcgaagcagttgggcgatcgtctagagaaacagtggacaattgaagaaaataaaactcgaaagccgtcagtttgccgggctctttggggttgtttcggcaaaactttcatttgcctgggattaatacaatttgtttcaactgtggtcaaaacaatttggtcaccgagagctttatcaaaattgatttcgtatttcaatcccggccaaaccgacttgaccaaacaagatgcctactattacgcttgcatggtcattagtttgagtgtgcttgacttaattgttaaaaataattataaactagccgcatcccagctagctgtccgtataaaagctgcagtttcgacgcttctttaccgaaaatccctgaagttgggtaacgaagcgttgtcggagataacggctgggaaaatcataacaatcacaagcaaagacttggatattgttgaaactgtaataacggaaggcaatgatatttggatagctttgctgcaaactgctctcatctgctatttgatttattgccaaatcggaatcgcttcactctctggaattgtctttttctttgtcgtgttacccattcaagtacttttgggcaaactggcgtacactttcaaactgaaaagtagcaaaaaaagtgacgaaagactcgagttcttgaaggaagttctgtcagcgataaaaattatcaaaatgtacacttgggagcaattttttgaaaccaaaatcaacgacacccgaaaagaagaactgaaggaaatttataaactctactacgccaaaatagggattatagtaattgggaacgtttcgacaaaagttgcattttttatttttctaatgacttacatttggcttggtaatgacatatcagctgaagtggtttactacattttgagttgtttcaaagaccttgaagcgtcgctcaacataactatgccttttggcatttcgtaccttgcggaaatgtttgccaccaccaaaagaattgaaagtgttttgaaaagtaaagaactgggaccagtccacaaagatattgactgcatagaacctaaactcattttatctaacaccactgtcaaaatacgggacaaagtagtgttaaacaacgtatcattgaccctcagctcaggtctccatgtcgttttgggcccagtaggtagtggcaaaacaacattcctgaaaacaatccttcgggaaactgaattcagtggcgagctccgaatttttgggaaaatctcattcgcgtcgcaagaaccgtggcttttcccctcaacaataaaaaataatatccttttcggggaggaatttttccccggacgttacaataaaattttacaaatctgtaacttaaaccatgacttaaacttactaccggagggagacaatacacttataggagaccgtggtttgaatttaagtaaaggccaacaagctcggataaacctagctagagctttgtacagagagggtgatatttacctcttggatgactgtttggcggctttagatgcccacgtaagtgacagcatttttcaagaatgcatttgcaagttcttgaaaaacaaaatttgcattttcgtgaccaataattcggactacactcaaaacgctgataatatcattgtgctagaaggcgggtcagtcaaaattgaaaagaaaataaaactcgaagaaaagttactcgagcttgaagctcttaacaaaacgaccgaaagcgaagaaaatcaagtcgtggtgaagagtgaccaaaatcagatttatcacgaagtgaaaaagtctggaaaagtgcctttgcgtgactaccatcaatacataatttacggcggaggtttgaccatattttgtgtcttgatggggctttttgtagcaactcaatccatggctagttttagtgagaaaattttaagcaaatgggttactttgcaacaaaatttaacaagtggcaaagagttgaataaaactaacattgctgaacctaaatctaacgagaagaacaatttcttggcgatttacgcgatcgctgttattttttccattttgttatcaaaagcttcgttcaatattcacaaagcaatggtgtgtaatatagtaaacagtaccatgcaatttttcgactcacatttaatcggaaatgttctgaatcggttttcgaaggattttgcaactgttgacgaacttcttccatttgtcgtgattgagtgcatgataatcattttagaagtcgttggttctatagctctgttaacaacagtccattacgttttcctcttagaggcctctttcgttttgtttttggcttgtgtggtcaaacagttttgccaacccactggacgtaatttggagagacttcacattctagctagaagtccaataatcggtcatatgagcaccagtctagaaggcttaacaaccattagggcaagcaatgctcaagacgttgttaaaaaagagtttgaaaggcatcaagatttgttttcgtctgcatatctcatggttattacaacgttcaaagctttaaatttttttatggaattagtatgtgtcgttttctttggtgttgtacttttacagtttttggcgactgatttagatgctagtgtgggtgatgtagggcttgtaataacccagtctttggcaactgtcaccacctttacactagctatgataaacatagcagattgtgaaaacctgatgatttctgttgaacgtgttttggaatacaccaaactccaggaagaaccaaaagacgggaaaataatagacaattggccaaaacgaggcctggtagccttcaataatgtttctcttaaatacgcttcaaataaacaaatgttgaaaaatgttaattttgaaattgcgcccaaagaaaaactgggacttgttggtagaaccggggccgggaaatcatcaattatctcggctttgtttagattatacgaaaccgaaggctcagtcacgattgacaacaccgacatcagggaagtttccctcaatttattgcgttcaaggataaccgtcatccctcaagatccctatctgttcataggcacaattcgcgaaaatttggatcctttgggtcagcacagtgacgacaaaatttggaaaattctgaaagacttgcagctcgactctttaattgataatctcaattcccagattgataaaggatcaaattttagtgctggccaaaagcagttactgtgtttggcgcgtgctgtccttcggaaaagcaacattttggttttggatgaagctacagcaaacgttgatccagaaactgatactttaatcgaagaatctgttaaaaggcattttgcggactcgactgttattgttgtggctcatcgattgttgtcggtaatgaattgtaacaaagtcgttgtgatgagtgacggtcgggttagcgaattcgacgagccggaaaagttagtcggccacaaagaggcccaaatttatcaagagctggaccctttagccagcgtttag

SEQ ID NO: 60028 - protein, 1214 aa, Tribolium castaneum
MDRDNTLKRETNPRETANIFSFLSFFYSLQLFKKGYSKSLEMEDIYEVVPDCRSKQLGDRLEKQWTIEENKTRKPSVCRALWGCFGKTFICLGLIQFVSTVVKTIWSPRALSKLISYFNPGQTDLTKQDAYYYACMVISLSVLDLIVKNNYKLAASQLAVRIKAAVSTLLYRKSLKLGNEALSEITAGKIITITSKDLDIVETVITEGNDIWIALLQTALICYLIYCQIGIASLSGIVFFFVVLPIQVLLGKLAYTFKLKSSKKSDERLEFLKEVLSAIKIIKMYTWEQFFETKINDTRKEELKEIYKLYYAKIGIIVIGNVSTKVAFFIFLMTYIWLGNDISAEVVYYILSCFKDLEASLNITMPFGISYLAEMFATTKRIESVLKSKELGPVHKDIDCIEPKLILSNTTVKIRDKVVLNNVSLTLSSGLHVVLGPVGSGKTTFLKTILRETEFSGELRIFGKISFASQEPWLFPSTIKNNILFGEEFFPGRYNKILQICNLNHDLNLLPEGDNTLIGDRGLNLSKGQQARINLARALYREGDIYLLDDCLAALDAHVSDSIFQECICKFLKNKICIFVTNNSDYTQNADNIIVLEGGSVKIEKKIKLEEKLLELEALNKTTESEENQVVVKSDQNQIYHEVKKSGKVPLRDYHQYIIYGGGLTIFCVLMGLFVATQSMASFSEKILSKWVTLQQNLTSGKELNKTNIAEPKSNEKNNFLAIYAIAVIFSILLSKASFNIHKAMVCNIVNSTMQFFDSHLIGNVLNRFSKDFATVDELLPFVVIECMIIILEVVGSIALLTTVHYVFLLEASFVLFLACVVKQFCQPTGRNLERLHILARSPIIGHMSTSLEGLTTIRASNAQDVVKKEFERHQDLFSSAYLMVITTFKALNFFMELVCVVFFGVVLLQFLATDLDASVGDVGLVITQSLATVTTFTLAMINIADCENLMISVERVLEYTKLQEEPKDGKIIDNWPKRGLVAFNNVSLKYASNKQMLKNVNFEIAPKEKLGLVGRTGAGKSSIISALFRLYETEGSVTIDNTDIREVSLNLLRSRITVIPQDPYLFIGTIRENLDPLGQHSDDKIWKILKDLQLDSLIDNLNSQIDKGSNFSAGQKQLLCLARAVLRKSNILVLDEATANVDPETDTLIEESVKRHFADSTVIVVAHRLLSVMNCNKVVVMSDGRVSEFDEPEKLVGHKEAQIYQELDPLASV

SEQ ID NO: 60029 - DNA, 3690 bp, Tribolium castaneum
  CDS (1)..(3690)
atggatcacgttaaaaagcgggctggaccaaggcatccgcttcttaaggcaaacctggtttcggtggccacgttcttttacacattgaaattatttagaaaaggtgctaaactagacttggaagaagaaaacctctatgaaactttacctaaattcaaatcagataaattaggaaatgaacttgaaaaagggtgggaaaaggaaggcaaaaactcagtatggcgtctactgttcatttgttacggaaaagaagtctttcttttggggttgtcagaaatactccaaccacatgcactgagtaaaataattagctactttagtccaaaccagaccagtatgaccaaaaacgatttatattcatacgctggtcttatgattgtcatcaacgttacagattttgtttacacccacaattattttctagcactgaatacactaggaattcgaattcgtacagcactttgttccctcatttactgcaaagcattaacactaagacaagaccaaatttcaatcggaaaatttaccaacctcttgactaaagacattcccagtttggaggcttttccatatttcgttaatgacttatggattgtgattctccaaacaatcgtcgtttctttcgtaatgtaccaaaaactgcaagtggccacctttgcaggagttggacttttcataatcgtattgccgttacaaatttatatgggctcttgggcggctaaattacgaatgaaaatgtgcaaaaaagtagatgaacgattgcaaactacacaggaaactttatcagcaatcaaaattattaaaatgtacacttgggagaagttttttattaacagagtctccaaaacaagaaaaaatgaagttaaaagtatgcaccggattttttacttgatattcttgctaatcgaaattggcgttcttaatggtaacattgccttttaccttctcataatgacctacaaatggttggggaaccttgtaactgctgaaatcgtctactttattgatagttgctttaataatttagtatttgccttagggatacgtttcccttacgctcttacacaaatagcagaagctgttgcctccgtcaaaagaatagaagacgttttaaaggcaccagaattgcacgaaaacgtaaatgacgctaatccaataatcaaaccaaaaattaatttaaaaaatgttaatgttgcctttagcgacactcaaattcttcattctatcaatttagatattgacttgggcgtcactctaataacaggacctgtcggaagtggcaaaagctttctgctgaaaacgatactaagggaatacgaacccaccaatggtagcatcctaacccaaggacgcatctcttacgcttctcaagatccttggctttttccttcttcgatcaaacagaatattttgtttggggaaaaatacgacgaagcccgataccaacaagtgttgaaagtttgtgatttgatttacgactttgagctattggcagacggtgataacaccattgttgaagatcgcggtaataatttgagcaaaggacagcaagctcgggtcaatttagctcgtgccgtttaccgagagagcgaaatttacctcctggatgactgtttgtcagctctcgatagccaagtcaacgactatattttcaaagaatgtattttgaaatttctccaaaacaaactagtggtgtttgttagtcataacgtgagccatgtgaaagaagttgataatgttatagtaatgcggcatggatctatcctgtctcatgccaagtccacggaaattcctgaaaaggaaattttggaagaaatcaaaggaaatgaaaaggaactgcgcaaagtagagaatgaagacggcgtggatgaggaaagtaaactgataaccgaagcaataaaagaacaaaaagtgtaccaagaattcaaaaagcaaggcgtcgttgaattggaagtgtacaagaaatatatgcaatactggggtggtatttttgtcactcttttaattcttgcagtttttggtatttcgcagtttgttcaaagttattccgacaaattagttagtaaatgggtcaacactgaacaaaagctagcaaatctcactctctatgacgttacgaatagtacagatatgaccaaagaagaaacaatagaaaatcgtaattatattttaaaaatgtatacaacgatgataatcgtaaacagcgtttgtcatctcggttgtatgtttgtcctgttcaaagtgattcaacgaacttccataaagttacacaaacacatgatcacccacatggtcaatgccagaatgaactttttcgacaccaatttcatcggcaacatcttgaacagattttctaaagatttgactgtaattgacgccggtctcccaattacttattatcaaattttcagaatgttttccagtatgattggaataatgtcgctgattgcaaccgttaacacattttttctcgttccttcgtttttatttttcggactgctgatggtaatttgtaaatattaccttcggacagctcgcagtttaaaacgcctggaagccaccacacgaagcccagtgattggttatttgaacgccacccttgaaggcctaacaacagtccgagcatttaagaatcaaagcactttgagacaagagtacgatcgtcatcaggatttgtacacttcggcttcttacactgcttgctcctcaagggaagctttcgcgttctgtctagatttcctctgttttatttttgtagcttcaattatctcacgatttatgtttttcaaaatgttgggtggtgacgttggccttgccatatctcaagctttaaaaatgaccggaactctacaatgggcagtacgaatttggtccgaaatggaaaactcaatgacctcagttgaacgagtcctggaatatattgaagtcaaacaggagaataaacaaggacaggtcctagaaaactggccgaaaaaaggcgaagtcaaatacgaaaatgtttccttgtcttataacaactcgaacgaatatgtcctgaaaaacgtgaatttcacggccaatcggcaggaaaaaatcggaatcgtcggtagaacgggtgctggaaaatcgtctatggtttcaacgcttttccgcctgtacgaagtcgagggaaaaattacaatcgatggcgttgatacaaaaacactagctttggatttcttgagaaagcatgtctccattatcccgcaggatccagtcctgttttcgggaacaatccgcgaaaacatcgatcctgagggaacttactctgataaagagatttggaagatgcttgaaacggcgcatttgaagaaatttgttccaagtttggattacaatattgttggaaacagctcaaattttagtgttggccaaaagcagttgatttgtttagcccgagcactcgttagaaataacaaaattatagtcctggatgaagcaacggccaacatggacccggaaacagatgctttgatacatcagacgatacaggagaatttttcctcatgcaccgttttagcgatagcgcacaaacttgattcggtactgaattcagataaaatcatcgttatggaaagaggggagattattgagtgtggtgaccctcgcagtttgttgcaaagtaaagaaggtgccttttatgaaatggtgaagaaatcagagttgttgtga

SEQ ID NO: 60030 - protein, 1229 aa, Tribolium castaneum
MDHVKKRAGPRHPLLKANLVSVATFFYTLKLFRKGAKLDLEEENLYETLPKFKSDKLGNELEKGWEKEGKNSVWRLLFICYGKEVFLLGLSEILQPHALSKIISYFSPNQTSMTKNDLYSYAGLMIVINVTDFVYTHNYFLALNTLGIRIRTALCSLIYCKALTLRQDQISIGKFTNLLTKDIPSLEAFPYFVNDLWIVILQTIVVSFVMYQKLQVATFAGVGLFIIVLPLQIYMGSWAAKLRMKMCKKVDERLQTTQETLSAIKIIKMYTWEKFFINRVSKTRKNEVKSMHRIFYLIFLLIEIGVLNGNIAFYLLIMTYKWLGNLVTAEIVYFIDSCFNNLVFALGIRFPYALTQIAEAVASVKRIEDVLKAPELHENVNDANPIIKPKINLKNVNVAFSDTQILHSINLDIDLGVTLITGPVGSGKSFLLKTILREYEPTNGSILTQGRISYASQDPWLFPSSIKQNILFGEKYDEARYQQVLKVCDLIYDFELLADGDNTIVEDRGNNLSKGQQARVNLARAVYRESEIYLLDDCLSALDSQVNDYIFKECILKFLQNKLVVFVSHNVSHVKEVDNVIVMRHGSILSHAKSTEIPEKEILEEIKGNEKELRKVENEDGVDEESKLITEAIKEQKVYQEFKKQGVVELEVYKKYMQYWGGIFVTLLILAVFGISQFVQSYSDKLVSKWVNTEQKLANLTLYDVTNSTDMTKEETIENRNYILKMYTTMIIVNSVCHLGCMFVLFKVIQRTSIKLHKHMITHMVNARMNFFDTNFIGNILNRFSKDLTVIDAGLPITYYQIFRMFSSMIGIMSLIATVNTFFLVPSFLFFGLLMVICKYYLRTARSLKRLEATTRSPVIGYLNATLEGLTTVRAFKNQSTLRQEYDRHQDLYTSASYTACSSREAFAFCLDFLCFIFVASIISRFMFFKMLGGDVGLAISQALKMTGTLQWAVRIWSEMENSMTSVERVLEYIEVKQENKQGQVLENWPKKGEVKYENVSLSYNNSNEYVLKNVNFTANRQEKIGIVGRTGAGKSSMVSTLFRLYEVEGKITIDGVDTKTLALDFLRKHVSIIPQDPVLFSGTIRENIDPEGTYSDKEIWKMLETAHLKKFVPSLDYNIVGNSSNFSVGQKQLICLARALVRNNKIIVLDEATANMDPETDALIHQTIQENFSSCTVLAIAHKLDSVLNSDKIIVMERGEIIECGDPRSLLQSKEGAFYEMVKKSELL

SEQ ID NO: 60031 - DNA, 3756 bp, Tribolium castaneum
  CDS (1)..(3756)
atggaccatataaaaaaacatatcaaagaaacacatccaattcttaaagccaacgtcgtttctttgatcacatttttttatactgtaaagttgttcagaaagggtgctaaacgggatttggaagaagaagatttgtacgaggttttacccaagtacagatcggacagattaggagacgagtttgaaagagaatgggaaaaacagaaaacaaaacgggacagaaactcaattttgcgcctgttgtgggcttgctatggaaaagaaattttcctcttgggggtgtcacagttggcggttaaaaccctgttgataatagttcaaccacatgctttgagcaaaataatcagttatttcaatccgaaccaaaccgaaatgaccaaaaacgatctgtatttctacgctggacttttggtcgttttcaacatattggactgtctttactcccacaactaccacctcgctgtcaccacactaggggtcaaaattcgcacagctttttgctctttcatttaccggaaagccttgaaactgagtccttcgagacttggcgatatctcagtcggaaaaatcataaatctgattactaaagatgttcatgctttagaacggttttcgtatttagccaacgacttatggattgcaattctcaaaacaatcatcgtttccttcatcatttacaggaaactttatttggcaacttttgcaggagtggggtttttcataattatattgcccattcaaatttacatggggacgtgggccgccaagttacgtatgaaaatgtgcaagaaagtagacgaacgattacaagcaacccaagagactttatcagcaattaagatcattaaaatgtacacttgggagaagttttttaccaagaaagtcaccgactctagaatcaaagaaatcaagagcatgcacctcattttttacttaaagttctttctgcttcaaatcggtgtattgaatggtaacattgccttctatcttcttattatgacctacaaatggttggggaaccacataactgcggaaatagtctacttcattgacagcttgttccatatcttgacacacactttaggtatacgtttcccaagtgctatttcacaaattgcagaaactacagcctctatcaagagaattggaaacgtactgaaagcactagagctgcaagaagtttcagacgcaaatcatctaatcatcaaacctaaaatctcgctgaaaaacgtggacattgccttaaaagacactaaaattcttcattcggtcaatttagatatcgatttaggggtcactctaataacaggacctgtcggaagtggcaaaagctttctgctgaaaacgatactaagggaatacgaacccaccaatggtagcgtcctgacccaaggacgcatctcttacgcttctcaagacccttggctttttccttcttcgatcaaacagaatattttgtttggggaaaaatacgacgaagccagataccaagaagtgttaaaagtttgtgctttgatttacgattttgagctattggcagacggtgataacaccattgttgaagatcgcggtaataatttgagcaaaggacagcaagctcgggtcaatttagctcgtgccgtttaccgagagagcgaaatttacctcctggatgactgtttgtcagctctcgatagccaagtcagcgactatattttcaaagaatgtattttaaaatttctccaaaacaaattagtggtgtttgttagccataacgtgagtcacttgaaagaagttgatagtgttatagtgatgcggcatgggtctatcctgtctcatgccaagtccacggaaatttccgaaaaggaaattctggaagaaatcagcgaagaagatgaaaaggaactgtgtgaggaggaggacgaggacgtgaatgaagaaagcaaactaataactgagacgacaagggaacggaaagtgtaccaagaagttaaaaagaaaggtgcagttgaattagaagtgtacaagaaatacctgcattacggaggcggtattttcgctttcctacttgttatcgcaatttatggcgtttcacaatttgttcaaagttattccgataaattagtcagcaaatgggtcaacactgagcaaaaattagccaatttcactctctacaacattacaaacaccacagatcagactgaagaagaaacaattgaaaaacgcgactacattttaaaaatgttcacggcaatgatagttctaagcacggtttttaacttgagccgatcttttggattctacagtgtgatcaaaagagcttcgctaaatttgcacaagcacatgatcatgcatatggtcaacgccacaatgtccttctttgacaccaatttcattggcaacattttaaaccgattttcaaaagacttgacggtcatagacgaacacctgccctttatttaccaccaagtgtttaggactttttttgtcgtaactggaataatgacacttatagcaacagttaacacatttttccttatcccgacctttttcttctttggattattgatgataattcgcggatattaccttcgcacagctcgaagtttaaaaagactggatgccacaactagaagtccagtggtgggtcacctgaatgcaacccttgaaggtctaacaacaatcagagctttcaaggctgaggaaatcctaagacatgaatatgaccgccaccaagatttgtacacttctgcgtcctatatctcgtattcttccatgagagcctatgcctttttcttggacattttgtgcgtcattttcatagcgtcaataatttcaagatttatttttttcgatgaggagattttggctggtgacgtgggccttgccatatcccaggctttgagaatgaccgggaccctgcaatggggagtgcgaatttggtccgaaatggaaaactcaatgacttcagttgagcgagttctggaatacactgaagtcaagcaggagaataaacaaggccaggtgctggaaaactggccgaaagaaggcgaagtcaaatacgaaaacgtttatttgtcttataacaacacggacgagtatgttctgaaaaacgtgaacttcacggcaaacccgcaggagaaaatcggaatcgttggtcgaactggcgctggaaaatcctcgataatctcaacatttttccgcttgtacgaagtcgaaggaaaaattacaatcgatggagttgatacgaaaacactagctttggatttcttgaggaaacatatttccattattccgcaggatcccgttctgttttcgggaacaatccgcgaaaacatcgatccagagggaatttactctgatgaggatatttggaatgcgatcgaaacggcgcatttgaaaaaactagtctcaagcttggattacgaaattactgaaagtagttccaactttagtgttggccaaagacagttgatttgtttagcgagggcacttatcagggataataagattatcgtactggacgaagccacggccaacatggacccggaaactgatgctctgatacatcaaacaatacatgaaaattttgcctcgtgtactgtttttacaatagcacacaagcttcattcgatactgaattctgacaaaattatcgtcatggatagaggggagattattgagtatgatgacccgctcagtttgatgcaaaataccgaaggcgtcttttacaaactggtgaagaagtcgggattattaccctcaaatttgtcgtaa

SEQ ID NO: 60032 - protein, 1251 aa, Tribolium castaneum
MDHIKKHIKETHPILKANVVSLITFFYTVKLFRKGAKRDLEEEDLYEVLPKYRSDRLGDEFEREWEKQKTKRDRNSILRLLWACYGKEIFLLGVSQLAVKTLLIIVQPHALSKIISYFNPNQTEMTKNDLYFYAGLLVVFNILDCLYSHNYHLAVTTLGVKIRTAFCSFIYRKALKLSPSRLGDISVGKIINLITKDVHALERFSYLANDLWIAILKTIIVSFIIYRKLYLATFAGVGFFIIILPIQIYMGTWAAKLRMKMCKKVDERLQATQETLSAIKIIKMYTWEKFFTKKVTDSRIKEIKSMHLIFYLKFFLLQIGVLNGNIAFYLLIMTYKWLGNHITAEIVYFIDSLFHILTHTLGIRFPSAISQIAETTASIKRIGNVLKALELQEVSDANHLIIKPKISLKNVDIALKDTKILHSVNLDIDLGVTLITGPVGSGKSFLLKTILREYEPTNGSVLTQGRISYASQDPWLFPSSIKQNILFGEKYDEARYQEVLKVCALIYDFELLADGDNTIVEDRGNNLSKGQQARVNLARAVYRESEIYLLDDCLSALDSQVSDYIFKECILKFLQNKLVVFVSHNVSHLKEVDSVIVMRHGSILSHAKSTEISEKEILEEISEEDEKELCEEEDEDVNEESKLITETTRERKVYQEVKKKGAVELEVYKKYLHYGGGIFAFLLVIAIYGVSQFVQSYSDKLVSKWVNTEQKLANFTLYNITNTTDQTEEETIEKRDYILKMFTAMIVLSTVFNLSRSFGFYSVIKRASLNLHKHMIMHMVNATMSFFDTNFIGNILNRFSKDLTVIDEHLPFIYHQVFRTFFVVTGIMTLIATVNTFFLIPTFFFFGLLMIIRGYYLRTARSLKRLDATTRSPVVGHLNATLEGLTTIRAFKAEEILRHEYDRHQDLYTSASYISYSSMRAYAFFLDILCVIFIASIISRFIFFDEEILAGDVGLAISQALRMTGTLQWGVRIWSEMENSMTSVERVLEYTEVKQENKQGQVLENWPKEGEVKYENVYLSYNNTDEYVLKNVNFTANPQEKIGIVGRTGAGKSSIISTFFRLYEVEGKITIDGVDTKTLALDFLRKHISIIPQDPVLFSGTIRENIDPEGIYSDEDIWNAIETAHLKKLVSSLDYEITESSSNFSVGQRQLICLARALIRDNKIIVLDEATANMDPETDALIHQTIHENFASCTVFTIAHKLHSILNSDKIIVMDRGEIIEYDDPLSLMQNTEGVFYKLVKKSGLLPSNLS

SEQ ID NO: 60033 - DNA, 1800 bp, Tribolium castaneum; identical to SEQ ID NO: 7455
  CDS (1)..(1800)

SEQ ID NO: 60034 - protein, 599 aa, Tribolium castaneum; identical to SEQ ID NO: 7456

SEQ ID NO: 60035 - DNA, 3369 bp, Tribolium castaneum
  CDS (1)..(3369)
atggaggagatcatcaattcgaaaaacgagtactatttgtatggttttttagtcattctagtgaactttttaagtgtgatagtgggccatttctaccacctcaaggtccaacatttagggatgaaaatccgcattagttgttgttctctgatttaccagaaagctctaaagattagtaagcaagtggagtcggagtcgaaaatgggaaaaatcgttaacttgttatcaaatgatgttaaccgctttgatttggcgccgatgcacttgatcaacctcatcgtagcaccgtttgagacactttttgtgatatttagcttgtatgcaacggttggcaccacagcggtcagcggaatcgtttttttagcagtatttatgccacttcaaatgtacatggggaaattaacgacgacttatagactgaaaagtgccacaaacaccgaccgaaggatcaaactaatgaacgaaattatcacaggcatcaaagtgataaaaatgttcgtttgggaaaaactatttgtggacatcatcgaaaaagccagaaggttggaagttcgccaaatacgcaaaatatcaaacattcgagcgttgaacgtctccttcatgcttttcataaaccggactgggattttcttatccgtcatgacgtactttctggtccggaagcaagtcgatgccaaatacgtgtttgtcctgtcgtcgttttacgcaattttgcgacaaactctaacagtttacctgccctttgctatccagaatttcagcgaaactagggtttctgtcgagagaattcgcctcttcctaacgtgcgatgaacaaattgcagtgacttatgtagcctcagataaggaacaactggtgaaacgcgatatcaccattcaggaatttgggaatattgagggaacgaaagttgggattcggttgaaaaacgcctcagtgaagtggctactggccgaaaattacagcttgaacagcgtgaattttgaggtttttggggagtttgtgatagttagtgggccagtgggtggtggaaaatccactcttctgtacacgattttaaaagaactgccccttgatcaaggagagttgagtgtgaaaggcattctctcgtatatgtctcaagagccgtggctgttttcgggcacagttcaacaaaacatactgtttgggtcaaaatttgacaaaaataagtacaacacaatcgtgcaaatttgccagttggaagcggacctctccacttttccgtacggtgaccacactttagttggggaaaacggggctctgttaagtggaggccagaaaacgcggatcaatttagctcgggccctttacagtgacgccgatatttatctactggacgatccttttgcgtccgttgacacgatcatcgggaagaaaattttccaagattgcattctcacgtacttaaggaacaaatgtgtggttctagtcacaaatcagcaaggttttttcgccgcagctgatagagtttacactttagataagggtatcctcaccaataatgtaaatatttacaagaaagagtacacttttgaggagcaacaaagtagggagcatataataagtggggaaaaaatcacagaactgaaactggaacccaaaaaagggaggcaagggaatgtcacgagacaagtgtatgcaaaatatgccaaatcggccgggaattgctcgagtcattgtctcctcttttttctgtttctggcgtcgcaaattgcggccagtggggccgactattttgtggcattttgggttaatttgagccaatcttccactcgcaattctttcaccgacgatatttgtctccaaatttatctcgctcttattattgcaaccataactttatcaatcgcgagatctatcacatttttccgattgtgcatcaaagcttcagtaaaattgcacaattgcatgtttgccaaagtaatcaaagcccccataactttcttcgaaacgaatccttcgggggaaatactgaaccgtttctcgaaagacatcggcatggtcgatgagaccattccttccattctcatggatacgtttcaaatcgctttcattatcctaggaagtgtggttttgataattttcctaaatccttggatgctgataccaacactagtgatttttcccctgttctatttttttaaaatttggtttctaaaaagaagtcgcaatctaaaacggctggaagcttcagcacgcactccaatctacacgcacgttcgtgaaaccctcaaaggtttaacggtgatcaggacatacaatgcggaaatcacaaccaaacgccaattcagctgctaccaagacttgcacagctcggctttttacactttcatgacttgcaatcgagcttttggcttctggttggacttaatctgcatgttttacaccattggggtgatagcgagcatcatgttgatggagacacaagccggcagtgttggcttgagtataacgcagtcaataaacctgatcggggtgctccagtggggcatcaaacagtggagcgagctggaaaaccagatgatcaacgttgaacgtgtctctgaatacacggagatttcccccgagcaaagcctgacgaaaaatttgggcgaaatttggccaagtgaaggccaaatcaagtttcaatccgtctcaatgcgctacccccagagcggtcgtctaaccctggacaacataagcttcacggtcgaacctagagagaaaatcggaataattgggcgaaccggcgctggaaaatcatccctagtttcaaccctcttccgtttgtacaacttcgaggggaaaattctcgtcgacggagtcaacacttgcgaaattccactcgacaccctccggtcaaaaatctcaatcatcccccaggaaccgatcctcttcacagggacgctgcgggagaatctggacccctttggcgagtttcccgacgccgttttgtggaacgttctggagcaagtgaaactgaaaagtgtggtagcgaacttttcagacggcctatcggttcaagtcctggaaggagggtcgaatttcagcgtgggacagaagcagctgatttgtctaggaagagcgatcttgaggaagaacaagattcttattttggatgaagcgaccgcaaatatcgatttccaaacggatcggttcattcaagaaacggtgcagagtgaattcaagaactgcaccgttttaacggtggcccataggatcaatacggttatggattcggacaagattatggtcctggatgatgggaaattggtggagtttgatagtccgagcagtttgttgcggaattcggacgggttgtttcggcaagtggtggatgagtgtaaagaaagtttgtccaaagcgaaataa

SEQ ID NO: 60036 - protein, 1122 aa, Tribolium castaneum
MEEIINSKNEYYLYGFLVILVNFLSVIVGHFYHLKVQHLGMKIRISCCSLIYQKALKISKQVESESKMGKIVNLLSNDVNRFDLAPMHLINLIVAPFETLFVIFSLYATVGTTAVSGIVFLAVFMPLQMYMGKLTTTYRLKSATNTDRRIKLMNEIITGIKVIKMFVWEKLFVDIIEKARRLEVRQIRKISNIRALNVSFMLFINRTGIFLSVMTYFLVRKQVDAKYVFVLSSFYAILRQTLTVYLPFAIQNFSETRVSVERIRLFLTCDEQIAVTYVASDKEQLVKRDITIQEFGNIEGTKVGIRLKNASVKWLLAENYSLNSVNFEVFGEFVIVSGPVGGGKSTLLYTILKELPLDQGELSVKGILSYMSQEPWLFSGTVQQNILFGSKFDKNKYNTIVQICQLEADLSTFPYGDHTLVGENGALLSGGQKTRINLARALYSDADIYLLDDPFASVDTIIGKKIFQDCILTYLRNKCVVLVTNQQGFFAAADRVYTLDKGILTNNVNIYKKEYTFEEQQSREHIISGEKITELKLEPKKGRQGNVTRQVYAKYAKSAGNCSSHCLLFFLFLASQIAASGADYFVAFWVNLSQSSTRNSFTDDICLQIYLALIIATITLSIARSITFFRLCIKASVKLHNCMFAKVIKAPITFFETNPSGEILNRFSKDIGMVDETIPSILMDTFQIAFIILGSVVLIIFLNPWMLIPTLVIFPLFYFFKIWFLKRSRNLKRLEASARTPIYTHVRETLKGLTVIRTYNAEITTKRQFSCYQDLHSSAFYTFMTCNRAFGFWLDLICMFYTIGVIASIMLMETQAGSVGLSITQSINLIGVLQWGIKQWSELENQMINVERVSEYTEISPEQSLTKNLGEIWPSEGQIKFQSVSMRYPQSGRLTLDNISFTVEPREKIGIIGRTGAGKSSLVSTLFRLYNFEGKILVDGVNTCEIPLDTLRSKISIIPQEPILFTGTLRENLDPFGEFPDAVLWNVLEQVKLKSVVANFSDGLSVQVLEGGSNFSVGQKQLICLGRAILRKNKILILDEATANIDFQTDRFIQETVQSEFKNCTVLTVAHRINTVMDSDKIMVLDDGKLVEFDSPSSLLRNSDGLFRQVVDECKESLSKAK

SEQ ID NO: 60037 - DNA, 3789 bp, Tribolium castaneum
  CDS (1)..(3789)
atggaggacaacgaacgcaaaagtttgaaagcccacacaaaagtacacccaaaagaaaaagcaaactttctttctactctgttcttttgttgggctctcccgaccttcgtcaagggctggaagaaggacctagacgaggatgacctctacggccccctcaaagcgcacgagtccaaagccctagccgacagaatgggcctcgtttggctaaaggaaaaaaacaaacaccgaattccttcattgggaaaagtgataatcaaagtgttttatcgcgaaattctcttctacgcctgtttcctcatgatacaggagctggttatcaagatggcgcaacctttactcgtcggaaaactcctcgaatattacgcccccgatcagcaaaacatgacgaaaaatgtggcttacatgtacgcctctgcgctgatttttttcatcttttcaaatattttcatccaacattcgtgctttttgggaatgcaacacctcgccatgaagatgcaagttgcttgccgatcgctcatttatcgcaaagctttgacgctgaacaaaaacgctttgatgaaaagcactgtgggccagatggttaatctaatgtccagcgacgtgagcaagtttagctacatttgtttgcatgtgcaccaaatgattctagcaccgattcagactgtgattgttctgtatctgctcttttcgaccgtaaacacggcagcaatggtcggtgttggactgctcattgtttttatccccatacaattttatatgggcaaactgacgtcgttttatcgccgcagaacggcccaaaagaccgacaaccgaattcgcctaatgaacgagataatctgcggcataaaaataataaaaatgttcacttgggaaaaaccgttttcgaaactggttgaaatggctcgaagattggagcttcacgaaattaaagcaaactcgtatcttcgcacggtttaccgctctgttaatgcgtgtctcattcctctgtcgatttttttatgcgttttgacctacgttttgagtggtaacaccctccaagcgcagtttgtgtttgttgtaacttcgttttatggaacgttacgtcagactttaacgttacatttcccccggtgtattgctctcttggcggaaatcaatgtttcactcggacgaatacaaaacttcctgctagctgaagaaacacaaaaaatgagtaatgaactgaggacggatgatgtgagggttattttaactgaagctggtgtcaagtggactgactcttcggattatagtttgtccgatgtatcgttttctgtaaattgtggcgaattggtggctgtaattggtcgggtcggaagtggcaaaagcacccttttgcaagcgattcttcgagaaattgatttatctaaaggagagttggttgtgagcggatcggtttcttacgctgcgcaagaaccgtggattttctcgtccagtatcagacaaaacatactgtttggcgaaaaaatgaatttcgaaaggtacaaggaagtggtcaaggtttgcgctttggaaaaagacttcaacttgtttccttacggagacaggactattgtaggtgaaaagggggtgatgttgagcgggggtcagaaagctcgagtaagtctagcgcgggctatctacaaagacgctgatatctatttgttagatgatcctctatcggcagtcgacacacacgtgggaaagcaactcttcgatcagtgtattttgggttttttgaaagacaaagcccggattttggtaacacaccaaatccaataccttggtaaagttgacgagatttatttgcttgaccggggacaagtcactctaaggggtacttatgacgagcttaagaaacacaaagactttgccaaattgctcgccgaagtcgagcaaacaccgcacgaagattgcgctcaagaaaaacattctgttgcgatcgcagaaacgtccaaattacccactgaggtaaaggaacagcgcagttcgggcacaatttcgaaaaaagtttatttgcattattttcgcgcgggcgatagtcgcattttcccgtcttttgtattacttacgtttgtagtaacgcagattgcatcaagctgtgttgactatttcctcactttttgggtaaatcttgagcaaaaacggctcgaaggcaccgagactttgttttttacaaccaacactcttctgtacatgtatgtgttcctaattgtttctctcacgttcatggttttagtgaactcagtctctttcgttaaattctcaatgaacacttgcaagaaattgcacgagaaaatgtttgcccaaatattgaatgccacgatgaggtttttcaatacaaatccttcgggacgagttctcaatcgtttttcgaaagacacgagtctggttgatgaaagtgtgccgccgtgtctatcagacaccatacatgttgctttaaatgtagttgctataactatagtgatctcatcggtaaatacatggattataataccaacaattctcattttcggactgttctatggctacaaaactatattcctggccactagccgaaatttgaaacgaatcgaagggactgcccgaagtcccatgttttcacacctgacggcttcactacaaggactagcaacaattcgagctttcgacgctgaagacgtgttgcgacacgagttcgacaacatccagaaccatcacagctcggctttgtacatgtacatagcctgtagccgaacttttgccttttggttggacgtaaactgtgttatttatgtcgcaatcgtaattttgagtttcctatttattggaacagaaaaatacggcggaaatgttggtcttgccattacacagtcaatcgctttgacaggaatgttgcaaagagggatccgacaatggagcgacttacaaaaccaaatgacttcagtcgaacgcatcttcgagtacactcaagtgccctctgagccagaccacggcaaaaaaatcccgcctaaagattggccctcggccggaaacatcgattttaacgacgtttcaatgaaatattctctcgatggtccttacgttctcaaaaatttgaactgtcggatcgcttcaagcgaaaaaatcgggattgtaggtagaacaggcgccgggaaatcgtccctaatctcggcgttgtttcgcctagccttgaccgaaggcaaaatcacaatcgacggtgtcgaaaccagcgaaatccctctaaatcacttgcgatcagcaatttcgataattccccaagaagcagtgctgttttccggcactttgcgcaaaaatctagacccgtttgataaattcagcgacgaagaactgtggaatgctttggatcaagttgaactaaagtcagccatttcggaattagctgccgggctttcgagcgctgtttcggaagaagggtcaaattttagtgttggagagaaacagctcttgtgtctggccagagcgattctgcaccgaaacaaaattttgattttagacgaagcgacggccaatgttgatttgcaaaccgatgagttgatccagaaaactataaggaggaagtttcgggattgtacggttttgacgatcgctcatcggttgtttactgtcattgattcggacaaaattcttgttttggataatgggagtattgtagaaatggaccatccacatttacttttgcaaaataccgacggagttttttacaatctggtcaaacagacgggaagggctatggcggaaaatttgaccaaaatggcccatgaaaactacatgaaacgcatttcttga

SEQ ID NO: 60038 - protein, 1262 aa, Tribolium castaneum
MEDNERKSLKAHTKVHPKEKANFLSTLFFCWALPTFVKGWKKDLDEDDLYGPLKAHESKALADRMGLVWLKEKNKHRIPSLGKVIIKVFYREILFYACFLMIQELVIKMAQPLLVGKLLEYYAPDQQNMTKNVAYMYASALIFFIFSNIFIQHSCFLGMQHLAMKMQVACRSLIYRKALTLNKNALMKSTVGQMVNLMSSDVSKFSYICLHVHQMILAPIQTVIVLYLLFSTVNTAAMVGVGLLIVFIPIQFYMGKLTSFYRRRTAQKTDNRIRLMNEIICGIKIIKMFTWEKPFSKLVEMARRLELHEIKANSYLRTVYRSVNACLIPLSIFLCVLTYVLSGNTLQAQFVFVVTSFYGTLRQTLTLHFPRCIALLAEINVSLGRIQNFLLAEETQKMSNELRTDDVRVILTEAGVKWTDSSDYSLSDVSFSVNCGELVAVIGRVGSGKSTLLQAILREIDLSKGELVVSGSVSYAAQEPWIFSSSIRQNILFGEKMNFERYKEVVKVCALEKDFNLFPYGDRTIVGEKGVMLSGGQKARVSLARAIYKDADIYLLDDPLSAVDTHVGKQLFDQCILGFLKDKARILVTHQIQYLGKVDEIYLLDRGQVTLRGTYDELKKHKDFAKLLAEVEQTPHEDCAQEKHSVAIAETSKLPTEVKEQRSSGTISKKVYLHYFRAGDSRIFPSFVLLTFVVTQIASSCVDYFLTFWVNLEQKRLEGTETLFFTTNTLLYMYVFLIVSLTFMVLVNSVSFVKFSMNTCKKLHEKMFAQILNATMRFFNTNPSGRVLNRFSKDTSLVDESVPPCLSDTIHVALNVVAITIVISSVNTWIIIPTILIFGLFYGYKTIFLATSRNLKRIEGTARSPMFSHLTASLQGLATIRAFDAEDVLRHEFDNIQNHHSSALYMYIACSRTFAFWLDVNCVIYVAIVILSFLFIGTEKYGGNVGLAITQSIALTGMLQRGIRQWSDLQNQMTSVERIFEYTQVPSEPDHGKKIPPKDWPSAGNIDFNDVSMKYSLDGPYVLKNLNCRIASSEKIGIVGRTGAGKSSLISALFRLALTEGKITIDGVETSEIPLNHLRSAISIIPQEAVLFSGTLRKNLDPFDKFSDEELWNALDQVELKSAISELAAGLSSAVSEEGSNFSVGEKQLLCLARAILHRNKILILDEATANVDLQTDELIQKTIRRKFRDCTVLTIAHRLFTVIDSDKILVLDNGSIVEMDHPHLLLQNTDGVFYNLVKQTGRAMAENLTKMAHENYMKRIS

SEQ ID NO: 60039 - DNA, 2406 bp, Tribolium castaneum
  CDS (1)..(2406)
atggctgcaaatatgagctactgccccccgggggtgcacatttgggacgtgtgggtgaaccacgggacgtcccaatgcttcgtcgagactttgtcatcgtctgtgatcgctgggtttattttactggctggtaccatccagttgtgcatgtacaggaaatatggtactgaaatatcgccaaaccacttggttcagtcccgtttgtaccatttccaaatttttgtgacgctgctggtgcccgtgttggaagtggtgaggttcgtgctgcgagggacagtgtttgatgataaacacatttatgggtttatgataacgtccctcgtgctcaacctcctcgcctaccccttttcccttctggtggtccgagtcgaaaggcactaccttttgccctcggtgcccaccaaagggcacggtatcgttcttttactcttctggactctagttttcatctccgaaaacctcgctttcttcaatttggacaagaaagaatggtggtttcagctcaaaacgacagaggaccaaatcgagatgggccttttcgtcgtacgttacttatcctgtcttttaatctttttactaggcttaaaagcgcccggaatcacccaaaacatcaactatttcacactaaacgactcgactcggaatttgccgccacagcaggaccgtaccgagaaccaatcaacatggcgcaatctttggaagaaagtccgaattttggcgccctttatttggcccaaaaaggacgttttgttgcaatttcgcgtcattttctgcttcctgctattggccggggggcgggtcatcaacttgtacgtccccatttacaacaaatatatcgtggatagtatgacacctgatgagaaattagagaagttggagtttcgctgggactggattttggtttacgttgcgtttaagttcctccaaggtggggggacggggggtatggggttgttgaataatttgcgttcgtttctgtggatcaggatacagcagtatacgacgagggaggtggaggtggagttgttcagacatttgcacagtttgtcgttgcggtggcatttggggcggaagacgggggaggtgttgagagtgatggatagggggacggacagtattaataatttgttgaactatattattttttcgatttttccgacgattgttgatattattgtggctgtggtgttttttgtggtgacttttaatgcgtggttcggattgattgtcttcatcacgatggtgttatacatagctctcacaatcagcatcaccgaatggcgtacgaaattccaacgtcgcatgaaccttgccgacaacgagacacgtgctcgtagcgtcgactctttactaaatttcgaaacggtcaaatattacggtgccgaacagtacgaagttgaagcatttcgtgaagccatcctgcgctaccaagtcgaagaatggaagtccaacatcactctcaacattttaaacacagtccagaacattattatttgtaccggacttttggccggaagtctcttatgtgcctggatggttgtggaaaagggggagcttagagttggcgattatgttcttttcgccacttatattgtccaactctatgtcccattgaactggtttgggacgtattacagggcgattcagaaaaattttgtcgatatggaaaatatgttcgatttgttgaaggaggaccaggaggtgatcgatgcccccaatgcggggcccattgccgtcaaaaggggggctgtggagttcaataatgtctcgtttgggtacttacccgaacggttggtgctgaaaaatgtcactttttcggtgcctcaaggcaaaaccgtggctctggtcggcccttcgggcagcggtaagagcacaataattcgtttattgttccgtttctacgacgtcgagaccggttcggttataatcgacggtcagaacatcaaaacagtgactcaggaatcgctcagaagggcgatcggagtcgtgcctcaggacactgtcctgttcaataacacgatccgatataatattaaatatggacgtttgacagctactgacgctgatgtgattgaagcagcacgtggtgctgatattcatgatcgtattttgacgtttccggacgcttatgacacccaagttggtgaaagggggctgcggttaagcggcggcgagaaacaacgtgttgctatagcacgtacgttgctcaaagcccccatgattatactgttggatgaggcgacaagtgcgcttgatacgcaaactgagagaaacatccaagagtccttggataggatgtgtgccaataggacgacgattattgtggcgcatcgattgtcaactgttatacatgccgatgagatacttgtcttacgggacggggaaattatagaaaggggaaagtaa

SEQ ID NO: 60040 - protein, 801 aa, Tribolium castaneum
MAANMSYCPPGVHIWDVWVNHGTSQCFVETLSSSVIAGFILLAGTIQLCMYRKYGTEISPNHLVQSRLYHFQIFVTLLVPVLEVVRFVLRGTVFDDKHIYGFMITSLVLNLLAYPFSLLVVRVERHYLLPSVPTKGHGIVLLLFWTLVFISENLAFFNLDKKEWWFQLKTTEDQIEMGLFVVRYLSCLLIFLLGLKAPGITQNINYFTLNDSTRNLPPQQDRTENQSTWRNLWKKVRILAPFIWPKKDVLLQFRVIFCFLLLAGGRVINLYVPIYNKYIVDSMTPDEKLEKLEFRWDWILVYVAFKFLQGGGTGGMGLLNNLRSFLWIRIQQYTTREVEVELFRHLHSLSLRWHLGRKTGEVLRVMDRGTDSINNLLNYIIFSIFPTIVDIIVAVVFFVVTFNAWFGLIVFITMVLYIALTISITEWRTKFQRRMNLADNETRARSVDSLLNFETVKYYGAEQYEVEAFREAILRYQVEEWKSNITLNILNTVQNIIICTGLLAGSLLCAWMVVEKGELRVGDYVLFATYIVQLYVPLNWFGTYYRAIQKNFVDMENMFDLLKEDQEVIDAPNAGPIAVKRGAVEFNNVSFGYLPERLVLKNVTFSVPQGKTVALVGPSGSGKSTIIRLLFRFYDVETGSVIIDGQNIKTVTQESLRRAIGVVPQDTVLFNNTIRYNIKYGRLTATDADVIEAARGADIHDRILTFPDAYDTQVGERGLRLSGGEKQRVAIARTLLKAPMIILLDEATSALDTQTERNIQESLDRMCANRTTIIVAHRLSTVIHADEILVLRDGEIIERGK

SEQ ID NO: 60041 - DNA, 2184 bp, Clostridium thermocellum ATCC 27405
  CDS (1)..(2184): transl_table=11
atgctcaggcgtttgttcaaaaaaaagtatgtatgcgtaaggcaatatgatttgacagactgtggagcagcctgtttgtccagtattgcccaatattacgggttaaaaatgtcccttgcaaagatacgtgagatgacaggcaccgatacccagggcacaaatgcctatggtttaattcatgctgcaaagcaactggggttttcagcaaaaggtgttaaggcctcaaaagaggatttgctgaaagattttaggcttccagccatagcaaatgtaattgttgacaacaggcttgctcattttgtagtgatttattcaattaaaaacaggataattacggttgccgaccctggcaagggaattgtcaggtatagtatggatgatttttgttcaatttggaccggtgggcttgttttgctggagcccggcgaagctttccaaaaaggggattatacccaaaatatgatggtgaaatttgcaggttttttgaagcctttaaaaaaaaccgtactgtgtatatttttagcttcgcttttatatactgctttaggaattgcaggctccttttatatcaagtttttgtttgacgaccttataaaatttgaaaagcttaacgaccttcatataatttccgcaggatttgctgttatatttttacttcagatatttcttaattattacagaagcatacttgttaccaaacttggaatgagcattgacaagtccataatgatggagtattactcccatgtgttaaagcttcccatgaattttttcaattccagaaaagttggggagataatttcaagatttatggatgcttcaaaaatacgacaggcaatttccggagcaacccttaccataatgattgatacaattatggccgttatcggaggaattcttttatatatacaaaactcttccctgttctttatatcttttatcatcatattgctgtacggaataattgtgacggtgtttaacaaaccgattcagaatgctaacaggcaaataatggaggataatgcaaaattaacttcggcgctggtggagtcggttaaagggattgagacgataaaatcctttggtgccgaggaacagaccgaaaaaagcaccagagacaaaattgaaactgtaatgaaaagctcttttaaagaagggatgctgtacataaatctttcttccctgaccggtattgttgccgggcttggaggtattgtaatactctgggccggtgcatacaatgtcataaagggaaacatgagcgggggacagcttcttgcttttaatgcactgttggcatattttctcacacctgtgaaaaacttaattgatcttcagccgcttatacaaacggcggtggtagcctccaacaggcttggagagatacttgaacttgccactgaaaaggaactgagagaagacagtgatgattttgtcatatcattaaaaggagacattgaatttaggaatgtggattttcgctacggattaagaaagcctgtgctaaaaaacattaatttaaccataccaaaagggaaaacggtagccatagtaggtgagagtggttccgggaaaactactctggcaaagcttttgatgaatttttacagtccggaaaaaggggacattttgataaacggacacagtataaaaaatataagtttggagttgattagaaagaaaatagcttttgtttcacaggatgtctttattttcagtggtactgtaaaagaaaatctttgtcttggcaatgaaaatgttgatatggatgagattataaaagcggctaaaatggcaaatgcccatgattttatagaaaaactgcccctaaaatatgatacttttttgaatgaaagcggagcaaatctttccgaagggcaaaaacaaaggctggcgatagcaagggcactgcttaaaaaaccggatattttgatactcgacgaggcaacaagcaatttggacagcatcaccgaaaaccatatcaaggatgcaatatacggtttggaagatgatgtaacggttattataatagcccacaggctgagcacaatagtaaactgtgacaaaatatatctgctaaaagacggtgagatagtggagagtggctctcacaccgagcttatagcgttaaaaggttgttattttaagatgtggaaacagacagaaaacactttggcttcgtaa

SEQ ID NO: 60042 - protein, 727 aa, Clostridium thermocellum ATCC 27405
MLRRLFKKKYVCVRQYDLTDCGAACLSSIAQYYGLKMSLAKIREMTGTDTQGTNAYGLIHAAKQLGFSAKGVKASKEDLLKDFRLPAIANVIVDNRLAHFVVIYSIKNRIITVADPGKGIVRYSMDDFCSIWTGGLVLLEPGEAFQKGDYTQNMMVKFAGFLKPLKKTVLCIFLASLLYTALGIAGSFYIKFLFDDLIKFEKLNDLHIISAGFAVIFLLQIFLNYYRSILVTKLGMSIDKSIMMEYYSHVLKLPMNFFNSRKVGEIISRFMDASKIRQAISGATLTIMIDTIMAVIGGILLYIQNSSLFFISFIIILLYGIIVTVFNKPIQNANRQIMEDNAKLTSALVESVKGIETIKSFGAEEQTEKSTRDKIETVMKSSFKEGMLYINLSSLTGIVAGLGGIVILWAGAYNVIKGNMSGGQLLAFNALLAYFLTPVKNLIDLQPLIQTAVVASNRLGEILELATEKELREDSDDFVISLKGDIEFRNVDFRYGLRKPVLKNINLTIPKGKTVAIVGESGSGKTTLAKLLMNFYSPEKGDILINGHSIKNISLELIRKKIAFVSQDVFIFSGTVKENLCLGNENVDMDEIIKAAKMANAHDFIEKLPLKYDTFLNESGANLSEGQKQRLAIARALLKKPDILILDEATSNLDSITENHIKDAIYGLEDDVTVIIIAHRLSTIVNCDKIYLLKDGEIVESGSHTELIALKGCYFKMWKQTENTLAS

SEQ ID NO: 60043 - DNA, 1740 bp, Herminiimonas arsenicoxydans
  CDS (1)..(1740): transl_table=11
ttgcgcggcctgctgaaatttttgctgccctataaaaaacaatttgcgctggccggcatcgcactgattgtggccgcagcagcgacattggcgattccatatgcgttccgccagatgatcgatctcggcttcggcgccaacggcatacacgataccggcagcatcaatacctacttcctcgccctgttcggtgttgcctgcatactggcgctcgccactgccgcgcgcttttacatggtgtcgtggctgggtgaacgcgtgacggcagatgtgcgcaacgccgtctattcgcatgtcgtcacgcaaagcccgcaatttttcgagacgacgcaaagcggtgaagtcctgtcgcgcctgacgaccgataccacactgatccagaccctgatcggcaccagcatatcgatggcattgcgcaatacgctgctgtttgccggcggcctggtgatgctgttcgtcaccagcatcaaactgtcgtcgattattctcgtgatgctgattgcgacggtcttgcctatcgtctggttcggccggcgtgtgcggtccctgtcacgcgcctcgcaggatagggttgcagattcgtctgccctggccggtgaaatcctgaacgcgatgccgaccgtgcaggccttcacgcatgaaaaaattgaatccgaacgtttcagcaagacagtggaagatgcattcaaaaccgcgatgcgccgtatccgcgcccgctcgctgctgacgatgattgcgatcctgctgattttcggtgcgattgttttcgtcctgtggctgggtgcgcatgcagtgatcgacggcacgatgagcggtggcgaactcggtcagttcatcctgtattccgccattgtggcgggcgcaatcggcgccttgtccgaagtggtgggcgatgcacaacgtgcagcaggggcgaccgaacgcttgctcgaattgctcgccgtacagtcgccgatttcctcgcctgccgtacctctccccttgccgccacggcgcgccaacggctcttcactggcactggatctggtgagcttctactacccttcgcgtccattgaccccagccatatccaatttctcgatcgcgatcaaggccggtgaaacggtggccgtggtcggcccgtccggcgccggcaagacatcgctgtttcagctgctgttgcgtttttacgatccgcaggaaggcgtgatcgaactcgatggcgtcgatatccgtcagctcgatctgcatgccttgcgcaacaccatcggcatcgtgccgcaggacaccgtgattttttctgccaatgcgatggaaaacatacgctacggccgccccgatgccagcgacgaggaagtcatcgccgtggcaaaaatggccgcggcgcatgaattcatagatcgtttgccggaaggctatcaatcctttctcggcgaacgcggcgtgcgcctgtccggcggtcagcgccagcgcatcgccatcgcgcgcgccttgctgaaaaacccgcccctgctgctgctcgatgaggccaccagtgcgctggacgcggaatcggaacgtctggtgcagagcgcgctggaagcggcgatggtgggccgcaccaccctggtgatcgcccacagattggcaaccgtgcagcgcgcccatcgcatcatcgtgatggaacatggccacatcgtcgaaaccggcacgcatgcatcgctggtcgcagccggcgggctgtatgccagtttggccgcgctgcagttcgggcagcattga

SEQ ID NO: 60044 - protein, 579 aa, Herminiimonas arsenicoxydans
MRGLLKFLLPYKKQFALAGIALIVAAAATLAIPYAFRQMIDLGFGANGIHDTGSINTYFLALFGVACILALATAARFYMVSWLGERVTADVRNAVYSHVVTQSPQFFETTQSGEVLSRLTTDTTLIQTLIGTSISMALRNTLLFAGGLVMLFVTSIKLSSIILVMLIATVLPIVWFGRRVRSLSRASQDRVADSSALAGEILNAMPTVQAFTHEKIESERFSKTVEDAFKTAMRRIRARSLLTMIAILLIFGAIVFVLWLGAHAVIDGTMSGGELGQFILYSAIVAGAIGALSEVVGDAQRAAGATERLLELLAVQSPISSPAVPLPLPPRRANGSSLALDLVSFYYPSRPLTPAISNFSIAIKAGETVAVVGPSGAGKTSLFQLLLRFYDPQEGVIELDGVDIRQLDLHALRNTIGIVPQDTVIFSANAMENIRYGRPDASDEEVIAVAKMAAAHEFIDRLPEGYQSFLGERGVRLSGGQRQRIAIARALLKNPPLLLLDEATSALDAESERLVQSALEAAMVGRTTLVIAHRLATVQRAHRIIVMEHGHIVETGTHASLVAAGGLYASLAALQFGQH

SEQ ID NO: 60045 - DNA, 1782 bp, Burkholderia vietnamiensis G4
  CDS (1)..(1782): transl_table=11
ttggaaacccagaacactcttcgcaaaccgatggacggcgccagcacgtcgccggtcacggtcctcaagcgcctgtggccgtacatccggccgctgatcggcatcgtggtgctcgccgtgatgacgatgggcgtcgtcgccgccaccgaggccggcattccggcgctgctcaagccgctgctcgaccacgggttcggttcgcacggcagcgatcgcgcgaaatggtacgtgccgatcgcggtgatcgggctcgcgctcgtgcgcggcgtgtcgcagtacgcgtccaattacctgctcaactacgtatcgaaccgcatcctgctgcagctgcggctcgagatgttccagcggatgatccacacgggcgcgtcgttcttccagcgcgagaccgcgagcaccgtgatcaacgcgatcgtgttcgaggtcaaccagatcctgtcggtgctgaccggcgtgatggtcacgctcgtgcgcgattcgctgaccgtcgtgttcctgctcggctacctgttcatcctgaactggcggctcacgctgatcgtcgcggtgatcctgccgggcatcggctggctggtcagcaagatcaatcgccgcctgcgccgcctgaaccgcgagcaccagacgctgaccaacgagctgtcgtacatcgtcgaggagacggtcggcgggtacaaggtcgtcaaggtgcacaacggcgaagcgtacgaactcgaccgcttcacctcgatgagcaagcgcctgcgcggctatgcgatgcgcatgacgatctccggcggcctcgcgcagccgctcacgcaattcctcgcgtcgatcgcgctcgcggtggtgatcacgatcgcggtcgtgcagtcgacgaacgaccagacgacggtcggcggcttcgtcgcgttcgtcacgtcgatgctgctggtgatttcgccgctcaagcatctgatcgacgtgaaccagccgctgcagcgcggcatgaccgccgccgagctgatcttcgggctgatcgacgagccggccgagccgcagggcggcggccgcgagctgccgcatgcgcgcggtgagatcgaattccgcgacgtgtcgttcgactacggcgcggccgagcggccgacgctcgaccgcatttcgttcaaggtcgcgccgggcgagatgatcgcgctcgcggggccgtccggcagcggcaagacgacgctcgtgaacctgctgccgcgcttcttcgatccgaccggcggcacgatcctggtcgacggcgtgccggtccgcgacttcgacatccacgccctgcgcgggcagatggcgatggtcagccaggacgtggtgctgttcaacgacacgatcgccgcgaacgtcgcgtacgggcagacgccggaccgcgcgcgcgtccaggccgcgctcgaagccgcgaacctcgccgacgcggtcgccgcgatgccggacgggctcgacacgctggtcggcggcaacggcatgcgcctgtcgggcggccagcggcagcggctcgcgatcgcgcgcgcgatctacaaggacgcgccgatcctgatcctcgacgaggcgacctccgcgctcgactccgaatccgagcgtcacgtgcaggccgcgctcgaacggctgatggaaggccgcacgacgctcgtgatcgcgcaccggctgtcgaccatcgaacgcgcggaccgcatcctcgtgctcgaggccggcaagatcgtcgagtccggcagccacgacgaattgctgcgtcacggcgggctctacgcgcatctgcatcgaatccagtatcagcagcaggcggcctga

SEQ ID NO: 60046 - protein, 593 aa, Burkholderia vietnamiensis G4
METQNTLRKPMDGASTSPVTVLKRLWPYIRPLIGIVVLAVMTMGVVAATEAGIPALLKPLLDHGFGSHGSDRAKWYVPIAVIGLALVRGVSQYASNYLLNYVSNRILLQLRLEMFQRMIHTGASFFQRETASTVINAIVFEVNQILSVLTGVMVTLVRDSLTVVFLLGYLFILNWRLTLIVAVILPGIGWLVSKINRRLRRLNREHQTLTNELSYIVEETVGGYKVVKVHNGEAYELDRFTSMSKRLRGYAMRMTISGGLAQPLTQFLASIALAVVITIAVVQSTNDQTTVGGFVAFVTSMLLVISPLKHLIDVNQPLQRGMTAAELIFGLIDEPAEPQGGGRELPHARGEIEFRDVSFDYGAAERPTLDRISFKVAPGEMIALAGPSGSGKTTLVNLLPRFFDPTGGTILVDGVPVRDFDIHALRGQMAMVSQDVVLFNDTIAANVAYGQTPDRARVQAALEAANLADAVAAMPDGLDTLVGGNGMRLSGGQRQRLAIARAIYKDAPILILDEATSALDSESERHVQAALERLMEGRTTLVIAHRLSTIERADRILVLEAGKIVESGSHDELLRHGGLYAHLHRIQYQQQAA

SEQ ID NO: 60047 - DNA, 1935 bp, Bradyrhizobium sp. ORS278
  CDS (1)..(1935): transl_table=11
atgtttccggatttgccaagcgacgtgcggcgggcctatcacgacggcagattggatgaattctcaggtgatcccatgagtgcagtggaacggcttgacgggcggcagggcgcggccccttcggcgcaggaggcggtccaggacgccgtcgccgcggtcgaggccctgaccgagccggcgacgccggtccgccgctccaagctgcgtccactgctggcactggcgccctatatcgcccgttaccgcgttcgcgcctttctcgctctggtcgcactgacgatcgccgctctcaccacgctgctggtcccggtcgcggtccgccgcatgatcgatttcggcttcacgccgaagggcatcgcgctgatcaacagctatttcagcgtcatgatcgcggtggtcgccgtgctcgcgctggccagcgccgctcgctattacctggtcatgaccatcggcgagcgcatcgtcgccgatctccgccgcgacgtgttcgcgcatctgatgtcgctgtcgccttcgttcttcgattccgcgcgctccggcgaattggtgtcgcggctcaccgccgacaccacgcagatcaagtcggccgccggcgcctcggtctcgatcgcgctgcgcaacctgctgctgtttctaggcgccaccgcgatgatggtgttcaccagcccgaaattgtccggcttcgtgctgctggccattccgctgatcgtgctgccgctggtcgcgttcgggcgctgggtgcgccgcctgtcgcgcaatgcccaggacacgctggccgacgcctcggcctatgcctccgagctggtcggcgccatccgcacggtgcaggcctataccagcgagaagctcgcggccggacgcttcggcggcgaggtcgagcaggcctatgaggccgcacgggtctcgaccaaggcgcgcggtgtgctcaccgcaatcatcatcttcatcgtgttctccagcgtggtcgcgatcctctgggtcggctcgcacgatgtgctcaccggcaacatcagcgccggccggctcggccagttcgtgctctacgcggccttcgccgccgccggccttggccagctttcggaggtctggggggaagtgtcggccgcctcgggcgccgccgagcggctgttcgagctgctgcacgtgaagccggagatcatcgcaccggcgcatccgaccgcactgcccgaaccggcgcgcggcgacatcggcttcgaccgcgtcagcttcgcctatccgagccgtcccgatgtccgcgtgctcgaggacgtctcgttcgccatccgcgccggcgagaaggtcgcgatcgtcggcccctccggcgccggcaagagcacgctgtttcatctcctgttgcgcttctatgatccggcgtccggcgtcatctcggtcgatggcgtgccggtccggtccgccgatccgcgcaaggtgcgcgaacgcatggcgctggtgccgcaggaatccgtggtgttcgccgcgagcgcgcgcgagaacatccgcttcggccgccccgaagcgaccgatgccgaggtcgagcgcgccgccgatctcgcccatgccagtgagttcatccgtcgcctgccggaaggtttcgagaccccgctcggcgagcgcggcgtgacgctgtccggcggccagcgtcagcgcatcgcgatcgcgcgcgccatcctccgcgacgcgccgctattgctgctcgacgaggcgacctcggcgctcgacgccgagagcgagacgctggtgcagacggcgctcgaaggcctgatgaaggaccgcaccacgctggtgatcgcgcatcgcctcgcgaccgtgctctcgtgcgaccgcatcctggtcatggaccgcggccgcatcgtcgagcagggcacgcatacgtcgctggttgcggcgaatggcctctatgcgcggcttgcgcggctgcagttcgagaccgtgtag

SEQ ID NO: 60048 - protein, 644 aa, Bradyrhizobium sp. ORS278
MFPDLPSDVRRAYHDGRLDEFSGDPMSAVERLDGRQGAAPSAQEAVQDAVAAVEALTEPATPVRRSKLRPLLALAPYIARYRVRAFLALVALTIAALTTLLVPVAVRRMIDFGFTPKGIALINSYFSVMIAVVAVLALASAARYYLVMTIGERIVADLRRDVFAHLMSLSPSFFDSARSGELVSRLTADTTQIKSAAGASVSIALRNLLLFLGATAMMVFTSPKLSGFVLLAIPLIVLPLVAFGRWVRRLSRNAQDTLADASAYASELVGAIRTVQAYTSEKLAAGRFGGEVEQAYEAARVSTKARGVLTAIIIFIVFSSVVAILWVGSHDVLTGNISAGRLGQFVLYAAFAAAGLGQLSEVWGEVSAASGAAERLFELLHVKPEIIAPAHPTALPEPARGDIGFDRVSFAYPSRPDVRVLEDVSFAIRAGEKVAIVGPSGAGKSTLFHLLLRFYDPASGVISVDGVPVRSADPRKVRERMALVPQESVVFAASARENIRFGRPEATDAEVERAADLAHASEFIRRLPEGFETPLGERGVTLSGGQRQRIAIARAILRDAPLLLLDEATSALDAESETLVQTALEGLMKDRTTLVIAHRLATVLSCDRILVMDRGRIVEQGTHTSLVAANGLYARLARLQFETV

SEQ ID NO: 60049 - DNA, 1791 bp, Bartonella quintana str. Toulouse
  CDS (1)..(1791): transl_table=11
atgaatcttttcaatcattcagaaaaatctacaaaatcttcccatacaaagccttcattctcttcgttctcgacttttggcccttatattatacgttatagttggctcatactctttggttttctcgctttatctgttgccgctcttgttacgctcgctttgcctgttgctattcgtcaaatgcttgatcatggtttttcttcttcaagtcatggcaatatcaatttttacttcgctattttgtttgtgttagccttgcttcttgcacttgcttcagcctgccgttattattgtgttattaccttgggcgaacggattgttgcggatttacggcgtgatgtttttacgcatatcatacaactttctccggctttttttgatcagtcccattctggtgaacttgtttcgcggcttttaacagataccactcaaataaaattggctgttggctccactgcttctatagctttgcgtcatctcatcgtggtgattggagcgatttttatgatggttatcaccaatgccaaattgtcttcgcttgttctgcttgctatcccttttgttgctattccattggttattttcgggcgcaaggttcgtacacgcacacgtattgcgcaagaccgtatagcagatgccaacgctttggcaacagaacaggtaagcgccgttcgtactgtacaagcctttaacgttgaaaaacaggtttctgcacgtttttcccagttggttgaacgtgcctttcagacagcgcgtgcttccgtgattcttcgttcttttttcaccggctttaccatctttttggtttttagcagtgttgttgccgttttatggattggatcccgtgacgtcttaaatggcaccatgtcgggcggaacattaggtcaatttgttctctatgcggttttgggagcttctacttttacacaattatcggaacttggtgcagaattaatccaagccctgggcgctgctgaacggcttgctgaattattgcaaaaacagcccactattttagctcccaaagttcctttaccattggcacaacctgtccaaggcgcaatcatttttgatcaggttgattttacatatccttctagaccaaaagaaaagatcttgcgctctctttccttttctgtcaaagcgggcgaaactgtggcttttgttggtgcttcaggtgcaggaaaaagcaccattttttcactgattcttcgtttttatgatccaaacagcggtcaaatccgctttgatggtactgaaattaacagcctttctctccaagatttacgcagttcaatttcttatgtcccccaagatgtagccatttttgacggcacattacgggataatattacttttggtagcgaaaatattaatgaagagcaaatcatcgccgcagccaaaacagccaatgcacttgaatttatccaggccttgccaaaaggttttgatactgaggtcggagaacgtggtaccatgctttctggtggacagaaacagcgtattggtattgcacgtgcgatttttaaaaatgctcctcttttgttacttgatgaggcaacctcagctttagatgcaagcagcgaaaagttggtgcaagaagccttggaaggtctgatgcaacatcgaacaacactggtgattgctcaccgtttagcaacgattttaaaagcagatcgcattctggtgatggaaaaagggactcttgttgaagagggaacacatgcggaactcattgcacaaaatggcgtttatgcacatttggcgaaactgcaattttcgcctgaataa

SEQ ID NO: 60050 - protein, 596 aa, Bartonella quintana str. Toulouse
MNLFNHSEKSTKSSHTKPSFSSFSTFGPYIIRYSWLILFGFLALSVAALVTLALPVAIRQMLDHGFSSSSHGNINFYFAILFVLALLLALASACRYYCVITLGERIVADLRRDVFTHIIQLSPAFFDQSHSGELVSRLLTDTTQIKLAVGSTASIALRHLIVVIGAIFMMVITNAKLSSLVLLAIPFVAIPLVIFGRKVRTRTRIAQDRIADANALATEQVSAVRTVQAFNVEKQVSARFSQLVERAFQTARASVILRSFFTGFTIFLVFSSVVAVLWIGSRDVLNGTMSGGTLGQFVLYAVLGASTFTQLSELGAELIQALGAAERLAELLQKQPTILAPKVPLPLAQPVQGAIIFDQVDFTYPSRPKEKILRSLSFSVKAGETVAFVGASGAGKSTIFSLILRFYDPNSGQIRFDGTEINSLSLQDLRSSISYVPQDVAIFDGTLRDNITFGSENINEEQIIAAAKTANALEFIQALPKGFDTEVGERGTMLSGGQKQRIGIARAIFKNAPLLLLDEATSALDASSEKLVQEALEGLMQHRTTLVIAHRLATILKADRILVMEKGTLVEEGTHAELIAQNGVYAHLAKLQFSPE

SEQ ID NO: 60051 - DNA, 1791 bp, Bartonella henselae str. Houston-1
  CDS (1)..(1791): transl_table=11
atgaattttttcaatcattcagaaaaagctaaaaaatttttccatacaaagccttcattctcttcgcttacaacttttagtccttatcttgtgcgctatcgctggttgtttgtctttgcctttattgctttatctgttgctgctctcgtgactcttactttgcctgttgctatccgtcaaatgcttgatcatggcttttctacttcaagtcatggccatattaatttttacttcgctcttttgtttgttttagctttgctgcttgcacttgcttcagcctgccgttattactgtgtcatcactttaggagaacggattgttgccgatttacggcgtgatgtttttgtgcatattatgaaactttctcctgctttttttgatcgttcccattctggtgaacttgtttcacggcttttaacagataccactcaaataaaattggctgttggttcaaccgcttctacggctttgcgtcatctgattgtggtgattggagcgattgttatgatggttatcaccaatgccaaattgtcttcgcttgttttgcttgctatcccttttgttgctattccgttagttgtctttgggcgcaaggttcgtacacgtacacgcgctgcgcaagatcgtattgcagatgccaacgctttagcaactgaacaggtcagcgccattcgcactgtgcaggcctttaccgctgaaaagcttgtttctaaacgtttttctcagttggtagaacgtgcttttcagacagcacgctcttccgtcattctgcgttccttttttactggctttgcaatctttctggttttcggcagtgtggttgctgttttatggattggatcccgggatgttttgaatggcactatgacgggtggggcattaggtcaattcgtgctctatgcggtttttggagcttctacctttgcgcaattatcagaattgggtgcagaattaatccaagcagcaggcgctgctgaacggcttgctgaattgttgcaagaacagcctactattttagctccaaaagctcctgcacctttggcaaaacctgttcaaggtgcccttgtttttgatcaggttgattttacttattcttccagaccacaagagaagattttgcgctctctttccttttctgtcaaaccaggggaaacagttgcttttgttggcgcttcaggtgcaggaaaaagcacacttttttctttgatccttcgtttttatgatccaataagtgggcaaattcgctttgatggcgtggaaatcaagcgcctttctctgcaagatttacgcagttcgatctcgtatgttccacaggatgtcgccatttttgacggtacactgcgcgataatattgtttttggaaccgaaaatatgactgaagagcaaatcattgccgctgctaaagcagcaaacgcacttgagtttattgaagctttaccaaatggtttggatacagaagtgggagaacgcggtattatgctttctggtggacaaaaacaacgcattggtattgctcgggcaattttaagaaatgctcccctgttgctgctggacgaagcaacatcagctttagatgcaaacagtgaaaaattggtgcaagaagccttagaagaactgatgcaaaatcggacaacattggtgatcgctcatcgtttggcaacaattttaaaagctgatcgtattctcgtgatggagaaaggtgctcttgttgaagaaggaacacatgcagaactcgtcgcacaaaacggggtttatgcgtatttagccaaattgcaattttcgcctgagtaa

SEQ ID NO: 60052 - protein, 596 aa, Bartonella henselae str. Houston-1
MNFFNHSEKAKKFFHTKPSFSSLTTFSPYLVRYRWLFVFAFIALSVAALVTLTLPVAIRQMLDHGFSTSSHGHINFYFALLFVLALLLALASACRYYCVITLGERIVADLRRDVFVHIMKLSPAFFDRSHSGELVSRLLTDTTQIKLAVGSTASTALRHLIVVIGAIVMMVITNAKLSSLVLLAIPFVAIPLVVFGRKVRTRTRAAQDRIADANALATEQVSAIRTVQAFTAEKLVSKRFSQLVERAFQTARSSVILRSFFTGFAIFLVFGSVVAVLWIGSRDVLNGTMTGGALGQFVLYAVFGASTFAQLSELGAELIQAAGAAERLAELLQEQPTILAPKAPAPLAKPVQGALVFDQVDFTYSSRPQEKILRSLSFSVKPGETVAFVGASGAGKSTLFSLILRFYDPISGQIRFDGVEIKRLSLQDLRSSISYVPQDVAIFDGTLRDNIVFGTENMTEEQIIAAAKAANALEFIEALPNGLDTEVGERGIMLSGGQKQRIGIARAILRNAPLLLLDEATSALDANSEKLVQEALEELMQNRTTLVIAHRLATILKADRILVMEKGALVEEGTHAELVAQNGVYAYLAKLQFSPE

SEQ ID NO: 60053 - DNA, 1800 bp, Symbiobacterium thermophilum IAM 14863
  CDS (1)..(1800): transl_table=11
gtggcgatgcgcggcggccccggcgccttccggctcgacgactacgacgtgaagctgagccaggtggatccccggatctaccggctgctcggcaccctgatccgcccgtacgtgcccaagctggccgcgggcgtcctgctcatggtggccaccgccctcaccgggctggtaggtccgtacctcacgcaggtggcgatcgaccgcttcgtcgccgagcgcgaccccgcgggactcgacctggtggccctggccttcctggcgaccgccctgctcaactggtggtccagttacgggcagacgtacatcgtctcctacgtgggccagtccatcatctacgatctgcgggaccggatgttccgccacctgcagcggctctccttccggttcttcgactccatggccaccggacgcatcatgtcccggctgatgtccgacgtggacgcgatcaaccagctggtctcctcgggcctggtgagcctgttcgccgactctatggtgctggtcaccatcatgggcacgatgctctggatgaactggcggctggccctggtctccttcatcaccatcccgaccctgctgctggtgctgcggcttttccggggctggatgcgggatgccttcatggcccagcgccggcgggcggcggacatgaacgcccacctggcggaggccatcgccggcatccgggtcacgcaggcgtacgtgcgggaggcccgcaaccaggcgcagttcgacggcatcaacgagcggctgcggcaggccaacctgggggccgtgcgggtctgggcgacgatgatgccctcgattgaggtggtgtcggccttcggcgtgacgctggtgctctggtacggcggcatcctgctccggggcggcaccgcggacgtgaccgtgggccaggtcgcggccttcatcctctacctgaaccggttctttcagcccatccgcgacctgtcgcaggtgttcaacgtctttcaggcagcggtggtctcggccgagcgggtcgccgagctgctggatcagcagccggagatcgtggaccggcccggcgcccgcgacctgccccgggtcgccggccgggtggagttccgggacgtggtgttcgggtacgagccgggccaggtggtgctgaaggggatcaatctgcgggcggagccgggggagaccatcgccctggtggggccgaccggcgcagggaagtcgtcggtcatcaacctgctcgcccggttctacgagccgcaggaggggcaggtgctggtggacggggtggatctcagcaccgtgacgcagcggtcctggcggtcgcagctgggcatcgtgctgcaggacaccttcctgttctcgggcacgatccgggacaacatccgctatggccggcctgacgccaccgacgaggaggtggaggccgccgcccgcgcggtgggcgcccacgacttcatcgtgcggctggagaaggggtacgacacggaggtgcacgagcggggggcgaagttgtcggtgggtcagcggcagctgatcgctttcgcccgggccttgtgcgccgacccggcggtgctgatcctggacgaggcgacgtcgaacatcgacacgcacacggaggcggtgatccaggaggccctgcagaccctgctccggggccggacggcgttcgtcatcgctcaccggctgtccacgattcggtccgcggaccggatctactacatcgaggacggacaggtggtggagcaggggcggcacgcggagttgctcgccctgggggggaggtatgcgaggatgtatcgggggcagtgggagggggagtga

SEQ ID NO: 60054 - protein, 599 aa, Symbiobacterium thermophilum IAM 14863
MAMRGGPGAFRLDDYDVKLSQVDPRIYRLLGTLIRPYVPKLAAGVLLMVATALTGLVGPYLTQVAIDRFVAERDPAGLDLVALAFLATALLNWWSSYGQTYIVSYVGQSIIYDLRDRMFRHLQRLSFRFFDSMATGRIMSRLMSDVDAINQLVSSGLVSLFADSMVLVTIMGTMLWMNWRLALVSFITIPTLLLVLRLFRGWMRDAFMAQRRRAADMNAHLAEAIAGIRVTQAYVREARNQAQFDGINERLRQANLGAVRVWATMMPSIEVVSAFGVTLVLWYGGILLRGGTADVTVGQVAAFILYLNRFFQPIRDLSQVFNVFQAAVVSAERVAELLDQQPEIVDRPGARDLPRVAGRVEFRDVVFGYEPGQVVLKGINLRAEPGETIALVGPTGAGKSSVINLLARFYEPQEGQVLVDGVDLSTVTQRSWRSQLGIVLQDTFLFSGTIRDNIRYGRPDATDEEVEAAARAVGAHDFIVRLEKGYDTEVHERGAKLSVGQRQLIAFARALCADPAVLILDEATSNIDTHTEAVIQEALQTLLRGRTAFVIAHRLSTIRSADRIYYIEDGQVVEQGRHAELLALGGRYARMYRGQWEGE

SEQ ID NO: 60055 - DNA, 1851 bp, Agrobacterium tumefaciens
  CDS (1)..(1851): transl_table=11
atgtcaatttcagacacaatctaccgtccgtttgaaaatttgatccggccattagatattccctaccggcctcttccctccacagggcctgtggcggtcctcctgcatttcatatcaatgtttcggggtgtgctgatcctactcgcactttccgcgatggcgatggaagcgatcaatttgtctatcgtctgggggctgtcggttgtcgtggatggcgtcacgcaacagggcgcgtccgcattcctggagaatgaatggccactgctgacctttctcggtctcttgatcttcccggcgatgccaatcgcttcgttcctactcaacacactccagtcacatacgcttggcatcggcatgccggcggcaatccagtggcagggccacaaggcggtggagcggcaggatcttgctttcttccatgagctatttgctgggcaggtcgcctcgcggctacagcaggtatcatccgccgtacagcagcagatcattgccgctttccagaccgtcccgcgctttttgttgcagatggttggttccgttatcctgcttagcgctctgtcctggcagctcgccctgcctgttgtcatatggatcgcgctcaacgtcgcatacaccgtcagaacagttcccacctttgccgagcgctcccgtcgcaccgccaagcagcgtagcttggttgccggtgccattaccgatctctacaccaacatgcagatgatcaagcaatttgccgctgaagatagcgaagcaggcgcgatccgccgtaccatccaaaagtccgtacagacgcagcagagcgaacaacgcatctaccgtacgtccgaactcgccgtggttatcctcaacacgatcctgtggctaagcatgctatcgatcggattttccggcttggttaaggggttcctctccgtcggtcagttcgtcggcgcagtctacatcctgcagcggctttccacccagatctttgttttcctgcaaatgggccagcagatctttcaggcaatagggacaatcaaggacgcgatgccggtgatgaccacgccgcccaccatcattgatcggccgagcgcagccgatcttgtagtggaccgtggcgaaattcggttccaaaatgtcggtttcgcctacaagtccggcaagccggtgatcaataatctttcgctgaccatccggcccggggaaaaggtcggcctggttggactatctggggctggcaagacaacactcgtgagccttctgctgcgcttttacgacattcaagacggagcaatcctgatcgacgggcaggacatctgcgaggtcactcaggggagccttcgccgcaacatcggcgtgatcgcgcaggatgtagcattgctgcaccgctcggtcggcgataatatccggtatggtcggccagaggcgacccagcaagaaatcgaagcggcggcgacgacagcgcgggctgatctgttcatcagggacctgtcggacggtgaaggccgtaaaggttatgaggccttcgtcggcgaccgtggtatcaaactctccggtggtcaacggcaacgtgtggctatcgcgcgggtgttgctgaaggacgcgccgatcctggtgctcgatgaggcgacctccgccctcgacagtgaatcagaggctgctatccaagaaaagctggggctggtcatggcaggaaagacggtcattgctatcgcccatcgcctttcgactattaccatgatggatcggatagtcgtgctcgaccgtggccatatcgtggaagaaggcagacctgaggagttgataaagcggggtggcttgtttgcccgcctttggaaacgtcagacgggtggctttattccagaggatgagtag

SEQ ID NO: 60056 - protein, 616 aa, Agrobacterium tumefaciens
MSISDTIYRPFENLIRPLDIPYRPLPSTGPVAVLLHFISMFRGVLILLALSAMAMEAINLSIVWGLSVVVDGVTQQGASAFLENEWPLLTFLGLLIFPAMPIASFLLNTLQSHTLGIGMPAAIQWQGHKAVERQDLAFFHELFAGQVASRLQQVSSAVQQQIIAAFQTVPRFLLQMVGSVILLSALSWQLALPVVIWIALNVAYTVRTVPTFAERSRRTAKQRSLVAGAITDLYTNMQMIKQFAAEDSEAGAIRRTIQKSVQTQQSEQRIYRTSELAVVILNTILWLSMLSIGFSGLVKGFLSVGQFVGAVYILQRLSTQIFVFLQMGQQIFQAIGTIKDAMPVMTTPPTIIDRPSAADLVVDRGEIRFQNVGFAYKSGKPVINNLSLTIRPGEKVGLVGLSGAGKTTLVSLLLRFYDIQDGAILIDGQDICEVTQGSLRRNIGVIAQDVALLHRSVGDNIRYGRPEATQQEIEAAATTARADLFIRDLSDGEGRKGYEAFVGDRGIKLSGGQRQRVAIARVLLKDAPILVLDEATSALDSESEAAIQEKLGLVMAGKTVIAIAHRLSTITMMDRIVVLDRGHIVEEGRPEELIKRGGLFARLWKRQTGGFIPEDE

SEQ ID NO: 60057 - DNA, 1803 bp, Methylococcus capsulatus str. Bath
  CDS (1)..(1803): transl_table=11
atgtttgatcgctcccgcctgcatcggctctggcaggtccgccggtccgtgcagctcgtctggaaaagcagcccgaagtcgacgctgatacacgggggattgatgttggtcctggggcttctgcctgtggcgggcctttacttggtcaagctcattatcgacaccgtaaccgcgcaggaagcgcctgagtgggaaagcatcgggggcttgcttgccgcagctttgagcattgcggtactcaccgactggctccgtgccttggatgcgcatgtcagtgagatccagtctcagcaggtcaccgatcatgtgcatgacttgcttcacaagcaggcgattaggttggacctcggctattatgaaaatcccgaattccaggacaatttgcaccgtgcgcagaccgaggcgccttatcgaccggctttgatcatcgaccggctcatcagtcttttgcagaatgccgtttccttgggtgcaatcgcattgctgctgctggcgtttcattgggagttgacccttggcctgtttcttttcatgttgcccatccttttcgtccggatgcgccatgcgcgacttcagcatcggcattggcagagttggaccgctcggcaacgtcaggcgtactatttgagccaattgctgaatttccaggaccatgccaaggaggtaaggctattcgggctagggaaccatcttcaccaacggtttatggacttgcggaagtcgattcgtcaggaccgcctggcgttatcgcgcgatcggaccaaaggagaggcgcttactcaaggctgcgcatccttgggtgtttacggcgcacttgcttttctcgcttatcaaaccatggtgcgagccatcagcatcggcgacatggtggtctattatcaggcgttgcagcgaggtcaagcgttattgcgggatttattcgccagcgccgccggtctttacgagaacgcgctgttcctggcgaatttttacgactttctattgctggaaccgcgggtgaaagaaccggaagtgccctgcgtgattccgcagccgctgcgaggtgagattcgctttgaatgcgtcaggttcgactatccgcacggaacgcgtccggtattgaaagcggtggacatgacgatttctgcgggggaaaaagtggctctggtcggcaagaacggtgccggcaagactacactggttaaactgttatgccggttgtacgatcctacggaaggtcgaatcacagtagatggtatcgatcttcgtaatttctcaagcgaagagtggcgaaagcaaatcggcgtggttttccaggatttcggccgttatcaatttaccgtcagggagaacattgggtttggcgaccttgttgctcggaatctacctggacaaatcgaacaagcggcccggcttagcggagcggatggattcatagcgggtctccctcacggctatgactcgctactcggtacattgtttgccggcggagaggaactgagtatcggccagtggcaacagatcgcgatcgctcgggcagccttgcgatcggcacccatcatcatcttggacgaaccgaccagcgcactggatccggaagccgaagcccaggtgttggagcggttccggcagatagcggagggacggaccgcgattttgatcagtcacaggttgtctacggtgtgtatggcggaccgtattttcgtgctcgatgacggcagggtttgcgagtctggaacgcatacagaactgctcagtctcaatggcgtttatgcggggatgttccattctcaggcgcgacactatcgaaccgtgcaagagtga

SEQ ID NO: 60058 - protein, 600 aa, Methylococcus capsulatus str. Bath
MFDRSRLHRLWQVRRSVQLVWKSSPKSTLIHGGLMLVLGLLPVAGLYLVKLIIDTVTAQEAPEWESIGGLLAAALSIAVLTDWLRALDAHVSEIQSQQVTDHVHDLLHKQAIRLDLGYYENPEFQDNLHRAQTEAPYRPALIIDRLISLLQNAVSLGAIALLLLAFHWELTLGLFLFMLPILFVRMRHARLQHRHWQSWTARQRQAYYLSQLLNFQDHAKEVRLFGLGNHLHQRFMDLRKSIRQDRLALSRDRTKGEALTQGCASLGVYGALAFLAYQTMVRAISIGDMVVYYQALQRGQALLRDLFASAAGLYENALFLANFYDFLLLEPRVKEPEVPCVIPQPLRGEIRFECVRFDYPHGTRPVLKAVDMTISAGEKVALVGKNGAGKTTLVKLLCRLYDPTEGRITVDGIDLRNFSSEEWRKQIGVVFQDFGRYQFTVRENIGFGDLVARNLPGQIEQAARLSGADGFIAGLPHGYDSLLGTLFAGGEELSIGQWQQIAIARAALRSAPIIILDEPTSALDPEAEAQVLERFRQIAEGRTAILISHRLSTVCMADRIFVLDDGRVCESGTHTELLSLNGVYAGMFHSQARHYRTVQE

SEQ ID NO: 60059 - DNA, 3066 bp, Azoarcus sp. EbN1
  CDS (1)..(3066): transl_table=11
atgtccacggacgccccaccgaaactcgattccctcgccgatttcctgtcgtcggtggaactgctgtcgcccttcacgcgcgacgaactcgagcagctggccgggcaggcccagccgcgcttcctcgcgttcggcgaaaccgtctgcagcgccggcgagccggccgacggcgtgttcgtgatccgctccggttcggtgcggatcttcgccgacgagcacggcaaggaaatcagcctcggcgtgcgcaaggcgcgcgagaccgtcgccgagatggcgatgctgcgcgagtaccggcacgaattctcggcgcgcgcgtcggcgaagaccgagctgctgctgatcccgcgccaggcgttcgagccggtcctggcgaagaatccggcggcgcaggcgttcgtcaccagctacgtcgcgatcggctcggccggcggcgtcgtcgcgcggctgttcgatctgcgcggcaaggtcgaccgcgccgagctcgaagagctggtgcgcagcgtcggcgtcaagcgcgttgcggccggcagggagatcctcaagcaggacgcgcgcgacgaccgccgcctgtacgtggtccgccagggcgaagtacgcctcgtgcgcaccgagcagggcagcgagtacccgctggcgacgctcggccacggcgagatcttcggcgagaaggcgtgcctgatgcgccaggaacaggtcgcgtcggtggtcgcggtcgtcgatacgacgctgctggtggtccccgaaaaatccgtccaccagatcctcgagcgcaatccgaagctgcgcgaggtgctcgaggagcgcatccgcttcgtcgaacgcgagctgcagcggcagaaaaagctcgccgaacggcgcaacctgcgcgtcatgctcgacctgcagtcgaagccggagctcggcgagcggctgatccgacgcttcccgctcgtcgagcaggccgaggaaatggactgcggcgcggcgtgcctggcgatgatctgccgccactacgacatcccgatgacgctcggcaaactgcgcgaactcgcgaacgtgacgacacagggcgcgacgctcgacagcctcgcgcgcgccggcgaatcgctcggcttcaccacgcgcggcgtgcaatgcacgttcgacgcgctgctcggcttcgaactgccgttcatcgtgcattgggagggctaccactacgtcgtcgtgtatggcgtctcgaagcggcaggtgtgggtcgccgatccggctgtcggcttcaggaagatcgcgatcgaagagttcgagcgcggctggagcggcacctgcctgctgttcacacccgggcagaatctcgcgcagctgacggtgtcgcgctcgccgtggctgcgtttcgtctcgtacctgcggccgtacaagaagatcctcgcgcacctcgtcatggcgactttcgtgatccaggtgctgggcatcgtgccgccgctgatcatccagaacatcctcgacggcgtgatcgtgcacgagaacgtcagcctgctgcacctcctgatcgccggactcgtcatcaccaacctcttcacgctgctgatgtcgggcatccgggcgtttctcgcgaatttcatggtgcgcaacatggacttcgcgatgatgtcgcagtttttcaagcacacgctgtcgctgccgttctcgttcttcgccaagcgcaagaccggcgacatcttcgcgcgcttccaggaaaaccagacgatccgcgcgtttttgaccgaatcgacggtcacgacggtgctcaacctgctgatggtgttcatctacttcacgatcctgttcctctacaacgtgaagatgacgctcctgctgctcgcgttcgtcatcccgatcatggcgctgacggtgctcgtgacgccgaagatcaagaactatgcgcgcgaagtgttcaccacctcgaccgacgccaaagccttcctgatggaagcgctcggcggcgtcgagacggtcaagggcatgggcatcgagcgcccggtgcggctgaaatgggagaagaaatacgcgaaggcgctggaggtgcaataccgcgcgcagcgcttcaacgtgctggtcggcgtcgccagccaggtgctcaacgccgcgacgacgatcgcgatcctgtgggtcggagcgtcgcaggtgctcgcgcatcagctcacgatcggtcagctcatcgcgttcaacgccttgatgggcagcgtgctcgcgccgctgatggggctggtcgcgctgtggagccaggtcaatgacgccggggtcgcgatggagcgcctcggcgacgtgctcgacatggagccggagcagcgcccggaagaggttgcctcgcgcgtcgtgctgccggacctgcagggtcacatcgccttcgaaggcgtgtatttccgctatggcggcgacgagacgccatacgtgctcgagaacatcagcttcgagatcaagcccggcgagctcgtcgcgatcgtcggccgcagcggttcgggcaagacgacgctggcgaagctgctcgtcggcttctacccgccgaccgacgggcgcatcgtcgtcgacggctacgacatggcgacgatcgacaaggagtactaccgcgcgcaggtcggctacgtgatgcagagcaacctcttgttctccggcaccatcgccgagaacatcgccagcggtgacgaggcgccggaccggcggcgcatcgaggaggtcgcgcgcatggccgacgcccacgcgttcatccgcaagatgccgctgggatatgagcagatcgtcggcgagcgcggcgtgggcctgtccggcggtcagatccagcgcctgtgcatcgcccgcgcgctgtaccacgacccgcgcctcctggtgttcgacgaggcgacttccgcgctcgacacgcagtcggagagcaacatcatcagcaacatgcacgacatcctcgccgggcgcaccgcggtcgtcatcgctcaccggctgtcgacgatcatgcgcgccgacaagatcctcgtgctgtacgaaggcgcgatcgtcgagcaggggcgccacgacgagctggtcgatcggcgcggcatgtattaccaactggtgcagaagcagctggcggcggcatga

SEQ ID NO: 60060 - protein, 1021 aa, Azoarcus sp. EbN1
MSTDAPPKLDSLADFLSSVELLSPFTRDELEQLAGQAQPRFLAFGETVCSAGEPADGVFVIRSGSVRIFADEHGKEISLGVRKARETVAEMAMLREYRHEFSARASAKTELLLIPRQAFEPVLAKNPAAQAFVTSYVAIGSAGGVVARLFDLRGKVDRAELEELVRSVGVKRVAAGREILKQDARDDRRLYVVRQGEVRLVRTEQGSEYPLATLGHGEIFGEKACLMRQEQVASVVAVVDTTLLVVPEKSVHQILERNPKLREVLEERIRFVERELQRQKKLAERRNLRVMLDLQSKPELGERLIRRFPLVEQAEEMDCGAACLAMICRHYDIPMTLGKLRELANVTTQGATLDSLARAGESLGFTTRGVQCTFDALLGFELPFIVHWEGYHYVVVYGVSKRQVWVADPAVGFRKIAIEEFERGWSGTCLLFTPGQNLAQLTVSRSPWLRFVSYLRPYKKILAHLVMATFVIQVLGIVPPLIIQNILDGVIVHENVSLLHLLIAGLVITNLFTLLMSGIRAFLANFMVRNMDFAMMSQFFKHTLSLPFSFFAKRKTGDIFARFQENQTIRAFLTESTVTTVLNLLMVFIYFTILFLYNVKMTLLLLAFVIPIMALTVLVTPKIKNYAREVFTTSTDAKAFLMEALGGVETVKGMGIERPVRLKWEKKYAKALEVQYRAQRFNVLVGVASQVLNAATTIAILWVGASQVLAHQLTIGQLIAFNALMGSVLAPLMGLVALWSQVNDAGVAMERLGDVLDMEPEQRPEEVASRVVLPDLQGHIAFEGVYFRYGGDETPYVLENISFEIKPGELVAIVGRSGSGKTTLAKLLVGFYPPTDGRIVVDGYDMATIDKEYYRAQVGYVMQSNLLFSGTIAENIASGDEAPDRRRIEEVARMADAHAFIRKMPLGYEQIVGERGVGLSGGQIQRLCIARALYHDPRLLVFDEATSALDTQSESNIISNMHDILAGRTAVVIAHRLSTIMRADKILVLYEGAIVEQGRHDELVDRRGMYYQLVQKQLAAA

SEQ ID NO: 60061 - DNA, 1782 bp, Synechococcus elongatus PCC 6301
  CDS (1)..(1782): transl_table=11
gtgccgaggtctgataggttgagacgtgaccccgtgttctcctcaacctccttgcagaagcacgccagctacaacctcctttggccttatctgcggccccaaacgaagaccattgttcaggccttgctctgtacgctggtcttcacggcattttggccgatcttggctttcttggcaggccagatggtcaatctgctggtacagggaaaagtatgggaactggcacggctggcagcgatcacgatcgtcggcttcctcatccataaagctgctcagtatggacaagactccttaatggcgaaggcggcgcttcagatcgcctacaacctgcgggtcaatacctatcgacacatccaaagcctgagcctcagctacttcgagaaggccaaaactggcgacctcacctaccggatgaccgaggacatcgatcgcgttggggaagtcgtcaataaggtctttcacgatgcgacaccctcgatcctgcagctgatcgtcgtgctcagctacatgatctatctgaactggacgctgacgctggcgatcctagtgattgcgccgatcatgggtttcttggtcggctggtttgggcagcaaatgttggtgtttccgcggcgcagtcagtcgcggatctcaaacttatcttctctgctaacggaagtctttagcggcattcgtctggtgcgggcctttgctgcggaaccctacgaaatcgagcgcttcagccgcgaggccgagcgtaaccgtgaggcccgctatcgcacggcttggctgcgggccattcaatatcccgtcattggctttctgcaggccgctagcattctcttcattgtcgtgctgggcagttggcagatttccacgggccagctcaacgggccaaatttgggcagctatgtggcagcgatcgccatgttaattgacccgatcgtccacctgatcgataacttcaacgagttcaagcaggggcaggcttcccttgatcgcattgatgaactgctgagcattgagcctgcggttcaagaggatccccagtcacggatgctgccgccgattaccggcaaggtggaattccgacaggtgagcttcagctatcgcagcgacagtgcgccggtgttgcgccaactcaatctgacggtcgaaccaggtgaagcggttgccttggttggggcttcaggtgcgggcaaatcaaccctcgtcaatctgatcccgcgtttctacgacccgcaggatggcgaaattttggtggatggcattcccattcgcagtgtcaccctcggcagtctgcggcgacagatcggtatcgtcccccaagagacaatcctgttctccggcacgattgcccagaacattgcctttggtcagaggcagttcgatcgcgctgccgtggaagaagccgcacgcattgccaacgcccatcaattcatcagccaaatgcccgatggctatgacacatgggtgggagagcgcggcgtcaacctctccggcggtcagcggcagcggctggcgatcgcccgcgcggtcttgctggatccacgcattttaattctggatgaggcgacttcggcgcttgattccgagtccgaaaccttggtgcaagaggccctagaacgggtgatgcagggacggacggtctttatcattgctcaccgtctggctacggttcgtaatgccagccgcatcttggtgatggagcgcggccagattgttgaggcaggcaatcacgatgcgctgttggcagaggctggccgctatgcgcgatactacgcacagcaatttcgtgcctga

SEQ ID NO: 60062 - protein, 593 aa, Synechococcus elongatus PCC 6301
MPRSDRLRRDPVFSSTSLQKHASYNLLWPYLRPQTKTIVQALLCTLVFTAFWPILAFLAGQMVNLLVQGKVWELARLAAITIVGFLIHKAAQYGQDSLMAKAALQIAYNLRVNTYRHIQSLSLSYFEKAKTGDLTYRMTEDIDRVGEVVNKVFHDATPSILQLIVVLSYMIYLNWTLTLAILVIAPIMGFLVGWFGQQMLVFPRRSQSRISNLSSLLTEVFSGIRLVRAFAAEPYEIERFSREAERNREARYRTAWLRAIQYPVIGFLQAASILFIVVLGSWQISTGQLNGPNLGSYVAAIAMLIDPIVHLIDNFNEFKQGQASLDRIDELLSIEPAVQEDPQSRMLPPITGKVEFRQVSFSYRSDSAPVLRQLNLTVEPGEAVALVGASGAGKSTLVNLIPRFYDPQDGEILVDGIPIRSVTLGSLRRQIGIVPQETILFSGTIAQNIAFGQRQFDRAAVEEAARIANAHQFISQMPDGYDTWVGERGVNLSGGQRQRLAIARAVLLDPRILILDEATSALDSESETLVQEALERVMQGRTVFIIAHRLATVRNASRILVMERGQIVEAGNHDALLAEAGRYARYYAQQFRA

SEQ ID NO: 60063 - DNA, 1770 bp, Pseudomonas syringae pv. syringae B728a
  CDS (1)..(1770): transl_table=11
atgatttcacggattacccgacgtcatcgccaggccttgcgtctggctgcgagtttcatcgcgccgtatcgctggcaggcgctcggcgcattgctggcactggtcattaccgcgggcatcaccctgtcgatcgggcagggcatcaaactgatggtcgatcagggtttcatgacccgttcaccgcagttgctcgagcgctcgatcgggtttttcatgctgctgacggtcggcctcgccgtcggaaccttcgcccgtttctatctggtgtcatggatcggcgagcgtgtggttgccgacttgcgcaagaaggtgttcgatcacctgatcgagctgcatccgggcttctacgagaacaatcgcagttcggaaatccagtcgcgactgaccgccgacaccacgctgttgcagtcggtgatcggctcgtcactgtcgatgttcctgcgcaatgcgctgatggtcatcggcggcatcgtgctgttgttcatcaccaatcccaaactcaccagcatcgtggtggtggcgttaccgctgatcatcgcgcccattctcatgttcgggcggcgggtacgaaacctgtcgcgcgagagccaggaccgggtcgccaatgtgggcagctacgtggccgaggccctggggcagatcaagacggtgcaggcctacaatcaccagcagcaggacaagcagcgtttctcgcatacggtggagcaggcgttcgagaccgctcgcaaacgcatcctgcagcgttcctggctgatcacgctggtgatcgtcctggtgttgggtgcggtggcggtgatgttgtgggtgggcggcatggacgtgatcagcggccgcatttccagcggtgagctggcagcgttcgtgttctacgcgctgatggtcggcatggcgttcggcacgttgagtgaggtgattggcgatctgcagcgcgccgccggtgccgcagagcggatcggcgagctgcttcaggcgcgcagcgagatcagcgtgcccaccacggacctgcagagcctgccaccgcgcatcagcgggcgtctggcgcttgagaatgtcaccttcgcttacccgtcgcgtcccgagcgcaatgcactggataatttgaccctgagcatcgagcctggtgaaaccctggcgctggtcggaccctccggagcaggcaagtcgaccatcctcgatctgctgttgcgtttttacgacccgattcaagggcgcatcctgatcgagggcgtgccgatcgcgcagctcgatcaccatgacctgcgccgctgcttcgcgctggtttcacaatcgcccgcgctgtttttcggcactgtcgaggacaacattcgttacggtaacgccactgcgagcctcgagcaggtgcaggcggcggcgcgcattgcccatgcgcatgaattcattctcgacatggccgacggttaccgtacgcatctgggtgagggcggggtgggcttgtccggcggacagcggcagcgtctggcgattgcccgagccttgctggtcgatgcgccgattctgttgctggacgaggcgaccagtgcgctggacgcgcagagtgagcacttgattcaacaggctctgccgagcttgatgcaggggcgtaccacgctggtcatcgcccaccggctggccacggtgcagaatgccgaccggattgccgtcatggatcaggggcggttggtcgcggtgggcacccatcagcagttgatcgccagcaacccgctttatgcgcgactggcggcgttgcagttcaatgccggggttgagtag

SEQ ID NO: 60064 - protein, 589 aa, Pseudomonas syringae pv. syringae B728a
MISRITRRHRQALRLAASFIAPYRWQALGALLALVITAGITLSIGQGIKLMVDQGFMTRSPQLLERSIGFFMLLTVGLAVGTFARFYLVSWIGERVVADLRKKVFDHLIELHPGFYENNRSSEIQSRLTADTTLLQSVIGSSLSMFLRNALMVIGGIVLLFITNPKLTSIVVVALPLIIAPILMFGRRVRNLSRESQDRVANVGSYVAEALGQIKTVQAYNHQQQDKQRFSHTVEQAFETARKRILQRSWLITLVIVLVLGAVAVMLWVGGMDVISGRISSGELAAFVFYALMVGMAFGTLSEVIGDLQRAAGAAERIGELLQARSEISVPTTDLQSLPPRISGRLALENVTFAYPSRPERNALDNLTLSIEPGETLALVGPSGAGKSTILDLLLRFYDPIQGRILIEGVPIAQLDHHDLRRCFALVSQSPALFFGTVEDNIRYGNATASLEQVQAAARIAHAHEFILDMADGYRTHLGEGGVGLSGGQRQRLAIARALLVDAPILLLDEATSALDAQSEHLIQQALPSLMQGRTTLVIAHRLATVQNADRIAVMDQGRLVAVGTHQQLIASNPLYARLAALQFNAGVE

SEQ ID NO: 60065 - DNA, 1869 bp, Pseudomonas fluorescens Pf-5
  CDS (1)..(1869): transl_table=11
gtgtcagcggtcataatcaacctgactcattgtgatttaccaaagttcctgcgaattcatctcgttgccgttgctgcaacgaacggctcgccggtgcgtcaatggatgaacagcatgctttcttctcgtcaccgccgggcgctgcatctggccagccgctttgtcgctccctaccgttggcaggcgctgggcgccttgctggcactgatagttaccgccggcattaccctgtccatggggcagggcattcgcctgttggtggaccagggcttcatgactcaatcgccccatctgttgaaccagtccatcggcctgttcctgctgctggtgctggcgctggcggtgggtaccttcgtgcgcttttacctggtgtcgtggattggcgagcgttgcgtggcggatatccggcgccaggtgttcaatcacctgatctacctgcatcccgggttctacgaaaacaaccgcagctcggaaatccagtcgcgcttgaccgcggacaccaccttgctgcaatcggtgatcgggtcttcgctgtcgctgtttttgcgcaatgcgctgatggtgctgggggggatcgtgctgctgtttgtcaccaaccccaagctcaccagcattgtggtcatcgccttgccgctggtgctggcgccaatcctgatcttcggtcggcgggtgcgcagcctgtcgcgcctgagccaggaccggattgccgatgtcggcagctatgtctcggaaaccctcggccagatcaagacggtccaggcctacaaccaccaacctcaggatgaacggcggtttgccgtgaccgtggagcaggcgttcgacacggcgcgcaagcggattgtccagcgtgcctggctgatcaccctggtgatcgtcctggtgctgggggcggtgggggtgatgctctgggtcggtggcatggacgtgattgccgggcgcatctccggcggcgagctggcggcattcgtcttctacagcctgattgtcggcagtgccttcggcaccctgagcgaagtgatcggcgagttgcagcgcgcggccggcgcggcggagcggattgccgaattgctgcgggcggacaatatcatccagccgcccgccgacgggctggtaagcctgccggcgcgggtgcggggtgatctggagctggacgggctgcggttttcctatccgtcgcggcccgaccgcttcgcgatcgatggtttgagcctgagcatccgggccggagagactctggccttggtggggccttccggggctggtaaatccaccctttatgatctgttgctgcgcttctacgacccgcagcagggaaggatcctgctggatggcgtggccctgacccagctcgacccgctggacctgcgtcgctgcttcgccctggtttcgcaaagcccggcgctgttctacggcagcatcgaggagaacattcgctacggcaatcccgaggcgaccctggcccaggtccaggaagcggcgaagatcgcctatgcccatgagttcatcgaacagatgcccgagggttatcagacccacctgggggatgccgggcttggcctttcgggcggccagcgccagcgcctggcgatagctagggccttgctggtggacgcgccgatcctgctactggacgaagccaccagcgccctggacgcgcaaagcgagcacctgatccagcaggccttgcccagcctgatgaagaaccgcaccaccctggtgatcgcccatcgcctggccacggtgaagaatgccgaccggatcgcggtcatggaccagggcaggctggtcgcggtgggtacccatcagcaactgattgccagcaaccccttgtatgcgcgcctggcggccctgcaattcagcgatggctga

SEQ ID NO: 60066 - protein, 622 aa, Pseudomonas fluorescens Pf-5
MSAVIINLTHCDLPKFLRIHLVAVAATNGSPVRQWMNSMLSSRHRRALHLASRFVAPYRWQALGALLALIVTAGITLSMGQGIRLLVDQGFMTQSPHLLNQSIGLFLLLVLALAVGTFVRFYLVSWIGERCVADIRRQVFNHLIYLHPGFYENNRSSEIQSRLTADTTLLQSVIGSSLSLFLRNALMVLGGIVLLFVTNPKLTSIVVIALPLVLAPILIFGRRVRSLSRLSQDRIADVGSYVSETLGQIKTVQAYNHQPQDERRFAVTVEQAFDTARKRIVQRAWLITLVIVLVLGAVGVMLWVGGMDVIAGRISGGELAAFVFYSLIVGSAFGTLSEVIGELQRAAGAAERIAELLRADNIIQPPADGLVSLPARVRGDLELDGLRFSYPSRPDRFAIDGLSLSIRAGETLALVGPSGAGKSTLYDLLLRFYDPQQGRILLDGVALTQLDPLDLRRCFALVSQSPALFYGSIEENIRYGNPEATLAQVQEAAKIAYAHEFIEQMPEGYQTHLGDAGLGLSGGQRQRLAIARALLVDAPILLLDEATSALDAQSEHLIQQALPSLMKNRTTLVIAHRLATVKNADRIAVMDQGRLVAVGTHQQLIASNPLYARLAALQFSDG

SEQ ID NO: 60067 - DNA, 1770 bp, Pseudomonas syringae pv. phaseolicola 1448A
  CDS (1)..(1770): transl_table=11
atgatttcacggattacccgacgtcaccgccaggcacttcgcctggccgcgagtttcattgcgccgtatcgctggcaagcgttcggagtgttgttggcactggtcattaccgcgggtatcaccctgtcgatcggccaaggcatcaagctgatggtcgatcagggcttcatgacccgctcgccgcagttgctcgaacgctcgatcggctttttcatgctgctgacggttggcctggccatcggaacgttcgcccgcttctatctggtgtcatggatcggcgagcgtgtggtcgccgacctgcgcaagaaagtattcgatcacctgatagagctgcatccgggcttttacgagaacaatcgcagctcggaaatccagtcgcggctgactgccgataccacgttgttgcagtcggtgatcggctcgtcactgtcgatgttcctgcgcaacgtactgatggtcgttggcggcatcgtgctgttgttcatcaccaaccccaagctcaccagcatcgtggtggtggcgttgccgctgatcatcgcgcccattctcatgttcggacggcgggtacgaaacctgtcgcgcgagagccaggaccgggtcgccaatgtgggcagctacgtggccgaagcgctggggcagatcaagacggtgcaggcgtacaaccatcaagagcaggacaaacagcgtttttcacatacggtggagcaggcgttcgataccgctcgcaaacggattttgcagcgctcctggctgattacgctggtgatcgttctggtgctgggcgtagtggcggtaatgctatgggtgggcggcatggacgtgatcagcggacgtatttccagcggagagctggcagcgtttgtgttttacgcgctgatggtcggcatggcgtttggcacgttgagcgaggtgatcggcgatttgcagcgcgccgccggtgccgcagagaggattggcgagctgcttcaggctcgcagcgagatcaaagcgccagccacagagctgcagagcctgccgcaacgcatcagcgggcgtctggcgctggagaatgtcactttcgcctacccgtcgcgtcccgagcgcaatgcgctggataacctgaccctgaacatcgagcccggtgaaaccctggcgctggtcgggccttccggagcaggtaagtcgactattctcgacctgctgctgcgtttctacgacccgactcaagggcgcatcctgattgagggcgtgccgatcgcacagctcgatccgcacgatctgcgccgctgcttcgcgctggtttcacaatcgcccgcactgtttttcggcagtgtcgaggacaacattcgttacggaaacgccagtgccagccttgagcaggtacaggcagcagcgcgtatcgcccatgcgcacgagttcattctcgacatggccgacggctacggtacgcatctgggtgagggcggtgtgggattgtccggcggacagcggcagcgtctggcgattgcccgtgcgttactggtcgatgcgccgatcctgttgctggacgaggcgaccagtgcgctggatgcgcagagtgagcacttgattcagcaagccttgccaagcctgatgcagggccgtactacgctggtcatcgcccatcgactggccactgtgcagaatgccgaccggattgccgttatggatcagggccggctggtggcggtcggtacccatcagcaactgattgccagcaacccgctctacgcacgtctggcggcgttgcagttcaatgctggcgtcgaatag

SEQ ID NO: 60068 - protein, 589 aa, Pseudomonas syringae pv. phaseolicola 1448A
MISRITRRHRQALRLAASFIAPYRWQAFGVLLALVITAGITLSIGQGIKLMVDQGFMTRSPQLLERSIGFFMLLTVGLAIGTFARFYLVSWIGERVVADLRKKVFDHLIELHPGFYENNRSSEIQSRLTADTTLLQSVIGSSLSMFLRNVLMVVGGIVLLFITNPKLTSIVVVALPLIIAPILMFGRRVRNLSRESQDRVANVGSYVAEALGQIKTVQAYNHQEQDKQRFSHTVEQAFDTARKRILQRSWLITLVIVLVLGVVAVMLWVGGMDVISGRISSGELAAFVFYALMVGMAFGTLSEVIGDLQRAAGAAERIGELLQARSEIKAPATELQSLPQRISGRLALENVTFAYPSRPERNALDNLTLNIEPGETLALVGPSGAGKSTILDLLLRFYDPTQGRILIEGVPIAQLDPHDLRRCFALVSQSPALFFGSVEDNIRYGNASASLEQVQAAARIAHAHEFILDMADGYGTHLGEGGVGLSGGQRQRLAIARALLVDAPILLLDEATSALDAQSEHLIQQALPSLMQGRTTLVIAHRLATVQNADRIAVMDQGRLVAVGTHQQLIASNPLYARLAALQFNAGVE

SEQ ID NO: 60069 - DNA, 1818 bp, Dechloromonas aromatica RCB
  CDS (1)..(1818): transl_table=11
atgcgtcgcgccactgctctccccaaaccgcccgctggccaagccctgccccaaacccatgtctggctgacgctgcgcacgctgttcccttatctgtggtcctatcggctacgtgtgctggccgccatggcttgcctgatcggtgccaagatcgccaatgtcagcgtaccgttgatcttcaaggaaatgatcgacggcctttccggtagccagcagttgctggccctgcccatcctgctgctggtcctgtacggcgccctgcgcttctcgacttcgctgtttaccgaattgcgcgaaatcctgtttgcccgggtgacccaacgcgccgttcgccaggtatcgctggaggtattccggcacctgcatgccttgtcgctgcgcttccacctggagcgtcagaccggtggcgtctcccgcgatatcgaacgcggcagccgctcgatctccagtctcatttcctacacgctgtactcaatcctgccgacgctggtcgaaattggactggtcctcggcatcctgttcgtcaaatacgatgtcggctttgtcgtcattaccgtcatatcactgatcgtctacattgtatttaccgtcaaggtcagtaactggcgcatcgacatccgtcgggctgtcaatgaaaacgactcagccgccaatacccgcgccatcgacagcctgctcaactacgagacggtcaaatattttaataatgaagcgtgggaagcccgtcgttacgacgaacaactgatcaaatgggaagaggctgccacgcgcagtcagactacgctggccttcctcaacctcggccaggcagcgatcatcgccctcggcgtcacggcgatgatgtggcgcgccgccagcggggtcgttgcaggcgagatgacaattggcgatctggtgctggtcaatgccttcctgatccagctctatattccgctcaatttccttggcatcgtctatcgcgaaatccggcaggccctgaccgatatcgaacgcatgttcaacctgctcaaggaaaaccgtgaaattgccgatgcacccgatgctcgcgagcttccgaacagccccttgcagatcaattttgaaaccgtcgatttcgcctacgatccggatcgccagatcctgaagaatctcagtttggccattcctccaggaaaaacagtcgctgttgtcggacactccggtgccggcaaatctacgctggcccggctgctctatcgtttctatgacgtcactggtggcgccatccggatcaatggccacgatctccgtgcgcttaagcaaagcagtcttcgagcagcaatcggcatcgtgccgcaggacacagtactgtttaacgacagtattttctacaacatcaactacggccgcccggaagcaagccgggaagaggttttcgccgcagcccgcgccgcccagttgcacgaattcatcgagtccttgccgcaaaaatacgaaacacgcgtcggcgaacgcggcttaaaactgtctggtggagaaaaacaacgcgtcgccatcgcccgggccttattgaaaaacccgcccatcctgatttttgacgaagccacctccgccctcgactcagccaccgaacgagctattcagacccagcttgaacaagtcgccgttggccacacaacgctgatcatcgcgcaccgcctgtccaccgtcatgaatgccgacgaaatcctcgtcatgagcgaaggccacatcatcgagcgcggctcacacgccgccctcctcgcagcaggcgccacttatgcgcggatgtggaccttgcaacaacaggaagaacacgagcacccggcaagacacggctaa

SEQ ID NO: 60070 - protein, 605 aa, Dechloromonas aromatica RCB
MRRATALPKPPAGQALPQTHVWLTLRTLFPYLWSYRLRVLAAMACLIGAKIANVSVPLIFKEMIDGLSGSQQLLALPILLLVLYGALRFSTSLFTELREILFARVTQRAVRQVSLEVFRHLHALSLRFHLERQTGGVSRDIERGSRSISSLISYTLYSILPTLVEIGLVLGILFVKYDVGFVVITVISLIVYIVFTVKVSNWRIDIRRAVNENDSAANTRAIDSLLNYETVKYFNNEAWEARRYDEQLIKWEEAATRSQTTLAFLNLGQAAIIALGVTAMMWRAASGVVAGEMTIGDLVLVNAFLIQLYIPLNFLGIVYREIRQALTDIERMFNLLKENREIADAPDARELPNSPLQINFETVDFAYDPDRQILKNLSLAIPPGKTVAVVGHSGAGKSTLARLLYRFYDVTGGAIRINGHDLRALKQSSLRAAIGIVPQDTVLFNDSIFYNINYGRPEASREEVFAAARAAQLHEFIESLPQKYETRVGERGLKLSGGEKQRVAIARALLKNPPILIFDEATSALDSATERAIQTQLEQVAVGHTTLIIAHRLSTVMNADEILVMSEGHIIERGSHAALLAAGATYARMWTLQQQEEHEHPARHG

SEQ ID NO: 60071 - DNA, 1791 bp, Prochlorococcus marinus str. NATL2A
  CDS (1)..(1791): transl_table=11
atgtataaatctaaatcaaaaaaaggaagaatcccattagcaagacttttaagtaatcttaaaagtcaaaagcgtctaatttattcagctattatttgctctacattaaataaattttttgatctcgcaccacctgtactaattggaatatctgttgacgtagtagtacgaaaagaaagttcatggcttggatcaattggctttaatactgtcccagatcagttaattgcgctctcaatcatttcctttttgatctggacagctgaatcattctttgaatatttatatggattaatgtggagaaatttagctcaaaagacacagcactatttaagaatcaaagcatatgaccatttacaaaaattagagatgacattcttcgaatcagataatacaggaaggcttatgactgtactaaatgatgatattaatcaactggaaagattcttggatgaaggagctaataaaattattcaattaataattactgtttttatagttggaggggcaatgattttattagctcccggaattgcattgctagcattcatacctattccatttattctttggggctcgattagattccagaagaacctagctcctcgctatcgtgaagtcagagatagggctggagatcttgcttcaagacttaataataatctcagtggaatgctaactattaaaagttttgctactgaagattgggaactagaaagattaagactagatagcaatttatatcaagaaagtaatagaaaagcgattaagttatcagcagcatttatccccttaattagattcgcgatactatttgcatttcttgcaatattaattgctgggggcttccaatcttggaaaggattaatgcctgtgggaacttatagttttttagtatttataactcaaagattattatggcccttaacgacattaggtcatatcctggatgattatcaaagatcaatggcctcaacaaatagagtattagatttaatagatactccaattaaaattaaaactggcaaagtcaagttagatccatttaatgttaaaggtgcaatcacatttaacaatattgattttacatatgaaggaaggtctcaagtcataaaaaactttaatttagatattagtcctgggaaaaaaataggtattgtaggtgccactggttctggcaaaagtacacttataaaactcttgttaaggctgtataaaatcagtaaaggttcaatagaaattgataataattcaattgaatcattggatttaaaaagtctacgacgttgtattgcattagtaagccaggaaacatatttgttccaaggtacaattgaagaaaatatttcttatggatcgcaaaatattgataaatcaaaaataaaaaatgctgcagatattgctgaagcaactgaatttattaatcaacttccacaaggcttaaacacaatagtgggagaaagaggacaaaagttatctggtggccaaagacaaagaattgcaatcgcaagagcaatcctaaaaaacgcccctattttagtattagatgaggcaacagcctctgtagacaatgaaactgaagccgcgattcaaaggtctctaaagaagataacaactagttgtaccacaattgttattgcacatcgtttaagcacagtaatagatgccgacgaaattatagttttagataaaggtaaaattatagagaaaggcacacatcattctcttctaaaaaatagagatttctattaccacctttggaaaattcaagctggtggaaataatacttaa

SEQ ID NO: 60072 - protein, 596 aa, Prochlorococcus marinus str. NATL2A
MYKSKSKKGRIPLARLLSNLKSQKRLIYSAIICSTLNKFFDLAPPVLIGISVDVVVRKESSWLGSIGFNTVPDQLIALSIISFLIWTAESFFEYLYGLMWRNLAQKTQHYLRIKAYDHLQKLEMTFFESDNTGRLMTVLNDDINQLERFLDEGANKIIQLIITVFIVGGAMILLAPGIALLAFIPIPFILWGSIRFQKNLAPRYREVRDRAGDLASRLNNNLSGMLTIKSFATEDWELERLRLDSNLYQESNRKAIKLSAAFIPLIRFAILFAFLAILIAGGFQSWKGLMPVGTYSFLVFITQRLLWPLTTLGHILDDYQRSMASTNRVLDLIDTPIKIKTGKVKLDPFNVKGAITFNNIDFTYEGRSQVIKNFNLDISPGKKIGIVGATGSGKSTLIKLLLRLYKISKGSIEIDNNSIESLDLKSLRRCIALVSQETYLFQGTIEENISYGSQNIDKSKIKNAADIAEATEFINQLPQGLNTIVGERGQKLSGGQRQRIAIARAILKNAPILVLDEATASVDNETEAAIQRSLKKITTSCTTIVIAHRLSTVIDADEIIVLDKGKIIEKGTHHSLLKNRDFYYHLWKIQAGGNNT

SEQ ID NO: 60073 - DNA, 1809 bp, Anabaena variabilis ATCC 29413
  CDS (1)..(1809): transl_table=11
gtggctatagcatctccatctcaccgggtattacaaaggcgtagacattctgcacatcctttacagcgcctgtttgactatggataccagtatcgtcaacaaatgttgttggcggttggttgttcaattctaaataagctttttgatttagctccaccagctttaattggtatggcggtggatgtggtagttaagcagcaggattctatcattgctcagttgggaataaaagatatctttgggcaatttttaattgtggcgctgctcacagtcatcacttggatactagagtcattttttgaatatcgctatcgcgtgttatggcgtaacctagcacagaatatccagcataacttacgtttggacgcatatagtcacctacaagaattggaattggcttattttgaagaacgtagcacaggtggtttaatgtctatcctcagtgatgatgttaaccaactagaacgttttttggacgtgggcgctaacgacattatccaggtagtcacgactattgtagtcgttggcggcgccttctttattttggctcccagcgtagcttggatggctattttaccaatgccatttattctgtggggttcggtggctttccagaaattgctagcaccacgttacgccgatgtacgggaaaaagtagggttactcaatgggcgtttgtccaataacctgagtggtatcaccacaattaaaagctttacggcggaagagtatgaaaaagggcgtttagaaatagatagttccgcttatcgtcaaagtaacacaagagcgatcgccttgtctgccgcttttattcccctaattcggatgctaattctcgtagggtttacctcattgctgctatttgggggtatggcaaccgttgcggggagaatgtccgtaggcgcttatagttcattagtatttttagtccagctactactttggcctttaactagattgggggaaacttttgatctttatcaaagggctatggcttccactaatagagtgatggagttgttagatactccgattacagcgtatacaggaaatattgctttacctgtagaagaagtacgcggtgccgtggaatttaacaatgttacttttgcctataaagatagattacctgtagttaaacatttatctttgcaaatacccgcaggtaatactattgctattgttggttctactggttctggtaaaagtactttagtaaaactgctgctgcgcttgtatgaagtgcaagctgggaaaataaccttagatgggatcaatatagaagatttaaagttacgcgatttacgccgtagtatgggtttagttagtcaagatgtattcctatttcatggcacggtagctgagaacatagcatacggtactttcgatgcgacagaacaagaaatcatcactgctgccaagatagcagaagcgcacgaatttattagccatctaccccagggttatgaaacaattgtgggagaaagggggcaaaagttatctgggggacaaagacaacgaatagccattgcacgggcggttttgaagaatccaccgattttgattttagatgaagctacctcggcagtggataatgaaacagaggcagcaattcagcgatcgctcgaacgaattaccatcaatagaactacaattgcgatcgctcaccgtctttccacaattcgcaatgctgattgtatatatgtcatggaacatggacaattagtggagtcaggaacccatgaagcattgttagacaaggatggaatatatgctaacctctggcgtgtgcagagtggtttgaaatga

SEQ ID NO: 60074 - protein, 602 aa, Anabaena variabilis ATCC 29413
MAIASPSHRVLQRRRHSAHPLQRLFDYGYQYRQQMLLAVGCSILNKLFDLAPPALIGMAVDVVVKQQDSIIAQLGIKDIFGQFLIVALLTVITWILESFFEYRYRVLWRNLAQNIQHNLRLDAYSHLQELELAYFEERSTGGLMSILSDDVNQLERFLDVGANDIIQVVTTIVVVGGAFFILAPSVAWMAILPMPFILWGSVAFQKLLAPRYADVREKVGLLNGRLSNNLSGITTIKSFTAEEYEKGRLEIDSSAYRQSNTRAIALSAAFIPLIRMLILVGFTSLLLFGGMATVAGRMSVGAYSSLVFLVQLLLWPLTRLGETFDLYQRAMASTNRVMELLDTPITAYTGNIALPVEEVRGAVEFNNVTFAYKDRLPVVKHLSLQIPAGNTIAIVGSTGSGKSTLVKLLLRLYEVQAGKITLDGINIEDLKLRDLRRSMGLVSQDVFLFHGTVAENIAYGTFDATEQEIITAAKIAEAHEFISHLPQGYETIVGERGQKLSGGQRQRIAIARAVLKNPPILILDEATSAVDNETEAAIQRSLERITINRTTIAIAHRLSTIRNADCIYVMEHGQLVESGTHEALLDKDGIYANLWRVQSGLK

SEQ ID NO: 60075 - DNA, 1794 bp, Pseudomonas fluorescens PfO-1
  CDS (1)..(1794): transl_table=11
atgatcccgatgctttcctcgcgccaccgccgggccttgcgcctgaccagttctttccttgccccttatcgctggccggcctttggtgcgctgctggcactgatcgtcacggcgggcatcaccctgtcgatggggcagggcatcaagttgctggtcgatcaaggcttcatgactcaatcgccgcacttgctcaatcaatccatcggcctgttcatgctgttggtgctcggcctcgcggtcggcacgtttgcgcggttttatctggtgtcctggatcggtgagcgcgtggtggcggacatccgtcggcaggtgttcaaccatctggtgtacctgcatcccgggttttacgaggacaaccgcagctcggaaatccagtcgcggctgaccgctgacaccacgctgctgcaatcagtgatcggctcgtcgctgtcgctgttcctgcgcaatttgctgatggtcattggcggtgtggtgctgctgttcatcaccaaccccaagctcaccagcatcgtggtaatagcactgccgctggtgattgcgccgatcctgatttttggccgccgcgtgcgtaacctctcccggctgagtcaggaccggatcgccgacattggcagttacgtctcggaaaccctcggccagatcaaaaccgtgcaggcctacaaccatcaggtgcaagacgaacagcgtttcgccagcaccgtcgagcaggcattcgagactgcgcgcaaacggattttccagcgggcctggctgatcacgctggtaatcgtgctggtgctcggcgccgtcgcggtgatgttgtgggtcggcggcatggacgtgatcgccgggcggatttctgccggtgaactggcggcgttcgtgttctacagcctgatcgtcggcagtgcgtttggcacgttgagcgaagtgatcggagagttgcagcgagcggctggcgccgccgagcgcatcgccgaattgctgcgttcggaaaacatcatccagccaccgaccacaggattggtgacgctgccggagcgggtcaaaggcgagctggagttgcaggatgtacgtttttcctacccttcgcgtcccgatagcctcgccgtcgatggcttgagtctgacgatcaacgccggggaaaccctcgcgctcgtgggaccgtccggcgcgggcaagtccacggtgtatgacttgctgctgcgtttctacgatccccgggaagggcggatcctgatcgatggcgtaccgctgacgagcctcgatccgctggacctgcgtcgctgcttcgcgctggtctcgcaaaccccggcactgttcttcggcagtgtcgaagagaacattcgctacggctgcccgaccgccacgctggagcaggtgcgggaggcggccagaatcgcccacgcccacgacttcatcgaacagatgcccgacggctaccagacccatctgggcgacggtggcctcggtctgtcaggcggacaacgccagcgcctggccattgcccgggcgttgctggtcgacgcgccgatcctgctgctcgacgaagccaccagcgcccttgatgcccaaagcgaacacctgattcagcaagcactgccgagcctgatgcaaaaccgcaccacgctggtcattgcccaccggttggcgacggtgaaaaacgccgaccggattgcggtgatggatcagggcaaactggtggcgatcggtacgcatcaggagttgatcgccagtaatccgctgtatgcgcggttggcggcgttgcagttcagtgatggtcgtcaggtttcaaccgaccctgtaaccgactaa

SEQ ID NO: 60076 - protein, 597 aa, Pseudomonas fluorescens PfO-1
MIPMLSSRHRRALRLTSSFLAPYRWPAFGALLALIVTAGITLSMGQGIKLLVDQGFMTQSPHLLNQSIGLFMLLVLGLAVGTFARFYLVSWIGERVVADIRRQVFNHLVYLHPGFYEDNRSSEIQSRLTADTTLLQSVIGSSLSLFLRNLLMVIGGVVLLFITNPKLTSIVVIALPLVIAPILIFGRRVRNLSRLSQDRIADIGSYVSETLGQIKTVQAYNHQVQDEQRFASTVEQAFETARKRIFQRAWLITLVIVLVLGAVAVMLWVGGMDVIAGRISAGELAAFVFYSLIVGSAFGTLSEVIGELQRAAGAAERIAELLRSENIIQPPTTGLVTLPERVKGELELQDVRFSYPSRPDSLAVDGLSLTINAGETLALVGPSGAGKSTVYDLLLRFYDPREGRILIDGVPLTSLDPLDLRRCFALVSQTPALFFGSVEENIRYGCPTATLEQVREAARIAHAHDFIEQMPDGYQTHLGDGGLGLSGGQRQRLAIARALLVDAPILLLDEATSALDAQSEHLIQQALPSLMQNRTTLVIAHRLATVKNADRIAVMDQGKLVAIGTHQELIASNPLYARLAALQFSDGRQVSTDPVTD

SEQ ID NO: 60077 - DNA, 1737 bp, Rhodobacter sphaeroides 2.4.1
  CDS (1)..(1737): transl_table=11
atgagcgcgctgcggggcctcgtgccgttcctcgcgccctaccgcaagctcaccttcggcgcgctgggcgcgctcgttctcaccgcgataatcagcctgatcctgccggtgacggtccggcgcgtggtcgacggcttcatggagaacaatgcggccctgctcgaccagtatttcgccgccgccctcttcattgcggccgcactcgctgcaggcacggggctgcgctactatctcgtgacgcggctcggcgagcgggtcgtggccgacatgcgccgcgcgctcttcgaccggatgatgggcatgagccccgccttcttcgagcggatcatgacgggcgaggtgctgtcgcggctcacgaccgacacgacgctgcttctgtcggtgatcggctcctcgatctcggtggcgctgcgcaacctcctgatcctgatcggcgggctggtgcttctcctgttcacctcgaccaagctcactggcctcgtgatgctgctcgtgccgctcgtggtggtgccgatcgtcatcctcggccgcaagctccgccgcctctcgcgcgagaatcaggactggatcgcccagagttcgggcaatgcgtccgaggcgctcctgtcggtgcagacggtgcaggccttcacccacgagcgccagtcgcgcgccttcttcggcgatgtgacggagaagtcctttctgtcggccaaggaccggatcgggacgcgggcgctgatgacggtgatcgtgatcttcctcgtcttcaccgggatcgtgggcgtgctctgggtgggcgcgcgcgatgtgcgcgcgggcaccatgacgccgggcgagatggtgcagttcctcatctatgcggtgatggtggcgggctcggtcggcgcgctctccgagatctggagcgagctgcagcgggcggcgggcgcgaccgagcggctgaacgagctgctgacggccgaggatccggtgcaggatccggccacgccggtggcgctgccgcggccggtgaagggcgagatcagcttcgagggcgtgcgtttccgctatccggcgcggcccgaggtctcggcgctcgacgggatcgatctcgtcgtgcggccgggcgagacggtggcgcttgtggggccgtcgggggcgggcaagaccacgatcctccagctgctcctgcgcttctacgatccccagcagggggccgtgcgcatcgacggggtggatctgcgcgacatgacgcgcgacgatttccgccgtgccatcgccctcgtgccgcaggatccggtgatcttcgccacctccgcgcgcgagaacatccgcttcggccgtcccgaggccacggatgccgaggtggaggctgcggcccacgccgccgccgcgcacgatttcctgagcctcctgccgcagggctacgacacctatgtgggcgagcgcggcgtgatgctctcgggcgggcagaagcagcgcgtggcgctggcgcgggcgatcctgcgcgacgcgaagatcctgctcctcgatgaggcgacctcggcactcgatgccgagagcgaacgcgccgtgcagaccgcggtcgaggcgctggcgcagaaccgcacgacgctggtggtggcccacaggctcgccaccgtgaagcgcgcggaccggatcgtcgtcttcgacaagggccgcatcgtggccaccggcacccacgatgcgctggtggccgagggggggctctatgcccgtctcgcgcggctccagttcaccgacgggtcggtctga

SEQ ID NO: 60078 - protein, 578 aa, Rhodobacter sphaeroides 2.4.1
MSALRGLVPFLAPYRKLTFGALGALVLTAIISLILPVTVRRVVDGFMENNAALLDQYFAAALFIAAALAAGTGLRYYLVTRLGERVVADMRRALFDRMMGMSPAFFERIMTGEVLSRLTTDTTLLLSVIGSSISVALRNLLILIGGLVLLLFTSTKLTGLVMLLVPLVVVPIVILGRKLRRLSRENQDWIAQSSGNASEALLSVQTVQAFTHERQSRAFFGDVTEKSFLSAKDRIGTRALMTVIVIFLVFTGIVGVLWVGARDVRAGTMTPGEMVQFLIYAVMVAGSVGALSEIWSELQRAAGATERLNELLTAEDPVQDPATPVALPRPVKGEISFEGVRFRYPARPEVSALDGIDLVVRPGETVALVGPSGAGKTTILQLLLRFYDPQQGAVRIDGVDLRDMTRDDFRRAIALVPQDPVIFATSARENIRFGRPEATDAEVEAAAHAAAAHDFLSLLPQGYDTYVGERGVMLSGGQKQRVALARAILRDAKILLLDEATSALDAESERAVQTAVEALAQNRTTLVVAHRLATVKRADRIVVFDKGRIVATGTHDALVAEGGLYARLARLQFTDGSV

SEQ ID NO: 60079 - DNA, 1779 bp, Synechococcus sp. CC9605; identical to SEQ ID NO: 7501
  CDS (1)..(1779): transl_table=11

SEQ ID NO: 60080 - protein, 592 aa, Synechococcus sp. CC9605; identical to SEQ ID NO: 7502

SEQ ID NO: 60081 - DNA, 1749 bp, Synechococcus elongatus PCC 7942
  CDS (1)..(1749): transl_table=11
gtgttctcctcaacctccttgcagaagcacgccagctacaacctcctttggccttatctgcggccccaaacgaagaccattgttcaggccttgctctgtacgctggtcttcacggcattttggccgatcttggctttcttggcaggccagatggtcaatctgctggtacagggaaaagtatgggaactggcacggctggcagcgatcacgatcgtcggcttcctcatccataaagctgctcagtatggacaagactccttaatggcgaaggcggcgcttcagatcgcctacaacctgcgggtcaatacctatcgacacatccaaagcctgagcctcagctacttcgagaaggccaaaactggcgacctcacctaccggatgaccgaggacatcgatcgcgttggggaagtcgtcaataaggtctttcacgatgcgacaccctcgatcctgcagctgatcgtcgtgctcagctacatgatctatctgaactggacgctgacgctggcgatcctagtgattgcgccgatcatgggtttcttggtcggctggtttgggcagcaaatgttggtgttttcgcggcgcagtcagtcgcggatctcagacttatcttctctgctaacggaagtctttagcggcattcgtctggtgcgggcctttgctgcggaaccctacgaaatcgagcgcttcagccgcgaggccgagcgtaaccgtgaggcccgctatcgcacggcttggctgcgggccattcaatatcccgtcattggctttctgcaggctgccagcattctcttcattgtcgtgctgggcagttggcagatttccacgggccagctcaacgggccaaatttgggcagctatgtggcagcgatcgccatgttaattgacccgatcgtccacctgatcgataacttcaacgagttcaagcaggggcaggcttcccttgatcgcattgatgaactgctgagcattgagcctgcggttcaagaggatccccagtcacggatgctgccgccgattaccggcaaggtggaattccgacaggtgagcttcagctatcgcagcgacagtgcgccggtgttgcgccaactcaatctgacggtcgaaccaggtgaagcggttgccttggttggggcttcaggtgcgggcaaatcaaccctcgtcaatctgatcccgcgtttctacgacccgcaggatggcgaaattttggtggatggcattcccattcgcagtgtcaccctcggcagtctgcggcgacagatcggtatcgtcccccaagagacaatcctgttctccggcacgattgcccagaacattgcctttggtcagaggcagttcgatcgcgctgccgtggaagaagccgcacgcattgccaacgcccatcaattcatcagccaaatgcccgatggctatgacacatgggtgggagagcgcggcgtcaacctctccggcggtcagcggcagcggctggcgatcgcccgcgcggtcttgctggatccacgcattttaattctggatgaggcgacttcggcgcttgattccgagtccgaaaccttggtgcaagaggccctagaacgggtgatgcagggacggacggtctttatcattgctcaccgtctggctacggttcgtaatgccagccgcatcttggtgatggagcgcggccagattgttgaggcaggcaatcacgatgcgctgttggcagaggctggccgctatgcgcgatactacgcacagcaatttcgtgcctga

SEQ ID NO: 60082 - protein, 582 aa, Synechococcus elongatus PCC 7942
MFSSTSLQKHASYNLLWPYLRPQTKTIVQALLCTLVFTAFWPILAFLAGQMVNLLVQGKVWELARLAAITIVGFLIHKAAQYGQDSLMAKAALQIAYNLRVNTYRHIQSLSLSYFEKAKTGDLTYRMTEDIDRVGEVVNKVFHDATPSILQLIVVLSYMIYLNWTLTLAILVIAPIMGFLVGWFGQQMLVFSRRSQSRISDLSSLLTEVFSGIRLVRAFAAEPYEIERFSREAERNREARYRTAWLRAIQYPVIGFLQAASILFIVVLGSWQISTGQLNGPNLGSYVAAIAMLIDPIVHLIDNFNEFKQGQASLDRIDELLSIEPAVQEDPQSRMLPPITGKVEFRQVSFSYRSDSAPVLRQLNLTVEPGEAVALVGASGAGKSTLVNLIPRFYDPQDGEILVDGIPIRSVTLGSLRRQIGIVPQETILFSGTIAQNIAFGQRQFDRAAVEEAARIANAHQFISQMPDGYDTWVGERGVNLSGGQRQRLAIARAVLLDPRILILDEATSALDSESETLVQEALERVMQGRTVFIIAHRLATVRNASRILVMERGQIVEAGNHDALLAEAGRYARYYAQQFRA

SEQ ID NO: 60083 - DNA, 1776 bp, Synechococcus elongatus PCC 7942
  CDS (1)..(1776): transl_table=11
atgccccatccccttgtgcggttgtatcgctacagtgccccccatcaacggcaggtgctgagtgcgatcgcttgttcgatcctcaacaaaatctttgaccttgccccacccgtcctgattggcatggcggtggatgtggttgtccagcggcaggattcttggctggccaagtggggcgtcgtccccgttgaacagcagttagggctgttggtgctgttctcctttgtgatttggagcctcgaatcactgttcgagtatctctacgcttggcaatggcgcaccctcgcgcaaacgctgcaacatgagttgcgtttggatgcctacggccatttgcaagaactggagctgagcttttttgaggagcggagtactggtcagctactcagtgttctcaacgatgacatcaaccagctcgaacgcttcctcgaccacggcgcaaacgagattttgcaggtcacgaccaccgttctggcagtcggtggggcgatggcttatctctctccaaccgtggcagggctggcgattctgccgattcctgtcattctctggggatcgctgcgctttcaacggcgtttagccccgcgctatgcccgcgttcgcgaacaagccggtctgattagtgcacgactggcgaacaatttgggcggcattgccacgattaaaagtttcacggctgaggcatttgaaaaagggcgggtcgctgaggatagtgatgcctatcgccaagcgaatcgtcgggcgatcgcgctcagttccgcttttgttccattgattcgtttcgcgattctgtttgctttcatcgccattctttatgtcggtggaatggaaaccattaacggacggctcgatgtcggcacctatagctttttggtgttcattacccaacgtcttctctggcccttgaccagcttggggcgagtactggatgactaccaacgggcgatggcttcgacccagcgggtgatggatttgctggcgatcccggtgcaaattcccagcggtcgccaatctttgccgatcggccaagtgcaaggtgctgtccagtttgaaggcatcacctttgcttaccgtgatcgcgaacccagtgttatcgatctcaatctgaacatccccgctggtcaaacgattgcgatcgtcggggctactggttctggcaaaagtaccttagtcaaactgctgctgcgtttctatgaacctcaaaccggtcgcatcctactcgatgggattgatttgcgtgacttaaaactgaaggatttgcggcaggcgatcggcttcgttagccaggatgtttttctcttccatggcagtgttgctgagaacattgcctacggtagttttgacgcgactcagactgaaattgagcaagctgccaagctcgctgaagcccacgaattcatcatggatttaccccagggttacgacacagttgtgggcgaacgaggccagaaactgtcgggtggacagcggcagcgtttggcgatcgcgcgagccattctcaaggatccgccaatcctgatcctcgatgaagcaacctcggcagtcgataacgagaccgaagccgccattcagcgatcgctcgaacaaatcacccgcgatcggaccaccttggcgatcgcccaccgcctctcgacgattcgtcatgcggactgcatctatgtgatggatcagggtcgcttggtcgaagccggacaccatgacgaacttcttgccttggatggcctctatgccaacctctggaaagtgcaaaccggcgaacgtctgagcgatcgcgtttag

SEQ ID NO: 60084 - protein, 591 aa, Synechococcus elongatus PCC 7942
MPHPLVRLYRYSAPHQRQVLSAIACSILNKIFDLAPPVLIGMAVDVVVQRQDSWLAKWGVVPVEQQLGLLVLFSFVIWSLESLFEYLYAWQWRTLAQTLQHELRLDAYGHLQELELSFFEERSTGQLLSVLNDDINQLERFLDHGANEILQVTTTVLAVGGAMAYLSPTVAGLAILPIPVILWGSLRFQRRLAPRYARVREQAGLISARLANNLGGIATIKSFTAEAFEKGRVAEDSDAYRQANRRAIALSSAFVPLIRFAILFAFIAILYVGGMETINGRLDVGTYSFLVFITQRLLWPLTSLGRVLDDYQRAMASTQRVMDLLAIPVQIPSGRQSLPIGQVQGAVQFEGITFAYRDREPSVIDLNLNIPAGQTIAIVGATGSGKSTLVKLLLRFYEPQTGRILLDGIDLRDLKLKDLRQAIGFVSQDVFLFHGSVAENIAYGSFDATQTEIEQAAKLAEAHEFIMDLPQGYDTVVGERGQKLSGGQRQRLAIARAILKDPPILILDEATSAVDNETEAAIQRSLEQITRDRTTLAIAHRLSTIRHADCIYVMDQGRLVEAGHHDELLALDGLYANLWKVQTGERLSDRV

SEQ ID NO: 60085 - DNA, 3057 bp, Burkholderia xenovorans LB400
  CDS (1)..(3057): transl_table=11
atggatgcaccccagaccgcgccttccgcagccgagtttctgacctcggtggaaattctttcgccgttttcgcgcgacgagatcgagcgccttgccgactatgcgcaagcgcgcttctattcgttcggcgaaacggtctgctccgcgggtgagacggccgacgggctatacgtggttcgctcgggctccgtgcgaattttcacggaggagcacggcaaggaaaccagcatgggggtgcgcaaatcgggcgagatcttcgccgatatcgcgatgttgcgcgcctatgttcacgaagcgtcggtgcgggcgtcggcgaaaaccgagttgctgttcattccgcgcgccgcgatcgaaccggtgatcgccggcaatcaggccgcgctggcgttcgtcgccagttatgtggcgatcaactcggcgggcggtttcgtcgcgcaactgttcgatctgcgcggcaagctgaacaaggcggaactcgaagagtatgtgcgcagcgttggcgtgaaacgggttgcggcgggcaaggagattctcaagcaggacggacgcgaggaccggcggctgtatgtggtgcggcagggcgaagtgcgtattgtccggcatgaggaaggtcatgactacacgctcgccacgctcggcgaaggcgagatattcggcgagaaagcgtgcctgatgcgccaggagcagatggcctcggttgtcgcgacggccgatacgcggctactggtgattcccgagcgcacggtccattttattctcgaacgcaatccgaagctgcgcgaagtactcgacgagcggatccgttacggcgaccgtgaattgcagcggcaaaagcggctcgaacaacggcgcaagctgccgctcatgctcgatctgcagaccaaacccgagttcggcgagaaggtcatcaaacgcttcgcgctggtggaacaggccgaagaaatggattgcggcgcggcgtgccttgcgatgatatgccgccactacagcattccgatgacgctcggcaaattgcgcgaactcgccaacgtcaccactcagggcgccacgctcgacagtctcgcgcgagcgggtgaatcgctcggcttcacggcgcgcggcgtgcaatgcacgttcgattcgttgcgcggcttcgatctgccgttcatcgtgcactgggagggttaccactatgtggtggtatacgggctctccaaagattatgtgtgggtggcggacccggcggtcggcttcaggaagatgaccgtcgaagatttcgaacgcggctggagcggcacctgtctgctgtttaccggcgggccgaatctgctgcaaatgtctgccgcgcgttcaccgtggattcgttttgtcggctacctcacgccgtacaagaagattctcggccacctgtttctcgccaccttcgtgattcaggtattgggcgtgattccgccgctgattatccagaacattctggacggcgtgatcgtgcatcagaatgtcagcctgctgcatctgctgattggcggcttgattattgccaatgtcttttcgcaattgatgtcgtcgattcgcgcctatctggccaatttcatggtgcgcaatatggacttcgcgatgatgtcgcagttcttcaagcacaccctgtcgctgccattctcgttctttgccaagcgcaagaccggcgacattttcgcgcgcttccaggagaatcagacgatccgcgctttcctgaccgaatccaccgtcaccacggcgctgaacctgctgatggtgttcatctacttcacgatcatgttcgtctacaacgtgaagatgacactggtgctgattgcgttcatcattccgatcatggcgctgaccgcgatcgccacgccgaagatcaagggctatgcgcgcgaagtgttcaccgcgtcgaccgaatcgaagtcgtttctgatggaagccctcgccggcgtggagaccatcaagggcatgggtatcgaacggccggtgcgcttgcgttgggagaagaagtacgcaaaggcgctcgaagtgcaatatcgcgcgcatgcgttcaacattctcgtgggactcggcagtcagttgctgaatgcggcgacgacgattgcgattctctgggtcggcgcgaatctcgtgctggcgcgtgaaatgacgattggccaattgatcgcgttcaacgcattcatgggcagtgtactgggtccgttaatgggcctggtcggcttgtggagcatgctgaacgatgcgggcgtggcaatggaacgccttggcgatgtgctcgatatcgaacccgagcagaagccacaggatttgccctcgcgtgtgatgctgcccgaactccagggcgaaatcagtctgagcggcgtttatttccgttacggcgaaaacgactcggcctacgtgctcgaaaacatcagcttcgacatcaagccgggtgaactggtggcgatcgtggggcgcagcggttcgggcaagaccacgctcgccaagttgctggtcggcttctacacgccgaccgagggcaagatgacgatagacggctacgatctcggcgtggtcgataaagcctattatcgcgcgcagatcggctatgtgatgcagagcaacctgctgttttccggcacgattgccgagaatatcgcgagcggcgacgatgcgcccgatcggcgccgcatcgaggaagtggcgaagatggccgacgcgcacgcgttcatcagcaagatgccgcttggctacgagcagattgtcggcgagcgcggaatcggcttgtccggcgggcagatccaacggttgtgcattgcgcgggcgctgtatcacgatccgcgactactggtattcgacgaagcgacttcggcactggactcgcaatcggaaagcaatattctcggcaatatgcacgacattctgaaaggccgcacggcggtgatcattgcgcaccggctcagcacgatcatgcgtgcggacaagattctcgtgctgtacgaaggggcgattgtggaacagggccgtcacgaagagctgattcagcgcggcggcatgtattaccagctggtccagaaacagttgagtgcgtga

SEQ ID NO: 60086 - protein, 1018 aa, Burkholderia xenovorans LB400
MDAPQTAPSAAEFLTSVEILSPFSRDEIERLADYAQARFYSFGETVCSAGETADGLYVVRSGSVRIFTEEHGKETSMGVRKSGEIFADIAMLRAYVHEASVRASAKTELLFIPRAAIEPVIAGNQAALAFVASYVAINSAGGFVAQLFDLRGKLNKAELEEYVRSVGVKRVAAGKEILKQDGREDRRLYVVRQGEVRIVRHEEGHDYTLATLGEGEIFGEKACLMRQEQMASVVATADTRLLVIPERTVHFILERNPKLREVLDERIRYGDRELQRQKRLEQRRKLPLMLDLQTKPEFGEKVIKRFALVEQAEEMDCGAACLAMICRHYSIPMTLGKLRELANVTTQGATLDSLARAGESLGFTARGVQCTFDSLRGFDLPFIVHWEGYHYVVVYGLSKDYVWVADPAVGFRKMTVEDFERGWSGTCLLFTGGPNLLQMSAARSPWIRFVGYLTPYKKILGHLFLATFVIQVLGVIPPLIIQNILDGVIVHQNVSLLHLLIGGLIIANVFSQLMSSIRAYLANFMVRNMDFAMMSQFFKHTLSLPFSFFAKRKTGDIFARFQENQTIRAFLTESTVTTALNLLMVFIYFTIMFVYNVKMTLVLIAFIIPIMALTAIATPKIKGYAREVFTASTESKSFLMEALAGVETIKGMGIERPVRLRWEKKYAKALEVQYRAHAFNILVGLGSQLLNAATTIAILWVGANLVLAREMTIGQLIAFNAFMGSVLGPLMGLVGLWSMLNDAGVAMERLGDVLDIEPEQKPQDLPSRVMLPELQGEISLSGVYFRYGENDSAYVLENISFDIKPGELVAIVGRSGSGKTTLAKLLVGFYTPTEGKMTIDGYDLGVVDKAYYRAQIGYVMQSNLLFSGTIAENIASGDDAPDRRRIEEVAKMADAHAFISKMPLGYEQIVGERGIGLSGGQIQRLCIARALYHDPRLLVFDEATSALDSQSESNILGNMHDILKGRTAVIIAHRLSTIMRADKILVLYEGAIVEQGRHEELIQRGGMYYQLVQKQLSA

SEQ ID NO: 60087 - DNA, 1869 bp, Acidobacteria bacterium Ellin345; identical to SEQ ID NO: 7511
  CDS (1)..(1869): transl_table=11

SEQ ID NO: 60088 - protein, 622 aa, Acidobacteria bacterium Ellin345; identical to SEQ ID NO: 7512

SEQ ID NO: 60089 - DNA, 1803 bp, Silicibacter sp. TM1040
  CDS (1)..(1803): transl_table=11
atggcacgaggtgcagtgcagaatacggccagcaacgaggaacgcgagacctcgcgcaggatcggagtcctgaaggcgctttggccgttcatgcgtccgtatcgtggcttgatctttgccgcgctggctgcgctcaccctgacggcaggcgtgtcgctgtcgctgccgctggcggtgcgccgggtggtggacaacttccgcatcaccgatgccgcattgctgaaccagtattttacggctgcgatgatcatggcggcgctgctcgcgctgggcacggggatacgctatgcgctggtgaccaagctgggcgagcgggtggtggccgatatccgcaaggcggtgtttgaccgcatcatcggcatgagccccgcgtttttcgagcgtatcatgacgggcgaggtgctgagccggatcaccaccgataccacgctcattcagtcggtgcttgggtcttctgcatccattgcgctgcgcaacctgttgattttcctcggtggtctggtgctgatgctgctcacctcggccaagctcacggcgatggttctgctgatcgtgccggcggtgatcgtgccgatcctgtttctggggcggcgtctgcgggtgatctcgcgggagaaccaggactggatcgcggcctcgtcggggaatgcgggcgagtcgctgggcgcggtgcagaccgtgcaggcctttacccatgaggacctgagccgggcgcatttttccgagatgacagaaacctcctatgaggtctccaagcggcgcatccagacccgcgcattgctgacggtgatcgtgatctttctggtgttttcgggcgttgttggcgtcttgtggatcggggccaacgacgtgcgctttggctccatgagcgaaggcgctctggtgcagttcgtgatctatgccgtgatggtggcgggctccgtggcggcgctctcggagatctggagcgagttgcagcgtgccgcaggcgcgacggagcggctggtggagctgttgcaggccgaggacagcgtgcgcgaccctgaggtggcgcaggtgctgccagagcctgtgcgcggtgagctgacttttgacaccgtgtccttcacctatccctcgcggccggacgtctcggcgctggatcaggtgagcctcaccatcgcgccgggcgagaccgtggcctttgtcggcccgtcgggggcgggcaagaccacgatcattcagatgatccagcggttctacgatccgcaatcgggcgaggtgcgtctggacggtgtgccgctgcaggcgctggcgcgcgatgatttccgccgccacatcgcgctggtgccgcaagatccggtgatctttgctgccaccgcgcgcgacaatatccgttttggccgtcccgatgcgagcgacgccgaggtcgaggccgccgccaaggccgctgccgcgcatgacttcatcatgaagctgcccgaaggctatgatgcctatgtgggcgagcgcggggtgatgctgtcgggcgggcagaaacagcgcattgcgattgcgcgggcgatcctgcgcgacgcgcctgtgctgcttctggatgaggcgacctcggcgctggatgccgagagcgagcgtctggtgcaggccgcgtttgaggacctgagccgggatcgcaccaccattgtggtggcgcaccgtctggcgacggtcaaaaaggccgaccggatcgtggtgatggatcagggccgcattgttgcggtgggcacccatgagagcctggtggccgagggcgggctttatgcgcgcctcgcgcggctgcagttcaccgacgggcaggcgcaggggtaa

SEQ ID NO: 60090 - protein, 600 aa, Silicibacter sp. TM1040
MARGAVQNTASNEERETSRRIGVLKALWPFMRPYRGLIFAALAALTLTAGVSLSLPLAVRRVVDNFRITDAALLNQYFTAAMIMAALLALGTGIRYALVTKLGERVVADIRKAVFDRIIGMSPAFFERIMTGEVLSRITTDTTLIQSVLGSSASIALRNLLIFLGGLVLMLLTSAKLTAMVLLIVPAVIVPILFLGRRLRVISRENQDWIAASSGNAGESLGAVQTVQAFTHEDLSRAHFSEMTETSYEVSKRRIQTRALLTVIVIFLVFSGVVGVLWIGANDVRFGSMSEGALVQFVIYAVMVAGSVAALSEIWSELQRAAGATERLVELLQAEDSVRDPEVAQVLPEPVRGELTFDTVSFTYPSRPDVSALDQVSLTIAPGETVAFVGPSGAGKTTIIQMIQRFYDPQSGEVRLDGVPLQALARDDFRRHIALVPQDPVIFAATARDNIRFGRPDASDAEVEAAAKAAAAHDFIMKLPEGYDAYVGERGVMLSGGQKQRIAIARAILRDAPVLLLDEATSALDAESERLVQAAFEDLSRDRTTIVVAHRLATVKKADRIVVMDQGRIVAVGTHESLVAEGGLYARLARLQFTDGQAQG

SEQ ID NO: 60091 - DNA, 1767 bp, Myxococcus xanthus DK 1622; identical to SEQ ID NO: 7513
  CDS (1)..(1767): transl_table=11

SEQ ID NO: 60092 - protein, 588 aa, Myxococcus xanthus DK 1622; identical to SEQ ID NO: 7514

SEQ ID NO: 60093 - DNA, 1758 bp, Myxococcus xanthus DK 1622
  CDS (1)..(1758): transl_table=11
atgggcttgattcagaatccgccgctgagccacgcatcccttcgtcgcgtcctggcactggctcgtcccgagtggaggctgctcttgctcggcacgtgcttcctcttcatcgggagcgcgggaggcctgctcttcccacaggccatccgggtcatcctcgacgaagccctgactaccgccacgctcgacatggtgaacgacaccaccctgtggatgctgggggtgtgtttcatccagtcggtggccatcgggctgcgcttcgccttcttcaacatcgcgggtgagcgcattgtcagcgacctgcgggagcggctgtatcgcagcttgctggagcaggagatcgcgttcttcgaccagcaccgcactggcggcctcaccagccggctgtccactgacaccgccctcatccagggcgccgtcagtacgcacatcgccatcatgctccgcaacgcaaccacgttgattggagggctggcgctgctgctctacacctcgccccggttgacgctcgtcatgctggcggtcgtcccccccgtgacgctgggggcgctgttctatggccgcaaggcacggcagctcgcgcgagacgcccaggccgcggtggccgaagccaatgaagtcgccgccgagtccctctatggcattcagaccgtccaggccttcgtcgccgaagacgcggagcgccggagctatggccgtgccattggcaaggccctggcgctggcgcgcacgcgaatcgtctcctcgggcttcttcatgggaggaacgggcttcaccggcctggcgtcgaccctgctcgtcttctggtacggcacgcacatggtcgtttcgggcgacatcacggtgggtggactgacctccttcctgatgtacacgctgatggtcgtcatggccgtcggtgccctgagcgagctgtgggcggagttcatgaaggccggaggcgccaccgagcgcgtcttcgagctcatcgaccgtacgcccgccatctccgtcagcggcggcgagcggcccgcgaacatggaaggcaacctgcgcttccgcgacgtcaacttcagctaccccacgcgccgggacgtgcccgtcctccaaggcctggacatggacgtcgcgcccggtgaagtcgtggcgctggtgggacactcgggcgcgggcaagtcgactgtcgcctcgatgttgatgcgcttctacgatccggaccgaggggccatcctcgtcgatgagacagacctgcgaacgctcgacgtccgctggctccgtcagaacatcggcatcgtgtcgcaggagcccacgctcttctcgggcagcatcgccgacaacatccgctacggacgcaccgacgccaccgatgcggaagtggaagccgcggcccgcgtcgccaatgcccacgacttcgtgagccggtttccagaaggctaccgcacgcgcgtcggcgagcggggcatccagctctcgggcgggcagaagcagcgcgtcgccattgcccgcgcggtcctcaaggatccgcggctgctcatcctggacgaggccaccagcgcgctggactccgaaagcgagcacctggtcaaggaggcgctggaccggctcatggtgggacgcaccaccctcatcatcgcccaccgcctgtccaccgtggcgggcgtcgaccgcatcttcgtgctggaccagggccgcgtcgtccagcacggaaaccacgaggcgctcatcacccaggacggcctctacaagcgcctcgtggaacggcagttcatcgccgcctga

SEQ ID NO: 60094 - protein, 585 aa, Myxococcus xanthus DK 1622
MGLIQNPPLSHASLRRVLALARPEWRLLLLGTCFLFIGSAGGLLFPQAIRVILDEALTTATLDMVNDTTLWMLGVCFIQSVAIGLRFAFFNIAGERIVSDLRERLYRSLLEQEIAFFDQHRTGGLTSRLSTDTALIQGAVSTHIAIMLRNATTLIGGLALLLYTSPRLTLVMLAVVPPVTLGALFYGRKARQLARDAQAAVAEANEVAAESLYGIQTVQAFVAEDAERRSYGRAIGKALALARTRIVSSGFFMGGTGFTGLASTLLVFWYGTHMVVSGDITVGGLTSFLMYTLMVVMAVGALSELWAEFMKAGGATERVFELIDRTPAISVSGGERPANMEGNLRFRDVNFSYPTRRDVPVLQGLDMDVAPGEVVALVGHSGAGKSTVASMLMRFYDPDRGAILVDETDLRTLDVRWLRQNIGIVSQEPTLFSGSIADNIRYGRTDATDAEVEAAARVANAHDFVSRFPEGYRTRVGERGIQLSGGQKQRVAIARAVLKDPRLLILDEATSALDSESEHLVKEALDRLMVGRTTLIIAHRLSTVAGVDRIFVLDQGRVVQHGNHEALITQDGLYKRLVERQFIAA

SEQ ID NO: 60095 - DNA, 1824 bp, Myxococcus xanthus DK 1622
  CDS (1)..(1824): transl_table=11
gtgtcgctcaaggtccgcttccagaacgcgggcagtctcttcaagcagttgccggggaccttccggctcttctggcaggccagccctcgcggcgcggtggtgctgggcgcgctgacgctggtggcggcgctgttgccggcggccatcgcctgggtgggcaagctcatcgtggactcggtggtggcggcggcgcagggctcggtggaggcccgctcgcgggtgtacgggctggtggggttggagttcgggttgatgctgggctcggcggtggtggaccgcgggctgacgctgacgcgcgagctgcttcgcgccaacctggggaacctgctcaatgagcgcatcctccagaaggcgctggcgctggagctgcggcacttcgaggactcggccacctacgacaagatgcagaacgcgcggcgcgaggcgaacagccggccgctgtcgctggtgacgcaggcgttctccatcgtccgcaacaccatcaccctgggcaccttcgccgcgttgttggtggcgttgtcgccgtggagcgtggtggtgctggtggccgcgtcggtgccggccttcatcgccgaggcgcggctggccatggcgggcttccggctctactcgtggcgcgcgcccgagggccgcaagctgaactacctggagtggattctcacgcgggacagccacgtgaaggaggtgaagctcttcgggttggggccgctggtgctgggccgctaccgcacgctcttccagaagttcttcgcggaggaccgggcgctggccttccggcggatggcctggggcctggggctgggcgtcctctcattgggcgccttctatggctgctacctgctggtggcgggccgcgcggcgagcgggacgattaccgtgggcgacatggtgctgtacctgagcgtgttccgtcaggggcaggcggcgttccagggcatcctgaccagcgtgggctccatgtacgaggacgcgctcttcatgagcaacctgttcgcgtacctggacatccccaccggcggcgaggcgacgcgggtgctgccgccgctctctccgccgcgtgggcacgacagcgccatcgagctgcgtgacgtgtccttccgttatccggggaaggatgcgtgggcgctgaagaacgtgtcgctgtcgctgaagccgggacagaagctggcgctggtgggagagaacggggcggggaagagcacgttggtgaagctgctcctgcgcctgtacgagccggtggacggcgacatcttctacggcggcgtcaatctgaaggacatggacgtggaggacctgcgcagccgcttcggcgcggtgttccaggacttcgtgcgctaccagttcaacgtggcggagaacatcggcctggggcacgtgccggcgctggaggaccgcggccgcattgagaaggcggccgaggagggcggggccagcggtgtgattacggcgctgccacagcagtacgacacgatgctgggcggctggttcgagaaggggcaggagctgtcggcgggccagtggcagaagctggcggtggcgcgggccttcatgcgcgacgacgcggaggtgctgattctggacgagcccacggccagcatcgacgcggaggcggagcacgcgctgttcgagcgcttccaggcgctggcggcggaccggattgcgattgtgatttcgcaccgtttctccacggtgcgcatggcggaccagattgcagtgctccacaacgggcaggtggacgagctgggcagccacgacgagctgatggcgaaggacggccgctacgcgcacctgttccggctgcaggcgcgcggatatcaggactga

SEQ ID NO: 60096 - protein, 607 aa, Myxococcus xanthus DK 1622
MSLKVRFQNAGSLFKQLPGTFRLFWQASPRGAVVLGALTLVAALLPAAIAWVGKLIVDSVVAAAQGSVEARSRVYGLVGLEFGLMLGSAVVDRGLTLTRELLRANLGNLLNERILQKALALELRHFEDSATYDKMQNARREANSRPLSLVTQAFSIVRNTITLGTFAALLVALSPWSVVVLVAASVPAFIAEARLAMAGFRLYSWRAPEGRKLNYLEWILTRDSHVKEVKLFGLGPLVLGRYRTLFQKFFAEDRALAFRRMAWGLGLGVLSLGAFYGCYLLVAGRAASGTITVGDMVLYLSVFRQGQAAFQGILTSVGSMYEDALFMSNLFAYLDIPTGGEATRVLPPLSPPRGHDSAIELRDVSFRYPGKDAWALKNVSLSLKPGQKLALVGENGAGKSTLVKLLLRLYEPVDGDIFYGGVNLKDMDVEDLRSRFGAVFQDFVRYQFNVAENIGLGHVPALEDRGRIEKAAEEGGASGVITALPQQYDTMLGGWFEKGQELSAGQWQKLAVARAFMRDDAEVLILDEPTASIDAEAEHALFERFQALAADRIAIVISHRFSTVRMADQIAVLHNGQVDELGSHDELMAKDGRYAHLFRLQARGYQD

SEQ ID NO: 60097 - DNA, 1806 bp, Mesorhizobium sp. BNC1
  CDS (1)..(1806): transl_table=11
atggcattgacatccggcacagaggagcggaaatcaaggcgctcgctcagaccgctgcgcaatctgcttccttatgtgagacgctatcgcggcctggcgctcggcgcgggcttctttctggttcttgcggcattggcgacgctgctcctgccccaagctgtgcgccgcgttatagatcacggcttctccgatgccgatgcggccttcatcaccatttatttttccgggctgttgctggtggcggcgatcctcgccgtcgcttcggcctgccgctactatttcgtcgtcgcgctgggcgagcgcgtggtggcggatctgaggcgagacgtctttgcccatgtcacgcggctctctccggccttcttcgacagggcgcagtcgggcgagatcatctcgcggctgacggcggatgcgacgcagatcaaatccggtgtgggcgcctccgcatcccaggccgcccgcaacaccctcatgggccttggcgcagtggccatgatggtggtgacaagcccgcggctttccgcctttgcagttggcgccatacccatcatcgtgctgccgctggtcgctttcggccgctccgtccgccggcgttcccgctccgcgcaggatacgcttgccgaggcgaccgcctttgccagcgagcggattggtgctgtccgcgttctccaggccttcaacaatgaggagggcgcggcgaggcggtttggcggggcggtcgatgcggcattcgaggctgcccgaagctccattttcgcgcgtgcggtcctcaccttcttcgtcatccttggcgcttcgacctcggtcgtggccgtgctctgggtgggttcccgcgacgtgctcgccggcacgatgaccgcgggaacgcttgtccagttcgtcctctatgccgtgctggcggcgggggcgctcagcgccctttcggaagtaggcggcgaactcgcccaggcagccggcgcagccgaacgcatgtcggagctgctggctgaagagcctgccattgccgctcccgcggaccctatcgccctgccggtgccggcgcgcggtgccgtttccttcagggacatcagcttcgcttatccagctcgtcccggccgatcggccctgcacgaactgtctttcgacgtggcgcccggcgagacggtcgcgatcgtcgggccgtcaggcgccggcaaaagcacgattttctcactgctcctgcgctattacgatccggaccggggcgcggtgctggttgacggcgtcgatatacgcaaggcggatccgcaggccgtgcgcgagcgcatcgccatcgtgccacaagacgtgaccgtcttcgccgcgacggcggaagagaacattgccttcggccggccgggggcaacgcgcgagcaggtggaggccgccgcccgcgccgcactcgcgcatgacttcatcatggctctggaaaaaggctacgacactcaagtcggcgagcgcggcgtgatgctttccggcgggcagcgccagaggctcgccattgcccgcgctatcctgcgtgacgcgccgatcctgcttctcgacgaagctacctcggcgcttgatgccgagagcgagacattggtgcaggaggcgctggagcacctgatgcgcgggcgcaccaccattgtcatcgcgcaccgcctcgccactattttaaaggccgaccgcattctggtgcttgatgacggacgcatcgttgaagaaggctgccatgccgagcttgtctcgcgcggagggatctatgcgcggcttgccagcctgcaattcgaggccggcgcggatgttttcaagggagcggcggaatga

SEQ ID NO: 60098 - protein, 601 aa, Mesorhizobium sp. BNC1
MALTSGTEERKSRRSLRPLRNLLPYVRRYRGLALGAGFFLVLAALATLLLPQAVRRVIDHGFSDADAAFITIYFSGLLLVAAILAVASACRYYFVVALGERVVADLRRDVFAHVTRLSPAFFDRAQSGEIISRLTADATQIKSGVGASASQAARNTLMGLGAVAMMVVTSPRLSAFAVGAIPIIVLPLVAFGRSVRRRSRSAQDTLAEATAFASERIGAVRVLQAFNNEEGAARRFGGAVDAAFEAARSSIFARAVLTFFVILGASTSVVAVLWVGSRDVLAGTMTAGTLVQFVLYAVLAAGALSALSEVGGELAQAAGAAERMSELLAEEPAIAAPADPIALPVPARGAVSFRDISFAYPARPGRSALHELSFDVAPGETVAIVGPSGAGKSTIFSLLLRYYDPDRGAVLVDGVDIRKADPQAVRERIAIVPQDVTVFAATAEENIAFGRPGATREQVEAAARAALAHDFIMALEKGYDTQVGERGVMLSGGQRQRLAIARAILRDAPILLLDEATSALDAESETLVQEALEHLMRGRTTIVIAHRLATILKADRILVLDDGRIVEEGCHAELVSRGGIYARLASLQFEAGADVFKGAAE

SEQ ID NO: 60099 - DNA, 1653 bp, Trichodesmium erythraeum IMS101
  CDS (1)..(1653): transl_table=11
ttgacctgcacattagtatttactattttctggcctattttagcttggttaatgggtgaaatggcaggttatatcggcaagggagatgtcagagcaattattcaacttgcagggctagcagctatcatttttatgattaagggcgctgtacaatatggtcaagatactctgatggcaaaagcagctttaaccattgctttagacttgcgcaaacaattgtattctcacttacaaaaacttcatatcagttactttgaaaaatcaaaaactggggatctttcctatcgaattacagaagatatagatcgtactggggaagttatcaataaattttttcaccaatttgttccttgcattttacaattaatagttgtattaggctatatggtctatcttaactggcaattaactctagcaactctgataattgcacctttgatggcattattaataggttggtttggagagttattactttctttttctcgccaaagtcaacatcgtatttccaatttatctgctctcataactgaagtatttaatggtattagaatagttcaaacttttgcagctgaagaatatcaaattgctcaattttctgtggaagctgaacaaaacagacaagcaaaatatatggcagaaaaagttaaagcactccagtttgtagtagtgggtttcttggaagcaatgagtgtgatttttttatttttattgggaggatggcaaatatctcaaggaaatttaagtggagaaggctttattagttatgtaacaggtgttgctttgttaattgatccgatttctttaacaacaagtaattatagtgaatttaaacaaggtgaagcttcatgcgatagagtttttgaaatcttaagaattcaacctaaaattatacaaaaaacagatgcaattcctcttcctactgtagtgggaaaagtagaatataaaaatgtttgtttttcttataattctgaaaagcaagttttaaaaaatctgaatttgttggtaaaatcaggggaaataattgcttttgtaggagcctctggagcaggtaaaactacacttataaacttgcttcctaggttttatgaccctcagtcaggggaaatattaattgatgagataaatattcaagatgttactcttataagtctaagaagacaaattggaattgttccccaagaggtaactttattttctggaactatcttacaaaatattgcctttggtcaactagattataatatttatgcagtaaaagaagcagctaaaattgctaatgctcatcagtttattactaagctaccggaaggttatcaaacttgggtaggtgaaaggggagttaatttatctggagggcaaagacaaagaatagcgatcgctcgtgcagtattagaaaatccgaggatattaatattagatgaagctacttcttctctagactatgaatctgaatctttagttcaagaagccttagaaagattgatggaagggagaactgtatttattgttgctcataggttgacaactgtacaacgtgctaatcgaattttggttatggaaaatggtgaaattgtagagtcaggtactcacatagaattattagaaaaaggtgaactttacactcgtttatatcagaaacaatttagttaa

SEQ ID NO: 60100 - protein, 550 aa, Trichodesmium erythraeum IMS101
MTCTLVFTIFWPILAWLMGEMAGYIGKGDVRAIIQLAGLAAIIFMIKGAVQYGQDTLMAKAALTIALDLRKQLYSHLQKLHISYFEKSKTGDLSYRITEDIDRTGEVINKFFHQFVPCILQLIVVLGYMVYLNWQLTLATLIIAPLMALLIGWFGELLLSFSRQSQHRISNLSALITEVFNGIRIVQTFAAEEYQIAQFSVEAEQNRQAKYMAEKVKALQFVVVGFLEAMSVIFLFLLGGWQISQGNLSGEGFISYVTGVALLIDPISLTTSNYSEFKQGEASCDRVFEILRIQPKIIQKTDAIPLPTVVGKVEYKNVCFSYNSEKQVLKNLNLLVKSGEIIAFVGASGAGKTTLINLLPRFYDPQSGEILIDEINIQDVTLISLRRQIGIVPQEVTLFSGTILQNIAFGQLDYNIYAVKEAAKIANAHQFITKLPEGYQTWVGERGVNLSGGQRQRIAIARAVLENPRILILDEATSSLDYESESLVQEALERLMEGRTVFIVAHRLTTVQRANRILVMENGEIVESGTHIELLEKGELYTRLYQKQFS

SEQ ID NO: 60101 - DNA, 1842 bp, Shewanella sp. MR-4
  CDS (1)..(1842): transl_table=11
gtgaactcatcaaatcataaatcttcgcaaacggtattaccgcatactcccgttgagtcactggcttctcccccctccaaggtgcaagacagagccgtactcccctggatttggcaatttcttaagccctatcgcctgcgggtggtcgcggcgattgtatttcttttgattggctccttggcctggctatccctcgggcagggcgtgcggttgatggtggacgaaggttttattaaggataacgcccagcgtctcaatgaaattattttgttggtactgctgatcaccgcagtgagtggcactgcggtgttttgccgattttatctgatgacttggctcggcgagcgggtcagcgccgatataaggctgacggtttacaatcaactgctgaagttgtctccagccttctacgccaaggtgcgtaccggtgaggtgatttcgcgctttaccgccgattcgactctgctgcaaaccgtggtcggctcgagtctctcgatggcgctgcgctccggcgtgactgtgatcggtgggttggcgatgatggggatcaccagcgtgaagatgacgctgctggtgctactggcagtgcctttggtgctggggcctgtcggtttctttggccgaaaagtgcgaaccttagcgcgggagagtcaagatagggtggcggatttgggggcctatgtggatgaaaccttacatgaaatccacacagtgcaagcctatgggcatgaggataaggaccgcagtttattcaatagtcgtgtcgaagatgtgatgaccgccgccagtggtcgtattcgttaccgtgccatgttgatttcctccgtgatgtttttaagtatcgccgccattgcatctgtgacttgggtcggcgcccacgacgtgatgtcgggaaagatgacgggcggcgaactgtcggcctttatgttttatgccgtgatggtggcaggtgccgttgcgaccatcagtgaagttgtcggtgagatccaacgcgcctcgggcgccgccgagcgcttaatcgaactggctgaaactgaggtcgatattcctgcgccattggtgcctaaaacactgcctgcgaaagtgcgtggcgagctgcaactgcaacagctgagttttcattatcccgagcaaactcagttagtgctcagcgacttagaactgatgattaccgcgggcgagcgagtggccttggtcgggccgagtggtgccggtaagagtaccttatttcagttattgcagcggttttatgtgccgtcttcgggcagcattcatttggatgggattgatattgctgagctttcaccaaaggatttacgggcgcagtttgcgcttgtgccgcaggactcagtgatttttgctactagtgtgctggaaaatgtgcgctatggccgcgtcgatgccagcgagcaggaggtgattgatgcctgtattgcggcccgtgtccatgagtttatcagcgaatttagtgaaggttatcaaacctatttgggtgagcgcggcgtgcgcttatccggtggtcaaaagcagcgtatcgcgattgcgagggcgattctagccgacaggcctatcttgctgctcgatgaggcgaccagcgcgctcgatgccttaagcgagcaaaaagtgaagcaggcactcgatgaattgatgaaggggaaaaccacgcttatcatcgcccatcgccttgccactgtgatcaatgcggaccgaattatcgtgttcgataagggacgtatcgtcgccagtggtaagcatcaaacccttttacaaaccaatgcgttatatcgtgagtttgccagtttacagctgctaacggatgacgtgagtgcgcttagcgagtaa

SEQ ID NO: 60102 - protein, 613 aa, Shewanella sp. MR-4
MNSSNHKSSQTVLPHTPVESLASPPSKVQDRAVLPWIWQFLKPYRLRVVAAIVFLLIGSLAWLSLGQGVRLMVDEGFIKDNAQRLNEIILLVLLITAVSGTAVFCRFYLMTWLGERVSADIRLTVYNQLLKLSPAFYAKVRTGEVISRFTADSTLLQTVVGSSLSMALRSGVTVIGGLAMMGITSVKMTLLVLLAVPLVLGPVGFFGRKVRTLARESQDRVADLGAYVDETLHEIHTVQAYGHEDKDRSLFNSRVEDVMTAASGRIRYRAMLISSVMFLSIAAIASVTWVGAHDVMSGKMTGGELSAFMFYAVMVAGAVATISEVVGEIQRASGAAERLIELAETEVDIPAPLVPKTLPAKVRGELQLQQLSFHYPEQTQLVLSDLELMITAGERVALVGPSGAGKSTLFQLLQRFYVPSSGSIHLDGIDIAELSPKDLRAQFALVPQDSVIFATSVLENVRYGRVDASEQEVIDACIAARVHEFISEFSEGYQTYLGERGVRLSGGQKQRIAIARAILADRPILLLDEATSALDALSEQKVKQALDELMKGKTTLIIAHRLATVINADRIIVFDKGRIVASGKHQTLLQTNALYREFASLQLLTDDVSALSE

SEQ ID NO: 60103 - DNA, 1842 bp, Shewanella sp. MR-7
  CDS (1)..(1842): transl_table=11
gtgaactcatcaaatcataaattttcgcaaacggtattaccgcatactcccgttgagtcactggcttctcccccctccaaggtgcaagatagagccgtactcccctggatttggcaatttcttaagccctatcgcctgcgggtggtcgcggcgattgtatttcttttgattggctccttggcctggctatccctcgggcaaggcgttcggctgatggtggatgaaggttttattaaggataacgcccagcgtctcaatgaaattattctgttggtgctgctgatcaccgcagtgagtggcactgcggtgttttgtcgtttttatttgatgacttggctcggcgagcgggtcagtgccgatataaggctgacggtttacaatcaactgctgaagttgtctccagccttctacgccaaggtgcgtaccggtgaggtgatttcgcgctttaccgccgattctactctgctgcaaaccgtggttggatcgagtctctcgatggcactgcgctccggcgtgacagtgatcggcgggctggcgatgatggggataaccagcgtgaagatgacgctgctcgtgctactggccgtgcctttggtgctggggcctgtcggtttctttggccgaaaagtgcgaaccttagcgcgggaaagccaagaccgggtggcggatttgggggcctatgtggatgaaaccttacatgaaatccacacagtgcaagcctatggtcatgaggataaggaccgcagtttgttcaatggtcgtgtcgaagatgtgatgaccgccgccagtggtcgtattcgttaccgcgccatgttgatttcctccgtgatgtttttaagtatcgccgccatagtatctgtgacttgggtcggcgcccacgacgtgatgtcgggaaaaatgacgggcggcgaactctcggcctttatgttttatgccgtaatggtggcaggtgccgttgcgaccattagtgaagttgtcggtgagatccaacgcgcctcgggcgccgcagaacgcttaatcgaactggccgaaactgaggtcgatattcctgcgccgttggtgcctaaaaaactgcctgcgaaagtgcgtggcgagctgcaactgcaacagctgaacttccattatcccgagcaaactcagttagtgctcagcgacttagaactgacgattaccgcgggcgagcgggtggccttggtcgggccaagtggtgccggaaagagcacgctgtttcagttattgcagcggttttatgtaccctcttcgggcagcattcatttggatgggattgatattgctgagctttcaccaaaggatttacgggcgcagtttgcgcttgtgccgcaggactcagtgatttttgctactagtgtgctggaaaatgtgcgctatggccgcgtcgatgccagcgaacaggaggtgattgatgcctgtattgcggcacgtgcccatgagtttatctgtgagtttagcgaaggttatcaaacctatttgggtgagcgcggcgtgcgcttatccggtggtcaaaagcagcgtatcgccattgcgagggcgattttagccgacaggcctatcttgctgctcgatgaggcgaccagtgcgctcgatgccttaagcgagcaaaaagtaaagcaggcgctggatgaattgatgacggggaaaaccacgcttatcatcgcccatcgccttgccactgtgatcaatgcggaccgaattatcgtgttcgataagggacgtatcgtcgccagtggtaagcatcaaacccttttacaaaccaacgccttatatcgcgaatttgccagtttgcagctactaacggatgacgtgagtgcgcttagcgagtaa

SEQ ID NO: 60104 - protein, 613 aa, Shewanella sp. MR-7
MNSSNHKFSQTVLPHTPVESLASPPSKVQDRAVLPWIWQFLKPYRLRVVAAIVFLLIGSLAWLSLGQGVRLMVDEGFIKDNAQRLNEIILLVLLITAVSGTAVFCRFYLMTWLGERVSADIRLTVYNQLLKLSPAFYAKVRTGEVISRFTADSTLLQTVVGSSLSMALRSGVTVIGGLAMMGITSVKMTLLVLLAVPLVLGPVGFFGRKVRTLARESQDRVADLGAYVDETLHEIHTVQAYGHEDKDRSLFNGRVEDVMTAASGRIRYRAMLISSVMFLSIAAIVSVTWVGAHDVMSGKMTGGELSAFMFYAVMVAGAVATISEVVGEIQRASGAAERLIELAETEVDIPAPLVPKKLPAKVRGELQLQQLNFHYPEQTQLVLSDLELTITAGERVALVGPSGAGKSTLFQLLQRFYVPSSGSIHLDGIDIAELSPKDLRAQFALVPQDSVIFATSVLENVRYGRVDASEQEVIDACIAARAHEFICEFSEGYQTYLGERGVRLSGGQKQRIAIARAILADRPILLLDEATSALDALSEQKVKQALDELMTGKTTLIIAHRLATVINADRIIVFDKGRIVASGKHQTLLQTNALYREFASLQLLTDDVSALSE

SEQ ID NO: 60105 - DNA, 1797 bp, Alkalilimnicola ehrlichei MLHE-1
  CDS (1)..(1797): transl_table=11
ttgacagtcgccgggccaaaacgcctggaggcccttcggccgttgctggccttcctgcgccgctaccggctccgggtgacggcggcggtggccgcgctgctggtggctgccggcagcgtgctgaccttgggccaggccctgcggttggtggtggaccggggcttcctcggcgaggaccctgcggagctgaatcgcctgctactgctggccatgaccgttatcctgatcatggccctggcctcggcgctgcggtactacttggtctcctggatcggtgaacgggtggcggcggacctacgcacggccgtgtttgatcacgtcacccacctggagcccgcctttttcgagttgaacggggtgggcgagattcagtcccgcctgaccaccgacaccagcgtgctgcagaccatcctgggctcgtccttttcgatcgcggtgcgcaacctcctgctactcgcgggggccgtggtcatgctcttcatcaccagccctcgcttgaccgccttcgtgctgttgagtctccccctggtcctgattcccatcctctacttcggccggcgggtgcggcggctctcccgcgcgagtcaggaccgggtggccgatgtgggcagctatgccggtgagaccctgcacgccatccgcacggtgcaggccttcggccatgaggctgccgaccgcaggcgtttccgccgccatgtggatgcggccttcgccaccgccgtgcgccgggtgcgccagcgggcctggctggtgggcatggccatgatgctcgccttcaccgccgtgggcatcattctctggcagggtggccacgacgttctcgccgggcgtatgagcgccggtgaactggccgccttcgtgttctatgccgtgttggcggccggggccaccggtgcggtctccgaggtggtcggggagctttaccgggccgccggggcgacggaacggctgacggaactgttgcgcaaccagccgcgcatccgcgccccggcacggccggtgccgccgccacaaccgctgcgcggtgccatcagcctggagggtgtcgctttcgcctacccggggcggccgcaacagcgggtgctggaccgggtggacctgagggtggccgcgggtgagcgggtcgccctggtggggccctccggcgccggcaaaagcacggtgttcgcgttgctgctgcgtttctacgacccgattgagggccgggtgtgcctggatggcgtggacctgaaggcgatggatccgaaggcagtgcgcgctgcgatcgggctggtggcccaggagcccaccctctttaccgggacggcgtgggagaacatccgctatggccgggaggatgcggacgatgctgacgtccgccgggccgcggaggcggcccattgcactgagttcctgcagcaactgcccgaggggttcgatacccccctgggaccgggcggggttcagctctccggcggtcagcgccagcgcatcgccattgcccgggccatcctgcgcgacccggcgttactgctgctggatgaggccaccagtaacctggacgccgacagcgaggcgcgcatccagtcggcgctcgaggatctgatgcgcgagcggaccagcctggtgattgcccaccgcctggccacggtacagtcggcggaccgtatcgtggtgatgcagtccggccggatccaggcggagggcagccaccgtcagttgctgcgcgacagcccgctgtacgcgcacctggcggccctgcagttcggcagtgacccggatggagggtctccaggggctgcacagcctgtggggtaa

SEQ ID NO: 60106 - protein, 598 aa, Alkalilimnicola ehrlichei MLHE-1
MTVAGPKRLEALRPLLAFLRRYRLRVTAAVAALLVAAGSVLTLGQALRLVVDRGFLGEDPAELNRLLLLAMTVILIMALASALRYYLVSWIGERVAADLRTAVFDHVTHLEPAFFELNGVGEIQSRLTTDTSVLQTILGSSFSIAVRNLLLLAGAVVMLFITSPRLTAFVLLSLPLVLIPILYFGRRVRRLSRASQDRVADVGSYAGETLHAIRTVQAFGHEAADRRRFRRHVDAAFATAVRRVRQRAWLVGMAMMLAFTAVGIILWQGGHDVLAGRMSAGELAAFVFYAVLAAGATGAVSEVVGELYRAAGATERLTELLRNQPRIRAPARPVPPPQPLRGAISLEGVAFAYPGRPQQRVLDRVDLRVAAGERVALVGPSGAGKSTVFALLLRFYDPIEGRVCLDGVDLKAMDPKAVRAAIGLVAQEPTLFTGTAWENIRYGREDADDADVRRAAEAAHCTEFLQQLPEGFDTPLGPGGVQLSGGQRQRIAIARAILRDPALLLLDEATSNLDADSEARIQSALEDLMRERTSLVIAHRLATVQSADRIVVMQSGRIQAEGSHRQLLRDSPLYAHLAALQFGSDPDGGSPGAAQPVG

SEQ ID NO: 60107 - DNA, 1827 bp, Hyphomonas neptunium ATCC 15444
  CDS (1)..(1827): transl_table=11
atgcccacaagctgctggaccccgcgacgggtgatcaccatcacgtctgagacctctccggcgctgaaggaaaaggcccagcgatcgctgctgcggctgttcaaggcgcatttctggcctcagaagaaatggttcattggcggtacgctgatggccattctcacggcggcgttcagcatcggctatgtcgcggtgctcgattatgtcggcaacggcctgcagcgggacattgaacagaaggccgctggcacggccgccccgattgactggatatgggcgggcattgccgccatcgtgttgctcaccatcgggcgcgcggtatcgatgtatgcgatgaacctcctcaacaataccggcgtgcagcgcggtctcgtgggggttcagtcggtccagtatgatgcgctgacggacggcgattttgcccgcatctccggagacgcttcgggcggctttgtggcgcgcttcatcaatgatgtggtcgccattcgcgaggcgatgctgcgctttgccaacaacttcccgaaaagctcggcgaccgtcatcggtgtgcttgcctggctgttctggaaagactggcagctcgcgctgatcatcacggtggtttatcccctcgcactcgggccggttgtctcgctcggaaactccgtgcgcaaacggtccaaacgcgcccagcagcagaccggcgaagtaacgtcactgttgaccgaaggcttccagtcagcgcgcgttgtaaaagcttacggccttgagggctggcagaaggcgcgggcggcgaagggttttaccgaacgctcgcagcttttcctcaaagtgttgaccaagcgcgcaggcgttgaccccgtgctggaagtgttcggcggctttgcgctggcggccttgctgggtttcgtcgcctggcggatcgcgcagggcgaaagcacgctgggcgacttcctcggctttatcgcggcggttggcattgcggcgcctgaagtgcgcgcactcggcgctattggcgcggtcgcgcaggagggcgcagcggcggctgaccgggtgttcgaaattgtcgatcagcgcgcgcaggtggccgataagcccggcgccaaacaactcgataccgtccggggggagatcgaattccgggacgtgcagtttgcttatcccgatggcactcaggcgctcaaggggctgagtttcaccgcgcggccgggcgagacggttgccatcgtcggcgcatcgggggcgggcaagtctaccgtcttcaatctgctgatgcggctctatgatccctcatccggcgccgtggcggtagaccagcaggatgtgcgggaagtgaccggcgccagcctgcggatgcagatggcgctggtggcgcaggatgcggcactgtttgacgacacgattgccagcaacattgcgctcggccggatgggcgcctcgcgcgatgaggttgaagcggccgcgcgcgcggccaatgcgcatgatttcatcagtatgctgccgggcggctatgatgcgcccgcaggcgagatggggcgcaacctttccggcggccagcgccagcgcgtggctcttgcgcgggcgatcctgcgcggggcgcccgtcctgctgctggatgaggcaacctcagcgctggacgcggaaagcgaagcgaaagtgcagggcgcgctggctgaatttggcaaaggccgcacggtgctgatcattgcccaccgcctctccactgtgcgcgctgcagaccgtatcgtggtgatggaagacggccgcgcggttgaagaaggcacccatgaaagccttatgacggcagggggaacctaccgccgtctggtggagcttcagctcagctga

SEQ ID NO: 60108 - protein, 608 aa, Hyphomonas neptunium ATCC 15444
MPTSCWTPRRVITITSETSPALKEKAQRSLLRLFKAHFWPQKKWFIGGTLMAILTAAFSIGYVAVLDYVGNGLQRDIEQKAAGTAAPIDWIWAGIAAIVLLTIGRAVSMYAMNLLNNTGVQRGLVGVQSVQYDALTDGDFARISGDASGGFVARFINDVVAIREAMLRFANNFPKSSATVIGVLAWLFWKDWQLALIITVVYPLALGPVVSLGNSVRKRSKRAQQQTGEVTSLLTEGFQSARVVKAYGLEGWQKARAAKGFTERSQLFLKVLTKRAGVDPVLEVFGGFALAALLGFVAWRIAQGESTLGDFLGFIAAVGIAAPEVRALGAIGAVAQEGAAAADRVFEIVDQRAQVADKPGAKQLDTVRGEIEFRDVQFAYPDGTQALKGLSFTARPGETVAIVGASGAGKSTVFNLLMRLYDPSSGAVAVDQQDVREVTGASLRMQMALVAQDAALFDDTIASNIALGRMGASRDEVEAAARAANAHDFISMLPGGYDAPAGEMGRNLSGGQRQRVALARAILRGAPVLLLDEATSALDAESEAKVQGALAEFGKGRTVLIIAHRLSTVRAADRIVVMEDGRAVEEGTHESLMTAGGTYRRLVELQLS

SEQ ID NO: 60109 - DNA, 1869 bp, Hyphomonas neptunium ATCC 15444
  CDS (1)..(1869): transl_table=11
atgtttcgcttctttgaacgccgtatcgatccgtttccggaaaatccccaaggcgttccgccgagcgggttccggtcattcctgtggtattacatccgcccggccgcgccctggctgatcgcgatgtcgatcttcaccgcgctgattgcggccggcgaggtggcgctgttcggctttttgggcgggattgttgactggctggcgacggcggaccgggaaggctttctccagcgggaaggcggcacgctcgccattatgggtatcgtgctgctgatcggcctgccactggcaacgctgatacaggggctgatcgtctatcagggcctgatggggaacgtgcctatgagcgcgcgctggcggatgcaccggcagatgctgggccagtcgatgggtttcttcggcaacgagtttgccgggcgcgtcgccaccaaggtgatgcagacggccttgtccgtgcgcgaagtggtgatgaaggtgctcgacgtcttcgtcttcgtgatcgtgtacttcgtttcggccctcgcgctggtggcgagtgcggactggcgcctcaccctgccgctgctgctttgggcggtggtgtatggctttgtgctgcgctggtttgtgccgcgtctgggcaagattgccgaggcgcaggccgatgcgcgctcgatcatgacggggcgcattgttgattcctacacgaacattcagacggtgaaactgtttgcccattccggccgcgaggaagagtatgccaagggctcgatggacgggtttctgcagacggtttatcgccagatgcggatggtcacgggcttcaatgtggtggtctatctcaacaactcgctgctggtgttcctgatcgcggcaggcggcatctatctgtggatgggtaatctggttggcgccggcgcggtggcggcagcggtcggcctggcgctgcgcatcaagtccatgtcgcaatggatcatgtgggaagtggcgggcctcttcgaaaatatcggcgtggtctatgacggcatggcgatgttgcagacgccggtggcggtaactgatgacccggcggcggttgatctgccgcgcgtaaaaggggaggtcgtgtttgaagatgtggccttccattatggcaagggcgcgggcgtgatcgaggggctgaacctggcgatccggccgggcgagaagatcggccttgtcggccgctcgggcgcgggcaagacgacgctgacgagccttttactgcgcttctatgatgccgagggcgggcgcgttctgattgatgggcaggacatttccaaggtcacccaggataccctccgggcacagatcggcatggtgacgcaggatacctcgctgctgcaccgctcgatccgggacaacatcgcctatgggcgaccggacgccaccgatgatgacattcgtattgccgccaacaaggcggaggccatggcgttcatcgagacgctggaagattccaagggccgcatcgggtttgacgcgcatgtgggcgagcggggcgtgaagctttctggtggccagcgccagcggatcgcgattgcgcgcatcttcctgaaggacgcgccgatcctgatcctggacgaggcaacgtctgcgctcgattcagaggtggaggcggcgatccaggacaacctcttccgcctgatggaaggcaagaccgtgctggcgattgcccaccggctttccacgattgccgagatggaccggctgatcgtgctcgatcaggggcgcatcgtggagcagggaacgcatgacgagctggtcgcagcaggcggtctctatgcggagctttgggcgcgccagtccggcgggttcctgatcgagcctgagccgattgagagagacctcgccacggagccggcagagtga

SEQ ID NO: 60110 - protein, 622 aa, Hyphomonas neptunium ATCC 15444
MFRFFERRIDPFPENPQGVPPSGFRSFLWYYIRPAAPWLIAMSIFTALIAAGEVALFGFLGGIVDWLATADREGFLQREGGTLAIMGIVLLIGLPLATLIQGLIVYQGLMGNVPMSARWRMHRQMLGQSMGFFGNEFAGRVATKVMQTALSVREVVMKVLDVFVFVIVYFVSALALVASADWRLTLPLLLWAVVYGFVLRWFVPRLGKIAEAQADARSIMTGRIVDSYTNIQTVKLFAHSGREEEYAKGSMDGFLQTVYRQMRMVTGFNVVVYLNNSLLVFLIAAGGIYLWMGNLVGAGAVAAAVGLALRIKSMSQWIMWEVAGLFENIGVVYDGMAMLQTPVAVTDDPAAVDLPRVKGEVVFEDVAFHYGKGAGVIEGLNLAIRPGEKIGLVGRSGAGKTTLTSLLLRFYDAEGGRVLIDGQDISKVTQDTLRAQIGMVTQDTSLLHRSIRDNIAYGRPDATDDDIRIAANKAEAMAFIETLEDSKGRIGFDAHVGERGVKLSGGQRQRIAIARIFLKDAPILILDEATSALDSEVEAAIQDNLFRLMEGKTVLAIAHRLSTIAEMDRLIVLDQGRIVEQGTHDELVAAGGLYAELWARQSGGFLIEPEPIERDLATEPAE

SEQ ID NO: 60111 - DNA, 1803 bp, Rhizobium leguminosarum bv. viciae 3841
  CDS (1)..(1803): transl_table=11
ttggcagagcaggcacgggctgaggaaaacaagaagcgatcgctacgaccgctcggcaggctgacgccctatgtcatgcgttatcgcggcctggtggccggtgcgctgatgtcgctggcgcttgccgccatcacctcgctggcgctgccgctcgccgtgcgtcgcatgatcgatcacggcttcacccagtccgacggccgcttcatcaacagctacttcgccatgctgatggtcatggccatcgtgctcgcggtcgccagcgcgctgcgctattatttcgtcatcaccatcggcgagcgcattgtcgccgatcttcgccgcgatgtcttttcgcatgtgacccggctgtcgccctcctttttcgacgtcaatcaatccggtgagatcgtctcgcggctgaccgccgatacgacgcagatcaagtccgccgtcggcgccaccgcctcggtggcgctgaggaacctcatcctctgtatcggcgccatgggcatgatgatcgtcacctcgccgaagctttcgagcctcgtcatcggagcgatcccgctcatcgtcttcccgctcgtcgccttcggccgctcggtgcgcaagcgctcacgcgccgcgcaggatacgctcgccgatgcttccgccttcgccaacgagacgatcgccgcgacccgcaccgtccaggccttcaacggcgaggatgccgcagcgacgcgttacggcaccgccgtcgaatccgcctacgaggccgcccgcgccgccatccgctcgcgcgcgctgctgaccgggatcgccatcacgctgatcttcggcagcgtcgttgccgtgctctggttcggcgcccacagcgtgcttgccggcacgctttcggcgggcacgctcggccagttcctgctctatgccgtcatctccgccggttcgctgggcgcgctgtcggaggtctggggtgaactctcgcaggcagccggtgccgcagaccggctgaccgagattctcgacgaggtctcgccgatcaccgctcccgccagccctgagccgcttccttcgcccagccgcggccgtgtcgaattctcaggcgtgcactttgcctatccctcgcgccccggcaaatcggcgctgcatggcttaagcttcgcgatcacgccaggtgagaccgtcgccatcgtcggcccttccggtgccggcaagagcaccgtcttttcgctgctgctgcgcttctacgatccgcagcagggcagcgtgaagatcgatggtgtcgatgcgcagctgacgacgccggacgagctgcgccaacgcatcgccatcgtgccgcaggacgtcaccatctttgccgcgtcgatccatgacaacatcgccttcggccgtccgggcgcctcgcgtgacgaggtccgcgccgcagcccttgccgcgcaggccgacgaattcatcgctcggctggaccagggttatgagaccgaggtcggcgaacgcggcatcactctgtcaggcggccagcgccaacgcatcgccattgcccgcgccatcctgaagaatgcccccgtgctactgctcgacgaggcaacctccgcgcttgacgccgaaagcgaaacactggtgcagaaggcgctcgacggcctggtggacggccgcacaacgctcgtcatcgcccaccgcctggcaactgtgctgaaggccgaccgcattctcgtcatggaccagggccgggtcgtcgaggagggcacgcatcagagcctgatccgccacggcggcatctatgcgcggctggcgcggctgcaattcgacgccgccaatgaggatgtgctcgccgccgcgaaatag

SEQ ID NO: 60112 - protein, 600 aa, Rhizobium leguminosarum bv. viciae 3841
MAEQARAEENKKRSLRPLGRLTPYVMRYRGLVAGALMSLALAAITSLALPLAVRRMIDHGFTQSDGRFINSYFAMLMVMAIVLAVASALRYYFVITIGERIVADLRRDVFSHVTRLSPSFFDVNQSGEIVSRLTADTTQIKSAVGATASVALRNLILCIGAMGMMIVTSPKLSSLVIGAIPLIVFPLVAFGRSVRKRSRAAQDTLADASAFANETIAATRTVQAFNGEDAAATRYGTAVESAYEAARAAIRSRALLTGIAITLIFGSVVAVLWFGAHSVLAGTLSAGTLGQFLLYAVISAGSLGALSEVWGELSQAAGAADRLTEILDEVSPITAPASPEPLPSPSRGRVEFSGVHFAYPSRPGKSALHGLSFAITPGETVAIVGPSGAGKSTVFSLLLRFYDPQQGSVKIDGVDAQLTTPDELRQRIAIVPQDVTIFAASIHDNIAFGRPGASRDEVRAAALAAQADEFIARLDQGYETEVGERGITLSGGQRQRIAIARAILKNAPVLLLDEATSALDAESETLVQKALDGLVDGRTTLVIAHRLATVLKADRILVMDQGRVVEEGTHQSLIRHGGIYARLARLQFDAANEDVLAAAK

SEQ ID NO: 60113 - DNA, 1767 bp, Pseudomonas aeruginosa UCBPP-PA14
  CDS (1)..(1767): transl_table=11
atgccagccattctctcctcccgccaacgtatcgccctgcgcctggcctggcgcttcatggcgccttaccgctggcgcatgctcggggccctggtggcgttgctgttcaccgcggcgatcaccctgtccctgggccagggcatccgcctgctggtggaccaggggttcctcaccgcctcgcccgaattgctcaatcgctacatcctgctgttcttcgtgctggtgctcggcctggccgtaggcaccttcgtgcgcttctacctggtgtcctggatcggcgagcgcttcgtcgccgatatccgcaagcgcgtgttcgaccacctgatcgagttgcatcccggtttctacgaaaccaaccgtagctccgagatccagtcgcgcctgaccgccgacactacgctgctgcagacggtgatcggttcctcgctgtcgatggccctgcgcaatgccctgatgctggtcggcggggtgctgctgatgttcgtcaccaacgccaagctgaccagcatcgtggtgctggcgttgccgctggtgatcgccccaatcctgctgttcggccgccgcgtgcgcagcctgtcgcgggaaagccaggaccgggtggccgacgtcggcagctacgtcggtgagaccctcggtcagatcaagaccgtgcaggcctacaaccaccaggcgcaggatcgccagcgcttcgccggcaccgtcgagcgcgccttcgacaccgcgcgcaagcgcatcgcccagcgtgcctggctgatcaccgtggtgatcgtgctggtgctcggcgcagtcggcatcatgctctgggtcggcggccgcgacgtgatcgccggcagcatctcggccggcgaactggccgcgttcgtcttctacagcctgatcgtcggcatggccttcggcaccctcagcgaggtgatcggcgaattgcagcgcgccgccggcgccgcagagcgcatcgccgagctgctcagggcgcgcagcgagatccgcccgccagcgcaaccacgcaagctggcggcgcgggtgagcgggaggatcgaattgcaggcggtgcgcttcgcctatccgacccgtcccgaacactgggccatcgacgacatcagcctggccgtcgaaccgggggaaaccctggccctggtcggaccttccggtgccggcaagtcgaccctgttcgatctgctcctgcgtttcttcgatccgcagcaggggcggctgctgctggacggacagccgatcgtcgaactggacccggccgacttgcgccgcagctttgccctggtgtcgcagaaccccgcgctgttcttcggcagcgtcgaggaaaacatccgctacggccgtccgcatgccagcgccgccgaggtcgaggccgcagcgcgtgccgcgcatgcccacgagttcatcctgggtctgccgcagggctacgccacccacctgggcgagggcggcatcggcctgtccggcggccagcgccagcgcctggcgatcgcccgggcgttgctggtagacgcgccggtgttgctgctcgacgaggcgaccagcgccctggatgcggaaagcgagcacctgatccagcaggccctgccaggcctgatgagcggacgtaccaccctggtgatcgcccatcgcctggccacggtgcagagcgccgaccgcatcgcggtgatcgaccaggggcggctggtggcgattggtagccacgcccgtctgatcgccgagaacccgctctatgcgcgcctggcggaactgcagttcgccgtcggcggacgctag

SEQ ID NO: 60114 - protein, 588 aa, Pseudomonas aeruginosa UCBPP-PA14
MPAILSSRQRIALRLAWRFMAPYRWRMLGALVALLFTAAITLSLGQGIRLLVDQGFLTASPELLNRYILLFFVLVLGLAVGTFVRFYLVSWIGERFVADIRKRVFDHLIELHPGFYETNRSSEIQSRLTADTTLLQTVIGSSLSMALRNALMLVGGVLLMFVTNAKLTSIVVLALPLVIAPILLFGRRVRSLSRESQDRVADVGSYVGETLGQIKTVQAYNHQAQDRQRFAGTVERAFDTARKRIAQRAWLITVVIVLVLGAVGIMLWVGGRDVIAGSISAGELAAFVFYSLIVGMAFGTLSEVIGELQRAAGAAERIAELLRARSEIRPPAQPRKLAARVSGRIELQAVRFAYPTRPEHWAIDDISLAVEPGETLALVGPSGAGKSTLFDLLLRFFDPQQGRLLLDGQPIVELDPADLRRSFALVSQNPALFFGSVEENIRYGRPHASAAEVEAAARAAHAHEFILGLPQGYATHLGEGGIGLSGGQRQRLAIARALLVDAPVLLLDEATSALDAESEHLIQQALPGLMSGRTTLVIAHRLATVQSADRIAVIDQGRLVAIGSHARLIAENPLYARLAELQFAVGGR

SEQ ID NO: 60115 - DNA, 1812 bp, Magnetococcus sp. MC-1
  CDS (1)..(1812): transl_table=11
atgagtcccccgcccatcgaagccgttaccgaagagacccgttatggtgcctttttggatctgcatctgttacggcgttttttccgttacgccaaaccccatacacgctgggtcttgttggccctcgccattttgcccttgaacacccttattcagttagggcaacccctactgttaaggcaagcggtggatgaacacctcatccccggcacgctggatggctttgctggattgctggttgcattgggcgttttgttgttgctacaagccttggcgggctatggcatgtcggtggttaatgccaccctggggcagcgggtggtgcgagatctgcggcgcgacctgtttggccatttattacgcttggatgccagctattttaataaacacgcctcgggtcgtaccaccaatcgcgttaccaatgatgtggaggcggttagccagatggtctccgcgggtttaatccaccttattggcgatgtggtgctgctgacgggcattctcatcagcatggcgctgttagccccaaccctttctctcacgctggttgtggcactgcccctgattgtggggggaaccctgctggccgccaaaaaaagccgcctcgcgcaacgggaaaaccgcttgatgctggcccgcatggccagccgcctgacagaagagattgaaggacagcaagaggtacgactgtttcatcggcagcagcgcaaccatgcggaatttgagcagcaaaatcaggtttattttacctcatcactggtgagcaacacttgggaagccttccaatttagctttattgatgcactctctaccgtggttatcgcagcgctattttggattggcgccagcatgagcagcgccgacggcgtgaccattggcaccctggtggcttttattgattatgtgcgccgggtttttcaaccggtacgggatctatcggggaaatttaccaccatgcaggcagccatgaccgcgttggaacgtatttttggccttttggacagcaaaccacagatcacggacgcccaagttaaccatgccttcaccctgcccgcccgcccccgcttggtgatgcaggaggtcggctttgcctatggcgagcagcccatattaaaaaatctctcgctgaccgtggaacccggtgaacaggtcgcagtggttggccccaccggggccggtaaaagcaccctcattaaactgctcaaccgtacctacgaaccccaacaggggatcattcaactgggcggtcaagatctgcaaaatattcccatggctactctgcgtcgtacggtgggggtggtccctcaagagacctttttatttagcggtaccattgctgagaacattcacttgcgcgacccttctatcccacaagcggcggtggaggaggccgcccacaaaaccggcgccatggcttttatcgccgacctgcctgaaggcctgaatacccgattgaccgaacgggggggcaatctttctagtgggcagcggcagttgttgggcattacccgtgcgtttgtgtttaaccctgccttgctgatcttggatgaagccaccagctcggtggataccatcagcgaacgcttgatccaaaacgccttacaggagctgatggtcgggcgtaccgccattgtgattgcacaccggctgaacaccattattggagcagatcgtgtcattgtgatgcatgggggagagatcatccaggggggctcacaccaaacactggtcactcagcctgggctctatcgtaagttgtgtgaactgcaatttggtttagacggcagcctaccgacgctccagcagggttaa

SEQ ID NO: 60116 - protein, 603 aa, Magnetococcus sp. MC-1
MSPPPIEAVTEETRYGAFLDLHLLRRFFRYAKPHTRWVLLALAILPLNTLIQLGQPLLLRQAVDEHLIPGTLDGFAGLLVALGVLLLLQALAGYGMSVVNATLGQRVVRDLRRDLFGHLLRLDASYFNKHASGRTTNRVTNDVEAVSQMVSAGLIHLIGDVVLLTGILISMALLAPTLSLTLVVALPLIVGGTLLAAKKSRLAQRENRLMLARMASRLTEEIEGQQEVRLFHRQQRNHAEFEQQNQVYFTSSLVSNTWEAFQFSFIDALSTVVIAALFWIGASMSSADGVTIGTLVAFIDYVRRVFQPVRDLSGKFTTMQAAMTALERIFGLLDSKPQITDAQVNHAFTLPARPRLVMQEVGFAYGEQPILKNLSLTVEPGEQVAVVGPTGAGKSTLIKLLNRTYEPQQGIIQLGGQDLQNIPMATLRRTVGVVPQETFLFSGTIAENIHLRDPSIPQAAVEEAAHKTGAMAFIADLPEGLNTRLTERGGNLSSGQRQLLGITRAFVFNPALLILDEATSSVDTISERLIQNALQELMVGRTAIVIAHRLNTIIGADRVIVMHGGEIIQGGSHQTLVTQPGLYRKLCELQFGLDGSLPTLQQG

SEQ ID NO: 60117 - DNA, 1803 bp, Azoarcus sp. BH72
  CDS (1)..(1803): transl_table=11
atgtcctccgacctcacgccactcgccgcctcgccccgccgcctgtccgcgctctccgggctgtggcctttcctgcggccctaccgcgcgcgcatcgcgcttgcctttgcgctgctcacgctcggctccacgaccatcctgctggtgccgctggcctttcgcgacctggtcgatttcggctttggtacggcgacagcgcccgacgccagcggcggactgctcggcacactcagcctggacggccacttcgtcgcgctgttcgggctggccagcctgtgggcggtaaccgtcgcggcgcgctactacaccgtgtcgtggatcggcgagcgcgccaccgccgacctgcgcaatgcggtctatgcgcgcgtgctggcgcagtcgccgcagttcttcgagacgctgcagaccggcgaggtgctgtcgcggctgaccggcgacaccacgctgatccagaccgtggtcggcagttcggtgtcgatggggctgcgcagcctgttccagtttgccggcggcatggtgatgctggcggtgaccagcctgcacctgttctcgctcaacctcggcctcatggcgctgctgaccctgcccatcctcgccatcggccgcaaggtgaagcggctgtcgcgcgaatcgcaggaccgcatcgccgacgcctcggcgctggccggcgaaatcctcaacgcgatgccgacggtgcaggcctacacccaggagccgcaggaggtccgccgcttttccgcgcgcaccgaggcgggcttcgccaccgccatccgccgcacccgggtgcgcgcggcgctcaccgcgctgatcatcaccgcggtgatgggcaccatcatcttcgtgctgtgggtgggcgcgcgccaggtgcatgaaggtgtgctcacgaccggcgagctggcggccttcgtgctgtacgcgacgctggtggcgggcggcgtcggcacgctggccgaggtgtggggcgacgtgatgcgcgcggccggcgccgccgaacgcctgctcggcctgctgcacgccgaacccgccatccgcgacacgcccgcggccgcggcgccgctgccggccgcgcaggcggcgatccgcttcgagcatgtgcgcttcgcctacccggcacggccgcagacaccggcgctggacgacatcagcctggacatcgcacccggcgaatgcgtcgccctcgtcggcccctccggtgccggcaagaccacgctgttccagctgctgctgcgctactacgagcttgccgacggggccatccgcatcaacggccaggacatccgccagctgcgcctgcacgacctgcgcggcgacatcgccatcgtgccgcaggacccggtgatcttctcggcaagcgcgctggagaacatccgctacggccggccggaggcgagcgacgaggaggtgatcgccgccgcccgcgccgcggtggccgacgagttcatcgcccgcctgcccgagggctaccacacctttctcggcgagcgcggcacgcggctgtccggcggccagcgccagcgcatcgccatcgcccgcgcggtgctgaaaggcgcccgggtactgctgctggacgaagccaccagcgcgctcgacgccgaatcggaaatcctggtgcagcagggcctcgccgccgcgatgcgcggccgcaccacgctgatcatcgcccaccgcctggccacggtgcagaaggccgaccgcatcgtggtgatggagcacggccgcatcgtcgaaaccggcaccccggacgacctccgcagccagggcgggctgtacgcgcggctggcggcgttgcagctggatctttga

SEQ ID NO: 60118 - protein, 600 aa, Azoarcus sp. BH72
MSSDLTPLAASPRRLSALSGLWPFLRPYRARIALAFALLTLGSTTILLVPLAFRDLVDFGFGTATAPDASGGLLGTLSLDGHFVALFGLASLWAVTVAARYYTVSWIGERATADLRNAVYARVLAQSPQFFETLQTGEVLSRLTGDTTLIQTVVGSSVSMGLRSLFQFAGGMVMLAVTSLHLFSLNLGLMALLTLPILAIGRKVKRLSRESQDRIADASALAGEILNAMPTVQAYTQEPQEVRRFSARTEAGFATAIRRTRVRAALTALIITAVMGTIIFVLWVGARQVHEGVLTTGELAAFVLYATLVAGGVGTLAEVWGDVMRAAGAAERLLGLLHAEPAIRDTPAAAAPLPAAQAAIRFEHVRFAYPARPQTPALDDISLDIAPGECVALVGPSGAGKTTLFQLLLRYYELADGAIRINGQDIRQLRLHDLRGDIAIVPQDPVIFSASALENIRYGRPEASDEEVIAAARAAVADEFIARLPEGYHTFLGERGTRLSGGQRQRIAIARAVLKGARVLLLDEATSALDAESEILVQQGLAAAMRGRTTLIIAHRLATVQKADRIVVMEHGRIVETGTPDDLRSQGGLYARLAALQLDL

SEQ ID NO: 60119 - DNA, 1743 bp, Crocosphaera watsonii WH 8501
  CDS (1)..(1743): transl_table=11
atgaaaaaaagatcaaattggttgcgattgttaccttatttattaacagaatggccgtcattattaaaagggtttttatgtattttaggctttgttttagtgacattagctttaccttatttagcaggacaagtttctttaaatattggacaaggtaatctagaaaaagttgcttattggttgggtttaggaactttagcttttttagttcgggggatttttcaatacgggcaaaatatctttatgatcgatgcttctttggaaatggtgttaagtgttcgtaacaaagtttatgctcatttacacaaactgggactcgattattttgaagttgccaagacaggggacttaacctaccgtttaacagcagatattgacaaagttggcgaaattgtagacaaattatcccatcaatttgtatctaatgtactgcaattaattgtcattcctgcttatatgttttatttaaactggcagctaactattgctagtctgattttagcccctcttatggctactttggtgagtatgtttggtgaaaaattattaatattatcccgtcgtagtcaaaatcaaatttctaatctttctgccctgttaacagaggtttttagtggtgttcgtgtggttaaagcttttgctgcacaagattatgaagtaaaaagatttgcacaagaagctaaagaaaatcgtcgggcaagatatagggcagagaaattaaaagccacccaatatcctgtagtgggattcttacaagcagttagtattatgtccctcttttttattggaggatggcaaatttctcagggtaatttagcatcagaagaattcgttagttatttagctgcggttgctatcttgctgcatcctatcgatttaatgaccagtaattataatgaattcaaacaagcagaagcatcggtggatcgcatttttgaattgatggatgaaaaacccacagttaaggaaactgaaaatagtttaactctgccacaagtaacaggaaaagtagaattttctgaggttagttttgcctataaattagataaacccgtcctcagaaaactgagtttactagcagaacctggacaaattatagccttggtaggttcatccggtgcagggaaaacaacattagttaatttattacctcgtttctacgatccccaagatggagaaattttaatcgatggaattgatattaaagaggttagtttaaaaagtttacgccgacaaattgggattgttccccaagaaaccactttattctcaggaactattgctcaaaatattgcctatggccaagaagaattagattatgaagcaatcgaaaatgctgcaaaaattgccaacgcacactcatttatcagtcaattttctcaagggtatcaaacttggttaggagaaaggggtgttaatctctcagggggacaaaaacaaagaattgcgatcgctagagcagtcttattaaatcctcgtcttatgatcttagatgaagcgacatcagcactggattctgaatcagaagcgttggtacaagaagcattagaaagagtaatgaagaatcgtaccgtttttgtcattgctcaccgtttaagcaccgtccgcagtgctgattgtattttggtcttagaaaagggtcaagtagtggagtcaggaaaccatgatcagttgttaggaaaacaaggccgttatgctaagttttatcaacaacaatatgctaaaggtacagaagaattttag

SEQ ID NO: 60120 - protein, 580 aa, Crocosphaera watsonii WH 8501
MKKRSNWLRLLPYLLTEWPSLLKGFLCILGFVLVTLALPYLAGQVSLNIGQGNLEKVAYWLGLGTLAFLVRGIFQYGQNIFMIDASLEMVLSVRNKVYAHLHKLGLDYFEVAKTGDLTYRLTADIDKVGEIVDKLSHQFVSNVLQLIVIPAYMFYLNWQLTIASLILAPLMATLVSMFGEKLLILSRRSQNQISNLSALLTEVFSGVRVVKAFAAQDYEVKRFAQEAKENRRARYRAEKLKATQYPVVGFLQAVSIMSLFFIGGWQISQGNLASEEFVSYLAAVAILLHPIDLMTSNYNEFKQAEASVDRIFELMDEKPTVKETENSLTLPQVTGKVEFSEVSFAYKLDKPVLRKLSLLAEPGQIIALVGSSGAGKTTLVNLLPRFYDPQDGEILIDGIDIKEVSLKSLRRQIGIVPQETTLFSGTIAQNIAYGQEELDYEAIENAAKIANAHSFISQFSQGYQTWLGERGVNLSGGQKQRIAIARAVLLNPRLMILDEATSALDSESEALVQEALERVMKNRTVFVIAHRLSTVRSADCILVLEKGQVVESGNHDQLLGKQGRYAKFYQQQYAKGTEEF

SEQ ID NO: 60121 - DNA, 1761 bp, Xylella fastidiosa Ann-1
  CDS (1)..(1761): transl_table=11
atgcctgcaccacacatccccaaccgcctacaacgcctgaaccatctgcgcatcttgtggccattcatgcgccgccatcttgccttgttctcgggatggctgattgcgttggcagtctcctcggcagcaacgctgaccctaccaagcgccttcaaacaaatgattgaccacggtttttccagcgaggggcaaatcaatcggagcttcgctctactgttgttagtcgccgtgattctggcagtaggtacagcagcgcgcctgttctccgtctcgctactgggcgagaagatcatcaccgacctgcgtagccagttatacgcacacctcataggattggatgccagctttcacgatcgtaatcgcagcaacgagctggtgtcgcgtctggccacagacagtgaactgctacgctcaatcattggatccacaatgtcagtagcgacgcgtagcaccgtgactgcaatcggtagtctcatcatgttattcatcaccagtccacgcctcgccagcctttccctggtggtcatcccactcgtgatacttcccattgtcttaggcgcacaacacctccagaaagccgcccgtaccagccaggatcgcattgccgacaccaatagcttcgctgctgaaacattacgtgctttacgtacagtgcaagcctatgcacgtgaacattacgaacgtacacgcttcgaccgcacactggaaacgagtttgcaggccgcgcgacaacgcattcacatccaaacatgggtcaccgctgcaagcatcgtgttgatattcagtgcaatcgtcggagtgttatgggcaggtgcacatgatgtcattgctggccgtatgagcgcgggcacactcggtgaatttgtcctatacgcactgatcggcggtggttccatcggcgcccttgccgaagtgtggaacgaactacaacgtgccgctggtggcatgggccggattttcgaattactcaaagagaaaaacacgctcagcgtaccagccacacctaccttgccaccccatccattgcggggagaaatccgctttgaacgtgtcggcttccactacccacaacgcccagaaacacctgcacttgatggcattgacctgcatatacgcccgggggaaaccatcgcttttgtcggcccatccggtgctggcaaaagcaccctgctatcactattactacgcttctatgatcccacccatggacgcatcctgattgatggtgtggacctacgccaaaccgatccgaaagtattacggacacacattgcactggtacaacaacaaccaacactgttcaccgcgagcgcaatggaaaatatccgctatggacgactggacgccaccactgccgaaatcgagatcgccgcacgctcttccgaagcagatggtttcatccgcgccctgccacagggttatgccaccgagctaggcgagcacggcctgtccctgtccggcggccagcagcaacgtatcgcaatcgctcgcgcactcctcaaggaggcgccgattctactcctggatgaagcgaccaacgcacttgatgcacaaaacgagcaagcagtacaacaggcactggaacgactgatgacagggcgcaccacattgatcattgcacaccgcttggtcaccatcttgaaagctgaccggatcgtggtgatggaccaaggccggatcgtcgctcaaggcacccacagcgaactcatcgccgctggaggcctatacgcaaagctggcacgcctacaattcatagaataa

SEQ ID NO: 60122 - protein, 586 aa, Xylella fastidiosa Ann-1
MPAPHIPNRLQRLNHLRILWPFMRRHLALFSGWLIALAVSSAATLTLPSAFKQMIDHGFSSEGQINRSFALLLLVAVILAVGTAARLFSVSLLGEKIITDLRSQLYAHLIGLDASFHDRNRSNELVSRLATDSELLRSIIGSTMSVATRSTVTAIGSLIMLFITSPRLASLSLVVIPLVILPIVLGAQHLQKAARTSQDRIADTNSFAAETLRALRTVQAYAREHYERTRFDRTLETSLQAARQRIHIQTWVTAASIVLIFSAIVGVLWAGAHDVIAGRMSAGTLGEFVLYALIGGGSIGALAEVWNELQRAAGGMGRIFELLKEKNTLSVPATPTLPPHPLRGEIRFERVGFHYPQRPETPALDGIDLHIRPGETIAFVGPSGAGKSTLLSLLLRFYDPTHGRILIDGVDLRQTDPKVLRTHIALVQQQPTLFTASAMENIRYGRLDATTAEIEIAARSSEADGFIRALPQGYATELGEHGLSLSGGQQQRIAIARALLKEAPILLLDEATNALDAQNEQAVQQALERLMTGRTTLIIAHRLVTILKADRIVVMDQGRIVAQGTHSELIAAGGLYAKLARLQFIE

SEQ ID NO: 60123 - DNA, 1761 bp, Xylella fastidiosa Ann-1
  CDS (1)..(1761): transl_table=11
atgcctgcaccacacatccccaaccgcctacaacgcctgaaccatctgcgcatcttgtggccattcatgcgccgccatcttgccttgttctccggatggctgattgcgttggcggtctcctcggcagcaacgctgaccctaccaagcgccttcaaacaaatgattgaccacggtttttccagcgaggggcaaatcaatcgaacctttgctctactgttgttagtcgccgtgattctggcagtaggtacagcagcgcgcctgttctccgtctcgctactgggcgagaagatcatcaccgacctgcgtagccagttatacgcacacctcataggattggatgccagctttcacgatcgtaatcgcagcaacgagctggtgtcgcgtctggccacagacagtgaactgctacgctcaatcattggatccacaatgtcagtagcgacgcgtagcaccgtgactgcaatcggcagtctcatcatgttattcatcaccagtccacgcctcgccagcctttcgctggtggtcatcccactcgtgatacttcccattgtcttaggcgcacaacagctccagaaagccgcccgtaccagccaggatcgcattgccgacaccaatagcttcgctgctgaaacattacgtgctttacgtacagtgcaagcctatgcacgtgaacattacgaacgtacacgcttcgaccgcacactggaaacgagtttgcaggccgcgcgacaacgcattcacatccaaacatgggtcaccgctgcaagcatcgtgttgatattcagtgcaatcgtcggagtgttatgggcaggtgcacatgatgtcattgctggccgtatgagcgcgggcacactcggtgaatttgtcctatacgcactgatcggcggtggttccatcggcgcccttgccgaagtgtggaacgaactacaacgtgccgctggtggcatgggccggattttcgaattactcaaagagaaaaacacgctcaccgtaccagccacacctgccttgccaccccatccattgcggggagaaatccgctttgaacgtgtcggcttccactatccacaacgcccagaaacacctgcacttgatgacattgacctgcatatacgcccgggggaaaccatcgcttttgtcggcccatccggtgctggcaaaagcaccctgatatcactattactacgcttctatgatcccacccatggacgcatcctgattgatggtgtggacctacgccaaaccgatccgaaagtattacggacacacattgcactggtacaacaacaaccaacactgttcaccgcgagcgcaatggaaaatatacgctatggacgactggacgccaccactgccgaaattgagatcgctgcacgctcttccgaagcagatggtttcatccgcgccctgccacagggttatgccaccgagctaggcgagcacggcctgtccctgtccggcggccagcagcaacgtatcgcaatcgctcgcgcactcctcaaggaggcgccgattctactccttgatgaagcgaccaacgcacttgatgcacaaaacgagcaagcagtacaacaggcactggaacgactgatgacagggcgcaccacattgatcattgcacaccgcttggtcaccatcctgaaagctgaccggatcgtggtgatggaccaagggcggatcgtcgctcaaggcacccacagcgaactcatcgccgctggaggcctatacgcaaagctcgcacgcctacaattcatagaataa

SEQ ID NO: 60124 - protein, 586 aa, Xylella fastidiosa Ann-1
MPAPHIPNRLQRLNHLRILWPFMRRHLALFSGWLIALAVSSAATLTLPSAFKQMIDHGFSSEGQINRTFALLLLVAVILAVGTAARLFSVSLLGEKIITDLRSQLYAHLIGLDASFHDRNRSNELVSRLATDSELLRSIIGSTMSVATRSTVTAIGSLIMLFITSPRLASLSLVVIPLVILPIVLGAQQLQKAARTSQDRIADTNSFAAETLRALRTVQAYAREHYERTRFDRTLETSLQAARQRIHIQTWVTAASIVLIFSAIVGVLWAGAHDVIAGRMSAGTLGEFVLYALIGGGSIGALAEVWNELQRAAGGMGRIFELLKEKNTLTVPATPALPPHPLRGEIRFERVGFHYPQRPETPALDDIDLHIRPGETIAFVGPSGAGKSTLISLLLRFYDPTHGRILIDGVDLRQTDPKVLRTHIALVQQQPTLFTASAMENIRYGRLDATTAEIEIAARSSEADGFIRALPQGYATELGEHGLSLSGGQQQRIAIARALLKEAPILLLDEATNALDAQNEQAVQQALERLMTGRTTLIIAHRLVTILKADRIVVMDQGRIVAQGTHSELIAAGGLYAKLARLQFIE

SEQ ID NO: 60125 - DNA, 1800 bp, Sulfitobacter sp. EE-36
  CDS (1)..(1800): transl_table=11
atggcacgtaccccgacgcccggccccggcacagaagaacgcgaaaaatcgcgtgagttgggggccctgcgcgcgctgctgccgtttcttgcgccctatcgcgggctgatgatcgcggccattctggcgctggtgctcacggcgatgatctctttgacgctgccgctggccgtgcgccgcgtgatcgataacttcggcaccggcgaggccgaattgctggaccagtacttcgttgccgccctgatcatcgcggcccttctggctgtgggcacggggctgcgctatgcgctggtgacgcgctttggcgaacgggtcgttgccgatatccgcaaggcggtgttcgatcgcgtgatctcgatgagcccggcgttctacgagaacctgatgaccggcgaggtgctgagccggatcaccacggacactacgctgatcctgtcggtgatcgggtcgtccgtgtccatcgcgctgcgcaatatgctgatcgtgaccggtgggctggtgctgatgctgttcacctcggccaagctgacggcgatggtgttgttgatcgtaccggcggtgattgtgccgatccttgttctggggcggcgcttgcgggtgctgagccgtgaaaatcaggactggatcgcggcgagctcgggcaatgcgtccgagagtttgggcgcggtgcagaccgtgcaggcctttaccaatgaagccgccagccaatcgcaattcgcacagatgaccgaagcgtcctatgacgcggcgcagcgtcggatcaagacccgcgcgctgatgacgattattgtgatctttctggtatttgccggcgtcgtgggcgttttgtggatgggcgcgcgggatgtgcgtgccgaccagatgacccccggtgccttggtgcaattcgtgatctatgccgtgatggtggcaggcggggtcgcggcgctgtccgagatctggggtgaacttcaacgcgccgccggggccaccgaacgtctggtagagctgttgcggaccgaagacaccgtgcaagaccccgctgcggccatcgccttgcccagccctgtcgccggtcggattgcctttgaggacgtgcatttcagataccccgcacgacctgatgtgcaggcactggacggggtcaacctgtcgatcaaccccggtgaaacggtcgcgttcgtcgggccctcgggtgcaggcaagaccacgatcatccagttgattctgcggttctatgaccctgcctccgggcggatcacccttgacggggtcgatctgcgcgatgtctcgcgtgcggccttccgccgttcggtggccttggtgccgcaagatccggtgatcttcgctgcctctgcccgcgagaatatccgctttggccgccccgacgccacagacgccgagattgacgccgcggccgaggccgccgccgcccacgggttcatcagcgcattgcccgacggctacgacagctatctgggcgaacgcggggtgatgctgtcgggcgggcaaaagcagcgtatcgccatcgcccgcgccatcctgcgcgacgcgccggtgctgctgctggacgaagccacaagcgccttggatgccgaaagcgaacgcgccgtgcaggccgccgtggatcggttgagcgcggaccgcaccaccctgatcgtcgcgcaccgtctggcgacggtgaaaaaggccgaccgcattgtcgtgctggaagcagggcggatcgtcgatatgggcacccatgacgagctggtcaccaaaggggggctctatgcgcgcttggcgcggctgcaattcaccgatgggcgcggggacgtataa

SEQ ID NO: 60126 - protein, 599 aa, Sulfitobacter sp. EE-36
MARTPTPGPGTEEREKSRELGALRALLPFLAPYRGLMIAAILALVLTAMISLTLPLAVRRVIDNFGTGEAELLDQYFVAALIIAALLAVGTGLRYALVTRFGERVVADIRKAVFDRVISMSPAFYENLMTGEVLSRITTDTTLILSVIGSSVSIALRNMLIVTGGLVLMLFTSAKLTAMVLLIVPAVIVPILVLGRRLRVLSRENQDWIAASSGNASESLGAVQTVQAFTNEAASQSQFAQMTEASYDAAQRRIKTRALMTIIVIFLVFAGVVGVLWMGARDVRADQMTPGALVQFVIYAVMVAGGVAALSEIWGELQRAAGATERLVELLRTEDTVQDPAAAIALPSPVAGRIAFEDVHFRYPARPDVQALDGVNLSINPGETVAFVGPSGAGKTTIIQLILRFYDPASGRITLDGVDLRDVSRAAFRRSVALVPQDPVIFAASARENIRFGRPDATDAEIDAAAEAAAAHGFISALPDGYDSYLGERGVMLSGGQKQRIAIARAILRDAPVLLLDEATSALDAESERAVQAAVDRLSADRTTLIVAHRLATVKKADRIVVLEAGRIVDMGTHDELVTKGGLYARLARLQFTDGRGDV

SEQ ID NO: 60127 - DNA, 1512 bp, Erythrobacter sp. NAP1
  CDS (1)..(1512): transl_table=11
gtgtccgacatcgatgtcgggcaaatcctcatcttgctggttgtagccttggtcgccctcaccgttctgaacattgcggcagccattctttcggaacgtgcatcgacgcggatcctgaccgagcttcgcatcaagatatacaaccatgtccagatgctgcgtgttgggtttcatgacgatgcgcgcaggggcgacgtgctcgcgctcacgtcttacgaagtaggcaatctcagcgattttcttgccggcactatcgccaatgcgcccgccatgctgctcacggcagcaggggccatcgtgatattgttcacgattgaccctgtcatggccgcaattgtccccttgctgatccccgcattttacattctagtcaggttgtcaggcaggcgactgcgcaagctttcgagcgaggtgcgtgcagccgaggtcgagctgatcgcaattgcggagcgcgatcttgaaatgcttcctgcaatcaaggcatttgcgacagaggaaaaacaccggtcagaatttgcgacagcggctgacaattctcggcgcctggcagtccgacaagcgcaatggagcgtcacaattggcccggtgatggcgttgatcgcggcgcttgcggcgatttccgtgctcgtggttggtagcgagcagttgctcgacgcggatcgatcacccagcgacctgttcgcgtttcttctctatgcggctcttctgacgcagcctgccggtgctctcgccaaaatgtatggtgcctaccaaatggcgcgtggaactcttgctcgattggagtccgtacttgagcaggagcccgagccaggacaccaaatagggcagcggcttgagcgagcagcaggcgctatcgccttccgcaaagtaagctttggctatccgggccgcccgaccctgtttgatgccttggatttcgatgtgaagccgggcgagatcgtggcgctcacaggcgagaacggtgttggaaagtcgacgctcgttcgcctgctcttgcgcttttacgaacccttgtcggggacgatcacgctcgatgggacctgcatcagcgagtatcaggttcaagacttgcggcgacagtttggctacgtgccccaacgtgcccttctttttaacggcacaatcgccgacaatatcgtgttcggccaatccgcacctcacccgcaagaggccgtaagccgcgcggttaagctcgcacaggcggacgaattcatcgcctcgcttccagatggcctggagaccgtgattggcgatcacggggtacgcctgtcaggtggccaacggcaacggattgcgctcgcccgtgcgctctatagccagccgccgatctacatcctggatgaagcgacgagcatgtacgacctagaaggcgaagctgccttcgtcgaagaatgcatcggttcgctgaaagggcgcaccgtcattatcatcactcatcgtccggcgagcctcgcgcttgccgacagagtattgaaactgggaccggacggctttgtcagagtaggccggtaa

SEQ ID NO: 60128 - protein, 503 aa, Erythrobacter sp. NAP1
MSDIDVGQILILLVVALVALTVLNIAAAILSERASTRILTELRIKIYNHVQMLRVGFHDDARRGDVLALTSYEVGNLSDFLAGTIANAPAMLLTAAGAIVILFTIDPVMAAIVPLLIPAFYILVRLSGRRLRKLSSEVRAAEVELIAIAERDLEMLPAIKAFATEEKHRSEFATAADNSRRLAVRQAQWSVTIGPVMALIAALAAISVLVVGSEQLLDADRSPSDLFAFLLYAALLTQPAGALAKMYGAYQMARGTLARLESVLEQEPEPGHQIGQRLERAAGAIAFRKVSFGYPGRPTLFDALDFDVKPGEIVALTGENGVGKSTLVRLLLRFYEPLSGTITLDGTCISEYQVQDLRRQFGYVPQRALLFNGTIADNIVFGQSAPHPQEAVSRAVKLAQADEFIASLPDGLETVIGDHGVRLSGGQRQRIALARALYSQPPIYILDEATSMYDLEGEAAFVEECIGSLKGRTVIIITHRPASLALADRVLKLGPDGFVRVGR

SEQ ID NO: 60129 - DNA, 1827 bp, Erythrobacter sp. NAP1
  CDS (1)..(1827): transl_table=11
atgagcggggaagtatccgaaatctcgtccgatgaagtcgcaggcgacgtcgacaacgcagccgcgacgaagaaatcgcgctcgctcgcgccattgcgcatggtctatcgcgaggcgggcaaataccctgcacagatcggctacgcgcttgcggcgctgactgtcaccgcgcttgcgacgctggctattccgtggcgcttcaaggtcatcattgacgatgcatttggcggcacggccggccccgaagagatcgcgcacgcgtttcagtacttgcttatgatcgtcgtgatcctcggaatcggtacggcggcgcggttctatttcgtaagctggattggtgagcgcgtggtcgccgatattcgccttaaagttcagcaaaacctgctgcgcctgtcgcccggtttctatgaagagaacagtcccaaggaaatttcgagccgcatgacatcggacaccgcgatcatcgagacggtcgtgggcacgacggtctcggtcgccttgcgcaacacgctgaccggtatcggcgggatcgcgctgctgctctatcttgcgccgacgctgacgctgggccttttgatcggcattccgctggtgattgcaccgatcgttttcttcggccgcaagatccgcagcgtctcgcgctcgagccaagacagggttgccgatgtgggcgcttacgtcaccgaagtgctttctgcgatgaaagtggtccagagcttcggccaggaaaaacgcgagggtgaccgcttcggcggcgtggtcgaacggacattcgacaccgcgaaaaaacgcatcgcccttcgcgcaggaatgacctcgattgtcattctgctgattttcggcggtatcacgctggttatgtggcgcggcgcgcttgccgtgtcggaaggcgctatcagcggcggcacaatcgccgcgttcgtactgacgggcggccttgtcgcgggcgcgtttggatcgcttacggaagtctatggagaccttttgcgcggagcaggcgcggcaagccgactggcagaattgctcgaagcacggcccgctatcgcagctccggcgcggcccgaaagcctgcccgtgccgccgcgcggttcgctctcgttccgcaatgtgactttccgctatcccgcaaggccagagacgccggccctcaagaatttcagcctcgagatcgaaccgggcgaaacggtcgccatcgtcggaccgtccggcgcgggcaagtcgacccttttccagctggtcgagcgattttatgacccgcaggtcggcacaatccggctcgacggggtcccgctcaccaaggcggaccctgccgagattcgcgatcggattgccttcgtcccgcaggacggcgtacttttcagcgcggatgctcgcgacaaccttcgctatggccgctgggatgcgagcgaagaggaaatctgggaagccgcacgcgcggccaacgcgcatgagttcctgaaagcgctgccagccggcctcgacacttatctcggcgaaggcggcacgcagctatctggcggccagcgccagcgcgtcgccatcgctcgcgcgctgcttcgcgatgcgccgatcttgttgctcgacgaagccaccagcgcgctggacgctgaaagcgagcagcttgtgcagcaggcactggacgagctgatgaaggatcgcacgactctggtcatcgcccaccgccttgcgaccgtgcgcgctgccgatcggattatcgtgctcgataatggcgaaatcgcagagcaaggcacgcatgcagagctgaccgccgctggcgggctttatgctcggctggcgtcgctccagttcgccgccgaagccgcgtaa

SEQ ID NO: 60130 - protein, 608 aa, Erythrobacter sp. NAP1
MSGEVSEISSDEVAGDVDNAAATKKSRSLAPLRMVYREAGKYPAQIGYALAALTVTALATLAIPWRFKVIIDDAFGGTAGPEEIAHAFQYLLMIVVILGIGTAARFYFVSWIGERVVADIRLKVQQNLLRLSPGFYEENSPKEISSRMTSDTAIIETVVGTTVSVALRNTLTGIGGIALLLYLAPTLTLGLLIGIPLVIAPIVFFGRKIRSVSRSSQDRVADVGAYVTEVLSAMKVVQSFGQEKREGDRFGGVVERTFDTAKKRIALRAGMTSIVILLIFGGITLVMWRGALAVSEGAISGGTIAAFVLTGGLVAGAFGSLTEVYGDLLRGAGAASRLAELLEARPAIAAPARPESLPVPPRGSLSFRNVTFRYPARPETPALKNFSLEIEPGETVAIVGPSGAGKSTLFQLVERFYDPQVGTIRLDGVPLTKADPAEIRDRIAFVPQDGVLFSADARDNLRYGRWDASEEEIWEAARAANAHEFLKALPAGLDTYLGEGGTQLSGGQRQRVAIARALLRDAPILLLDEATSALDAESEQLVQQALDELMKDRTTLVIAHRLATVRAADRIIVLDNGEIAEQGTHAELTAAGGLYARLASLQFAAEAA

SEQ ID NO: 60131 - DNA, 2124 bp, Photobacterium sp. SKA34
  CDS (1)..(2124): transl_table=11
atgaaagatcctttacttcagtcactcgtatatataagccgtttttatggtcaggcaaattctcctgacgcgctcgtgtcagatttaccattaactgatggcttactatcaccttttcttcttcctcgcgcagcagataaagcaggactgcaagccaaagaaacaaaaatggaattggaaagtatctcttccctactctttcctgtcatcgctttgcttaaaggtggagaagcgtgtgttgttttaagtattgataaagaaaaaggtgaagccgaagttgtactgccacaaaacgaaggtagtgaacaatggatcaaactgaatgaattaaatgctcaatacactggccgtttatttttagttaaaaagcgcttccgctacgatgaacgctcgcctgagattctcaaaacgcgtgatggtcactggttttggagtacgttgtgggaatctcgtaatatttaccgtgatgtattgatagcctcaattcttatcaatctatttgccatcgccgccccccttttcactcgcttagtgtatgacaaaattgtacctaacttagcatttgattcattatgggtgctagccattggtattacggttatttttgtattcgatttgatattaaaacttctgagaagctattttattgatcttgcaggtaaaaaatcggacctattaatatcagcaaaaatatttagccgtgttatgggtattcgtatggaagcaaagccggcttctgttggtgcgtttgctcgccacttacaagaatttgagtctattagagagttttttacctcggcaacagtatcttcattaatcgatttaccttttgcgctattgttcttgttaattatctacatcatggcaggacctctagcattagtccccttgattgcagtattaattttagtggcatatagcttctttattcaacgaccacttcgcaagagtattgaagaaggctcacgtctttcttcacaaaaacatgccaacctcatcgaaagcctatcaggcttagagacagtgaaaatgtttggggcgcaaagtcaattccaataccgttgggaagaagcggtagcacatatgtccaactggagtttgaaatcacgtcgtttaacagactccgtgcaaaataccgccggtttcttacagcagttcgtttctgtcgcaatgattgtggtgggcgtgtatttaattgccaatggcgacctcactatgggtggtttgattgcctcaaccatgttaagtgggcgtgcggttggtccaatggtacaacttgccctactttctactcgttataaccaagcaaaatcagctatgacgataattgaacagttgatggctatgccgttagaacaggaagatggaaaacgttacattcaccgccctgttattcgcggaaaaattgaatttgataatgtttcctttgcttatcctaatgcaacacatgccgcgctaaaaaatattaacctcaccattaatcctggtgaaaaagtggcaattattggtcgtattggatccggtaagacaagtttagaacgtttgttaatgggactatatagaccaacagaaggttcagttttaattgatgatactgatattaatcaacttcatcatattgatattcgtcgaaatattggctgtgttccacaagatatcacgttattctttggctcaattcgtgacaatattacattaggtcgcccgttatccagtgataatgaaatcttgttagcagccgagcgtgcaggcgtgacagcctttacacaacacgacgctgcaggcttagaaaaacaaattggtgaaggtggtcatgctatttccggtggtcagcgacaagcgattgcgattgcacgtgcattcttatctaacccacccgttatgattatggatgaaccaacgagtagtatggataaccgctctgaaatgtatataaaacgccagcttactaatatgacgcctgaagaaacactgattttaatcactcataaaaccagtatgcttgatcttgttgaccgacttattgttatggaacaaggacgaattgtagctgatggtccaaaaaatacggttttgaagtcactccgtgaaggtaatgtaagccaaccaaaatcagagcaataa

SEQ ID NO: 60132 - protein, 707 aa, Photobacterium sp. SKA34
MKDPLLQSLVYISRFYGQANSPDALVSDLPLTDGLLSPFLLPRAADKAGLQAKETKMELESISSLLFPVIALLKGGEACVVLSIDKEKGEAEVVLPQNEGSEQWIKLNELNAQYTGRLFLVKKRFRYDERSPEILKTRDGHWFWSTLWESRNIYRDVLIASILINLFAIAAPLFTRLVYDKIVPNLAFDSLWVLAIGITVIFVFDLILKLLRSYFIDLAGKKSDLLISAKIFSRVMGIRMEAKPASVGAFARHLQEFESIREFFTSATVSSLIDLPFALLFLLIIYIMAGPLALVPLIAVLILVAYSFFIQRPLRKSIEEGSRLSSQKHANLIESLSGLETVKMFGAQSQFQYRWEEAVAHMSNWSLKSRRLTDSVQNTAGFLQQFVSVAMIVVGVYLIANGDLTMGGLIASTMLSGRAVGPMVQLALLSTRYNQAKSAMTIIEQLMAMPLEQEDGKRYIHRPVIRGKIEFDNVSFAYPNATHAALKNINLTINPGEKVAIIGRIGSGKTSLERLLMGLYRPTEGSVLIDDTDINQLHHIDIRRNIGCVPQDITLFFGSIRDNITLGRPLSSDNEILLAAERAGVTAFTQHDAAGLEKQIGEGGHAISGGQRQAIAIARAFLSNPPVMIMDEPTSSMDNRSEMYIKRQLTNMTPEETLILITHKTSMLDLVDRLIVMEQGRIVADGPKNTVLKSLREGNVSQPKSEQ

SEQ ID NO: 60133 - DNA, 1722 bp, delta proteobacterium MLMS-1
  CDS (1)..(1722): transl_table=11
atgagtaacaaagagatactgcggcgcctctatcatttggtttttccttaccgtcgccggttgctgctggccatggcctgtatggtgctggtggccggtttcggcggggcccaggcctatatggtcaagccgctgctggataagattttctttgaacaggaaagagccctgcttaacctgctgcctctgcttctgatcatgatttttgtggccaagggggtctgttattactgttaccgctacatgcttgataccgtcggccagaaggtgattcgcgatctgcgtaaatcgattttccagcatatccacgctctgccaatggctttttttcatcgcgtctccaccggtgagttgatctcccgggtgatctccgatgtcaccctgattcaaggcacggtttccaaggccctggtcagtatcctccgtgacctggtgcaggtgatcgtccttctgggggtgattttttatctcgattggcagatggcgctggttaccctggtgctgctaccggccgccgccgcccccatcgtccattttgccaggaaatttcgccgcaacagtattcgtaaccagcagaccgtggcgctggtttccaatgctctgcatgaaaccatcgttggccagcggatcgttaaagccttcgggatggaggcctacgagtcccgccgcttcagcatcttactggatcgtcttttctccataatcaaaaaagagatccaactgagcagtttgcaaaatcctttgatggaggtgatcggcggcatcgcctttgccgggattatctggtacggcggtagccaggtgctggccggccattcgacgccgggtactttttttgcgtttttaaccgccctgataatggtttatgatcccatgaaagggataagtggtttaaacagcgtggttatgcaggggctggcggcctccgaacgggttttccaattgttggatgaaccggtcgatatcggtgatcgatcggcagccagggtattgccgcctttcaagaaagagctggagtttaaaaatgtatctttcagttacgatggcaaggtgccggtattacgggaaatcaatttaaaggtgtcggcgggtgaggtgttggccatagtcggacccagcggtggcgggaaaagcaccctggtaaacctgatcccccggttttacgagattagcgaaggacaaattctgttggacggcaatgacctgcgtgaagtgaccctggcctccttgcgggcccagatcgccattgtcgagcagcagacggtgctgttcaacgacacggtcagaaacaatattgcctatggcgatctgcagcgcagcgaagaggaggttgttgctgccgccaaggcggctcatgcccatgactttatccaggatttaccagatggcctggatactctgattggagaggggggggcccggctctccggcggccagcgacaaaggatttccatcgcccgcgccttgctgaagaatgcccccattttgatcctcgatgaagctacctcggccctggataccgaatcggaaagggaggtacagaaggctctggagaacctgatggctgaccgtaccaccctggtgatcgcccatcgcctgtccaccattaaaaatgccgaccggatcatcgtgatgcaggatggccggattgtcgaggagggagatcatcaggacttgctggcacaggaaggggcttatcaactattgcatcggcagcagtaa

SEQ ID NO: 60134 - protein, 573 aa, delta proteobacterium MLMS-1
MSNKEILRRLYHLVFPYRRRLLLAMACMVLVAGFGGAQAYMVKPLLDKIFFEQERALLNLLPLLLIMIFVAKGVCYYCYRYMLDTVGQKVIRDLRKSIFQHIHALPMAFFHRVSTGELISRVISDVTLIQGTVSKALVSILRDLVQVIVLLGVIFYLDWQMALVTLVLLPAAAAPIVHFARKFRRNSIRNQQTVALVSNALHETIVGQRIVKAFGMEAYESRRFSILLDRLFSIIKKEIQLSSLQNPLMEVIGGIAFAGIIWYGGSQVLAGHSTPGTFFAFLTALIMVYDPMKGISGLNSVVMQGLAASERVFQLLDEPVDIGDRSAARVLPPFKKELEFKNVSFSYDGKVPVLREINLKVSAGEVLAIVGPSGGGKSTLVNLIPRFYEISEGQILLDGNDLREVTLASLRAQIAIVEQQTVLFNDTVRNNIAYGDLQRSEEEVVAAAKAAHAHDFIQDLPDGLDTLIGEGGARLSGGQRQRISIARALLKNAPILILDEATSALDTESEREVQKALENLMADRTTLVIAHRLSTIKNADRIIVMQDGRIVEEGDHQDLLAQEGAYQLLHRQQ

SEQ ID NO: 60135 - DNA, 1722 bp, delta proteobacterium MLMS-1
  CDS (1)..(1722): transl_table=11
atgagtaacaaagagatactgcggcgcctctatcatttggtttttccttaccgtcgccggttgctgctggccatggcctgtatggtgctggtggccggtttcggcggggcccaggcctatatggtcaagccgctgctggataagattttcattgaacaggaaagcaccttgctccacctgcttcctttggccctggtcatggtttttgtggtcaaaggggtatgttactactgttaccgttatatgcttgataatgtcggtcagagtgtgattcgtgatcttcgtaaactgatttttcaacatattcacgctttgccgatggctttttttcatcgtgtctccaccggtgagttgatctcccgggtgatctccgatgtcaccctgattcaaggcacggtttccaaggccctggtcagtatcctccgtgacctggtgcaggtgatcgtccttctgggggtgattttttatctcgattggcagatggcgttgatagccctggtgctgctgccggccgccgccgcccccatcgttcattttgccaggaaatttcgccgcaatagcattcgtaaccagcagaccgtggcgctggtttccaacgctctgcatgaaaccatcgttggccagcggattgttaaagccttcggaatggaggcctacgagtcccgccgcttcagcactctgttggatcatcttttttccataatcaaaaaggagatccaactgaggagtttgcagaatcctctgatggaggtgatcggcggtatcgcctttgccgcgattatctggtacggcggtacccaggtgttggcaggccattcgacgccgggtaccttttttgcgtttctaaccgccctgattatggtttatgatcccgtaaaaggtataagtggcttgaatagcgtagttatgcagggactggcagcctccgaacgggtttttcagttgttggatgaaccggccgatatcggtgatcggccggaagccaaggtattgccgcctttcaaaaaagagctggagtttaaaaatgtatctttcagctacgatggcaagataccggttttgcgggaaatcaattttaaggtgtcggcgggcgaggtgttggccatagtcggtcccagcggggggggtaaaagtaccctggtcaacctgcttccccggttttacgaagtcagcgaagggcagattttgttggacggcaatgatctgcgcgaagttaccttggtctccctgcgagcccagatcgccattgtcgaacaacagacggtactgtttaatgatacggtcagaaacaatatcgcttatggcgacctggaacgcagtgaagaggaggttgttgccgccgccaaagcggctcatgcccatgactttatccaggatttacccgacggcctggataccttgatcggcgaggggggcgcccggctttccggcggccagcgacaaaggatttctatagcccgcgccttgctaaggaactcccctatcttaattctcgatgaggctacctcggctctggataccgaatcggaaagggaggtgcaaaaggccttggaaaacctgatggctgaccgcaccaccctggtgattgctcatcgcctttccaccatcaagaatgcggatcggataattgtgatggacgatggccggattatcgaggagggtgatcatcaaaccctgttgcgccgtgaaggcgcttaccagctgttgcatcggcaacagtaa

SEQ ID NO: 60136 - protein, 573 aa, delta proteobacterium MLMS-1
MSNKEILRRLYHLVFPYRRRLLLAMACMVLVAGFGGAQAYMVKPLLDKIFIEQESTLLHLLPLALVMVFVVKGVCYYCYRYMLDNVGQSVIRDLRKLIFQHIHALPMAFFHRVSTGELISRVISDVTLIQGTVSKALVSILRDLVQVIVLLGVIFYLDWQMALIALVLLPAAAAPIVHFARKFRRNSIRNQQTVALVSNALHETIVGQRIVKAFGMEAYESRRFSTLLDHLFSIIKKEIQLRSLQNPLMEVIGGIAFAAIIWYGGTQVLAGHSTPGTFFAFLTALIMVYDPVKGISGLNSVVMQGLAASERVFQLLDEPADIGDRPEAKVLPPFKKELEFKNVSFSYDGKIPVLREINFKVSAGEVLAIVGPSGGGKSTLVNLLPRFYEVSEGQILLDGNDLREVTLVSLRAQIAIVEQQTVLFNDTVRNNIAYGDLERSEEEVVAAAKAAHAHDFIQDLPDGLDTLIGEGGARLSGGQRQRISIARALLRNSPILILDEATSALDTESEREVQKALENLMADRTTLVIAHRLSTIKNADRIIVMDDGRIIEEGDHQTLLRREGAYQLLHRQQ

SEQ ID NO: 60137 - DNA, 1779 bp, Alteromonadales bacterium TW-7
  CDS (1)..(1779): transl_table=11
atgccaaacagtacccccgcaaccgaaaaagctgcctttagcagtttattgcctatttttgcatttataaaaccctataaatggatggttatagcagcccttggcgctttattagtaacggctggcgttaatttatcgttaggccaaggcgttaagtttgttatagatcatggctttattgcgggctctcaagcgcaacttcaacaagctgtattggtacttattggtttaattagcttattggctgtaggcacctttagccgattttatctaatgtcgtggattggcgagcgagtcagtaacgatattcgtaaagccgtgtttaatcgcattgttactttgcacccaagctactttgaagaaaaccgcagtggcgagcttatgtcgcgtttaacaaccgacaccactttgctgcaatcaattattggctcatcgttttctatggcgctgcgtagcgcgttaatgctggttggcggtttggtaatgttattaattaccaacttaaagcttacgctcgtagtggttgcgtgtgtgccgctggtattagtgccaatgatggtatttggcaaaaaggtgcgtaaacttgcaagctcgagtcaagacgccattgccgatataagcacctatgccggcgagatcattcaaaatattaaagtggtacaaagctatagccacgaaacacaagagcaacatgcttttgcacttgaaaccgaaaaagcctttaacgttgccaaaagccgcattaaacagcgctcgtttttaattgccgctgtaatatttttaacctttagtgccattagcgcaatgctttgggttggcggcagtgatgtactggcaggcactatgaccgggggtgaactgggtgcgtttgtgttttacgctattatggtggcaatgtcggtggcaacggttgcagaagtgtacggcgaattgcaaagagcggcaggcgcagccgcccgcttacttgaattactggccgttaaaagtgaaattgaaaatccagaaaacccacaagacgctcagctacaaaataacgcaagtttacctgcaatctcgcttgaaaatatcagctttaattacccgtctcgcccggatgtcagtgcacttaacaaaataagcttaagcatttcgcaaggtcaaacagtcgctattgttggcccatctggcgcaggtaaaacaaccttatttgagctactacagcgcttttacgacccagctagtggcgcaataaaatttcacgatattgatattaagtcgctctctttaaacactctgcgcgataaaatgggcatggtggcacaaaaccctattttatttagctcagatgtaatgcataacattcgttacggcaatccaaacgccactgatgaacaagtatacgctgctgcaaaacatgctcatgccgatgaatttattaaacagttaccacaaggttacaacagctttttaggcgagcaaggcgttaggttatccggtgggcaaaagcagcgtattgtacttgctagggctattttaaaagaccctgaaatactccttcttgatgaagcaaccagcgcactcgatgcgcaaagcgagcaccatgttcaagccgcgcttgagcacttaatgcaaaatagaaccacgcttataattgcgcataggctagcaacagttatccatgcagatatgattgtagtcatggaaaatggagaaattattgcaacgggcactcaccaagaattagtcgcaagtaacccgttgtatcaaaagctgtgtgaattacagtttaataaggattaa

SEQ ID NO: 60138 - protein, 592 aa, Alteromonadales bacterium TW-7
MPNSTPATEKAAFSSLLPIFAFIKPYKWMVIAALGALLVTAGVNLSLGQGVKFVIDHGFIAGSQAQLQQAVLVLIGLISLLAVGTFSRFYLMSWIGERVSNDIRKAVFNRIVTLHPSYFEENRSGELMSRLTTDTTLLQSIIGSSFSMALRSALMLVGGLVMLLITNLKLTLVVVACVPLVLVPMMVFGKKVRKLASSSQDAIADISTYAGEIIQNIKVVQSYSHETQEQHAFALETEKAFNVAKSRIKQRSFLIAAVIFLTFSAISAMLWVGGSDVLAGTMTGGELGAFVFYAIMVAMSVATVAEVYGELQRAAGAAARLLELLAVKSEIENPENPQDAQLQNNASLPAISLENISFNYPSRPDVSALNKISLSISQGQTVAIVGPSGAGKTTLFELLQRFYDPASGAIKFHDIDIKSLSLNTLRDKMGMVAQNPILFSSDVMHNIRYGNPNATDEQVYAAAKHAHADEFIKQLPQGYNSFLGEQGVRLSGGQKQRIVLARAILKDPEILLLDEATSALDAQSEHHVQAALEHLMQNRTTLIIAHRLATVIHADMIVVMENGEIIATGTHQELVASNPLYQKLCELQFNKD

SEQ ID NO: 60139 - DNA, 1752 bp, marine gamma proteobacterium HTCC2143
  CDS (1)..(1752): transl_table=11
atgaacgaacatttacatcagcccgccggtaatacaggctggttaatataccgccgtttaatggttttcaccgctcgttactgggtcttcttcgcaattagcatagccggttttgccgtttatgcgttgacgcaggcggcgatcgcccatgtgatgaaatattttgttgacggcttgcagagtaaagatacaactttgatgaccatcgtacctgtggcggttgttatcattagtctggtgcggggttgcggttttttctgtggcaactattttatggcgctcgtgtcacttaatttagtgaatgatctacgtaaacagatgtttgaccatatgctggcgttgccaagcgtctttcatgaccaacgcaattccggcgaactggtgtcgatgatcacctacaatgtcaaccaggtcactaatgctgcaaccggtgccgtcagagtgctgtttcgtgaaggtttgacggtaatcgcactgatggcctacttgctctatcaaaactggcttttgaccttggtatttttactagtaacacctattttggccggggtgattctctacaccagcaaattatttcgccgtatgagtgaaagaatgcaagcatccatggggcaggtcacccatatctccaatgaagctatccagggatatagaattgttcgcagttatgggggcgaacactatgagcgcggtcggttccgcggcgctagtgataaaaacacccgccagggtttgaaattcagcctcatttcatcggtgcaagctccggtatttacctttcttgtatcagtagcgattgctgggctgatgttcttggtgctatacatggcctctgacgcaacagccggtgatatggtggcctacgttgttgctgcggggactctagcaaaacccgtacgtcagttgagcgaagtcaattccactatccagcgcggaattgctgcggcggagtcgatattttcattgctggatgaagacgctgaggtggatagcggctcgacggttgtcgatagagtcagtggccgcattgatttacgcgatgtttgctttgaatacgaaaccggcaagccggtattgcacaatattaacctgaccatcgagcccggagaaaccattgccctcgtcgggcgctctggcagtggtaagtcgacattggctaatcttttgttacgattttacgatgtcagcagtggtgaaattttattcgatgatattgagcttcgcgacatcgacattaactgcttgcgccggcaaatagcactggttaaccagcaggtggtgttatttaacgacaccgttgccaataacatagcttacggccagctcgccgacgttgatgggtcgtcgattattcaagccgctcagcgcgctaacgcgatgggatttattgaaaaactgccagagggattacaaaccattgtcggtgaagacggcactcggctgtcgggtggccagcgtcagcggctatcaatagcgagggcgctgctcaaagacgcccccattctggtgttggatgaagccacctccgccttggataccgagtccgagcgtaatattcagcaagcgctggacgcggtgatgattgggcgtacaacgttggtaattgcccatcgcttgtctaccatagaaaaggcagaccgaatcatcgtaatggatcatgggcacattgttgagcagggcaatcaccagcggttgattcagttaggcgggcattatgcgaatttgcatgcgttacagtttgaggatgggtaa

SEQ ID NO: 60140 - protein, 583 aa, marine gamma proteobacterium HTCC2143
MNEHLHQPAGNTGWLIYRRLMVFTARYWVFFAISIAGFAVYALTQAAIAHVMKYFVDGLQSKDTTLMTIVPVAVVIISLVRGCGFFCGNYFMALVSLNLVNDLRKQMFDHMLALPSVFHDQRNSGELVSMITYNVNQVTNAATGAVRVLFREGLTVIALMAYLLYQNWLLTLVFLLVTPILAGVILYTSKLFRRMSERMQASMGQVTHISNEAIQGYRIVRSYGGEHYERGRFRGASDKNTRQGLKFSLISSVQAPVFTFLVSVAIAGLMFLVLYMASDATAGDMVAYVVAAGTLAKPVRQLSEVNSTIQRGIAAAESIFSLLDEDAEVDSGSTVVDRVSGRIDLRDVCFEYETGKPVLHNINLTIEPGETIALVGRSGSGKSTLANLLLRFYDVSSGEILFDDIELRDIDINCLRRQIALVNQQVVLFNDTVANNIAYGQLADVDGSSIIQAAQRANAMGFIEKLPEGLQTIVGEDGTRLSGGQRQRLSIARALLKDAPILVLDEATSALDTESERNIQQALDAVMIGRTTLVIAHRLSTIEKADRIIVMDHGHIVEQGNHQRLIQLGGHYANLHALQFEDG

SEQ ID NO: 60141 - DNA, 1824 bp, marine gamma proteobacterium HTCC2080; identical to SEQ ID NO: 7551
  CDS (1)..(1824): transl_table=11

SEQ ID NO: 60142 - protein, 607 aa, marine gamma proteobacterium HTCC2080; identical to SEQ ID NO: 7552

SEQ ID NO: 60143 - DNA, 1740 bp, Marinobacter sp. ELB17; identical to SEQ ID NO: 7557
  CDS (1)..(1740): transl_table=11

SEQ ID NO: 60144 - protein, 579 aa, Marinobacter sp. ELB17; identical to SEQ ID NO: 7558

SEQ ID NO: 60145 - DNA, 1797 bp, Bacillus sp. SG-1; identical to SEQ ID NO: 7559
  CDS (1)..(1797): transl_table=11

SEQ ID NO: 60146 - protein, 598 aa, Bacillus sp. SG-1; identical to SEQ ID NO: 7560

SEQ ID NO: 60147 - DNA, 3756 bp, Lactuca sativa
  CDS (1)..(3756)
atggcggagacgacggaggcgtccaaggcaatgccggcgcaagcagaaaagagaaaggagcagagtattcccttctaccaactgttttcattcgcggacaagttcgattacgctctcatgattttaggtagcatcggtgccattattcacggatcttccatgcctttcttcttcctcttgttcggacaaatgattaatggcttcggaaaaaaccaatcggatttgaacaccatgactcacgaagtttcaaagtatgctctgtatttcgtctatctcggattggtagtgtgcatatcgtcatacgcagaaatcggatgttggatgtacaccggagaaaggcaagtgagcacgttgaggaagagatatttggaagcagttttaaaacaagacgttggattttacgatacagatgcaagaacaggagatatcgtttttagtgtctccactgatactctacttgtccaagacgccattagtgagaaggtgggaaactttatccattatctctcgacatttttggctggattggttgttggtttcgtttccgcatggaagctagctcttctaagtgttgcagtgatccccggaatcgcatttgcaggtggattatacgcttatactcttacaggtctcacttccaaaagccgtgaatcctatgccaatgctggcatcatcgctgaacaggcaattgcacaagtaagaacagtgtattcatatgtgggagaaaccaaagcactcgattcatattcagatgcaatacaacacactctcaaattgggatacaaagcaggaatggcaaaaggattgggattgggatgcacatatggaatcgcatgcatgtcatgggcacttgtgttttggtatgcgggtgtgtttattaggaatgggcaaacagatggtggaaaagcatttacagcaatcttctccgccattgttggtggcatgagtttgggtcagtcgttttcgaatcttggagcattcagcaaagggaaagctgctggatataaattattggaaatcattaagcaaaaaccgactatagttcaagactctactgatgggaaatgtttgaccgaggtcaacgggaatattgaatttaaggaggtgtcttttagttacccttcaaggcccgatgttcttatctttaaagagttttccattttcttcccggctggaaagacagttgcggtggttggtggtagtgggtccggtaaaagcacagttgtttccctaatcgaacggttttatgaccctaatcaaggacaaatcttgctagatgacgtggacatcaaaaccctccaactaaaatggcttcgcgaccaaatcggtctagtcaaccaagaacccgcactcttcgccaccacaatcctcgaaaacatcctctacggaaaacccaacgccaccacatccgaagtggaagccgccacgtcagccgccaacgcgcattccttcatcaccctcctcccaaacagctacaacacccaagtcggcgaacgcggaatccaactttccggtggtcaaaaacaacgcatcgcaatcgcaagagccatgttaaaaaaccctaaaatcctcctcttagacgaggccacatcagcactcgattccgcctccgaaaacatcgtccaagaagccctcgaccgcttgatggtcggaagaaccaccgtagtaatcgcgcaccgcctttccaccattagaaacgtcgattccatcgcggtaatccaacaaggacaaatcatcgaaaccgggacccacgaggaacttatttcccgcccaggggcgtattcgtcattaatccggttccaagaaatgatcggaaaccgcgatttttcaaacccgtcgatgactcaccggacgcggtcatcgcggttgagcaattcattgtctacaaaatctttaagtcttcgatccggaagcttaaggaatttgagttatcagtatagtacgggtgcggatgggcggattgaaatgatatcgaatgcggaaacggatcggaaaaacggagctccgagtgggtatttttttaggcttttgaaaatgaatgcacccgagtggccgtattcgattatgggtgcaattgggtcgattttatccgggtttattggtccgacttttgcgattgtgatgagtaatatgattgaggttttttactttgataaccctgcgagaatggagagaaagacaaaagagtatgtttttatatatgttggagctggtttatacgcggttgttgcgtatttaatccaacattatttctttagtatcatgggtgagaatctcactacacgagttcgaagaatgatgctttcagcgataatgagaaatgaagttgggtggtttgatgaagaggagcataactcgagtctagtggcagcgaggttagcaacagatgcagcagacgtgaaatccgcgatagctgagaggatctctgttatattacagaacatgacgtcacttctcacgtcatttgtagtcgctttcattgtcgaatggagggtttcacttctgattctcgctcttttcctcttcttgttctcgcccattttgcccagcaactttctctcaaagttcgccggagacacagcaaaagcccacgcaaaaacaagcatgatcgccggagaaggagtaagcaacatcagaacagtagcagccttcaacgcccaagacaaaatcctctccctattctccgacgaactccgtctcccccaaacacaaagtcttcgccggagtcaactttccggcatcctattcggcatctcacagctctctctcttcgcatcagaagccttaatcctgtggtacggcgcccacctcgttaccaaaggcctctccaccttctcaaaagtcatcaaagtcttcatcgtgttggtgataactgcaaactcggtagctgagactgtcagcctcgccccggaaatcatccggggtggtgaagccatcggttcggttttctcgatcctcgatcgacaaacccgaatcgacccagacgatcccgattccgacgtggtcgacactgtccggggagaaatcgagcttcgtcatgtcgatttctcgtacccgtcgagaccggatgttcctgttttcaaagacttcagtctgagaatccggtccggtcagagccaggctctggtcggaccgagcgggtcgggaaaaagctcggtcatcgcattgatcgagcgtttctacgacccgactgctggaaaagttatgattgacggaaaagatatccgacggttaaacctaaaatctctccggttaaaaatcggtctagtccaacaagaacccgcgttattcgccgccacgataatggaaaacatcgcgtacgggaaagccggagccaccgaggcggaggttatccaggcggcaaccgccgctaacgtccatacatttgtttccggcttgccggaaggttacaatactccggtcggcgaacgcggtgttcaactctccggcgggcaaaaacaaagaatcgcgatcgctcgagccgttttaaaaaatccagcgattctgttactagacgaagcgacgagcgcattggacgctgagtcagagtgtgtccttcaggatgcactcgagcggttgatgaggggtaggacgactgtccttattgcacaccgtctgtcgaccatcagaggggtcgacagtattggtgtggttcaagatgggaggattgttgaacaaggtagccatggggaacttattagccgacccgaaggggcttactctaggctcttgcaactacaacaacatcgtatgtga

SEQ ID NO: 60148 - protein, 1251 aa, Lactuca sativa
MAETTEASKAMPAQAEKRKEQSIPFYQLFSFADKFDYALMILGSIGAIIHGSSMPFFFLLFGQMINGFGKNQSDLNTMTHEVSKYALYFVYLGLVVCISSYAEIGCWMYTGERQVSTLRKRYLEAVLKQDVGFYDTDARTGDIVFSVSTDTLLVQDAISEKVGNFIHYLSTFLAGLVVGFVSAWKLALLSVAVIPGIAFAGGLYAYTLTGLTSKSRESYANAGIIAEQAIAQVRTVYSYVGETKALDSYSDAIQHTLKLGYKAGMAKGLGLGCTYGIACMSWALVFWYAGVFIRNGQTDGGKAFTAIFSAIVGGMSLGQSFSNLGAFSKGKAAGYKLLEIIKQKPTIVQDSTDGKCLTEVNGNIEFKEVSFSYPSRPDVLIFKEFSIFFPAGKTVAVVGGSGSGKSTVVSLIERFYDPNQGQILLDDVDIKTLQLKWLRDQIGLVNQEPALFATTILENILYGKPNATTSEVEAATSAANAHSFITLLPNSYNTQVGERGIQLSGGQKQRIAIARAMLKNPKILLLDEATSALDSASENIVQEALDRLMVGRTTVVIAHRLSTIRNVDSIAVIQQGQIIETGTHEELISRPGAYSSLIRFQEMIGNRDFSNPSMTHRTRSSRLSNSLSTKSLSLRSGSLRNLSYQYSTGADGRIEMISNAETDRKNGAPSGYFFRLLKMNAPEWPYSIMGAIGSILSGFIGPTFAIVMSNMIEVFYFDNPARMERKTKEYVFIYVGAGLYAVVAYLIQHYFFSIMGENLTTRVRRMMLSAIMRNEVGWFDEEEHNSSLVAARLATDAADVKSAIAERISVILQNMTSLLTSFVVAFIVEWRVSLLILALFLFLFSPILPSNFLSKFAGDTAKAHAKTSMIAGEGVSNIRTVAAFNAQDKILSLFSDELRLPQTQSLRRSQLSGILFGISQLSLFASEALILWYGAHLVTKGLSTFSKVIKVFIVLVITANSVAETVSLAPEIIRGGEAIGSVFSILDRQTRIDPDDPDSDVVDTVRGEIELRHVDFSYPSRPDVPVFKDFSLRIRSGQSQALVGPSGSGKSSVIALIERFYDPTAGKVMIDGKDIRRLNLKSLRLKIGLVQQEPALFAATIMENIAYGKAGATEAEVIQAATAANVHTFVSGLPEGYNTPVGERGVQLSGGQKQRIAIARAVLKNPAILLLDEATSALDAESECVLQDALERLMRGRTTVLIAHRLSTIRGVDSIGVVQDGRIVEQGSHGELISRPEGAYSRLLQLQQHRM

SEQ ID NO: 60149 - DNA, 3738 bp, Vitis vinifera
  CDS (1)..(3738)
  misc_feature (931)..(931): r is g or a
  misc_feature (957)..(957): m is a or c
  misc_feature (2698)..(2698): w is a or t
atggggaggaaaggtgggatgttccgctatgccaatggcatagacatgttgctgatgctgcttggaactctgggtagcattggagatggcttgatgtcaccgctcaccatgctcgttctcagtgatgtgatcaacgagtatggagatgttgacccatctttctccatccaagtggtggacaagcactcactctggctgttctgtgttgctattggagtgggaatatctgcttttattgaaggaatttgctggacaagaacatcagagaggcagacatcccgcatgagaatggaatacctaaagtcagtcctcaggcaagaagttggtttcttcgacaaacaagctgcttcttctactaccttccaagtcatatccaccatctcttctgatgctcattcaatccaagatgttatatctgagaagatacccaactgcttggctcacctctcatcattcatcttctgcctcatagttgccttctttctttcttggcgattggcagttgctgctcttccgttctcgctaatgttcatcattccaggggtaggatttggaaagctaatgatgaacctggggatgaagatgaaggtagcttatggggttgcaggtgagattgcagagcaagcaatctcatcagtccgaacagtttattcttatgcgggggagtgtcaaactctagacaggttcagccatgcccttcaaaaaagcatgacgcttggcataaagctaggattcacaaaggggctgttgataggaagtatgggaacgatttatgcagcttgggcttttcaggcttgggttgggactattcttgttactgagaaaggagagggaggtggctctgttttcatttctggagtctgcgtcatcctgggaggactgtctattatgaatgcactcccaaatctctctttcatcttagaggcaacarctgcagccacccgaatttttgagatmactgaccggattccagaaatagactctgaaaatgaaaaagggaaaattcttgcatatgtgagaggagaaattgaatttaaagaggttgaattcagttacccatcaagacccactaccaagattcttcaagggttcaatcttaaagtgaaagctggtaaaacagtaggccttgttggaggtagtggttcgggcaagtccacaatcatttccttgcttgaaagattctatgaccctgtcaaaggaaatattctcctggacggacacaaaataaagaggcttcagcttaagtggttgagatctcaaataggtctggtcaatcaagaaccagtcctcttcgccacatccataaaggagaatattctgtttggcaaagaaggagctccattggaacttgttgtaagagcagctaaggcagcaaatgcccatggtttcatctccaaattgcctcaaggatatgaaactcaagttgggcaatttggaattcagttgtctggagggcaaaagcaaaggattgccattgcaagggctttaataagagacccaagaatccttcttcttgatgaagctacaagcgctttggatgcagagtctgaaagaatagtacaggaagcactggatcaagcttccttaggaaggacaacaatcatgattgcccatcgcctctcgacgatccataaggccgacataatagtggttcttcaatcaggaagagtggttgaatcgggttctcacaatgatctgatccagatgaacaatggacaaggaggggcctatagcagaatgttgcaattgcagcaatcagctatgcaaagtaactccagtttctatcgtccagcggatggcacaagccatagcagaacgatgagtgcccagactccggtaagtgtgacctcaagcttgccaagcagtccagctttcctctttagcccagcattttccattagcatggcaccctccatccaactgcattcctacgacgaaagtgacagtgaaaacctggagaaatcttcttaccctccttggcaatggcgtttggtgaaaatgaatttaccagagtggaagagaggcttgcttgggtgtataggggctgcagtctttggagcaattcagccaacccatgcctattgcttgggaacagttgtctcagtctacttcctaaaagacgattcatccatcaaatcacaaaccaaattctattgcttcatcttcttaggcctggcggttctcagcttcatagcaaatctcctccaacattacaattttgcaatcatgggagagcgtttaattaaaagagtgcgggagaagatgcttggaaaggttcttacttttgagattggatggttcgatcaagatgagaatacaagtgcagccatctgtgcacggttagccactgaagccaacatggttcggtcgctgattggagatcgtatatcattgctggttcaggttttcttcagtgcttctctcgcttttatggttggattaatagtcacatggagattagctattgtaatgatagccatgcagcctctactcattgggagcttctattcgaagagtgttctgatgaagagtatgtctgaaaaggccctgaaagcacaaaatgaaggaagccaactagcaagtgaagcagctgttaaccacaggaccatcactgccttttcctctcagcaaagaatattgggtctgtttggagccacaatggaaggccccaagaaggagaatatcaaacagtcatggwtttcaggctttggtctcttcagctcacagtttctgacaacagcctctatagctttgacttactggtatggagggaggctaatgattcatggattaataaccccaaagcacctgtttcaagctttcttcatcctgatgagcaccggtaagaacattgcagatgcaggaagcatgacttctgatttggccaaagggagcagggccatgagatctgtttttgcaatcctagacaggcaaagtaagattgaacctgaagatccagaaagaatcatggttaacaaggcaattaagggctgcatagaactcaagaacgtattcttctcatacccaacaaggcctgaccaaatgatcttcaaggggctctctctcagaattgaagctggtaaaacagctgcacttgtgggagagagtggttcaggaaaatccactgtcattgggctgattgagaggttctatgacccactcaacggatcagtacagatagatcaacatgacatcaggagctataatttgagaaaactgaggtcacatattgccttggtgagtcaggagcccattctctttgcaggaaccatctatgagaacattgtttatgggaaagagaatgctacagaagctgaaataaggagggctgcacttcttgctaatgctcacgaatttataagttctatgaaagatggatacaaaacttactgtggagaaagaggagtccagctatcagggggccagaagcaaaggatagcactcgctcgagcaatattgaagaacccggcaatcattcttttagacgaggcaaccagtgcccttgacagtatgtcagaaaatctagttcaagaagctctggagaagatgatggttggcaggacttgtgtagttgtagctcaccggttatccacaatacagaagtcggacaccatagctgtgataaagaatgggaaggttgtggaacaaggctcccattctgatctacttgctgttggacatggcgggacttactactctttaataaagctacagggcaatcattctccttatcggtga

SEQ ID NO: 60150 - protein, 1245 aa, Vitis vinifera
  misc_feature (311)..(311): The Xaa at location 311 stands for Ala, or Thr.
  misc_feature (900)..(900): The Xaa at location 900 stands for Ile, or Phe.
MGRKGGMFRYANGIDMLLMLLGTLGSIGDGLMSPLTMLVLSDVINEYGDVDPSFSIQVVDKHSLWLFCVAIGVGISAFIEGICWTRTSERQTSRMRMEYLKSVLRQEVGFFDKQAASSTTFQVISTISSDAHSIQDVISEKIPNCLAHLSSFIFCLIVAFFLSWRLAVAALPFSLMFIIPGVGFGKLMMNLGMKMKVAYGVAGEIAEQAISSVRTVYSYAGECQTLDRFSHALQKSMTLGIKLGFTKGLLIGSMGTIYAAWAFQAWVGTILVTEKGEGGGSVFISGVCVILGGLSIMNALPNLSFILEATXAATRIFEITDRIPEIDSENEKGKILAYVRGEIEFKEVEFSYPSRPTTKILQGFNLKVKAGKTVGLVGGSGSGKSTIISLLERFYDPVKGNILLDGHKIKRLQLKWLRSQIGLVNQEPVLFATSIKENILFGKEGAPLELVVRAAKAANAHGFISKLPQGYETQVGQFGIQLSGGQKQRIAIARALIRDPRILLLDEATSALDAESERIVQEALDQASLGRTTIMIAHRLSTIHKADIIVVLQSGRVVESGSHNDLIQMNNGQGGAYSRMLQLQQSAMQSNSSFYRPADGTSHSRTMSAQTPVSVTSSLPSSPAFLFSPAFSISMAPSIQLHSYDESDSENLEKSSYPPWQWRLVKMNLPEWKRGLLGCIGAAVFGAIQPTHAYCLGTVVSVYFLKDDSSIKSQTKFYCFIFLGLAVLSFIANLLQHYNFAIMGERLIKRVREKMLGKVLTFEIGWFDQDENTSAAICARLATEANMVRSLIGDRISLLVQVFFSASLAFMVGLIVTWRLAIVMIAMQPLLIGSFYSKSVLMKSMSEKALKAQNEGSQLASEAAVNHRTITAFSSQQRILGLFGATMEGPKKENIKQSWXSGFGLFSSQFLTTASIALTYWYGGRLMIHGLITPKHLFQAFFILMSTGKNIADAGSMTSDLAKGSRAMRSVFAILDRQSKIEPEDPERIMVNKAIKGCIELKNVFFSYPTRPDQMIFKGLSLRIEAGKTAALVGESGSGKSTVIGLIERFYDPLNGSVQIDQHDIRSYNLRKLRSHIALVSQEPILFAGTIYENIVYGKENATEAEIRRAALLANAHEFISSMKDGYKTYCGERGVQLSGGQKQRIALARAILKNPAIILLDEATSALDSMSENLVQEALEKMMVGRTCVVVAHRLSTIQKSDTIAVIKNGKVVEQGSHSDLLAVGHGGTYYSLIKLQGNHSPYR

SEQ ID NO: 60151 - DNA, 3699 bp, Hordeum vulgare
  CDS (1)..(3699)
atgagccccggcacggcggccacgggcggtggcggtggcgagcggcggagcatccggggcctgttcaagttcgcggaccgggtggacgtggtgctcatggccctgggcacgctgggcgccatcggcgacggctgctccaccaacctcctcctcatcttcgccagcgacgtgatgaactcgctggggcgcggccacgcccagcagcagggcagtgccaccagcgcgcacttcatgcatgacatcgagaagtcgtgcctcaacttcgtctacttggcgttcgccatcctggtggtggcctccatggagggatactgctggagccggacgagcgagaggcaggtgctccggatcaggcacctgtacctggaggccatcctgcggcaggaggtggccttcttcgactcgcaggaggccaccacctcggagatcatcaacagcatctccaaggacgcctcactcatccaggaggtgctcagcgagaaggttcctctgtttctgatgcactccacggtcttcgtctccgggctcgccttctccacctatttctcctggaggctggctctggtttcctaccctctggtcctgctcctcattatccccggtctcatctacgggaagtacctcctgtacctctcccgcgagtcgcgccgcgagtacgccaaggcaaactccctcgtggagcaagcgctaggctccatcaagaccgtttactccttcactgcagagaaagggatcatccagaggtacacggcaatcctcgacaagaccatcaacctagggatcaagcagggcattgccaagggactcgctgtcggattcaccggtctttctttcgccatttgggcattcctcgcctggtatggcagccggttggtgatgtaccatcatgaaagcggagggaggatatacgctgcaggaatctcctttgttctgggtggcctatcccttggaatggcactcccggagctaaaacatttcatcgaggcctccgttgctgccacgagaattctcgaacggatcaaccgtgtgccccagatcaatgatgacgacccaaaggggcttgtgttggatcaagtccgtggagagattgagtttgagtccatccgctttgtctacccgtccaggcctaatatgacagtcctcaaagacttcaacctccagattcctgctggccaaacaattgctctggttggctctagtggcagcggcaagtctaccgcaatagcactggtacagcgcttctatgatgccagtgaaggaactgtcaaggtcgacggcatcgacattaagaaacttaatctcaagtcgattaggagcaagattggacttgtcagccaagaccatgcactgttcggcacatccataaaagagaacatcttatttggcaaaccagatgcaaccatggatttactatatgcagcagccatgacagcgaatgctcacaacttcataatggggcttcctgagggatatgagactaagattggtgagcgtggagcgttgctatcgggtggccagaaacagcgcattgccattgcaagggcggtcctcaagaaccctgctatacttttgcttgatgaagccacaagcgcacttgactcagagtctgagaagctagtgcagcatgcacttgatcaagcatctatgggaagaacaacactggtcgtagctcacaagctttccaccgtgaagaatgctgatcaaattgcggtagtcgatgggggtagaatagctgaaattgggacgcatgatgagctgatcaacaagggtggcccatattcacgacttgtgaaattgcagaagatggtgagctacatagatcaagaaactgaccaatttagggcctcctcagcagcaaggaccagtgccagccgtctcagcatgtccagagcaagtcccatgccactcacgccaggtttctcaaaggaaaccgagtcatatgtttccccacctgcaccgtctttctccaggcttcttgcaatgaatgcaccagagtggaagcaagcactcataggcagcatctctgcattggtatatggttccttgcagcccacctatgctctaaccatcggagggatgattgctgcattctttgttcaggaccacaatgagatgaacgcaatcatcagccgctatgcattgatcttttgctcactgtccctggtatccattgctgtcaatctactgcagcactacaatttcgcctacatgggggagcatctagttaggcgtatccgagtccaggtgcttgagaagatcttaacctttgaggcagcatggtttgatgaagacacaaattcaagtggctcgctgtgctctcggctaagtgacgagtcttctcttgtcaaaacccttgtcgcagacagaatctccctgctactccaaacagcttgtgggattgtaattgcggtgacaatgggcctcatagtagcatggaaacttgcccttgtcatgattgctgtacagccctgcacgatgatatgctactatgccaagaagatagttctctcaaatgtgtcgagggacttggcaaaggctcagtatgaaagtactcagattgccatagaagctgtttataaccacaggatggtgacctcatttggatgctcatcaaagattcttcagctcttcgagcatacgcaagaggaaccactgaggaaggcaaggaagaagtcatgggtagcagggataaccacagggctgtcgccgtgcctcacattcttatcatgggcattggacttctggtatggtgggaaattggcacagtccggggagatctcagcaggtgatgtcttcaaaaccttcttcgtcttggtgagcacaggaaagctgatcgctgatgctggcagcatgacatctgacctggcaaagggagcaaatgctgttgcttcagtttttgaggtgctagataggaaatctatctctccgcaaaattcacaggtggaaaaggacaatccgaagagcaagatacaaggacgaatagagttcaaaaaggtggatttttcatatccaacaagaccacaatgcctgatcctgcaagattttagcttggatgtcaaagcaggaacaagtattggcctggtggggagaagtggatgtggtaaatccacaatcataggtttgatccagaggttctatgatgttgatagaggtgctgtaaggatcgacggtgtggatgtgagggagatgaatgttctttggtatcgaggattcactgctttagttagtcaggagcctgcaatgttttctggcagtgtcagggacaacatcgcctttggtaaaccagaagctgatgaagaagagattgtcgaagctgctaaagccgcaaatgcgcatgaattcatctcatctctgaaggacggatatgacactgattgtggagagcacggcatacagctatcaggaggacagaagcaaagaattgcaattgcgagggcaataatccgaaatccagctatactacttcttgatgaagcaacaagtgctctcgatgcacagtccgagcaagtggtgcaggaagcacttgatcggatcatgacagggaggaccacaatcatagtggcacatcgactaaacacaatcaagaatgcagactcgatagccttcttaggagagggcaaggtgattgagcgtggtacttacccacagctcatgaacaagaagggggcattctttaacctggcaacccttcagaaataa

SEQ ID NO: 60152 - protein, 1232 aa, Hordeum vulgare
MSPGTAATGGGGGERRSIRGLFKFADRVDVVLMALGTLGAIGDGCSTNLLLIFASDVMNSLGRGHAQQQGSATSAHFMHDIEKSCLNFVYLAFAILVVASMEGYCWSRTSERQVLRIRHLYLEAILRQEVAFFDSQEATTSEIINSISKDASLIQEVLSEKVPLFLMHSTVFVSGLAFSTYFSWRLALVSYPLVLLLIIPGLIYGKYLLYLSRESRREYAKANSLVEQALGSIKTVYSFTAEKGIIQRYTAILDKTINLGIKQGIAKGLAVGFTGLSFAIWAFLAWYGSRLVMYHHESGGRIYAAGISFVLGGLSLGMALPELKHFIEASVAATRILERINRVPQINDDDPKGLVLDQVRGEIEFESIRFVYPSRPNMTVLKDFNLQIPAGQTIALVGSSGSGKSTAIALVQRFYDASEGTVKVDGIDIKKLNLKSIRSKIGLVSQDHALFGTSIKENILFGKPDATMDLLYAAAMTANAHNFIMGLPEGYETKIGERGALLSGGQKQRIAIARAVLKNPAILLLDEATSALDSESEKLVQHALDQASMGRTTLVVAHKLSTVKNADQIAVVDGGRIAEIGTHDELINKGGPYSRLVKLQKMVSYIDQETDQFRASSAARTSASRLSMSRASPMPLTPGFSKETESYVSPPAPSFSRLLAMNAPEWKQALIGSISALVYGSLQPTYALTIGGMIAAFFVQDHNEMNAIISRYALIFCSLSLVSIAVNLLQHYNFAYMGEHLVRRIRVQVLEKILTFEAAWFDEDTNSSGSLCSRLSDESSLVKTLVADRISLLLQTACGIVIAVTMGLIVAWKLALVMIAVQPCTMICYYAKKIVLSNVSRDLAKAQYESTQIAIEAVYNHRMVTSFGCSSKILQLFEHTQEEPLRKARKKSWVAGITTGLSPCLTFLSWALDFWYGGKLAQSGEISAGDVFKTFFVLVSTGKLIADAGSMTSDLAKGANAVASVFEVLDRKSISPQNSQVEKDNPKSKIQGRIEFKKVDFSYPTRPQCLILQDFSLDVKAGTSIGLVGRSGCGKSTIIGLIQRFYDVDRGAVRIDGVDVREMNVLWYRGFTALVSQEPAMFSGSVRDNIAFGKPEADEEEIVEAAKAANAHEFISSLKDGYDTDCGEHGIQLSGGQKQRIAIARAIIRNPAILLLDEATSALDAQSEQVVQEALDRIMTGRTTIIVAHRLNTIKNADSIAFLGEGKVIERGTYPQLMNKKGAFFNLATLQK

SEQ ID NO: 60153 - DNA, 2376 bp, Aspergillus fumigatus
  CDS (1)..(2376)
atgcgcgggattaggtcgcttccctgctgggctcctgggttgagcacgaagcgaattcctccacgagaactgtttgcagacctatttcctaatgcctgcgtaatttctgcgagacacagcgctcgcaatggtctcatccgacagttttcgggttgctccgggtcaataagcaacagttgcaacccgcgtccgtatcgatccgcaattacgtccttgttatccgccaatgtctgtagtaaaggggtttcggccgttcaaccgcgatttttgagtacagtcaggctgttttctacctcccagcgatcattggagccaaagtcgaacgtcaagtcgacaggcggtcaggtagtgaggccagagttacaccaggatcaggagcatgaggacatcgagaaaggctttgagctatcggagagagccgctcaggcagcacaggtcaacctcagcgcgaagctcgccaaagacggtgctgctggaaagaaggccgggttcaaggaaatatggaggctcttactgattgctcgaccggaggcgaagaagctcgccttagccttccttttcttgctggtatcatctggtattacaatgtccatcccattttcgattggaaagatcatggacacctcgacaaaagcgactacagaaggtggtaatgagctctttggtctgagccttcccatgttctatggtgcgttggctggaattctcactctgggcgctgcggcgaattatggtcgcattatcatcctgcgtatcgttggtgagcgtattgttgccagacttcgctcgaagctcttccgccagacatttgtgcaagatgcagagttcttcgatgcgaatcgggtcggtgacttgatttctcgccttagctctgataccattattgtcggcaagagtatcacacagaacctgtccgatggactgcgcgctgcagttagcggtgcagcagggttcggcttaatggcctacgtcagtctcaagctctccagtatactggctctccttctccctcctatcggcctcggggcttttttctacggacgagcgattcgaaacctgagtcgtcaaatccagaggaatcttgggaccttgactaagattgcggaggagcgcctaggcaacgtcaagactagccagtcctttgctggcgaggttctcgaggttcgtcggtataacaatcaagtgcgaaagatctttgaacttggcaaaaaagaatcccttatcagtgccacattctttagctccaccgggtttgctggcaacatgaccatcctggcattgctgtacgtcggaggaggcatggtccaatctggtgccataacaattggagaattaacttcattcctgatgtacacagcgtacgcagggtcaagcatgttcggtctttcgagcttttactctgaactgatgaaaggtgtcggggcagctagtcgactgtttgaattacaggatcgtcagccaacgatatctccaaccaagggcgagaaggtggcttcggcgcgaggaccaattcgcttcgaaaacgtgacttttagttacccgactcgtcctgctgttcctatttttagggatctcaatttcgaaattccccaagggaccaatgttgctatcgttgggccctcaggaggtggaaaatcaacgatcgcttctattttgctccgtttctactctcctaccgaaggaagagttctcatcggtggcaaagacatcacccatatgaacgccaaatctcttcgacgaaagattggaatcgtctcccaagagcctgtcctcttttcggggactatagcggagaacattgcgtatggtaaacctcaggccaagcggtcagagatcgttgcagctgcgcgcaaggcgaactgccagttcataagtgactttccggatggtcttgacacccaggtcggaccccggggcgctcagctttctggtggccagaagcagcgcattgcgattgcccgggctctgatcaaggatcctgatattctcatactcgatgaagcaacttctgctctcgatgcggagtccgaaactcttgtgaacagtgctcttaccgcgctccttcgtggtaacaatactaccattagcatcgctcatcgactctctactattaagagatccgatacgattattgtccttggtcccgacggaagagtagccgaacaaggcagttatgaggagctcagtgctcgccctgatggcgccttcaccaaattgatggagtggcagatgagcggcggtgaggtgatggaccagctcgccaacactcctgccaacccggtggcgcaggaaacttcttgggacttgcagagtgatgacgggacagagatatccgaggataccaacatcccctcagagccgcgaaaaattgattag

SEQ ID NO: 60154 - protein, 791 aa, Aspergillus fumigatus
MRGIRSLPCWAPGLSTKRIPPRELFADLFPNACVISARHSARNGLIRQFSGCSGSISNSCNPRPYRSAITSLLSANVCSKGVSAVQPRFLSTVRLFSTSQRSLEPKSNVKSTGGQVVRPELHQDQEHEDIEKGFELSERAAQAAQVNLSAKLAKDGAAGKKAGFKEIWRLLLIARPEAKKLALAFLFLLVSSGITMSIPFSIGKIMDTSTKATTEGGNELFGLSLPMFYGALAGILTLGAAANYGRIIILRIVGERIVARLRSKLFRQTFVQDAEFFDANRVGDLISRLSSDTIIVGKSITQNLSDGLRAAVSGAAGFGLMAYVSLKLSSILALLLPPIGLGAFFYGRAIRNLSRQIQRNLGTLTKIAEERLGNVKTSQSFAGEVLEVRRYNNQVRKIFELGKKESLISATFFSSTGFAGNMTILALLYVGGGMVQSGAITIGELTSFLMYTAYAGSSMFGLSSFYSELMKGVGAASRLFELQDRQPTISPTKGEKVASARGPIRFENVTFSYPTRPAVPIFRDLNFEIPQGTNVAIVGPSGGGKSTIASILLRFYSPTEGRVLIGGKDITHMNAKSLRRKIGIVSQEPVLFSGTIAENIAYGKPQAKRSEIVAAARKANCQFISDFPDGLDTQVGPRGAQLSGGQKQRIAIARALIKDPDILILDEATSALDAESETLVNSALTALLRGNNTTISIAHRLSTIKRSDTIIVLGPDGRVAEQGSYEELSARPDGAFTKLMEWQMSGGEVMDQLANTPANPVAQETSWDLQSDDGTEISEDTNIPSEPRKID

SEQ ID NO: 60155 - DNA, 3924 bp, Aspergillus flavus
  CDS (1)..(3924)
atgaagtccgacaaggatatactgatgaagccgctcccaaagtctcctgggacgggcagtacgactacgggtcactctgtctcgcacgctgaagaggtcctcgatcgacagctccatacgccggtgtcgcaaatcggcttttttggtatctatcgatatgcgactcgatgggatgtcgccattctcttcggcagtgcgcttgctgcgatcgcaggcggtgcagcactacctctcttcacggtcctcttcggcaggttgacgtcgacctttcaagacatcgctacccatcggattacttacgatcacttccatcacgagctgaccaagaatgtggtctacttcatatacttgggtgctgctgagttcgtcgcgatttatctagcgaccgtcggcttcatttataccggcgaccatgtcgtacagcagattcgggtggaatacttccaggctatcttaaggcagaatattgccttcttcgacactcttggtgctggggagatcacaacgaggatcaccgccgacacgaacctgattcaagacggtatctccgaaaaggtcggcctagccttgaccgggctttcgacgttcgtgacggcgttcatcatcgcctatataaagaactggaagctggcactaatctgtagtgccagcctgctcgcattgctgttgaccatgggtggttgctccaccctcatgctcatttttagcaagaaagcattggaataccagggtcgtggcgccagtatggccgaggacatccttgactccatccggaccgtcgcagcgtttaatgctcaggaaacactggcgcggaagtacgaatcgcatctcaaggatgccgaaggacccggaatgaagtcaaaagtgatcttcgccatcatggtgggagcattactatgcatcatgtatctcaactatggacttggcttctggatggggtctcgcttcctcgtcgaaggaatcagtaacatcaaagccggggatgtgctgaccatcatgatggccatcatcctaggttcctataatctgggcaatgtggcccccaatggacaagcgctgtcggacgctgtggcggcagcatcaaagctgtatggcaccattgaccgtcaatcccctttagatgcgttgtccgatcagggcaagacgctggagtttgtccgaggaaatattgtactccagaacatcaggcacgtttatccctcgcgacccgaggtcactgttgcccatgatctgagttgctatattcctgccggtaagacgactgccttcgtgggtccctcagggtccggcaaaagtaccatcatcagcttgcttgagcggttttatgacccagtcgcggggaccattatgctcgacggccacgatatccagacattgaatctccgatggctgcgacagcaaatgtcgctcgtgtcgcaagagccgagactcttcgccaccaccatcgcggagaatatccgttatggtatcattggctctcgattcgaaaaggaatcgacgtacgagatccgaaagcgagtcgaagcagcagctcgaatggcaaatgcgcacgacttcatcatggcgcttccgaatggttatgatacaaatatcgagagcttctcgctttctgggggccagaagcagcgcatcgctattgccagagctatcataaaagaccctaagatcctactcttagacgaagcaacatccgccttggacacgaaatccgaaaagctcgttcaggcagcgcttgacaaggcttctaagggtagaacgactattgtcatcgctcatcggctgtccacaatccagaaggcatacaacatcattgttcttgccaatggtcagattgttgagcaagggccgcatgagcatttgatggatcgacgggggatctattgtgacatggtggaagcgcacgagattaagaaacggtactcgagatactccaagagatattcccagctattgacgaacttgtcccctaagcataacccaatgaccttcttcttcgacaaagattacccgggcgatgacgagtccgatatttacagcatcctcagtgatgacgcatccgatattggattgcacactggggagaaacaaagaccagtgtcgagaatgtcactatctcatctcatgcagccggtcaaggaagaggcatattctttctggactttgttcaagttccttgcctcgttcaaccgtcccgagtggccgtttttattactagggctctgcgcatctatactggcaggggggatccaaccatcgcaggctgtgctgtttgcgaaggctgtcagcaccctcagcctgccccctcttgaatatccgaagctccggcacgatgccaacttctggtgcctcatgtttctcatgattggcattgtgtcgcttgtgttgtatagtgtgcaagggaccttgtttgcatatagttccgaaaagatggtctaccgggcccgcagtcaagcattccgggtgatactgcaccaggatatctctttcttcgatcaacaggaaaacacgacaggcgcattaacagccactctgagcgcggggaccaaagaactaactggcattagtggcgtcacattggggactatcttgattgtctctgtcaatcttgtggcttccttgggggtagcccttgtaataggctggaagttggcactggtgtgcatctccgcggttccagccctgctgatgtgtggatttgttcgcgtttggatgttggagcggttccaacgaagggccaagaaagcatatcaagaatcagctagttctgcttgtgaggcagcctctgccatccgtacggtcgtttctttgaccatggagacggaggctttgcaatcctatcaagcacagctccgtcggcagctgaagagtgatatactccccattgtgaaatcgtccttactctacgccagctcacaggcgttgcctttcttctgcatggcgttggggttctggtatggcgggtctctacttggtcatggagagtattccctgtttcaattttacgtgtgcttcagtgaggtgatctttggggcccaagccgctggaacggttttctctcatgccccggatatgggaaaggcgaagcacgctgcccgtgagttcaaacgtctgttcagcagcgacacaatgcatgcttctcggagcaaaggagttccggttacgtccatgcgaggactggtggagttccgcgatgtctcctttcgatatcccagtcgcttggaacaaccaatccttcgccacttgaacctgaccatcaagccagggcaatttgttgcactagtgggtgcgagtggaagcggcaagagcactaccattgcgttgctggagagattctatgatcccctcaaaggtggtgtttacgtagatggaaagaatattatcactctcgagatgtcttcctatcgcagtcacttggctctcattagccaagaaccgactttgttccaagggaccatccgagagaacatcctgctagggagcaacacacctcatgtcacagatgattttcttgttaaagcctgcaaggatgcaaacatatacgatttcatattgtcattgccgcaaggcttcaacaccattgttggcaataagggaggcatgctctccggtggccagaaacagcgcattgccatcgctcgggccctcattcggaatccaaaaatcctcctgttggacgaggctacgtccgcgctagattccgagtcggaaaaggtggtccaggcagcattggatgccgccgcgcggggacgcacaacgatcgcagttgctcaccggctgagcactatccagcgcgcagacttgatatatgtgctagatcagggggaggtcgttgaatcaggtacgcaccgggaacttctccggaagaagggacgctactacgaactcgtccatctacagaatccggatgccacgggtacgaagtag

SEQ ID NO: 60156 - protein, 1307 aa, Aspergillus flavus
MKSDKDILMKPLPKSPGTGSTTTGHSVSHAEEVLDRQLHTPVSQIGFFGIYRYATRWDVAILFGSALAAIAGGAALPLFTVLFGRLTSTFQDIATHRITYDHFHHELTKNVVYFIYLGAAEFVAIYLATVGFIYTGDHVVQQIRVEYFQAILRQNIAFFDTLGAGEITTRITADTNLIQDGISEKVGLALTGLSTFVTAFIIAYIKNWKLALICSASLLALLLTMGGCSTLMLIFSKKALEYQGRGASMAEDILDSIRTVAAFNAQETLARKYESHLKDAEGPGMKSKVIFAIMVGALLCIMYLNYGLGFWMGSRFLVEGISNIKAGDVLTIMMAIILGSYNLGNVAPNGQALSDAVAAASKLYGTIDRQSPLDALSDQGKTLEFVRGNIVLQNIRHVYPSRPEVTVAHDLSCYIPAGKTTAFVGPSGSGKSTIISLLERFYDPVAGTIMLDGHDIQTLNLRWLRQQMSLVSQEPRLFATTIAENIRYGIIGSRFEKESTYEIRKRVEAAARMANAHDFIMALPNGYDTNIESFSLSGGQKQRIAIARAIIKDPKILLLDEATSALDTKSEKLVQAALDKASKGRTTIVIAHRLSTIQKAYNIIVLANGQIVEQGPHEHLMDRRGIYCDMVEAHEIKKRYSRYSKRYSQLLTNLSPKHNPMTFFFDKDYPGDDESDIYSILSDDASDIGLHTGEKQRPVSRMSLSHLMQPVKEEAYSFWTLFKFLASFNRPEWPFLLLGLCASILAGGIQPSQAVLFAKAVSTLSLPPLEYPKLRHDANFWCLMFLMIGIVSLVLYSVQGTLFAYSSEKMVYRARSQAFRVILHQDISFFDQQENTTGALTATLSAGTKELTGISGVTLGTILIVSVNLVASLGVALVIGWKLALVCISAVPALLMCGFVRVWMLERFQRRAKKAYQESASSACEAASAIRTVVSLTMETEALQSYQAQLRRQLKSDILPIVKSSLLYASSQALPFFCMALGFWYGGSLLGHGEYSLFQFYVCFSEVIFGAQAAGTVFSHAPDMGKAKHAAREFKRLFSSDTMHASRSKGVPVTSMRGLVEFRDVSFRYPSRLEQPILRHLNLTIKPGQFVALVGASGSGKSTTIALLERFYDPLKGGVYVDGKNIITLEMSSYRSHLALISQEPTLFQGTIRENILLGSNTPHVTDDFLVKACKDANIYDFILSLPQGFNTIVGNKGGMLSGGQKQRIAIARALIRNPKILLLDEATSALDSESEKVVQAALDAAARGRTTIAVAHRLSTIQRADLIYVLDQGEVVESGTHRELLRKKGRYYELVHLQNPDATGTK

SEQ ID NO: 60157 - DNA, 3909 bp, Aureobasidium pullulans
  CDS (1)..(3909)
atgtcttctgccgacggcagacgaacagtttcatctgattatggccatccacgaccttcaatggccaacgtcgaagcggatcacaactttgagacgacgactttgaattctgctcaaccgcgatcatggcacactgagtttgtcttcgtctcccggaaattgattcaacaaattcttggtaaaaatccgttcaagagttcatatctggatttgttcaagcttgtcaacgatgcgaagtcgaaggccgttctttgggctggcatactgttggcaatagctgctggttgtccattgcccatcattggctatattttcggccagatcattacttctttcccgcctccggaagatgttctgcgagatagactgtatcagcttgttggtgtcgcttgtggctactttatcgttacgactggatatgcaattgcgtggggattgactggagagaagatctcgcgtcgttttcgagaaacgcttgttgagcgcctgcttggtcttgagcaggcatacttcgacatcaaagatccagacattacgaaccttctgaccgagaagattgaagcgatccagataggaacatctgaaaaagtcggcatattcatccagtcgatcagctacttcgttgctgcctttattgttgggttcatcttgaacgccaaactcaccggtattctattcgctgccgtcatacctctcatggctttgatcgttactgtcggctcctccagaatcgcaaagtacaccaaagcagccaccgaatacaccgaagccgctggaaggatcgctgaaagtgctatccatgctgtcaaggttgtgcaggcttttggcatggccgaaaatctcagcaaagaacactaccgtctgctcaaactgtctgcaagatacgccatccggaagtcagtttctgctgcgttcatgcttggcttggtctattttactgcttacagtgccaatgcgcttgccttttgggagggctcacgtctcgctgcagaatctggctcaaacaatgctggtaccgtctatgccgtggtcttcttgattatagacgcttcgtttgttgtcggccaatttggaccattccttggtagcttcgccaccgctgcagctgctggagaaagtgtttacgaaatcctcaaccatccacagtctgaaatcaacgtctactcggaggctgggcaagaagccacagagagcgacatgaaagctgatttggtctttcgcaatgtcacatttgtttatcccgcgaggacatctgctcgtgctctggaagagatgagtcttatcctcaaagccggacagatgaacgcgattgtcggcacgagtggttgcggcaaaagcactcttgtgtctctgctcttgaggctgtacgacatatcctctggtcaattgacaataggaagccatgatatcaaggacttcaacgtaaggagtttgagaaaatacacagccctggtagaccaagactctgtcctgttctctggttcggtccttgaaaacatcagttatggacttggtgaacattcattatcagacgatgttgtcttggagaggtgtactgaggctgcgaaagctgccaacctggactttgtcgacttcttgccacagggtattcacacgcgaatcggtaatggtggctatacgagtctctcgggtggtcagaaccagaggatttgcttggctcgagccctggtcaagaagcctgctctacttctgctagatgagccgaccgcggccctcgacgcaaacagcgaaggacttatcatggacgccgtcaaaagcgtggctgccacaggcacaacagtggtcatggtagcgcaccgactctccactgtgtcagactcgcccaacatcgtgctcatgggtgcaggcaaggtcattgagcaaggaaaccatgatgaactcatgcagttggaaggcgcctacttcaatcttatccaggcgcaacaactaaatgatgcagatgagtcatcggcagaggtatctgcagcaaccaccagtcaagtcaccccacaaaaagcaagcaagtccgaagattcggctgcttccagtgacaccgagacggtgcctccacaggcgaagaaggaagacaagccagccaaaaaggctggattctggaagctccttttgagatgtttgcgtctagccaaatccgactcgcccatcatcgctctgggtctcgctgcctcaatcgtatcgggtggcatcattctcggcgaagccatcgtcttcggcaacctcatctcggtgctgaacgatctcgagagtccagacttccgaagcagagcagaccttttctcactcctcttcttcatactggcactcattgcgctcttctcatacgccggcaatggatgctgtttcggtatcgtctcttcacattttgtcgccaaaattcaacatatctctcttgctagtatcttgcgacaagatatgcaatggttctcgggccagtcagtgccttcactcatgagcagtctcagctcagatgctggtcagcttgcttgcttgtccggagtggctattggcaccatattcacggtgtgtgtctccatcactggtggtatcatccttgcccacgtggtggcttggaaaattgctgttgtcctcctggctgctgtccccgttatgatcacggctggctacgtcagactacgcgtgctcgcactcgcggagagtagacacagatctgcttacaatgatgctgcttctatcgccgccgaggcttgtagaggcatccgcaccattgcttctctcggcagagagcgtggagtgtctagagcatccaacgcagcggtcaaagagccatacgacaagggcatccgattcaccttgattaccaataccttgctggccttgagtttctcaatcacttactttgtatatgcccttgcctactggtggggagccaagcaagtcagaaatggaacatacagtcaattggactttttcattgttcttcctgctcttctgttctctgcgcagagcgctggacagatcttcagtctgtcaccagagatgtcgcgtgctggtgtcgccgctcgcaacgtctttgggctacatgatcagaagccgaccatagtggatgttgacgcgaagcaatctggagcactgccaagctcgaccttgtctattcctactctagaggacaaggcaagtccatcatctggaggctggattgagttcaagaacgtcagtctatgctatccgtccaaacctcagcacccagcattgcagaatgtcaacatctccatcagaccaggagagttcattgcacttgtcggccctagcggagcaggcaagtcgaccattctctctctgctacagcgcttctacgatcccactgctggcagcgtacagctagatgggcaggacatccgcgaggttgctgtaccacaacacagaggtcgattggggctggtacctcaagagccagacctcttccctggctcgatctcctacaacatcggcttgggcgcagcgccaggtcagttggtgacgagagatgatatcgagaagatttgcgcaaagtgtggcattcacgagttcatcatgagtctgcccgaaggctacagcacagagtgcggcaccaatggttcgaaactctccggaggtcagaagcaacgtattgctgtcgccagagcattgatcaggtcaccggaagtgcttctcctggacgagtatacatccgctctggacgcccactccgagcaacagatcaaagaagcagttgatggagccagtgtggatcggactacgattgtggtcgcacatcgattgtccacggtgcagaacgcagatagaatctttgtgtttgatgatggacgtgtggtggaggttggtagccatgctgagcttgttgctcaagggggtttgtatgcaggcatggttctggcgcagacactcacatga

SEQ ID NO: 60158 - protein, 1302 aa, Aureobasidium pullulans
MSSADGRRTVSSDYGHPRPSMANVEADHNFETTTLNSAQPRSWHTEFVFVSRKLIQQILGKNPFKSSYLDLFKLVNDAKSKAVLWAGILLAIAAGCPLPIIGYIFGQIITSFPPPEDVLRDRLYQLVGVACGYFIVTTGYAIAWGLTGEKISRRFRETLVERLLGLEQAYFDIKDPDITNLLTEKIEAIQIGTSEKVGIFIQSISYFVAAFIVGFILNAKLTGILFAAVIPLMALIVTVGSSRIAKYTKAATEYTEAAGRIAESAIHAVKVVQAFGMAENLSKEHYRLLKLSARYAIRKSVSAAFMLGLVYFTAYSANALAFWEGSRLAAESGSNNAGTVYAVVFLIIDASFVVGQFGPFLGSFATAAAAGESVYEILNHPQSEINVYSEAGQEATESDMKADLVFRNVTFVYPARTSARALEEMSLILKAGQMNAIVGTSGCGKSTLVSLLLRLYDISSGQLTIGSHDIKDFNVRSLRKYTALVDQDSVLFSGSVLENISYGLGEHSLSDDVVLERCTEAAKAANLDFVDFLPQGIHTRIGNGGYTSLSGGQNQRICLARALVKKPALLLLDEPTAALDANSEGLIMDAVKSVAATGTTVVMVAHRLSTVSDSPNIVLMGAGKVIEQGNHDELMQLEGAYFNLIQAQQLNDADESSAEVSAATTSQVTPQKASKSEDSAASSDTETVPPQAKKEDKPAKKAGFWKLLLRCLRLAKSDSPIIALGLAASIVSGGIILGEAIVFGNLISVLNDLESPDFRSRADLFSLLFFILALIALFSYAGNGCCFGIVSSHFVAKIQHISLASILRQDMQWFSGQSVPSLMSSLSSDAGQLACLSGVAIGTIFTVCVSITGGIILAHVVAWKIAVVLLAAVPVMITAGYVRLRVLALAESRHRSAYNDAASIAAEACRGIRTIASLGRERGVSRASNAAVKEPYDKGIRFTLITNTLLALSFSITYFVYALAYWWGAKQVRNGTYSQLDFFIVLPALLFSAQSAGQIFSLSPEMSRAGVAARNVFGLHDQKPTIVDVDAKQSGALPSSTLSIPTLEDKASPSSGGWIEFKNVSLCYPSKPQHPALQNVNISIRPGEFIALVGPSGAGKSTILSLLQRFYDPTAGSVQLDGQDIREVAVPQHRGRLGLVPQEPDLFPGSISYNIGLGAAPGQLVTRDDIEKICAKCGIHEFIMSLPEGYSTECGTNGSKLSGGQKQRIAVARALIRSPEVLLLDEYTSALDAHSEQQIKEAVDGASVDRTTIVVAHRLSTVQNADRIFVFDDGRVVEVGSHAELVAQGGLYAGMVLAQTLT

SEQ ID NO: 60159 - DNA, 1815 bp, Ostreococcus tauri
  CDS (1)..(1815)
atgacgcccgtgaccgaatcccgagcgttactcggtggtaacgcggagacgacgtatgcgaacgaccgggaactcgcggatccgttgtcgtcgacggacgatgatctcgagcgtggcttactgcgcggcgcgaagacgggcgcacgggtgagctttagaagtctctttcagctggcgaaacaagacgcgagcacgctcgcgctgggcgtcctgagcctgttcgtgcgcctgccgttcagtgtttccatgccgcactggatgagcgccgcgatcgggggggcgatggacggtgatcgagggcgatttgagtataactggtacgcgttcctcatcgccggagcgtgcaacgggttgctcgatttttggaatgtctatttgttctcgatcgcgcagacgtccatcgtgcgacgattacgacgacgagcgttctcggcgacgctgaaaaagcgcatggcgtggttcgacgcgaggacttcgggggcgacggcaagcacgctgagcaacgattgctctcaagtcggtgcgaatctgtcatggttgtttcggtcgtgcatcgaggcggtggtgcgagtggtgggagtgggcggatatttattgtgggtgaagtttgagctcggattacttgcgctcacggtggtgccggtgacggctacgatcaactatttttacggcaccgtgatgtcggagaacgcgaagagagttcaagacacgctcggaaagtccaacgaggtggtgcaggagacgctgtcaaacatcagaaccgttcgttcgttcgcgcaggaaaaatcagagcgcggaagattcaaacatgccgtcgatgcgtggtatgcggagtcgctcaggagcgcgcaactatcgggcgtgtattacaccatcaactactctctgttgaccgcttgtttcgtcccggcgacgatcctgtacgtcgggagtggatacgtgctccgaggcgagatgcacgctgaagtactcgtggcagcgatgttgtacagcgcgatccttcaggagtactttgggaatctgttgagctcgtttacgaatttgttcgccgcacgaggagccgcggaggaactttttaaaattttagacggtggaaacggcgaggaagaggatgacgcgcagatgggcgataagttactcgagtcgagcatcatgggcgagatagccttcgagaacgtatcgtttgcgtatccgacacggccgaacattcgtgttctgtcgggcgtcagtttcgtcgtcaagccgagcgaaattgtgggcatcgttggacgaagcggcagtgggaaatcgacactgttctctttgttgcagcgattctacggagactactcgggaaaaattacactcgatggaaacaacatcgagacgcttaagaaacgctggctgagaaggaaatgttttgcgctggtcgggcaagagcccgtcttgttcaatggctcgattctcttcaacatcgcgtacgcttcaagcggtacgatcgaccgcgagcgcgcgatgcagtgcgccaaaatagcactcattcacgacgtgattgagaatgagctcggtggatacgagacgccagtcggagagcgaggctgccaactgagcggaggtcaaaagcaaagagtcgcgatcgcgagagcgctttactctgagccaaaggtattgctcttggacgaaccgacgagcgcgctcgacgcggaggcggaaaccatcgtaaccgccgctttgcgatctgccgccaaaaatcgaacgacgttagtgatctcacacgtccctgtagactctttcgttgaccgaacgattgagctctctagtcatagcaacccatag

SEQ ID NO: 60160 - protein, 604 aa, Ostreococcus tauri
MTPVTESRALLGGNAETTYANDRELADPLSSTDDDLERGLLRGAKTGARVSFRSLFQLAKQDASTLALGVLSLFVRLPFSVSMPHWMSAAIGGAMDGDRGRFEYNWYAFLIAGACNGLLDFWNVYLFSIAQTSIVRRLRRRAFSATLKKRMAWFDARTSGATASTLSNDCSQVGANLSWLFRSCIEAVVRVVGVGGYLLWVKFELGLLALTVVPVTATINYFYGTVMSENAKRVQDTLGKSNEVVQETLSNIRTVRSFAQEKSERGRFKHAVDAWYAESLRSAQLSGVYYTINYSLLTACFVPATILYVGSGYVLRGEMHAEVLVAAMLYSAILQEYFGNLLSSFTNLFAARGAAEELFKILDGGNGEEEDDAQMGDKLLESSIMGEIAFENVSFAYPTRPNIRVLSGVSFVVKPSEIVGIVGRSGSGKSTLFSLLQRFYGDYSGKITLDGNNIETLKKRWLRRKCFALVGQEPVLFNGSILFNIAYASSGTIDRERAMQCAKIALIHDVIENELGGYETPVGERGCQLSGGQKQRVAIARALYSEPKVLLLDEPTSALDAEAETIVTAALRSAAKNRTTLVISHVPVDSFVDRTIELSSHSNP

SEQ ID NO: 60161 - DNA, 4227 bp, Cryptococcus neoformans var
  CDS (1)..(4227)
atgtctgcttctccaggactcactgcggctgcagccggccccgaccatcttcaagcccgccgtgacgaaaaagtcatcgactccgagaaggatgctcttgcccacgatgctcatgctgtgaactctggtataccttacccaacagccactgcacctaatgtcggagcacccactgtcccaatcagcgttggtcgcgtttcgtcggcagccgaaggaaagattagccgctcctctatcgccgcttcctctgacactctccgcaactctccgttagagaagccaatctccaatgctttctcaaaatcacatccatacaagaaaagcaagttcgacttcctcaaatctcgaaagaaaaaagaagaggaagagagaaaaaataaagaaaaagagaaggaggccagtgttcttcctccagtttcgttctttgccctcttcaggttcgctgcacctcttgagatcattgccatggtcttgggccttgtgcttgccgttgcagccggatcttgccaacctttaatgactttaatattcggtcgattaaccacgtctttcacgaattatgctgtcattgcgaaccaaatatcccaagggggacttactcccgagacgtctgcggctttacaagcagccaaagatgatctcaagactcaatctggccacaatgccctttatctgatggccattggcattggaatgtttctagcgacttggctttacatgttcatctggaatgttactggcgagctcaactctaaaaggattagagagcgttacttggctgcagtgcttagacaggagattgcctactttgatgatctgggcgccggagaagtcgccactcgcattcagaccgattgtcaccttgtccaagagggaacatctgaaaaggtcgctctcgtattccaatatgctggtacttttgtctgcggttttgttctagcttttgtccggtcacctcgtcttgcgggcgctcttgtttccatcctgccagtcatcatgctctgcggcggtattatgatgacggccatggccaaatatgggactgcggctcttgatcacatcgcgaaagcgggcagcttggcagaagaggtcataggaagtatcaggactgttcaggcttttggcaaggaaaagatcttgggtgacaaatttgccgatcacattgagcagagcaagattgtcggtagaaaaggctccatctttgaaggctttggtttgagcatcatgttcttcgtcatctacgccgcttatgccctcgccttcttctacggtggcattctcgtcagtaacggccaagccgactccggtatcgtcatcaacgttttcatgtccatcctcattggttccttctccatggcgatgcttgctcccgagttggctgctgtcaccaaagcgcgaggcgctgctgccaagcttttcgcaactatcgaccgtgtacccgccattgattccgccagcgaggaaggtttcaagcccgatggccttcgcggtgagattagctttgaaaatgtcaagttccattatccgtcccgacccagcattcctatcttgaagggcttcactactacgtttgaagccggtaagactttcgctctcgtcggagctagtggaagcggaaagagtactgtcgtttctcttattgagaggttttacgaccccgttagtggtgttgtgaagcttgacggtagagatatcaggtcgcttaacctcaattggcttcgtcaacagattggtcttgtatctcaggaacccactcttttcggtaccaccgtccgcggtaacgtcgaacacggtctcatcggctccagatatgagaatgcctctctcgaggaaaaatttgagcttgtgaagaaggcttgtgtcgatgccaacgcccataattttatcatgaaacttccgcaaggttatgataccatggttggtgagcgcggtatgctgttatctggtggtcagaagcagcgagttgcgattgctcgtgctatcgtttccgaccctaggattttgttgttggacgaagctacctctgctcttgacactcagagcgaaggtattgtgcaagatgctttggacaaggcctcgcgaggcaggactactatcaccattgctcataggttatctaccattcgagatgccgacagaatttacgtgatgggtggtggcgaagtactggagcagggttctcacaacgatcttctcgccaacgaaaacggtccttacgcacaacttgtcaacaatcaaaaacttgctcaagaagctgctgctgaagccctccaggtggatgacgatatcgaggaccctgacgatgccgttttcattggcggttcttcgcctatgcaagaaaaagacaaacagcttcatcgcgcagtgactggaaggtctttggccagtatcgccatggacgacatccaagccaagagggcggaggaagtcgcaggtgaggacaagataccttcaagctttggtctgtatgccaggctgttgaggatgaattccgccgataaatttatatacatcatagcgtttatcgccgccatctgcgcaggcatggtttatccttctttggccatcctctttggcaaagccctctccgactttgagattcaagatcctgccgaacttcgacatgctctcagtcgcagtgccctgtggtactttatcactgctcttgcggctgcatttgtcatcttcttccaaagtgccggcttctctcgcgccggttgggatttgaacggtgtcttgagaaaaaagttgttcactgctactttgcgacatgacatcgaatggttcgacgaggaacgcaactctactggtgccgtcacatccaaccttgccgatcaacctcagaaggtgcaaggtctgtttgggcctactttgggtacagtcgtccagtcctgcgccactctcatcggtggttgtattatcggcttgtgctacggtcctcttctcgctctgatcggtatcgcttgtatccccatccttgtctctggaggttatattcgtctcaaggtcgttgtactcaaggaccaacgtatgaagaagctccatgccgctagtgcacatcttgccagtgaagctgctggagccgttaagacagtagccagtcttaccagggagaaggatgtaaggagaatctattctgaagctcttaaagctcctatgaaattaaatttccgtacttctattaaatcccagtgtctctttgcggcgagtcagggtttgactttctgtatcattgctctggtcttctacattggcgcattatggatcatcgatgccaaatactccactgctagtttctatactgtcttgaactccattgtctttgcgtctattcaagctggaaatgtcttcaccttcgtcccggatgcgtccaaggccaattcctcggccgcctccatcttccgaagcatcgacaatgaaccggctatcaatgctgaatctaatgaagggaaggtgcttgatcacaagcacgtcgttggtcatgtgcgaattgaaggcgttcacttcaggtatcctaccaggccgggagtgagagtactgaggaatttgactattgatgttcctgccggcacttatgtggcactcgttggtccttccggttgtggaaagtctaccactattcaaatgctggagaggttctacgaccctttggctggccgtgtgactttggatggcatcgatattaaggagctcaacttggcgagttaccgtagccagatctccctcgtttctcaagaacctaccctttacgcgggtacaattaggtttaatattcttttgggcgcgaacaagcccatagaggaggtgactcaggatgagattgatgctgcctgcaaggatgccaatatttacgactttatcgtgtccttgccagatggttttgacaccgaagtgggtgggaaaggctctcagctttctggtggtcaaaagcaacgtatcgctatcgcccgtgctctcattcgaaaccctaaagtcttgctccttgacgaagctacgtccgcactcgacagtcagtcagaaaaggtcgttcaggaggcacttgataaggcagccaagggtagaacaaccattgcgattgctcatcgtttgtcgtcaattcaacattctgaccggatttactacttctctgaaggcagggtagccgagcatggaacacatcaggagcttttggccaagaagggtggctattatgagctggttcaaatgcaaaacctgagtcgtcaatag

SEQ ID NO: 60162 - protein, 1408 aa, Cryptococcus neoformans var
MSASPGLTAAAAGPDHLQARRDEKVIDSEKDALAHDAHAVNSGIPYPTATAPNVGAPTVPISVGRVSSAAEGKISRSSIAASSDTLRNSPLEKPISNAFSKSHPYKKSKFDFLKSRKKKEEEERKNKEKEKEASVLPPVSFFALFRFAAPLEIIAMVLGLVLAVAAGSCQPLMTLIFGRLTTSFTNYAVIANQISQGGLTPETSAALQAAKDDLKTQSGHNALYLMAIGIGMFLATWLYMFIWNVTGELNSKRIRERYLAAVLRQEIAYFDDLGAGEVATRIQTDCHLVQEGTSEKVALVFQYAGTFVCGFVLAFVRSPRLAGALVSILPVIMLCGGIMMTAMAKYGTAALDHIAKAGSLAEEVIGSIRTVQAFGKEKILGDKFADHIEQSKIVGRKGSIFEGFGLSIMFFVIYAAYALAFFYGGILVSNGQADSGIVINVFMSILIGSFSMAMLAPELAAVTKARGAAAKLFATIDRVPAIDSASEEGFKPDGLRGEISFENVKFHYPSRPSIPILKGFTTTFEAGKTFALVGASGSGKSTVVSLIERFYDPVSGVVKLDGRDIRSLNLNWLRQQIGLVSQEPTLFGTTVRGNVEHGLIGSRYENASLEEKFELVKKACVDANAHNFIMKLPQGYDTMVGERGMLLSGGQKQRVAIARAIVSDPRILLLDEATSALDTQSEGIVQDALDKASRGRTTITIAHRLSTIRDADRIYVMGGGEVLEQGSHNDLLANENGPYAQLVNNQKLAQEAAAEALQVDDDIEDPDDAVFIGGSSPMQEKDKQLHRAVTGRSLASIAMDDIQAKRAEEVAGEDKIPSSFGLYARLLRMNSADKFIYIIAFIAAICAGMVYPSLAILFGKALSDFEIQDPAELRHALSRSALWYFITALAAAFVIFFQSAGFSRAGWDLNGVLRKKLFTATLRHDIEWFDEERNSTGAVTSNLADQPQKVQGLFGPTLGTVVQSCATLIGGCIIGLCYGPLLALIGIACIPILVSGGYIRLKVVVLKDQRMKKLHAASAHLASEAAGAVKTVASLTREKDVRRIYSEALKAPMKLNFRTSIKSQCLFAASQGLTFCIIALVFYIGALWIIDAKYSTASFYTVLNSIVFASIQAGNVFTFVPDASKANSSAASIFRSIDNEPAINAESNEGKVLDHKHVVGHVRIEGVHFRYPTRPGVRVLRNLTIDVPAGTYVALVGPSGCGKSTTIQMLERFYDPLAGRVTLDGIDIKELNLASYRSQISLVSQEPTLYAGTIRFNILLGANKPIEEVTQDEIDAACKDANIYDFIVSLPDGFDTEVGGKGSQLSGGQKQRIAIARALIRNPKVLLLDEATSALDSQSEKVVQEALDKAAKGRTTIAIAHRLSSIQHSDRIYYFSEGRVAEHGTHQELLAKKGGYYELVQMQNLSRQ

SEQ ID NO: 60163 - DNA, 3099 bp, Penicillium marneffei
  CDS (1)..(3099)
atgagacaaaacatgggctactttgataatatcggcgctggtgaggttaccactcgtatcacagccgacaccaatcttatacaagacggtatctccgaaaaggtggctttggtgatagcagcattggctactttcgtcactgcattcgtgattgcatacatcaagtactggaaactggcgctcatctgctcttcgagtatcattgctctcactttgatgatgggcggtggctcgcggttcattatcaagtatagcaaactatctctggaaagctacgcacaaggaggaaatttggcggaggaagtcattagctctattcgtactgctatagctttcggtacgcaggaaaggcttgcccagcaatacgataaacacctcgacaaggctgagaaatggggtatcaggctgcagatgatcttcgccgtcgtgctaggtggaatgtttagtatcatgtacttgaacacgggtctagggttctggatgggttcccgtttcatcgtggatggcgaaattggtgttggccaggtcctaaccgtgttgatggctactatcatgtcgtcattcagtttaggaaatgttgctcccaatgctcaagcttttaccagtgctgttgctgccgccgcgaaaatttacagcaccattgatcgaatttcccctcttgacccaatgtcagaagaaggtcgcaaattggatcaggtcgaaggaagcattgagctgtgcaatgtgagccagcggtacccttcgcgaccagacgtcgccgtcatgaaagatgtcagcttgttcattccagctggaaaaactactgctttggttggtccttctggctcaggaaagagtacgattattggtttggttgaacgtttctacaacccagtccgtggacaggtccttttggacggtcaagacattcaatcgcttaatctgcggtggttgcgacagcaaatctcgcttgtcagtcaagagccgattctttttgctacgactatctttgagaacgtcagatatggtttgctcggtactgagttcattaatgaaagcgatgagaagttgcagcaacgcatcgaacaggcgcttgaaatggctaatgctcttgattttgtgaatgctcttcctgaaggtatacatacccatgttggcgagcgaggtttcttgctttcaggcggtcagaaacagcgtattgccattgcccgtgctgtcgttggcgaccccaagattctcctactggatgaagccacatcggcccttgacaccaagtctgaaggtgtcgttcaagcagccctggataaggctgcagaaggtcgtacaaccattgttattgcacatagattatccacaatcaaaacggcacataacattgttgtcttggtggatggcagcattcaggaacaaggcactcacgatcaactattggactcccagggtgcttactacaggttggtcgaagcacaacgcatcaacgaggcaaaagaatccggagcgctctcatcagaagataccgaggaggaagctgccgccgaagaagaaaaagaaattgaacgcacaacatctcgcatcagaatgtctcgcacattgagctccactgcgtctgggttcaaaccaggccttgaacgagaggccacgctcagatccatctcaagcgtcgttcagtccaagaaggagcagaccaaagaatctcactattcgctatggacacttatcaaattcatctactcattcaacaaaaaggaaactccttacatggttgtcggcctcttttttgcctgtctcgcgggtggtgctcaacctactcaatccgtcctctattccaattctatcattaccatctcacaaccccctagcaattatggacaattgaaacgcgacgctagcttctggtccctcatgtttctcatgctcggtctcgtccaacttattgtgtataccacgcaaggtatcatgtttgcatacagctcggagaagctgattcgccgggcacggagccaggctttcaggacaatgctgcgtcaagacatcaccttctttgatagcgacgaaaacagcaccggtgccttgacctcgttcctttcaacggaggcaaaacacttgtctggaatcagcggtgctactctcggaacacttgtcaatgtgacgacgactttggcagcatgctgtgttatagctctagctgttggttggaagcttgccctagtctgtatttcgacgatcccggcattgctcgcttgtggatactggcgtttctcggttcttgcacaattccaagcacgatccaagaaggcttatgaaatctcggctagttatgcctgcgaagctacttctgccattcgtaccgttgcctcgttgacccgagaagaagacgttctaaacacgtatcgaaagcaactcgaagcgcagacgaggaggagtctcttttctgttgcacgatcatccgtgctgtatgccgcttctcaggctttgtcatttttctgcatggccttgggtttctggtacggcggggaactctttggcaaacatcagtacaccatgttccagtttttcctctgcttcacccaaattatttttggagcacaatctgccggcagtatctttgcttttgcgcccgacatgggtaattccaaaaatgccgctgctgatttcaagaaattgttcgatcgtcgtccggctattgatgtttggtcagaggatggccacaagctagacagtgccgagggcacagtcgagttccgaaacgtccacttccgctatccaactcgccctgagcagcctgttctccgggggttgaatctgaccgtcaacccaggtcaatacgttgctcttgtcggtgcaagtggatgcggaaagagtacgaccattgctcttttggaacgcttctacgacccgatttcaggtggtgtgtacattgacgggcagaatatcgctaacctgaacgtcaactcttatcgacagcacctggctttggtgagtcaggaaccaactctgtaccagggcacggtccgagagaatattcttttgggcagcaatgcgacagatatttcggaagaaaccatcatcaatgcttgcaagaacgccaacatttacgactttatcttatccttaccgtaa

SEQ ID NO: 60164 - protein, 1032 aa, Penicillium marneffei
MRQNMGYFDNIGAGEVTTRITADTNLIQDGISEKVALVIAALATFVTAFVIAYIKYWKLALICSSSIIALTLMMGGGSRFIIKYSKLSLESYAQGGNLAEEVISSIRTAIAFGTQERLAQQYDKHLDKAEKWGIRLQMIFAVVLGGMFSIMYLNTGLGFWMGSRFIVDGEIGVGQVLTVLMATIMSSFSLGNVAPNAQAFTSAVAAAAKIYSTIDRISPLDPMSEEGRKLDQVEGSIELCNVSQRYPSRPDVAVMKDVSLFIPAGKTTALVGPSGSGKSTIIGLVERFYNPVRGQVLLDGQDIQSLNLRWLRQQISLVSQEPILFATTIFENVRYGLLGTEFINESDEKLQQRIEQALEMANALDFVNALPEGIHTHVGERGFLLSGGQKQRIAIARAVVGDPKILLLDEATSALDTKSEGVVQAALDKAAEGRTTIVIAHRLSTIKTAHNIVVLVDGSIQEQGTHDQLLDSQGAYYRLVEAQRINEAKESGALSSEDTEEEAAAEEEKEIERTTSRIRMSRTLSSTASGFKPGLEREATLRSISSVVQSKKEQTKESHYSLWTLIKFIYSFNKKETPYMVVGLFFACLAGGAQPTQSVLYSNSIITISQPPSNYGQLKRDASFWSLMFLMLGLVQLIVYTTQGIMFAYSSEKLIRRARSQAFRTMLRQDITFFDSDENSTGALTSFLSTEAKHLSGISGATLGTLVNVTTTLAACCVIALAVGWKLALVCISTIPALLACGYWRFSVLAQFQARSKKAYEISASYACEATSAIRTVASLTREEDVLNTYRKQLEAQTRRSLFSVARSSVLYAASQALSFFCMALGFWYGGELFGKHQYTMFQFFLCFTQIIFGAQSAGSIFAFAPDMGNSKNAAADFKKLFDRRPAIDVWSEDGHKLDSAEGTVEFRNVHFRYPTRPEQPVLRGLNLTVNPGQYVALVGASGCGKSTTIALLERFYDPISGGVYIDGQNIANLNVNSYRQHLALVSQEPTLYQGTVRENILLGSNATDISEETIINACKNANIYDFILSLP

SEQ ID NO: 60165 - DNA, 3852 bp, Drosophila melanogaster
  CDS (1)..(3852)
atgattggcgtgcgcaccctttattattattgcagtgagcccaacaagtcgaaaaagaagtccaagcatgacgagtcggatgccagcgatgaggaggatggctccgagtaccatgaggatgtcaagcaggttagctacttccagctctttcggtacgccaccaaaaaggatcgagcgctctatgtgattggactactgtctgccgtcggcacaggcctgaccactccggccaacagtttgatattcggtaatctcgccaatgacatgattgacttgagtggactgcttgagagcggaaaatcgtatcgagctgacgatgctatttctactttgcttctggacaaagtgcggcagttctccctgcaaaacacctacatcggcatgattatgctggtgtgttcctatctctcgatcacctgcttcaactacgcggcccactcccagatcctcaccatccgctcaaagttctttcgctccattctgcatcaggacatgaagtggtacgacttcaaccagagtggcgaagtagccagccgaatgaatgaagatctctccaaaatggaggatggcttggccgaaaaagtggtcatgttcgtccattaccttgtcgccttcgtgggatctttggtgctagcctttgtcaagggctggcagctatccctggtgtgcttgaccagtttgccactaacattcatcgccatgggcctggtggccgtggccacgtcccgcctggcgaaaaaggaggtgaccatgtatgctggtgctgccgtggtggctgaaggcgctctctccggaattcgaacggtaaaggcttttgagggcgaggcgaaggaggtggctgcgtacaaggagcgtgtggttgctgccaagatcttgaatatcaagagaaatatgttctccggaatcggattcggtctgctttggttcttcttcatctacgcatcctatgctctggccttctggtatggagtgggtctggtaatcgaatccgcgtatgagaactacgatgctggcaccatgatcaccgtattcttttccgtgatgatgggttccatgaatattggaatggcggctccctatatcgaggcatttggcatcgcgcaagggcgcctgccgaaggttttccacattatcgagcagattccggaaattaatccattgatggggagggtaaaagttaatgagccccttaccaccattgagtttaaggaagtggagttccagtatcccacgcgaccggaggtttctattctgaacaaactgaacctgaaaatccatcgtggccagacggtggctcttgttggtccatccggctgtggcaaatcaacctgcatccaactggtccagcgattctatgacccccaggctggtaatcttttgttcaatggcaccaatcttaaggacctcgacatcaactggctacgcttccttaggattggagtggtgggtcaggaaccaatcctcttcgccacttccatatacgagaatatcaggtacggtcgagaggacgccactcgcgaggagatcgaggcagcacgtgccgcagccaatgcagccatctttattaagaagctacccaaaggatatgatactttggtgggagagcgaggagctcagttgtccggagggcagaagcagaggatagccattcgtcgcgcattgattcgtgatcccgaaatcttgctgttggatgaagccacatctgcattggataccgccagtgaggctaaagtacaagctgccctggagaaagtcagcgctggaaggacgaccatcatcgtggcccaccgtttgtccaccgttcgtcgggcagacaggattgtggtgatcaacaagggtgaggtggtggagagtggaacgcatcaagagttgatggagttgaaggatcattactttaatcttgtaaccactcaactgggtgaggatgatggctcggtccttagtcccactggtgatatctacaagaactttgacatcaaggatgaagatgaggaagagatcaaagtacttagcgaggacgaggacgaagatgtgatggtcactgacgagaaaaataagaaaaagaaaatgaagaaggtcaaggaccccaacgaggtgaaacccatgttggaggtgatgaaaatgaacaaaccggaatggcttcagatcgcagtgggttgcatctcctccgtgatcatgggctgcgccatgcccatctttgccgtgctctttggtagcatccttcagattctttcggttaaggataatgatcaatacgttcgcgaaaactccaaccagtacagcttgtacttcttgattgccggtatcgtagtgggcattgccacgttcctacagatatacttctttggtatcgccggtgagagactgacggaacgccttcgaggactcatgttcgaggccatgctgcgccaggaggtggcctggttcgatgacaaggcgaacggtaccggaagcctttgtgcccgactctccggagatgctgctgcagttcagggtgccactggtcaacgaattggaacgatcattcaatcgatctccactctggcattgggcattgccttgtccatgtattacgagtggagtctgggattggtggcccttgcctttacgcccttcatcctgatcgccttctacatgcagcgtactctaatggcaaaagagaacatgcgtccggccaagaccatggagaactgcaccaaactggccgtcgaagtggtttccaatattcgtactgtagcttctctgggtcgtgaggaaatgttccaccagaactacattggcatgctgattccagctgttgagatttccaagagaaatacccacttccgaggattggtctacggtctcgcccgttccctgatgttctttgcctatgctgcttgcatgtattatggaacatggtgtgtgattcaccgcggaattttgtttggagatgtattcaaggtatcccaagccgtgatcatgggtacggcttccattgccaatgcattggcctttgctcccaatatgcagaagggagtttcggcagccaagaccatctttacgttcctccgccgccagccgtcgattgtggaccgaccgggagtgtctcgtgatccttggcatagcgagggatatgttcgcttcgacaaggtgaagttcagctatcccacacgcagtgagattcaggtactcaagggtctggagcttgctgtgagcaagggtcagaagatcgccctagtgggtccatcgggctgtggcaagtccacgtgcatccagctgatacagcgattctacgatgtagatgagggagctacccttatagatgagtgtgatgtgcgcaatgtttctatgaccaatctgcgcaaccagttgggtatcgtgtcgcaggagcccattcttttcgatcgcacaatccgagagaatatttcctacggtgacaatgccaggaatgtgactgatcaggagatcatctcggcgtgcaaaaagtccaatatccacgaattcatcgctaacctgcccttgggttatgatacaagaatgggcgagaagggtgctcagttgtccggaggtcagaagcagcgcatagctattgcacgagccctcatccggaatccgaaaatcatgctgcttgacgaggccacttctgccttggacgctgaaagtgaaaaggttgtccaagatgcactcgatgccgcctctgagggacgtaccacgatcagtatagcccaccgactctccaccgttgtccactccgacgtaatattcgtcttcgagaacggattagtgtgtgaagctggagaccacaagcaactgcttgcgaatcggggtctctactacacgctctacaaacttcagagcggcagcatgtag

SEQ ID NO: 60166 - protein, 1283 aa, Drosophila melanogaster
MIGVRTLYYYCSEPNKSKKKSKHDESDASDEEDGSEYHEDVKQVSYFQLFRYATKKDRALYVIGLLSAVGTGLTTPANSLIFGNLANDMIDLSGLLESGKSYRADDAISTLLLDKVRQFSLQNTYIGMIMLVCSYLSITCFNYAAHSQILTIRSKFFRSILHQDMKWYDFNQSGEVASRMNEDLSKMEDGLAEKVVMFVHYLVAFVGSLVLAFVKGWQLSLVCLTSLPLTFIAMGLVAVATSRLAKKEVTMYAGAAVVAEGALSGIRTVKAFEGEAKEVAAYKERVVAAKILNIKRNMFSGIGFGLLWFFFIYASYALAFWYGVGLVIESAYENYDAGTMITVFFSVMMGSMNIGMAAPYIEAFGIAQGRLPKVFHIIEQIPEINPLMGRVKVNEPLTTIEFKEVEFQYPTRPEVSILNKLNLKIHRGQTVALVGPSGCGKSTCIQLVQRFYDPQAGNLLFNGTNLKDLDINWLRFLRIGVVGQEPILFATSIYENIRYGREDATREEIEAARAAANAAIFIKKLPKGYDTLVGERGAQLSGGQKQRIAIRRALIRDPEILLLDEATSALDTASEAKVQAALEKVSAGRTTIIVAHRLSTVRRADRIVVINKGEVVESGTHQELMELKDHYFNLVTTQLGEDDGSVLSPTGDIYKNFDIKDEDEEEIKVLSEDEDEDVMVTDEKNKKKKMKKVKDPNEVKPMLEVMKMNKPEWLQIAVGCISSVIMGCAMPIFAVLFGSILQILSVKDNDQYVRENSNQYSLYFLIAGIVVGIATFLQIYFFGIAGERLTERLRGLMFEAMLRQEVAWFDDKANGTGSLCARLSGDAAAVQGATGQRIGTIIQSISTLALGIALSMYYEWSLGLVALAFTPFILIAFYMQRTLMAKENMRPAKTMENCTKLAVEVVSNIRTVASLGREEMFHQNYIGMLIPAVEISKRNTHFRGLVYGLARSLMFFAYAACMYYGTWCVIHRGILFGDVFKVSQAVIMGTASIANALAFAPNMQKGVSAAKTIFTFLRRQPSIVDRPGVSRDPWHSEGYVRFDKVKFSYPTRSEIQVLKGLELAVSKGQKIALVGPSGCGKSTCIQLIQRFYDVDEGATLIDECDVRNVSMTNLRNQLGIVSQEPILFDRTIRENISYGDNARNVTDQEIISACKKSNIHEFIANLPLGYDTRMGEKGAQLSGGQKQRIAIARALIRNPKIMLLDEATSALDAESEKVVQDALDAASEGRTTISIAHRLSTVVHSDVIFVFENGLVCEAGDHKQLLANRGLYYTLYKLQSGSM

SEQ ID NO: 60167 - DNA, 3825 bp, Oryza sativa
  CDS (1)..(3825)
atgggcgacaaggagaagccgtcgttcctgcggctggttcgctacgccgacgcgcacgaccggtgcctgatggcgctgggcgttctgggcagcttcggcgatggcatgatgcagccgctgtcaatgctggtgctcggcgacatcgtcaacagctacggcggcgccggcggcgccggcggcgccggcagtgcccggagcgccttcagctccggcgccgtcgacaagtttgcgcttcggttactgtacgtcgccgttgcagtgggtgcctgctccttcctagagggtctgtgctggacgagaacggcggaacggcaggcgtcaaggatgaggaggctgtacctggaggccgtcctgagccaggaggtggcgttcttcgacgccgcgccctcctcgccgtcgtcgccgcaggcccaggcccaggccaccacgttccgcgtcatctccaccgtctccgacgacgccgacgccatccaggacttcctcggcgagaagctccccatggtcctggccaacgcgacgctcttcttcggcgcgctggccgtgtcgttcgtgttcgcgtggcggctcgcgctggcgggcctcccgttcacgctcctcctcttcgtcacgccgagcgtgctcctcgccgggcgcatggccgcggcggccggggaggcccgcgtggcgtacgaggaggcgggcgggatagcgcagcaggcggtgtcgtccatccggacggtggcgtcgtacaccgcggagcggcggacggtggagcggttccgcggagcggtggcgcggagcgcggcgctcggcgtcaggcaggggctcatcaagggcgccgtgatcgggagcatgggcgtcatctacgccgtctggtccttcttgtcgtggatcggcagcctcctcgtcatccacctgcacgcccagggcggccacgtgttcgtcgcctccatctgcatcgttttggcgggaatgtcgatcatgatggcgctgccgaacctccggtacttcattgacgcgacggcggcggcgagccggatgcaagaaatgatcgaaatgctcccaccgctcgaaggggcggagaagaagggagccaccatggaaaggatcaggggcgagatcgtgttcaaagacgtgcacttctcgtacccgtcgaggccggacacgctggtgctcaacggcttcaacctgaccatctctgagggcgccaccgtcggtctcgtcggcggcagcgggtccgggaagtccaccgtgatctcgctgctgcagaggttctacagcccggactccggggagatatcgatggacgaccatggcattgacacgctcaatgtggagtggcttaggagccagatagggctagtgagccaagagcctgtactgtttgcgacctccattagggagaacatactgttcggcgacgagacggcctcgttgaagcaagtcgtcgccgcggcgaagatggccaatgcccacgagttcatcgtcaagttgccccatggatacgaaactcatgttggtcagttcgggacgcagctgtcgggagggcagaagcagcgcatcgccattgctcgagcgctcgtccgggacccgaggatcctgctgctggacgaggcgacgagcgcgctcgacgccgagtcggagcggacggtgcaggacgcgctggaccgggcgtccgtgggccggaccaccgtgatcgtagcgcaccgcctctcgacgctccgcaaggcggacacgattgcggtgctcgacgctggccgcgtcgtggaggccggcacgcacgacgagctcttggggatggacgacgggggtgaaggcggcgtgtacgccaggatggtgcacctgcagaaggcgccacccgtggcggcgagggaggagcgccaccgcgccgtggatgtggtggagagcgagatggtgtcgttccgcagcgtggagattatgtcggcggtcagcgccaccgagcaccgtcctagccccgcgccgtcgttctgctcggtcgaacactcgacggagattgggaggaagctcgtggaccacggtgtggcgcgctccaggaagccctcgaagcttcgcctgctgaagatgaaccggccggagtggaagcaggcgttgcttgggtgcgttggcgccgtcgtcttcggcgcggtgctgccgctctactcgtacagcctaggctcgttgccggaggtttatttcctcgccgacgatggccagatccgttccaagaccaggttgtactccttcctcttccttggcatcgccgtcgtctgcatcacggcgaacatcgtgcagcactacaacttcgcggtgatgggcgagcgcctgacggagcgtgtccggggccagatgctcgccaagatcctctccttcgaggtcgggtggttcgacgaggacgagaactcgagcgccgcggtgtgcgcgcggctggcgacgcagtcgagcaaggtccgctccctcgtcggcgaccgcatgtgcctgctggtccaggcgggcgccacggcgtcgctgggcttctcgctcgcgctcgccgtgtcgtggcgcctcgccacggtgatgatggccatgcagccgctgatcatcgcgagcttctacttcaagaaggtgctcatggctgccatgtccaagaaggccaagaaggcgcaggtgcaggggagccagctcgccagcgaggccgtggtgaaccaccggacgatcaccgcgttctcgtcgcagcggcggatgctccgcctgtacgaggccgcgcaacaaggccccaagaaggacaacgtggcgcactcgtggttctccggcttctgcctgtgcctgtgccagttcagcaacaccggcagcatggcggtcgctctctggtacggaggcaagctcatggccaaggggctcatcactcccacgcacctgttccaggtgttcttcatgctcatgaccatgggaagggtcatcgccgacgccgggagcttgacgtcggacttggcgcaaggcggcgacgcggtgcgctccgtcctcgacacgctggaccgtgaaccgacgatcaaggacgacgacaacgacaacgagaggaagaagaagaaacggaaggagataaaaggcgcgatcgagttcaagaacgtgcacttcagctacccgacgcggccggaggtggccgtgctctccggattcagcctcgagatcggcgcggggaagacggtggcgctcgtcgggccgagcgggtccggcaagtcgacggtgatcgggctgatcgagcggttctacgacgcgcagaggggctcggtcctggtcgacggcgaggacatcaggagctacagccttgcacgcctccggtcgcaggtggcgctcgtcagccaggagccgacgctcttctccgggacgatacgcgacaacatagcgtacggcgccgccgaagagcacgccaccgaggacgaggtggcccgcgccgcggcgctcgccaacgcccacgggttcatcagcgccatggagcgcgggtacgacacgcgcgtcggggagcgcggcgcgcagctgtcgggggggcagaggcagcggatcgcgctggcgcgggcggtgctgaaggacgcgaggatcctgctgctggacgaggcgacaagcgcgctggacgccgcgtcggagaggctggtgcaggacgccgtggaccggatgctgcgggggaggacgtgcgtcgtggtggcgcaccgcctctcgacggtggagaagtccgacacgatcgcggtggtgaaggacgggagggtggcggagagagggaggcaccacgagctcctcgccgtcggccgcgccgggacgtactacaacctgatcaagctccagcacggcagatcgccgtgccttagtcccatgtga

SEQ ID NO: 60168 - protein, 1274 aa, Oryza sativa
MGDKEKPSFLRLVRYADAHDRCLMALGVLGSFGDGMMQPLSMLVLGDIVNSYGGAGGAGGAGSARSAFSSGAVDKFALRLLYVAVAVGACSFLEGLCWTRTAERQASRMRRLYLEAVLSQEVAFFDAAPSSPSSPQAQAQATTFRVISTVSDDADAIQDFLGEKLPMVLANATLFFGALAVSFVFAWRLALAGLPFTLLLFVTPSVLLAGRMAAAAGEARVAYEEAGGIAQQAVSSIRTVASYTAERRTVERFRGAVARSAALGVRQGLIKGAVIGSMGVIYAVWSFLSWIGSLLVIHLHAQGGHVFVASICIVLAGMSIMMALPNLRYFIDATAAASRMQEMIEMLPPLEGAEKKGATMERIRGEIVFKDVHFSYPSRPDTLVLNGFNLTISEGATVGLVGGSGSGKSTVISLLQRFYSPDSGEISMDDHGIDTLNVEWLRSQIGLVSQEPVLFATSIRENILFGDETASLKQVVAAAKMANAHEFIVKLPHGYETHVGQFGTQLSGGQKQRIAIARALVRDPRILLLDEATSALDAESERTVQDALDRASVGRTTVIVAHRLSTLRKADTIAVLDAGRVVEAGTHDELLGMDDGGEGGVYARMVHLQKAPPVAAREERHRAVDVVESEMVSFRSVEIMSAVSATEHRPSPAPSFCSVEHSTEIGRKLVDHGVARSRKPSKLRLLKMNRPEWKQALLGCVGAVVFGAVLPLYSYSLGSLPEVYFLADDGQIRSKTRLYSFLFLGIAVVCITANIVQHYNFAVMGERLTERVRGQMLAKILSFEVGWFDEDENSSAAVCARLATQSSKVRSLVGDRMCLLVQAGATASLGFSLALAVSWRLATVMMAMQPLIIASFYFKKVLMAAMSKKAKKAQVQGSQLASEAVVNHRTITAFSSQRRMLRLYEAAQQGPKKDNVAHSWFSGFCLCLCQFSNTGSMAVALWYGGKLMAKGLITPTHLFQVFFMLMTMGRVIADAGSLTSDLAQGGDAVRSVLDTLDREPTIKDDDNDNERKKKKRKEIKGAIEFKNVHFSYPTRPEVAVLSGFSLEIGAGKTVALVGPSGSGKSTVIGLIERFYDAQRGSVLVDGEDIRSYSLARLRSQVALVSQEPTLFSGTIRDNIAYGAAEEHATEDEVARAAALANAHGFISAMERGYDTRVGERGAQLSGGQRQRIALARAVLKDARILLLDEATSALDAASERLVQDAVDRMLRGRTCVVVAHRLSTVEKSDTIAVVKDGRVAERGRHHELLAVGRAGTYYNLIKLQHGRSPCLSPM

SEQ ID NO: 60169 - DNA, 3924 bp, Aspergillus oryzae
  CDS (1)..(3924)
atgaagtccgacaaggatatactgatgaagccgctcccaaagtctcctgggacgggcagtacgactacgggtcactctgtctcgcacgctgaagaggtcctcgatcgacagctccatacgccggtgtcgcaaatcggcttttttggtatctatcgatatgcgactcgatgggatgtcgccattctcttcggcagtgcgcttgctgcgatcgcaggcggtgcagcactacctctcttcacggtcctcttcggcaggttgacgtcgacctttcaagacatcgctacccatcggattacttacgatcacttccatcacgagctgaccaagaatgtggtctacttcatatacttgggtgctgctgagttcgtcgcgatttatctagcgaccgtcggcttcatttataccggcgaccatgtcgtacagcagattcgggtggaatacttccaggctatcttaaggcagaatattgccttcttcgacactcttggtgctggggagatcacaacgaggatcaccgccgacacgaacctgattcaagacggtatctccgaaaaggtcggcctagccttgaccgggctttcgacgttcgtgacggcgttcatcatcgcctatataaagaactggaagctggcactaatctgtagtgccagcctgctcgcattgctgttgaccatgggtggttgctccaccctcatgctcatttttagcaagaaagcattggaataccagggtcgtggcgccagtatggccgaggacatccttgactccatccggaccgtcgcagcgtttaatgctcaggaaacactggcgcggaagtacgaatcgcatctcaaggatgccgaaggacccggaatgaagtcaaaagtgatcttcgccatcatggtgggagcattactatgcatcatgtatctcaactatggacttggcttctggatggggtctcgcttcctcgtcgaaggaatcagtaacatcaaagccggggatgtgctgaccatcatgatggccatcatcctaggttcctataatctgggcaatgtggcccccaatggacaagcgctgtcgaacgctgtggcggcagcatcaaagctgtatagcaccattgaccgtcaatcccctttagatgcgttgtccgatcagggcaagacgctggagtttgtccgaggaaatattgtcctccagaacatcaggcacgtttatccctcgcgacccgaggtcactgttgcccatgatctgagttgctatattcctgccggtaagacgactgccttcgtgggtccctcagggtccggcaaaagtaccatcatcagcttgcttgagcggttttatgacccagtcgcggggaccattatgctcgacggccacgatatccagacattgaatctccgatggctgcgacagcaaatgtcgctcgtgtcgcaagagccgagactcttcgccaccaccatcgcggagaatatccgttatggtatcattggctctcgattcgaaaaggaatcgacgtacgagatccgaaagcgagtcgaagcagcagctcgaatggcaaatgcgcacgacttcatcatggcgcttccaaatggttatgatacaaatatcgagagcttctcgctttctgggggccagaagcagcgcatcgctattgccagagctatcataaaagaccctaagatcctactcttagacgaagcaacatccgccttggacacgaaatccgaaaagctcgttcaggcagcgcttgacaaggcttctaagggtagaacgactattgtcatcgctcatcggctgtccacaatccagaaggcatacaacatcattgttcttgccaatggtcagattgttgagcaagggccgcatgagcatttgatggatcgacgggggatctattgtgacatggtggaagcgcagcagattaagaaacggtactcgagatactccaagagatattcccagctattgacgaacttgtcccctaagcataacccaatgaccttcttcttcgacaaagattacccgggcgatgacgagtccgatatttacagcatcctcagtgatgacgcatccgatattggattgcacactggggagaaacaaagaccagtgtcgagaatgtcactatctcatctcatgcagccggtcaaggaagaggcatattctttctggactttgttcaagttccttgcctcgttcaaccgtcccgagtggccgtttttattactagggctctgcgcatctatactggcaggggggatccaaccatcgcaggctgtgctgtttgcgaaggctgtcagcaccctcagcctgccccctcttgaatatccgaagctccggcacgatgccaacttctggtgcctcatgtttctcatgattggcattgtgtcgcttgtgttgtatagtgtgcaagggaccttgtttgcatatagttccgaaaagatggtctaccgggcccgcagtcaagcattccgggtgatactgcaccaggatatctctttcttcgatcaacaggaaaacacgacaggcgcattaacagccactctgagcgcggggaccaaagaactaactggcattagtggcgtcacattggggactatcttgattgtctctgtcaatcttgtggcttccttgggggtagcccttgtaataggctggaagttggcactggtgtgcatctccgcggttccagccctgctgatgtgtggatttgttcgcgtttggatgttggagcggttccaacgaagggccaagaaagcatatcaagaatcagctagttctgcttgtgaggcagcctctgccatccgtacggtcgtttctttgaccatggagacggaggctttgcaatcctatcaagcacagctccgtcggcagctgaagagtgatatactccccattgtgaaatcgtccttactctacgccagctcacaggcgttgcctttcttctgcatggcgttggggttctggtatggcgggtctctacttggtcatggagagtattccctgtttcaattttacgtgtgcttcagtgaggtgatctttggggcccaagccgctggaacggttttctctcatgccccggatatgggaaaggcgaagcacgctgcccgtgagttcaaacgtctgttcagcagcgacacaatgcatgcttctcggagcaaaggagttccggttacgtccatgcgaggactggtggagttccgcgatgtctcctttcgatatcccagtcgcttggaacaaccaatccttcgccacttgaacctgaccatcaagccagggcaatttgttgcactagtgggtgcgagtggaagcggcaagagcactaccattgcgttgctggagagattctatgatcccctcaaaggtggtgtttacgtagatggaaagaatattatcactctcgagatgtcttcctatcgcagtcacttggctctcattagccaagaaccgactttgttccaagggaccatccgagagaacatcctgctagggagcaacacacctcatgtcacagatgattttcttgttaaagcctgcaaggatgcaaacatatacgatttcatattgtcattgccgcaaggcttcaacaccattgttggcaataagggaggcatgctctccggtggccagaaacagcgcattgccatcgctcgggccctcattcggaatccaaaaatcctcctgttggacgaggctacgtccgcgctagattccgagtcggaaaaggtggtccaggcagcattggatgccgccgcgcggggacgcacaacgatcgcagttgctcaccggctgagcactatccagcgcgcagacttgatatatgtgctagatcagggggaggtcgttgaatcaggtacgcaccgggaacttctccggaagaagggacgctactacgaactcgtccatctacagaatccggatgccacgggtacgaagtag

SEQ ID NO: 60170 - protein, 1307 aa, Aspergillus oryzae
MKSDKDILMKPLPKSPGTGSTTTGHSVSHAEEVLDRQLHTPVSQIGFFGIYRYATRWDVAILFGSALAAIAGGAALPLFTVLFGRLTSTFQDIATHRITYDHFHHELTKNVVYFIYLGAAEFVAIYLATVGFIYTGDHVVQQIRVEYFQAILRQNIAFFDTLGAGEITTRITADTNLIQDGISEKVGLALTGLSTFVTAFIIAYIKNWKLALICSASLLALLLTMGGCSTLMLIFSKKALEYQGRGASMAEDILDSIRTVAAFNAQETLARKYESHLKDAEGPGMKSKVIFAIMVGALLCIMYLNYGLGFWMGSRFLVEGISNIKAGDVLTIMMAIILGSYNLGNVAPNGQALSNAVAAASKLYSTIDRQSPLDALSDQGKTLEFVRGNIVLQNIRHVYPSRPEVTVAHDLSCYIPAGKTTAFVGPSGSGKSTIISLLERFYDPVAGTIMLDGHDIQTLNLRWLRQQMSLVSQEPRLFATTIAENIRYGIIGSRFEKESTYEIRKRVEAAARMANAHDFIMALPNGYDTNIESFSLSGGQKQRIAIARAIIKDPKILLLDEATSALDTKSEKLVQAALDKASKGRTTIVIAHRLSTIQKAYNIIVLANGQIVEQGPHEHLMDRRGIYCDMVEAQQIKKRYSRYSKRYSQLLTNLSPKHNPMTFFFDKDYPGDDESDIYSILSDDASDIGLHTGEKQRPVSRMSLSHLMQPVKEEAYSFWTLFKFLASFNRPEWPFLLLGLCASILAGGIQPSQAVLFAKAVSTLSLPPLEYPKLRHDANFWCLMFLMIGIVSLVLYSVQGTLFAYSSEKMVYRARSQAFRVILHQDISFFDQQENTTGALTATLSAGTKELTGISGVTLGTILIVSVNLVASLGVALVIGWKLALVCISAVPALLMCGFVRVWMLERFQRRAKKAYQESASSACEAASAIRTVVSLTMETEALQSYQAQLRRQLKSDILPIVKSSLLYASSQALPFFCMALGFWYGGSLLGHGEYSLFQFYVCFSEVIFGAQAAGTVFSHAPDMGKAKHAAREFKRLFSSDTMHASRSKGVPVTSMRGLVEFRDVSFRYPSRLEQPILRHLNLTIKPGQFVALVGASGSGKSTTIALLERFYDPLKGGVYVDGKNIITLEMSSYRSHLALISQEPTLFQGTIRENILLGSNTPHVTDDFLVKACKDANIYDFILSLPQGFNTIVGNKGGMLSGGQKQRIAIARALIRNPKILLLDEATSALDSESEKVVQAALDAAARGRTTIAVAHRLSTIQRADLIYVLDQGEVVESGTHRELLRKKGRYYELVHLQNPDATGTK

SEQ ID NO: 60171 - DNA, 2370 bp, Aspergillus oryzae
  CDS (1)..(2370)
atgcgcggagtccgggtgcttggggcttggactccagtagtcaccgcgaggcagttcgttcagtcaagagggagctttttcagggagctttaccctggagttcagacacatacatgtgtgactggggtctccagtagccaaagccgacaattttcgagagttccggcttcattgtgcaacagtactagcaattaccgtctccaacaccctacgagtttcctccagaacaatgtctctagacgtgtctttcctcagtcgcgaccctctcacattttacggttcttctcctctacggaccggtatctagaatccaagtcaaccgcccggtcgacgaatactcctcaggtgaacagtacacccactgagaaagaggatgaagaagtagacaaaggcttcgaattatctgaacgcgcagcgcaagcagcaaaaatcaacctcagcgcaaagttggctaaagacggggcatcgggaaagaaatcggggttaaaagaaatatggagacttctatccattgcacggccagaggccaagaagctcgggtttgccttcctctttttgctggtttcgtcatccatcaccatgtcaattcccttctctatcgggaagatcatggatgcggcgacaaagtctgctaccgaagggggcggtgaactcttcggcctcagcctaccaatgttctatggagctttggccggagtcctcaccttgggcgctgctgcaaactatggtcgcatcattattctgcgtattgttggtgaacgcatcgttgctagacttcgctcgaagctcttccgccagacattcattcaagatgcagagtttttcgacgcaaatcgagttggtgatttgatctctcgactcagctctgatacaattattgtcggaaagagcattacgcagaatttgtccgatggtttgcgggcagcagtgagcggtgcagccggcttcggattgatggcatatgtcagtcttaagctctccagcattctggctctattgcttcctcccattggccttggagctttcttctatggaagagcgattcgcaacttgagtcgcaagattcaaaggaacctaggagacttaaccaagattgccgaagagcgcttgggcaatgtgaaaacgagtcagtcttttgcgggtgaagttattgaggttaacaggtacaacaaacaagtgcggaagatcttcgagctcggcaaaagagaatccgtgattagtgcgactttctttagttcaactggtttcatgggcaatatgacgattttggcactcctttacgttggaggaggaatggttcggtctggtgctattagtatcggagaattgacctcgtttttgatgtatacagcctatgcaggttcaagcatgtttggtttgtctagtttctactccgaactgatgaagggcgttggagcggctagccggcttttcgaattgcaggaccgcaaaccgacgatatctccaactaagggtacaaaggttgtctctgctcgtgggcctattcgctttgagaatgtgtcttttagctacccaacacgacctgctgttcccatcttcacggatttgaacttcgaaattccccagggaaccaatgttgctattgttggaccttcaggaggaggcaaatctaccattgcttccattttgcttcgattctatcttcccaccaagggcagggttctgattgatggaaaggatattggtgagatgaatgctaaatcacttaggagaaagattggcattgtgtctcaggagcccgttcttttctcgggctctatcgcagagaacatctcatacggaagcccgcaggcaacaaggtccgcgattatcgcagctgccaggaaggcgaactgccagttcattagtgatttccctgatggccttgatactcaagtgggtcctcgaggagctcagctctccggtggacagaagcaacgcattgctattgcccgtgccctaatcaaagaccctgatatcttaattcttgatgaagcgacttctgctcttgacgcagaatctgagactttagtgaacagtgctctggctgctttgctccgcgggaacaacacgacaatcagcattgcccatcgactctctaccatcaagcggtccgatactatcatcgtcctcggccccgacggtaaggttgccgaacaaggttcgtacgaagagctcagctctcgtcctgacggtgccttcacgaagttgatggaatggcaaatgagcggtggcgatgtctctcagcctccaaaggacgctcctatcagccctttgacccaagaaaaattgtggcagatggaagaagagcaggaggttggcgctgaggaagcagcctctagacaaggcgagcagcagaagaacgagtag

SEQ ID NO: 60172 - protein, 789 aa, Aspergillus oryzae
MRGVRVLGAWTPVVTARQFVQSRGSFFRELYPGVQTHTCVTGVSSSQSRQFSRVPASLCNSTSNYRLQHPTSFLQNNVSRRVFPQSRPSHILRFFSSTDRYLESKSTARSTNTPQVNSTPTEKEDEEVDKGFELSERAAQAAKINLSAKLAKDGASGKKSGLKEIWRLLSIARPEAKKLGFAFLFLLVSSSITMSIPFSIGKIMDAATKSATEGGGELFGLSLPMFYGALAGVLTLGAAANYGRIIILRIVGERIVARLRSKLFRQTFIQDAEFFDANRVGDLISRLSSDTIIVGKSITQNLSDGLRAAVSGAAGFGLMAYVSLKLSSILALLLPPIGLGAFFYGRAIRNLSRKIQRNLGDLTKIAEERLGNVKTSQSFAGEVIEVNRYNKQVRKIFELGKRESVISATFFSSTGFMGNMTILALLYVGGGMVRSGAISIGELTSFLMYTAYAGSSMFGLSSFYSELMKGVGAASRLFELQDRKPTISPTKGTKVVSARGPIRFENVSFSYPTRPAVPIFTDLNFEIPQGTNVAIVGPSGGGKSTIASILLRFYLPTKGRVLIDGKDIGEMNAKSLRRKIGIVSQEPVLFSGSIAENISYGSPQATRSAIIAAARKANCQFISDFPDGLDTQVGPRGAQLSGGQKQRIAIARALIKDPDILILDEATSALDAESETLVNSALAALLRGNNTTISIAHRLSTIKRSDTIIVLGPDGKVAEQGSYEELSSRPDGAFTKLMEWQMSGGDVSQPPKDAPISPLTQEKLWQMEEEQEVGAEEAASRQGEQQKNE

SEQ ID NO: 60173 - DNA, 4032 bp, Aspergillus oryzae
  CDS (1)..(4032)
atgacctcagtggagaaagctggtggctcttctccagctactgctatcgaaaatgagaagtctattagcaattctgcttccggttcaacgatagctccgccagcgggcaaggaacagggtacccgtccttcatcctcccacaagagtgatagagtcggcgacaataatgatgatgacgatgctctttattcccacctaccagaacatgagaagcagatattgaagaaacagctcgatgcggacgaaaggaaagtgccattcgttgcgcttttccgctatgcatctcgaatggatatactcatcatgtttataagcgcgatttgtgctatagctgccggtgcagcactaccgctattcacaatccttttcggttccttggcctcagccatgtcaaatagggtcgcagatcttatttcatatgatgaattttatcaccaactgacaaagaatgtcttgtacttcgtatatcttggcatcgctgaatttgtcacggtatatatcagcactgttggattcatttatactggggagcacatcagccaaaagatccgcgaacattacctcgagtccatcctgcggcaaaacatggcctattttgataaattgggtgctggtgaagtaaccacgcgcatcaccgccgacacaaaccttatccaggacggtatctctgagaaagttggacttacacttacggccatctccacatttgtcaccgcttttattgttgcgtatgtcaaatattggaagttggcgctgatttgcagctcgacgattgtcgcccttgtgttggtcatgggaggtgggtctcgctttattgtgaagtacagcaagagatctctggatagttatggtgctggtggcaccgttgcagaggaggtgatcagctccattcggaatgccactgcattcggcactcaggataagcttgccaagcaatacgaggttcacctggcagaagcagaaaagtggggagtcaagaaccaactcatacttggcttcatgattggcggaatgtttggtatcatgttctccaactatggcctcggcttctggatgggctcccggttccttgttaacggagaggttaatgttggtcaggtcctcactgtgttgatggcgattttgataggctccttcagtctgggaaacgtcagcccgaatgctcaagcatttacgaatgctgtagcagcagcagccaagatctatactaccattgatcgtccttcaccattggatccgtactcggatgaaggagagacaccctctcacgttgaaggcaacattgagttccgcgacgtcaaacacatctacccttcacgacctgaagtgacgattatggacggcgtttccttaaaaatacctgctggcaaaaccacagctttagtaggtccttcaggctctggaaagagtactgttgtagggttggtcgagcgcttttacttccctgtcggtggtcaagtattcctagatggttatgacattcagaaccttaaccttcgttggctgcgtcagcaaatctcgttggttagtcaggaacctatccttttcggcactacgatctacaagaatatccagtatggactcattggcacgaaatttgagcacgaatcagatgagaagatccgtgaactgatcgagaacgcggcgagaatggccaatgctcatgacttcgtcagtgctttgccagaagggtacgagaccaatgtcggacagcgcgggttcttgctatctggtggtcaaaagcagcgaattgccattgcccgtgccattgtcagcgacccaaagattcttttgcttgatgaagctacatctgcattggataccaagtcagaaggagttgttcaagctgctcttgataaagctgcagaaggtcgaaccactattgttattgctcatcgtctatcgaccataaaaaccgctcacaatattgttgtcttggtcgatggcaggattgtagaacagggtacacatgatgaactagtcgatcgcaagggtacctacaatagcctcgtagaggcccagcgcatcaaggaagagaaggatgcagaggctctggatgatgaagttgaagatgaggacgagttccccaaagaacagatgtctcgtattaagactgctgacagcggtgcagcttcagttgtggacgttggagacgaaaaggtttactctgggatcggacgttctgccacccacaaatcggtatcaagcgctattctcgccaagaagaaccaggagaaaacccacaaatactcgctgtggtcactgatcaaattcattgcttctttcaaccgccctgaactaagctatatgttgattggattggttttttcggtccttgcagggggtggtcaacccacccaggcagtcctctacgctaaagcgatcagttcactctctttaggtgcagcaggcccgagcacatatggcaagctccgtcatgatgcgaacttttggtctctgatgttttttgtcgttggaattgctcaatttatcaatctttctattaacggtgccgcatttgccgtcagttccgagagactcattcgtcgcgcacgaagcaaagcttttagaacgattcttcgtcaagacatcaccttctttgatagagaggaaaacagcactggcgccctaacttctttcttgtcaaccgaaacaaaacatttgtcgggagtcagtggtgtaacgttgggcacaattttgatgactagcacaacccttggggcagcaattgtgatctctctcgcaatcgggtggaaattggccttggtctgtatctccgttgtcccagtacttctggcatgtggattttaccgtttctacatgcttgctcagttccagcaccgttccaagattgcctatgaagggtctgcgagctacgcttgtgaagcaacctcagccatccgcaccgtggcttctctcacccgagaacgggatgtgtggacagtgtatcactctcagctggaatcccaagggaagaaaagtctaatctctgttttgaagtcgtcactactttatgccagttcacaggctctggttttcttttgtgttgcgctcggcttttggtatggtggcactctcctcggtaaacatgaatactcggttttccgcttcttcgtctgcttctctgagatcctctttggtgcacagtctgcggggactgtattctccttttcgccagacatgggcaaggcgaagaatgccgcagctgaatttaaaaggctgttcgacagggaacctaccattgatacgtggtcggaagatggcaagaaactagagtctgtggaaggttcaattgaattccgcgacgtgcatttcaggtacccgactcgtcccgaacagccggttcttcgggggttgaatttgaccgtgaagcctggtcaatatgttgctctcgttggacccagtggatgtggaaagagtactaccattgcactgcttgagcgtttctatgatacactgtccggctctgttcttgtggatggccaggacatcacccaactcaatgttaattcctaccggagctttttgtcgctggtcagtcaggagccgaccttgtatcaaggaactatcaaagagaatatcttgctaggtgttgatcaagaccacactcccgaagaggcagtgattaaggcatgcaaggatgcaaatatctatgattttattatgtctcttccggagggattcaacaccgtggttggcaacaaaggaggcatgttatccggtgggcaaaagcaacgagttgctattgcccgcgcccttctccgtgaccccaaggtcctccttctagatgaagctacctcggctctcgactctgaatccgagaaagttgtacaggcggcgctggatgccgccgccaaaggtcgaactacgattgctgttgctcaccgactgagtacgatccagaaagccgatgttatctacgtatttgaccagggcaagattgtcgaaagcggaacacaccaagaactggtccgcaacaaaggccgttattatgaactggtcaacctacaaagtttaggcaaggatcactaa

SEQ ID NO: 60174 - protein, 1343 aa, Aspergillus oryzae
MTSVEKAGGSSPATAIENEKSISNSASGSTIAPPAGKEQGTRPSSSHKSDRVGDNNDDDDALYSHLPEHEKQILKKQLDADERKVPFVALFRYASRMDILIMFISAICAIAAGAALPLFTILFGSLASAMSNRVADLISYDEFYHQLTKNVLYFVYLGIAEFVTVYISTVGFIYTGEHISQKIREHYLESILRQNMAYFDKLGAGEVTTRITADTNLIQDGISEKVGLTLTAISTFVTAFIVAYVKYWKLALICSSTIVALVLVMGGGSRFIVKYSKRSLDSYGAGGTVAEEVISSIRNATAFGTQDKLAKQYEVHLAEAEKWGVKNQLILGFMIGGMFGIMFSNYGLGFWMGSRFLVNGEVNVGQVLTVLMAILIGSFSLGNVSPNAQAFTNAVAAAAKIYTTIDRPSPLDPYSDEGETPSHVEGNIEFRDVKHIYPSRPEVTIMDGVSLKIPAGKTTALVGPSGSGKSTVVGLVERFYFPVGGQVFLDGYDIQNLNLRWLRQQISLVSQEPILFGTTIYKNIQYGLIGTKFEHESDEKIRELIENAARMANAHDFVSALPEGYETNVGQRGFLLSGGQKQRIAIARAIVSDPKILLLDEATSALDTKSEGVVQAALDKAAEGRTTIVIAHRLSTIKTAHNIVVLVDGRIVEQGTHDELVDRKGTYNSLVEAQRIKEEKDAEALDDEVEDEDEFPKEQMSRIKTADSGAASVVDVGDEKVYSGIGRSATHKSVSSAILAKKNQEKTHKYSLWSLIKFIASFNRPELSYMLIGLVFSVLAGGGQPTQAVLYAKAISSLSLGAAGPSTYGKLRHDANFWSLMFFVVGIAQFINLSINGAAFAVSSERLIRRARSKAFRTILRQDITFFDREENSTGALTSFLSTETKHLSGVSGVTLGTILMTSTTLGAAIVISLAIGWKLALVCISVVPVLLACGFYRFYMLAQFQHRSKIAYEGSASYACEATSAIRTVASLTRERDVWTVYHSQLESQGKKSLISVLKSSLLYASSQALVFFCVALGFWYGGTLLGKHEYSVFRFFVCFSEILFGAQSAGTVFSFSPDMGKAKNAAAEFKRLFDREPTIDTWSEDGKKLESVEGSIEFRDVHFRYPTRPEQPVLRGLNLTVKPGQYVALVGPSGCGKSTTIALLERFYDTLSGSVLVDGQDITQLNVNSYRSFLSLVSQEPTLYQGTIKENILLGVDQDHTPEEAVIKACKDANIYDFIMSLPEGFNTVVGNKGGMLSGGQKQRVAIARALLRDPKVLLLDEATSALDSESEKVVQAALDAAAKGRTTIAVAHRLSTIQKADVIYVFDQGKIVESGTHQELVRNKGRYYELVNLQSLGKDH

SEQ ID NO: 60175 - DNA, 2427 bp, Brachidontes pharaonis
  CDS (1)..(2427)
atgtctaaatcaaacggagttgttaatgaagattgcgaagaagccatgcctataaatgaggagagcaagccaaggtttaagaagagttatgaattgccaactttacgatacagtaaccttgtcatccttcttgtcaccatagatactattatttccattgcattatgggttacaggaggaaacacagattattttacagataacatcaaagatttccacctgacggagtcagtgtttgaccttgccctactttcagcaggaaaaatgatcttttttgttggcttcttatccttgttagagacgtactcttacagacagatagaaaaaccttatgacaacagtctaaatcagaaaacaaaaattatacatatattattagtagtagtcagctttttcacatttgggtacacagtaaccaagggaggacttgttttgaataaatttcttaatgactcgtcttactcaaaaatacattctaagtacaatgggcttgtgatatcagctgtgtgttttagtttcatagaattcatagcaccgctattgagttttggagctatgagaagattgaaagtgattgggatattacacagatataatgacaatggggtcgaagttgataaggagggcaaggtcattcagaagaaagtcaatattaaaagactgatagtcttggcaaaacctgaatgggttataatcttgtggggaactttagccttagtagcatccagtggcagccagatggcagcaccgttgttctttggtatggtggttgatgctgcacagaaagatttgtctgaactgaccagactagtgataatattactgataatatacatgattggagcaatatttgcctttctgagatcatggatgtttacgttggctggacaaagatttgttgctaggttacggaaaaaattatttgcacaaattatcgaacaggacgtggcattctttgacacaaacaggactggagagttatgtaacagattggcatcagacacacaagtcctacaaaatgctgccactgtgaatatatcaatgttagtaagatacattctccagctgattgggtcattagttttcatgtttgtactaaacgcagcattgactggtgtgttattgtcagttgtcccccttgtgtctattgtagcggttcagtatggaaaatttgtacaaaaaatgcagaagaaatttcaggacaaactaggagatgcaggaacggttgctgaagagagtttatctggtgtacggacagttagatcattctctgcagaacctaaaactgtacataattatggaaaggaaatcaatgaaagttatagaattggcaagcaattggctctggcttcaggtggattccaaggcatcataggtgttcttgctcagggtgctatagctctagtcttgtggtatggtgggaaactggtctatgatgaggctcatggtaaacatacaggtcttacacctggtgttctaacatctttcctgttgtacacactacaggttgccatggcgtttgctttcatgtcctcactgtatggagatttcatgaaggccgttggagcatcagtcagaatatttggattgctagaaaggaaaccagaagttcccaatgagaatggcctcatacctgcagaactgacaggaagagtagaatttaagaatgtgacatttacatacccatccagacctgaaacagaagtattaaagaatataacatttacggtagaacctggagaaatggtagccttagttggtccatcagggggaggtaaatctacaatcgtcaacctgatagaaagattctatgatcccaatggtggaactatttatctggatgattatgacttgaaagaactagatccccagtggtttaggaagaaaatctctatggtcagtcaggaaccaacgttatttgcttgctccattaaagaaaacattgcatttggaataaatgctgagttatcagagattgaggatgtatgtaaacaagctaacgcccatgactttatccaaacatttgaggagaggtatgataccttggtgggagaaagaggagtcagattgtccgggggacagaaacaaagaattgctatagcaagggcacttatcatgaatcctaaacttttgctgctggatgaggcaaccagtgccctagatgctgagagtgaacatttagtacaagaagctatagacagagctatgaaaagtagaacagtgatagttatagcacacagattgtccacagtcaggaatgcttcaaaggtaatagtaatagacaaaggcactatagcagagagtggtacacatgacgaacttatagctaaagacggagtctacaaaaaactggtgttacgacagttaacagctggtggccggtcagatcttagtattcaatcaagcatgaatgacaatggcagttga

SEQ ID NO: 60176 - protein, 808 aa, Brachidontes pharaonis
MSKSNGVVNEDCEEAMPINEESKPRFKKSYELPTLRYSNLVILLVTIDTIISIALWVTGGNTDYFTDNIKDFHLTESVFDLALLSAGKMIFFVGFLSLLETYSYRQIEKPYDNSLNQKTKIIHILLVVVSFFTFGYTVTKGGLVLNKFLNDSSYSKIHSKYNGLVISAVCFSFIEFIAPLLSFGAMRRLKVIGILHRYNDNGVEVDKEGKVIQKKVNIKRLIVLAKPEWVIILWGTLALVASSGSQMAAPLFFGMVVDAAQKDLSELTRLVIILLIIYMIGAIFAFLRSWMFTLAGQRFVARLRKKLFAQIIEQDVAFFDTNRTGELCNRLASDTQVLQNAATVNISMLVRYILQLIGSLVFMFVLNAALTGVLLSVVPLVSIVAVQYGKFVQKMQKKFQDKLGDAGTVAEESLSGVRTVRSFSAEPKTVHNYGKEINESYRIGKQLALASGGFQGIIGVLAQGAIALVLWYGGKLVYDEAHGKHTGLTPGVLTSFLLYTLQVAMAFAFMSSLYGDFMKAVGASVRIFGLLERKPEVPNENGLIPAELTGRVEFKNVTFTYPSRPETEVLKNITFTVEPGEMVALVGPSGGGKSTIVNLIERFYDPNGGTIYLDDYDLKELDPQWFRKKISMVSQEPTLFACSIKENIAFGINAELSEIEDVCKQANAHDFIQTFEERYDTLVGERGVRLSGGQKQRIAIARALIMNPKLLLLDEATSALDAESEHLVQEAIDRAMKSRTVIVIAHRLSTVRNASKVIVIDKGTIAESGTHDELIAKDGVYKKLVLRQLTAGGRSDLSIQSSMNDNGS

SEQ ID NO: 60177 - DNA, 1551 bp, Providencia stuartii
  CDS (1)..(1551): transl_table=11
atgcgagttctattaccttttttggctctctatcgccgacactggtttttgatcctgctcggcatgatcttagccatcgtgactttacttgccagtattgggctacttactctatcagggtggttcctcgctggggcgcgaattgcaggttttccggggctttattattttaattatatgctgcctgctgctggtgtccgtggtgccgctattttccggaccgcaggctacgccgaacgactggttagccatgatgccacattccgagttttggcccatttacgtgtgttcgcctttagtaaaatattaccgctctcaccgggggggatcagccgcttccgccaaggggaaattcttaacagccttgtggcggatgtcgaaaccctcgatcacctatatttacgtgttttatcgccgatttttgctgcttttgtcgtgatctttgtcctgatttttgggttgagcttccttgaccctcgcctagcgtggacactcggttgtattatgctgtttttattatttaccttaccgtttgtcttttatcgtgcaggtaagcccatcggacaagagctgacttacttacgtgcccattaccgcactgtcctgacatccgctttacaagggcaagcggaactgactttgtttggagcgcttccccgttttcgccaaacattggcaaatattgaaagccaatggcaaggacgccaacaacagcaagccaatctaacaggggtatctcaagccattattctatttgcctctggttttactgctactttgttgttgtggatggcggcagatcatgtgggggggaatactaacccaggagcactcattgctttatttgtcttctgtgcactggccgcttttgaagccttaggtcccgtcgccgttgcctttcagcatatggggcaagtgattgcttctgctgaacgtgtttctcagctaattgatgccaaaccagaggtaacattccctgacaacggtttatcccttccccaattggaaagccttgttgtcgacaatatttcatttacttaccccgagcaacctttcgcggttttaaaacaggtttcgctttcactgctaccggggcaacacatcgccttattaggtaaaacaggttgtgggaaatcaacacttttgcaattactcactcgagcatgggatgttgatagtggtatgatcaaaattaatggtcaaaatattagtgactatagtgaacaagcactgcgttcgctcatgtcagtcgttccacaacgggtacacatttttagtgataccttgcgtaataatctactgctcgctaacgataaggcaaccgacaaacagctcattgaggtgttagaccaagttggtcttggtaatttgctggaaaatgagcaaaaacttaacgcttggatgggtgaaggtggtcgacaattatcgggtggagagcagcgccgcttagggatcgctcgagcgctattacataatacgccattaattttaatggatgagccaaccgaaggcttgatgcacaaacagagcagcagatccttgccctgttaa

SEQ ID NO: 60178 - protein, 516 aa, Providencia stuartii
MRVLLPFLALYRRHWFLILLGMILAIVTLLASIGLLTLSGWFLAGARIAGFPGLYYFNYMLPAAGVRGAAIFRTAGYAERLVSHDATFRVLAHLRVFAFSKILPLSPGGISRFRQGEILNSLVADVETLDHLYLRVLSPIFAAFVVIFVLIFGLSFLDPRLAWTLGCIMLFLLFTLPFVFYRAGKPIGQELTYLRAHYRTVLTSALQGQAELTLFGALPRFRQTLANIESQWQGRQQQQANLTGVSQAIILFASGFTATLLLWMAADHVGGNTNPGALIALFVFCALAAFEALGPVAVAFQHMGQVIASAERVSQLIDAKPEVTFPDNGLSLPQLESLVVDNISFTYPEQPFAVLKQVSLSLLPGQHIALLGKTGCGKSTLLQLLTRAWDVDSGMIKINGQNISDYSEQALRSLMSVVPQRVHIFSDTLRNNLLLANDKATDKQLIEVLDQVGLGNLLENEQKLNAWMGEGGRQLSGGEQRRLGIARALLHNTPLILMDEPTEGLMHKQSSRSLPC

SEQ ID NO: 60179 - DNA, 2049 bp, Actinobacillus porcitonsillarum
  CDS (1)..(2049): transl_table=11
atggaacccaataaaaataaggatcttggtttagctgcacttaaaattcttgctcaatatcataatatttcagtcaaccccgaagaattaaaacataaatttgatctagatggaaaaggtttgtctttaacatcatggttaatcgcagcaaaatcattagatttaaaagcaaaggctattaataaagccgttgagcgtttaccttttgttaatttacctgcacttatctggagggaagatggaaaacattttatcttagtaaagatagataaagataaaaaacgctatttaacctataacttagaggatgatgcgcctaaaattttggaggaaagcgagtttactaatttataccaaaataaaattattttaatgacctctagagcatctattattggtcaacttgcaaaatttgattttacttggtttattcctgctgtcattaaatataggaaaatttttattgaaaccttgatcgtttctgtttttttacaaattttcgcactaattacaccgctatttttccaagttgttatggataaagtattagttcataggggattctcgactttaaatgtcattactattgctcttgcaattgttattgtatttgaaattatcttaaatggactaagaacttatatattttctcatagtacaagtagaattgatgttgaattaggagcaaaacttttccgacatttattagcactaccaatttcttattttgaaaatcgaagagttggagatacggttgctagagtaagagaattggatcaaatccgcagttttttaacaggacaagcgcttacatctgttttagatcttgttttttcgtttattttctttatcgttatgtggttttatagcccaaaacttacgatagtcattctttgttcgctaccattctatatattatggtcattattaatcagtccaatacttcgtcgtagattagacgagaaatttgctagaggagctgataatcaatcctttttagttgaatcagttagtgcaataaatacaattaaagcaatggccgttactccacaaatgactaatatttgggataaacaattagctggttatgtagcatcaaattttcgagttactgttttggcaactatcggtcagcaaggtgtgcaattcattcaaaaaactgtcatggtaataaatctttggcttggtgcacatttagtaatttcaggtgatttaagtataggaaaacttattgcatttaatatgttatctgggcaagttattgctcctgttattcgtttagctcaattatggcaagactttcaacaggtcggtatttcagtgactcgtttaggtgatgtattgaatgccccaacagaaagttataaaggcaaattatctctacctgaaattcaaggtgatatcacattcaagaatattaattttagatacaaacctgactctcctactattttacgtaatgtttctttaagtattaaaaaaggagaggttatcggaatagttgggcgttcaggctcagggaaaagtaccttaacaaaattattacaacgtttttatattcccgagcaaggtcaaattttagttgatggacatgacttagctttagctgatcccaactggctacgccgtcaaatcggtgtagtactacaagataatgtgctatttaatcgctctattagagaaaatattgcactcacggatccaggaatgtcgatggaaaggattattgcagccgctaacttagctggtgcccatagcttcatctctgaattaaaagaaggatacgatacaatagtgggtgaacaaggggctggtttatcaggagggcaacgacaaagaatagcaatagctagagcacttattaataatcccaaaatactaatttttgatgaagctaccagtgcattagattatgaatcagaacggattattatgaataatatgtccaaaatcagtgaaggaagaacagtaataattattgctcatcgattatctacagtaaaaaatgcagatcgcattattcgtgatggaaaagggagaaattattga

SEQ ID NO: 60180 - protein, 682 aa, Actinobacillus porcitonsillarum
MEPNKNKDLGLAALKILAQYHNISVNPEELKHKFDLDGKGLSLTSWLIAAKSLDLKAKAINKAVERLPFVNLPALIWREDGKHFILVKIDKDKKRYLTYNLEDDAPKILEESEFTNLYQNKIILMTSRASIIGQLAKFDFTWFIPAVIKYRKIFIETLIVSVFLQIFALITPLFFQVVMDKVLVHRGFSTLNVITIALAIVIVFEIILNGLRTYIFSHSTSRIDVELGAKLFRHLLALPISYFENRRVGDTVARVRELDQIRSFLTGQALTSVLDLVFSFIFFIVMWFYSPKLTIVILCSLPFYILWSLLISPILRRRLDEKFARGADNQSFLVESVSAINTIKAMAVTPQMTNIWDKQLAGYVASNFRVTVLATIGQQGVQFIQKTVMVINLWLGAHLVISGDLSIGKLIAFNMLSGQVIAPVIRLAQLWQDFQQVGISVTRLGDVLNAPTESYKGKLSLPEIQGDITFKNINFRYKPDSPTILRNVSLSIKKGEVIGIVGRSGSGKSTLTKLLQRFYIPEQGQILVDGHDLALADPNWLRRQIGVVLQDNVLFNRSIRENIALTDPGMSMERIIAAANLAGAHSFISELKEGYDTIVGEQGAGLSGGQRQRIAIARALINNPKILIFDEATSALDYESERIIMNNMSKISEGRTVIIIAHRLSTVKNADRIIRDGKGRNY

SEQ ID NO: 60181 - DNA, 3942 bp, Rhizopus stolonifer
  CDS (1)..(3942)
atgaaacgagaccatagtacatcaaggtcttctgtcactgctcaatcagatagtggagacacccaattgaatacaacagaaaatcacgatgaaaaaatacttttacaacaagaaattgcagccgcagaacgatcagacgtaaaatcagaagagactgataagaaaaagaagaaggaaaaacaactctcagtcccaatctataaaatttttcgttttgctactaaactcgagttgttaatgatttgcattgctgccatcttttcagcaggtattggtgctatgcaaccaatctcgattatcatctttggacaattcatgacaaccatttctactgcaatggcaagtggtgattatcaagctctggtcgatgctacccatccactcgtcttgatctttgtttacatgggaactgccgttcttgtctgtgcttacattgcccaatgcttctgggttttaactggtgaaaaccaagtccgtcgaatccgaaacttgtacattcattctattcttcgacaagacatgtcctggtttgacaaggccgaagaaggctcactcactacccgtttagccaccgacacacagctgattcaagacggtatttctgacaaattcggtctgttggtgatgtgtattggtcaattcttggctggttttattatcgcctttgtcaaaggttggcgtttggctgtagttatcttggctaccattcccttgctggccggtactggtgctgccatgggttatttcatcaccaaatatacactcaagtctcaagatgcctatgccgaagctggttctgtagctgaacaagttttctcgggtattcgtaccgtctattcgttttctctccaaaaccgttttgcagaactctattcaaatcgtctggaaaatgcaatgaagaccggtattcgacgtggacaagtgcttggctttggttttggtggctttatgtttgtgctcttttgtacttatgctctctcgttctggtacggttccaagttgacgcgtgagatgatcatgacaggttcagatgtcttggtggtcttttttgcaatgattattggtgccatggccttgcttcagttaccgcctaatctgtctgcagtctctagtggatgtggtgcggcttacaagatttacagtacaattgatcgtgtacccgagattgatcctgatagtcaagaaggattgaagccccaaagctataatgccaatttggagttcagagacgtcatgttcaagtaccctacacgtcccgatatcacaatcttaaaaaagttgaacttgaccattcgtcctggtatgactgttgcctttgtgggtccttccggttctggtaaatcgaccagtgtacaattgattcaacgcttttatgatcctaatgctggttctgtctttttggatggtcacaatcttcgtgattacaatgtggcctggcttcgtagtcagatcggtgtggtcagtcaagaacctgtgctctttaacatgtccattaaacaaaacttgcttatgggtatcagcaagcaggtgtctaatgatgaaatcgtggatgcttgtaagaaggccaattgtcacagctttgtttctcaattgcctgatggttatgatacaatggttggtgaacatggtggtatgctttctggtggtcaaaaacaacgtattgctattgctcgtgctattttaaagaatccccctattttgttattggacgaggctacctctgctttggatactcaatctgaacgtttggtacaagccgctttggatgccgcctctgctgaccgtactactattgttattgctcatcgtctgtctactattcgtaatgctgatctgattgtggtgatgcatcaaggtgatttggttgaacaaggtagccacaatgagctactcgctctgaacggtgtctatgctgatttggtcaagaagcaagaaatcgctaccaaacaagtcggtacagttactgaagaacctgattctgaagaactcttgagacgcgaagaaagggaaattgcccaagaaaagcaacgcgctgctgaagaattggatgaaaaggacacgaacgatcatcttttccgagtgactactggtgcctcttctgtggatgcttatgaactcaaacgtcgtaaagaaaaagaagaacgcaaaaatgcaaagaagcagagtattcctatgggtaaagttttgaaccaaatgcgtagtgagtggcacttgttggctattggtgtatgcggtgctgctattgccggtgctgttttcccttgttttgccttgatttttgctcgtgtgattgctctcttgatttctcctgatatgtcccctcctggacctatgagtggtaccaacctctattcgttcttgtttgtggtgattggtatttgtgctttcattggtttttctagtcaggtgatctcgtttgaagtggctggtgaacgctacaccaagcgtcttcgtagtgatatctttcgtgcttttatgagacaagaaattggattttttgatcacgatgataactcgcttggtgctcttacttccagattggctattgactccaagaatgtaaatgaattggttacaaagacatggggtgatattactcaaatcattgttactgccatcacaggtttgtctatcgctttctctcaaacctgggccttgactctcgttattctctgtatgactccctttatcgcctttgccactggttatgaatctaagatccaccgtgggtttgaagacaagaccaagaaggccaacgaacaatcaggtgaagtagcaggtgaagccatcaaggagatccgtaccgtgaccgccctgaacaagcaaaactttttcgaaaccaaatatcatagagccactgatcatcctcacaagctcgctcaacgcaaggcttacatgtcctctattggttacgccctccaacaaggtatcactctttacaccaacgccgtagccttttacgcgggtatccgctttatggccaacggaatgattgatttccaacaaatgtttacttgtatgatggccatcatgttgactgcacaaggtgttggccgtgcctctgtatttacctccactctttccaaggccaaatactctgccattgccgccttcgatattctcgaacgtgaacctgagattgatcccgatttggagggaatcgaacctgctcatagtcagatcaatggtgacattgcctttgaaaacatcactttccgttaccctgcacgtcccgacacttctatctttaacggcgaatttaatctgcacggcaaaagtggacagaccattgcactcgtgggaccttctggatgtggcaagtcgactacgattggtatgcttcagcgatggtacgatcctatctctggtacagtccgtttggatgataacaatgtcaagaactactcgcttaacaaccttcgaagccacatggcattggtgggacaagagcccatattgtttgatatgacgattggcgagaacattagttttggtgtagatgaatccatccaggtcacccaagaacaaattgaagatgcttgtcgtgcatccaacattcataagtttattgtcggattaccacaaggttatgatacgcgtgtgggtgataaaggatcgcaattgtcaggtggacaaaagcaacgtattgccattgctcgtgccttaattcgtaaacctcgtgtgctcttattggatgaagctacttctgctcttgattctgaaagtgagaagttggtacaagcggccattgacaatattctggaagaaggaggacgtacgacgatcactattgctcatcgtttgtcaactattcaaaacgctgatttgatttgtgtggtcaagaatggtcgtgtgattgaacaaggtactcactgggagctcttgaaattgagtggtgtctatagtgatctggtctaccaacaatctctcaacgctcattaa

SEQ ID NO: 60182 - protein, 1313 aa, Rhizopus stolonifer
MKRDHSTSRSSVTAQSDSGDTQLNTTENHDEKILLQQEIAAAERSDVKSEETDKKKKKEKQLSVPIYKIFRFATKLELLMICIAAIFSAGIGAMQPISIIIFGQFMTTISTAMASGDYQALVDATHPLVLIFVYMGTAVLVCAYIAQCFWVLTGENQVRRIRNLYIHSILRQDMSWFDKAEEGSLTTRLATDTQLIQDGISDKFGLLVMCIGQFLAGFIIAFVKGWRLAVVILATIPLLAGTGAAMGYFITKYTLKSQDAYAEAGSVAEQVFSGIRTVYSFSLQNRFAELYSNRLENAMKTGIRRGQVLGFGFGGFMFVLFCTYALSFWYGSKLTREMIMTGSDVLVVFFAMIIGAMALLQLPPNLSAVSSGCGAAYKIYSTIDRVPEIDPDSQEGLKPQSYNANLEFRDVMFKYPTRPDITILKKLNLTIRPGMTVAFVGPSGSGKSTSVQLIQRFYDPNAGSVFLDGHNLRDYNVAWLRSQIGVVSQEPVLFNMSIKQNLLMGISKQVSNDEIVDACKKANCHSFVSQLPDGYDTMVGEHGGMLSGGQKQRIAIARAILKNPPILLLDEATSALDTQSERLVQAALDAASADRTTIVIAHRLSTIRNADLIVVMHQGDLVEQGSHNELLALNGVYADLVKKQEIATKQVGTVTEEPDSEELLRREEREIAQEKQRAAEELDEKDTNDHLFRVTTGASSVDAYELKRRKEKEERKNAKKQSIPMGKVLNQMRSEWHLLAIGVCGAAIAGAVFPCFALIFARVIALLISPDMSPPGPMSGTNLYSFLFVVIGICAFIGFSSQVISFEVAGERYTKRLRSDIFRAFMRQEIGFFDHDDNSLGALTSRLAIDSKNVNELVTKTWGDITQIIVTAITGLSIAFSQTWALTLVILCMTPFIAFATGYESKIHRGFEDKTKKANEQSGEVAGEAIKEIRTVTALNKQNFFETKYHRATDHPHKLAQRKAYMSSIGYALQQGITLYTNAVAFYAGIRFMANGMIDFQQMFTCMMAIMLTAQGVGRASVFTSTLSKAKYSAIAAFDILEREPEIDPDLEGIEPAHSQINGDIAFENITFRYPARPDTSIFNGEFNLHGKSGQTIALVGPSGCGKSTTIGMLQRWYDPISGTVRLDDNNVKNYSLNNLRSHMALVGQEPILFDMTIGENISFGVDESIQVTQEQIEDACRASNIHKFIVGLPQGYDTRVGDKGSQLSGGQKQRIAIARALIRKPRVLLLDEATSALDSESEKLVQAAIDNILEEGGRTTITIAHRLSTIQNADLICVVKNGRVIEQGTHWELLKLSGVYSDLVYQQSLNAH

SEQ ID NO: 60183 - DNA, 1908 bp, Streptoverticillium netropsis; identical to SEQ ID NO: 7595
  CDS (1)..(1908): transl_table=11

SEQ ID NO: 60184 - protein, 635 aa, Streptoverticillium netropsis; identical to SEQ ID NO: 7596

SEQ ID NO: 60185 - DNA, 4968 bp, Cryptococcus neoformans var
  CDS (1)..(4968)
atgtccgtgtgcctgtcgctgtgcctttttggtgtgcctgaatgccgtcttttgttctttcggtggaggacaaagagggacgaaaaacaaaaagacacgatgatccagccgggggggggggggggagatggagtgtccataattgcacccgcctcttctgcacctatacaagccccccagccgttggcccatctctacgccggagcccccatgtccaccagcagccgctttgcgtcgccggacagagtcgagctcgtcgcgctcacaccacgccagctgccgcccacgtccgacggctcgcctttccacgaccggcattcagtggctacgcctgtggccagtatggcggaggaaagcgacgggctgtcgggctacggctatggaaggagccgccaaaagacagcgccaggctaccagttcgccaacccttctcccgctggcctagacgaaaaacgcggccagccagtctcttttggcccaatgctggacgaaatcacgcctccgtcacaatggagaaggtcattatacccagctgatgcgccgcccatcccggcttcaacgtttgagcggcacctcggcctcgtccctcttccaacatccccggccacgtcccatcgcatcatgccagtttctgagcctattaaacccaggttccgtcggctctttgtcttcaccaccaccagagactatatcttgcttctctgcccagcggttgtgctttccattctctcggcactcatccagccctacatgtccatcgtgatcggtaacgccttcgccatctttgcagcctatcccctgaatacctcgctcgctaccgatgccgaccgtgctgccctccgcagtggtgtcgccagcacgtctatacaactgacagtcgccggcgtgcttgccttgctcttcaactacttgaaaggggtcatgtggacgagatacggcgagacagtggcagatagattaagagccaaggtctatcatggtgtgcagggtaagcctatggagtggtatgatatgggcatgggtatgagagaagaagagcaaggagagggaaaggagaatgacaccgtaggcgctggtggcttaatgtcaaagttcaacagggagaccgatgatgttaggatggccacttcccacgcctttggattagtggttcaaaacacattcactttcgtcctgtgcttcatccttgctatcattgaatcgccatctttggctttcgttaccctctccaccattccccttgtcgtccttacccaagtcgttacccagatcctttgcgcgcctctgttggctaccgaacgacgcgtgcttgccgaggcctccaccaacgtcgagcgtgccaccgctgcaatttctacagtcaaagtacacaacgctcaagcagccgaagaaaacaggttcatgcactcggtgagcaagagcaaaggtaatttgatcaaacaaggattggtgtggggcgtatccgcaggcttgacagactttttcttgctcggaacgtttgtgctcggattctggtatggcgccaaaatcattcgggaaggcaaggccacatcaggagccgtcatgacatgcttctgggcttgtctctttgccgccacgtaccttcagcaggttgtcccccagctcaccataatgaccaagggcaaaaactcgatcgcttcgctattgacagtcattcaagctaacccttccagacccatatctggcaacccattctcccctacaaactctccaattgatagtagcttctctcctgcggttaatacattgaaccccaagcgtgtttcccgccctcttgctctccaaggggttcgaccttctcgatgccatggagagttcaatttcaaccacatctcatttgcctatccatctcgcccggaaaatcctgtactttgtgatatctcccttttcattccgcctggggaaacaacctttatcgtgggcggttcaggctctggcaagtccaccattgctcagctactcctccgactatacgaccccacgtcaggagagattactatggataaccaatctttccccttcttgaacggtcatttcacaagagaaaatatcgctgctgtacagcaaggctgtattcttttcgatatgtcggtgcatgacaatgtcgctatggggcttgctggcgctggtgccgatcccaagacaggcgtgaaaagggcaccagaggacgtgacccgtgaacaagttgtagaggcttgtaaaatggcgatgattcatgatttcgtggtgagcttgcccgacggttatgataccatcttgggaaccggtgggtcgagtttgagtggaggacagagacagcgattggcgattgcgcgggcgagaatcagaaacccgaccgtcctcatccttgatgaagcgacatcggctttggatgccacttctagggtgcttgtcttccaaaatctcaaggcgtggcgcaataaccggaccaccatcgtcatcacccacgacctttcacagatcgtttccgacgactttgtctacgtcatgaaaaacggcgtcgtcgccgagcaaggatttcgtcttgatctcatgaagaaaccaaacggcacgtttgcccatatggcggcggaacaagccgtcaatcctttgccggccaaggaggtcgcgtctgacgcagagtggcatgatgcgctcaacacactcctcgacatggaggaagattatgaagaggtgctcgacagcagggtcagatctcacactccttcatttcttgggatgcagagaaatagtgcagtctatctcgatatccttgacgagtactccaggagtcagcgcctttctcaagtcgaccgccgacagtctcgtactagcttgacacccgctcagaagcgtctatcatggactcctgagcagctgggcagtcgtgcccctagcagacagagtataaccgctccgatcagtcgccctccgtctagccagatgagtcgacccgtgagcaggttaagcgtcgtcgtcgattcaaattcgaggctaagcttgaggaccatgatggcggagagccgaggacaagatggaagaatgcttcatccgggctggatggaaaaaaattcatcctcaaggataagcgcaattaggcaaaggcagcaaagaacactctctgagaatctagaagacgacttgaaaggcctgccttccgatgtcaacctttccgacagcgttcttgttgaagaggtctccacaggctcagccactatgccaccggttccaggcttatcttctctcatcaaactctatttcccaacacttccagctaagccacttctcctgcttggctgtataggttctatcggtcacggagcgacaactcccatctggtcattcttcctttccaagctgatgactatcgttggagcaggtggtgctgataccacctctctcaccaaatacggtctcatagtcctcggcttgtgtgccgcacaagggctgtcgaactgtgttcaggaatatgcccttgttggactctctgctagatggacccatatggtacgcggggtcgccatgcataagctcatcacgcaagacaaggcattctttgatctttcatccaactcgccctctcgactggtccagatcctcatcaaagatgccgacgacgcgagaaccattatgagtcaagtaatcggtagggcggtgactgtggtgaccatgatcggtttgggtttgatttgggcaatggctgtggaatggaggttgactctgataggcttggccttgggtccaattttcggcggattcatggcggttaactcatggttcattggtaacgtcgagctggcttgcaaagttgcaagagaggaggtgggaagagtgttctatgaaagtgtagccaacgtcagggggatccgagcgatggcgctcgacagtgcttttgaaaaaaggttcgaggaggatgctagtaatgctaggaagaccggtacacgttcggcatgggctatggccatgggtggagcgattgcaggaggattgcctttgtttgctcaagctctcatgaactttgccggttcagcttttatgctccaagggcgcatgaactacgagcagatgttacaagtatataaccttgtactgttcagcctaacttttggcagtggtatgcttgattttatccctaccatggccaaagctcgagcagctgctcgggactttaaccgcatatatcagctatgcgaatccaccaccgaatcaatcggttcacttcgctttcccatcaatggtcacgtcgagttctctcatgtcaatttctcatacccctcgaggcctgatgttcccattcttaaagacgtgtcatttacgttcaaacccggagagtgcgttgcagtcgtcggtccttccggctccggtaaatcgactatcgcagctcttctgcaaaggctatatgtgccagatggtggcgacattcgcttgggcgatcgtagcctgagggaagcggatgttgtatggctacggaatcatgttgctgttgtatcgcagtcggccaatctctttgatgccaccatcgccgaaaacattgcctatggatcacccaatttgcccctttccgagatctacagagctgccgaagctgccaatatccacgacttcattcagagtctaccgcagggctatgaaacgaatctcggagaaaacgccagtttgatctccggcgggcaagctcaaaggctgcaaattgcgagggcgttatgtagaacaagcagggtcctcatcttagacgaatgtaccagcgcattggatcccgacaacgctagggctgtattggacacgattgtcaagatcaaacaggaccgtacaacaatcttcatcacccattcagtcgaggccatgaaacgctgcgatagaatcatttgcctcggagaaggtagagtacaggaggaagggtcatttgaagaactcgttaggaagggaggggtatttgctcagctgatgaagacgggagaatgggagtaa

SEQ ID NO: 60186 - protein, 1655 aa, Cryptococcus neoformans var
MSVCLSLCLFGVPECRLLFFRWRTKRDEKQKDTMIQPGGGGGDGVSIIAPASSAPIQAPQPLAHLYAGAPMSTSSRFASPDRVELVALTPRQLPPTSDGSPFHDRHSVATPVASMAEESDGLSGYGYGRSRQKTAPGYQFANPSPAGLDEKRGQPVSFGPMLDEITPPSQWRRSLYPADAPPIPASTFERHLGLVPLPTSPATSHRIMPVSEPIKPRFRRLFVFTTTRDYILLLCPAVVLSILSALIQPYMSIVIGNAFAIFAAYPLNTSLATDADRAALRSGVASTSIQLTVAGVLALLFNYLKGVMWTRYGETVADRLRAKVYHGVQGKPMEWYDMGMGMREEEQGEGKENDTVGAGGLMSKFNRETDDVRMATSHAFGLVVQNTFTFVLCFILAIIESPSLAFVTLSTIPLVVLTQVVTQILCAPLLATERRVLAEASTNVERATAAISTVKVHNAQAAEENRFMHSVSKSKGNLIKQGLVWGVSAGLTDFFLLGTFVLGFWYGAKIIREGKATSGAVMTCFWACLFAATYLQQVVPQLTIMTKGKNSIASLLTVIQANPSRPISGNPFSPTNSPIDSSFSPAVNTLNPKRVSRPLALQGVRPSRCHGEFNFNHISFAYPSRPENPVLCDISLFIPPGETTFIVGGSGSGKSTIAQLLLRLYDPTSGEITMDNQSFPFLNGHFTRENIAAVQQGCILFDMSVHDNVAMGLAGAGADPKTGVKRAPEDVTREQVVEACKMAMIHDFVVSLPDGYDTILGTGGSSLSGGQRQRLAIARARIRNPTVLILDEATSALDATSRVLVFQNLKAWRNNRTTIVITHDLSQIVSDDFVYVMKNGVVAEQGFRLDLMKKPNGTFAHMAAEQAVNPLPAKEVASDAEWHDALNTLLDMEEDYEEVLDSRVRSHTPSFLGMQRNSAVYLDILDEYSRSQRLSQVDRRQSRTSLTPAQKRLSWTPEQLGSRAPSRQSITAPISRPPSSQMSRPVSRLSVVVDSNSRLSLRTMMAESRGQDGRMLHPGWMEKNSSSRISAIRQRQQRTLSENLEDDLKGLPSDVNLSDSVLVEEVSTGSATMPPVPGLSSLIKLYFPTLPAKPLLLLGCIGSIGHGATTPIWSFFLSKLMTIVGAGGADTTSLTKYGLIVLGLCAAQGLSNCVQEYALVGLSARWTHMVRGVAMHKLITQDKAFFDLSSNSPSRLVQILIKDADDARTIMSQVIGRAVTVVTMIGLGLIWAMAVEWRLTLIGLALGPIFGGFMAVNSWFIGNVELACKVAREEVGRVFYESVANVRGIRAMALDSAFEKRFEEDASNARKTGTRSAWAMAMGGAIAGGLPLFAQALMNFAGSAFMLQGRMNYEQMLQVYNLVLFSLTFGSGMLDFIPTMAKARAAARDFNRIYQLCESTTESIGSLRFPINGHVEFSHVNFSYPSRPDVPILKDVSFTFKPGECVAVVGPSGSGKSTIAALLQRLYVPDGGDIRLGDRSLREADVVWLRNHVAVVSQSANLFDATIAENIAYGSPNLPLSEIYRAAEAANIHDFIQSLPQGYETNLGENASLISGGQAQRLQIARALCRTSRVLILDECTSALDPDNARAVLDTIVKIKQDRTTIFITHSVEAMKRCDRIICLGEGRVQEEGSFEELVRKGGVFAQLMKTGEWE

SEQ ID NO: 60187 - DNA, 4035 bp, Aspergillus fumigatus
  CDS (1)..(4035)
atgcaaaaagtgaccaggcatattcccaccaaggacgacttgggcaagtccttcgcctatttgcggctcctcttttccttggactacacgatcgccgatgttctgctcataattgggggcttattattcgccatttgcgccggtattcccttccctctactcggtatcgtcttcggtgacctgatcaacgacctgaatacggtgacgtgcagttcctcggatcgcgctactgcggacctctcctcggctgtgcgggcgaaggtgttgtatgtcatctacatcacaattgcaaacttttgtttcatctacgcccacagcacttgctggtgtttggtgagtgagcgcctggcacgccgctaccgtcgccgttactttgagagcattatcaaacaggaggccaaattcatcgaatcacttccttcgggtgacgttgtttcgcgtctggtcagtgacattgaacttgtgcagtcgggcacgtcggagaaggtgggactcgtcatctcaactctgtcatactttgtggctgcctatgtggttgccttcatcaaagtgcccaagattgcaggcatgctagtctctgtggttccttgtttcttcttgatggcacttggcggagggcattacatcaagaaatttgcgggtcgtctggccgagaaagtcaatgcggccacatccatagcttcctccagtttgtcacacctgacacttgttcatgccttcaatgcgaacgaccggctcgagaagcgtttcgcgggctacctcttgcaatcgaggaaagacgcggttcgaaaagctactactcacgcggcacaattgggctgtctttacttcattgcctattccgccaacgccctagcattttgggaaggatcccaaatgatctcaaaatcggtggccgacggaaactctggaacctctgtcggtgcggtttacaccgttatcttcgtcctcattgacgcatccttcattctcagtcaggtcgctcccttcatccacgtgttcgcctcggctgcaggcgcttcagagaggcttttgcaggtgatcaacaggccttctgccattgatgggacgtctgattcaggcgataagactgccgcatttggtgaggaggatattcgctttcgggatgttcacttcaagtacccctcacgcccggatgtccctgtcctgcaaggagtgactttcaacatcccgcccaaaaagcatacagcgattgtgggtccttctggcggtggaaagtcaacagttgttgcacttctagagcgcttctacgatcccgattcaggggatgttctgatcggcgacaagaatttccgggacataaatgttagatacctgcgcgggaatatcggctatgtacaacaagaaccttcgttgctggatcgtaccattctggaaaatattgcatatggcttagtgtcgtctgcgatggagcggcatcagcggctcgccccctttatcctcgactcgagtctgcctgatcttgccgaaaaaattcgagagggccttacagagaaggaagcactccgcgagtacgacagttgtgtcaccgagattgtggacttggtcaaagaagcggctgccaatgcgaatgcgcttggctttattgaagcactgccctatggtttcgccacaaacgtaggtacggcagggaatcagctgagcggtggccagaagcaacgaattgctctcgcccgtgctctggttcgagaaccatgcctgttgattttggacgaggcaactgcggctcttgattcgaccagtgagcagcttatccaggccgcattgaacagggtatccgagcgagttacgactgtatcaatcgcccaccgcctagcaacagccaaaaatgcgcataagatcgttgtggtccagagtggccgtgttactgaggaaggatcccacacggacttggtttcgcggggaggggtctacgcagagatggtgcggcttcagaacctgggaaagctatctctagacgatagggtaatctcgggagacatgatcagtgcactgaacgcaactcctgaaacacgacagttgttggacgaaaaacaagcttttgtcgatggtaacaggtcagacatcacggaggacacggttgttgctgacacaccgtcggactcccgcgatggaagtgaggaggaagccagaaagaaaaggaagagaacacggtctgcagggttcgtcacacggtacaccttcgccttgatccgtcccaacttgcattgggttctgctaggtcttgccatgtctgtcattatcggcggcagctactcggcagaggctattgtatttggtcacacggttggaagcttgagcccttgcaggtctgccgaagctatcagccgcgatggcaacctctacggattactcttcttcatcctcgctttggtcgagttcggtgctaatgtggtgggtggctgtgctttcggctgggctgccgataaagtgttgtaccggatccgagtgctgtctttacgctcgctactgggccaaaccgtgaaatggcacgaatcggaggatcgcacccctgggacgttgctcacatacatcactggtgacgcatcggcgttgggtggcattactggcacaaccatagggctcctgctggcgactgctgtcaacctgataggaggtttagtgatctcgttctcaattgcttggaagatcacaattgtattgtttcccacaattccagtcctgctggtgtcaggcatgatgaaactccgagtgcaaaaacaactcgccgaacgtcatcagaaggcgtttgcgaaggctacagctgtcaccattgaggccgtcgacaacatccgcgcagtttctgcattctctctggagaagcaatcgtaccaggtttatggtcgtgcacttcgaggtccctaccgggctaccatcaaagccacgttccacgggaatgcatggttagcattggcatttagcatcagcaacctggtctatgccctagcgtactggtggggttcgaaacagatcgccgagggtcgctattcccaaacgcaatttttcattgtcatgccagctctgttgtttagcacgcagtcttgtgggcagatgtttgcccttgcgccggatatctcgaaagccggggtggcttcgtccaatatcgtcgaactgctgactacccgttcggcagaggatgaagtgacacctggatcatcgcacagcttccagccttccagcagtcttctcgaggagaagaccgcagtgcaggacatcgaggcgcaggaatatgctcgctccacacggcaacgtgccgctgaaaggggaggcatgggcgcccaactgcgcgatgtccattttacttatccacatcgcccagagcgcccggtcctgaagggtctcaacattgacatcaaaccaggtcagttttgcgctctggtggggcccagcgggtcaggcaaatcgaccacgtttgccatgctggagagattttaccggcctaatgccggtgcagttgtcatcgacggtgtggacgtcactcgtcaggtcgggacagagttccgcgatgatattgcgctggttcctcagcagaacattctcttcgagggaactgttgccttcaacgttgcacttggcgcatgcccaggccacgagcccacacaagaggagattgaggaggcatgtcgcatggccaacatccacgatgtcatcatgactctgccccaggggtatcagacgatgtgcagccatgacggcaagcagttttcgggtggacagcgccagcgactgtcgattgcccgcgcattggtgcgcaagcctcgcttgctgctgctggacgagtcgacaagtgcgctagacgtggaatcggagaagcgaattcaggaagcgctggcgaccctggcaggccggaccacagtagtggccatcgcgcatcgactgaataccattcatcgggccgatcagatcttcttgatcgaggacggcagatgcattgagcaaggtacacaccagcagctgatccagcggagcgagacataccggacgagtgtgattcaccaatcgctggaaacttga

SEQ ID NO: 60188 - protein, 1344 aa, Aspergillus fumigatus
MQKVTRHIPTKDDLGKSFAYLRLLFSLDYTIADVLLIIGGLLFAICAGIPFPLLGIVFGDLINDLNTVTCSSSDRATADLSSAVRAKVLYVIYITIANFCFIYAHSTCWCLVSERLARRYRRRYFESIIKQEAKFIESLPSGDVVSRLVSDIELVQSGTSEKVGLVISTLSYFVAAYVVAFIKVPKIAGMLVSVVPCFFLMALGGGHYIKKFAGRLAEKVNAATSIASSSLSHLTLVHAFNANDRLEKRFAGYLLQSRKDAVRKATTHAAQLGCLYFIAYSANALAFWEGSQMISKSVADGNSGTSVGAVYTVIFVLIDASFILSQVAPFIHVFASAAGASERLLQVINRPSAIDGTSDSGDKTAAFGEEDIRFRDVHFKYPSRPDVPVLQGVTFNIPPKKHTAIVGPSGGGKSTVVALLERFYDPDSGDVLIGDKNFRDINVRYLRGNIGYVQQEPSLLDRTILENIAYGLVSSAMERHQRLAPFILDSSLPDLAEKIREGLTEKEALREYDSCVTEIVDLVKEAAANANALGFIEALPYGFATNVGTAGNQLSGGQKQRIALARALVREPCLLILDEATAALDSTSEQLIQAALNRVSERVTTVSIAHRLATAKNAHKIVVVQSGRVTEEGSHTDLVSRGGVYAEMVRLQNLGKLSLDDRVISGDMISALNATPETRQLLDEKQAFVDGNRSDITEDTVVADTPSDSRDGSEEEARKKRKRTRSAGFVTRYTFALIRPNLHWVLLGLAMSVIIGGSYSAEAIVFGHTVGSLSPCRSAEAISRDGNLYGLLFFILALVEFGANVVGGCAFGWAADKVLYRIRVLSLRSLLGQTVKWHESEDRTPGTLLTYITGDASALGGITGTTIGLLLATAVNLIGGLVISFSIAWKITIVLFPTIPVLLVSGMMKLRVQKQLAERHQKAFAKATAVTIEAVDNIRAVSAFSLEKQSYQVYGRALRGPYRATIKATFHGNAWLALAFSISNLVYALAYWWGSKQIAEGRYSQTQFFIVMPALLFSTQSCGQMFALAPDISKAGVASSNIVELLTTRSAEDEVTPGSSHSFQPSSSLLEEKTAVQDIEAQEYARSTRQRAAERGGMGAQLRDVHFTYPHRPERPVLKGLNIDIKPGQFCALVGPSGSGKSTTFAMLERFYRPNAGAVVIDGVDVTRQVGTEFRDDIALVPQQNILFEGTVAFNVALGACPGHEPTQEEIEEACRMANIHDVIMTLPQGYQTMCSHDGKQFSGGQRQRLSIARALVRKPRLLLLDESTSALDVESEKRIQEALATLAGRTTVVAIAHRLNTIHRADQIFLIEDGRCIEQGTHQQLIQRSETYRTSVIHQSLET

SEQ ID NO: 60189 - DNA, 3792 bp, Leptosphaeria maculans
  CDS (1)..(3792)
  misc_feature (318)..(318): n is a, g, c or t
atggctgagcccgagagcgagaagcccagttcagcccagggcggcggactgccctcctctgaccaccccctcaaccccattctgcagcgccagattgagctgcccgaaatcaaaatcaactacttctccctctttcgatatgcgaccgtcaaggagtatgccctgctgctcatttcggccttctttgccgctgtttctggggccatgttccccctgctgattcttttcattggtaacctcgtgcaagtcctcaaggatttcaatcttggcacaataccgcaagaacagctcagtgagcagattcgcgatattgctctntacattgtctaccttttcctcggtcagctggtctccgtcttcatcttcaccaacggctgccttctcgtcggcgaggccatcaccaatgccattcgcgaaaagtatgtccgctccctcttccggcagaacattgccttcttcgacacctacggatccggtaaaatcacctcccagctcacctcgagcacggcaaccattcaagatgccatatcacacaagattggcttgtttgtcagcgcctgctcctgctttgtcgcctcctacgccattggtttcgtcaagcactggaagctcaccttcatcctgacctccaccgtcgtcgccatcacgggcgtcatgatcatcatgtccggcttcatggccaagtttggagccaattcttccggtgcgcttgcagaagcttcggcaaagctcgaggaaacctttagcggtatccgcgtcgtcaaggcccttggcttagagaaacgcttatccgacgaactggatccacagctcctcaacatcgagttctggggtaagcgagtgagacatgtcatgggatggatgttggccatcatgtacggtctcatctttctcaactatggattggccatatggcagggctataggttcatgcaaggcgggacagaagacgtcggtgccatcatcaccgtactcatgtgtctcaacattggagcgttcttgttcggcaacgtggggccccatcttcaggccatgagcctcggagccgctgccgcccaagacatattcgccgtcattgagcgtgagtcggttacggatggcggcgcgccgcccggatcattcgaggtcgaaggaaacattgaattccgcaacgtcagccatgtctatcccagccggccagacacacacgtcctccaggatttcagcatgatcttccccgctggcaaagtcacggccattgtcggcgcctctggtagcggcaagagtaccattgtcagcatcttggagaggttctacgaacctgtcagtgggcaggtcttcctggacggccacgacatcacccacctcaacgtgcaatggctcagacagcagtttggcttggtcggtcaggagcccgtgctcttcaacggatccatcttcaaaaacgttgcgtacggtctcaaaggtacacaatatgggcaagaatcgagggaggtcaccatgaagctcgtgaccgaagcttgccgtattgccaatgcgcatgacttcatcactgcccttcctcacggatatgatcaagaggttggcattcgcggcgcttctctcagcggcggccagaggcagcgaattgccattgcacgagccattgtgtcgggtccaaagattctcctgctcgacgaggctacctcagcactcgatgtccagtccgaagaggcggtccaattgggactcaacatggcctcttctggtcgcactaccattgtcgtcgcccattcgctgtccaccatcaagctcgctgacaacatcatcgtcatggaaaaaggtcgggtcgctcagcaaggaacccatgccgaattggaggctcaggaaggattgtaccaaacattcgtgcgcagacaacaattgaagcaagccaccttggaaccaccccatgctcgcatcacgcccgctgtcgatactcctgcttccccgcaacatcgtctctcggagaagactggcagtatctatggacaaggcgaatcggaagcagccgacaagagtccctctacaaagtactcgtttgtgcagctcgtcaaatttgttgctaggttcaacaaggaagattggcgattgatggtgacaggaatagcgagcgccgtcatttccggtgccgtatggccggcccacagtgtattctttgccaaagctattgtcgcgctttcttctccgtcacctgcatctctggctcgaggtccaaacttctgggctgccatgtacgtcatgctagcttttgtgcagatcgccagtcagggagttcagggcagtgcattcgcaatctgtgccgaacgactgatactgcgtgctcgtcgcgtagctttcaaataccttctccgccaggacgtggagttctttgacgatcctctgcactcttccggcatcatgaccagcttcgtcagctctgatgtcaatgccctcgcgggattgagcggcgtcttcctgggaaccctgttcagtgcaacggcaacggttttgggaggcttgattctctcgctggccgttggctggaaattgaccctggtcaccatgggcacgattcccatcatcatcgttgccggctacgtacgactcaaattggtcggaactttggaaaagatttcgcgcaaggtacatgaagaatctgcaggccgcgtgtgcgaggaaatcaacgctgtcaggaccgttgcggcttcttgcctcgaggacgagatgtgtgaagactatgttcgcagcttgaagtcgaaggaaaaaacctatctacgggcaaccctgtggagctctggctggtatgctttgtcggaagcagtgccgcttggttgtatgtcgctgggcttctggtatggtgctacactagtcatgagaacagagtacacgaccgagcaattcttcatagtggtcactgccgtcatctttggtgcctcatccgctggtctcgtctttgcctttgctcctgattttggcaaggctggcgtatcagcagagagactgcaagagctcgtggatcgacagcccgaggtggatacttggtctgaagagggcgatcatatcgagacgacaaacggaaaggtggacgtttccaatgttgtcttctactacaatcaacgatcgaaaactcctgtactcaactccatctcacttggcgccgctcctggacaatccatcggcctttgtggtgggagcgggtcgggtaaaagtactgtcgcttcgctcctcgagcgcttttacaatccctcttctgggacggtcagtctggacgaaaaggatgtgcgcacgatcaacatcaacagctatcgcgctcagttcgccttggtcaaccaggaacccctgctcttctcctgctctattcgtgagaacctgctttatggttcgcttggcaaggaccttacagactcggagattgaagaagcctgcaagatggctcaagtctacgactttgtctgctcattgccagaagggctagacacttcctttggatccaacgcggtgatgcttagtggtggtcagaggcaacgtctctcgattgcgcgcgccattcttcgcaaaccccgtgtcttgattctcgatgaggctacctcggcccttgactcgacctcggaacgggccgtcattgaagcattgacgaaaacagccgagggtagaacgacaatcatggttgcgcacagactcagcacgatccaaggatgcgacaagatcttttacctccgcgctggtgcggtggctgaagaaggaacacatgaggagttgatggcgaaacgaggcagttactatgacagtgtcaacctgcagtctctgggataa

SEQ ID NO: 60190 - protein, 1263 aa, Leptosphaeria maculans
MAEPESEKPSSAQGGGLPSSDHPLNPILQRQIELPEIKINYFSLFRYATVKEYALLLISAFFAAVSGAMFPLLILFIGNLVQVLKDFNLGTIPQEQLSEQIRDIALYIVYLFLGQLVSVFIFTNGCLLVGEAITNAIREKYVRSLFRQNIAFFDTYGSGKITSQLTSSTATIQDAISHKIGLFVSACSCFVASYAIGFVKHWKLTFILTSTVVAITGVMIIMSGFMAKFGANSSGALAEASAKLEETFSGIRVVKALGLEKRLSDELDPQLLNIEFWGKRVRHVMGWMLAIMYGLIFLNYGLAIWQGYRFMQGGTEDVGAIITVLMCLNIGAFLFGNVGPHLQAMSLGAAAAQDIFAVIERESVTDGGAPPGSFEVEGNIEFRNVSHVYPSRPDTHVLQDFSMIFPAGKVTAIVGASGSGKSTIVSILERFYEPVSGQVFLDGHDITHLNVQWLRQQFGLVGQEPVLFNGSIFKNVAYGLKGTQYGQESREVTMKLVTEACRIANAHDFITALPHGYDQEVGIRGASLSGGQRQRIAIARAIVSGPKILLLDEATSALDVQSEEAVQLGLNMASSGRTTIVVAHSLSTIKLADNIIVMEKGRVAQQGTHAELEAQEGLYQTFVRRQQLKQATLEPPHARITPAVDTPASPQHRLSEKTGSIYGQGESEAADKSPSTKYSFVQLVKFVARFNKEDWRLMVTGIASAVISGAVWPAHSVFFAKAIVALSSPSPASLARGPNFWAAMYVMLAFVQIASQGVQGSAFAICAERLILRARRVAFKYLLRQDVEFFDDPLHSSGIMTSFVSSDVNALAGLSGVFLGTLFSATATVLGGLILSLAVGWKLTLVTMGTIPIIIVAGYVRLKLVGTLEKISRKVHEESAGRVCEEINAVRTVAASCLEDEMCEDYVRSLKSKEKTYLRATLWSSGWYALSEAVPLGCMSLGFWYGATLVMRTEYTTEQFFIVVTAVIFGASSAGLVFAFAPDFGKAGVSAERLQELVDRQPEVDTWSEEGDHIETTNGKVDVSNVVFYYNQRSKTPVLNSISLGAAPGQSIGLCGGSGSGKSTVASLLERFYNPSSGTVSLDEKDVRTININSYRAQFALVNQEPLLFSCSIRENLLYGSLGKDLTDSEIEEACKMAQVYDFVCSLPEGLDTSFGSNAVMLSGGQRQRLSIARAILRKPRVLILDEATSALDSTSERAVIEALTKTAEGRTTIMVAHRLSTIQGCDKIFYLRAGAVAEEGTHEELMAKRGSYYDSVNLQSLG

SEQ ID NO: 60191 - DNA, 3816 bp, Oryza sativa subsp
  CDS (1)..(3816)
atgggcgacaaggagaagccgtcgttcctgcggctggttcgctacgccgacgcgcacgaccggtgcctgatggcgctgggcgttctgggcagcttcggcgatggcatgatgcagccgctgtcaatgctggtgctcggcgacatcgtcaacagctacggcggcgccggcggcgccggcagtgcccggagcgccttcagctccggcgccgtcgacaagtttgcgcttcggttactgtacgtcgccgttgcagtgggtgcctgctccttcctagagggtctgtgctggacgagaacggcggaacggcaggcgtcaaagatgaggaggctgtacctggaggccgtcctgagccaggaggtggcgttcttcgacgccgcgccctcctcgccgtcgtcgccgcaggcccaggcccaggccaccacgttccgcgtcatctccaccgtctccgacgacgccgacgccatccaggacttcctcggcgagaagctccccatggtcctggccaacgcgacgctcttcttcggcgcgctggccgtgtcgttcgtgttcgcgtggcggctcgcgctggcgggcctcccgttcacgctcctcctcttcgtcacgccgagcgtgctcctcgccgggcgcatggccgcggcggccggggaggcccgcgcggcgtacgaggaggcgggcgggatagcgcagcaggcggtgtcgtccatccggacggtggcgtcgtacaccgctgagcggcggacggtggagcggttccgcggcgcggtggcgcggagcgcggcgctcggcgtcaggcaggggctcatcaagggcgccgtgatcgggagcatgggcgtcatctacgccgtctggtccttcttgtcgtggatcggcagcctcctcgtcatccacctgcacgcccagggcggccacgtgttcgtcgcctccatctgcatcgttttggcgggaatgtcgatcatgatggcgctgccgaacctccggtacttcattgacgcgacggcggcggcgagccggatgcaagaaatgatcgaaatgctcccaccgctcgaaggggcggagaagaagggagccaccatggaaaggatcaggggcgagatcgtgttcaaagacgtgcacttctcgtacccgtcgaggccggacacgctggtgctcaacggcttcaacctgaccatctctgagggcgccaccgtcggtctcgtcggcggcagcgggtccgggaagtccaccgtgatctcgctgctgcagaggttctacagcccggactccggggagatatcgatggacgaccatggcattgacacgctcaatgtggagtggcttaggagccagatagggctagtgagccaagagcctgtactgtttgcgacctccattagggagaacatactgttcggcgacgagacggcctcgttgaagcaagtcgtcgccgcggcgaagatggccaatgcccacgagttcatcgtcaagttgccccatggatacgaaactcatgttggtcagttcgggacgcagctgtcgggagggcagaagcagcgcatcgccattgctcgagcgctcgtccgggacccgaggatcctgctgctggacgaggcgacgagcgcgctcgacgccgagtcggagcggacggtgcaggacgcgctggaccgggcgtccgtgggccggaccaccgtgatcgtagcgcaccgcctctcgacgctccgcaaggcggacacgattgcggtgctcgacgctggccgcgtcgtggaggccggcacgcacgacgagctcttggggatggacgacgggggtgaaggcggcgtgtacgccaggatggtgcacctgcagaaggcgccacccgtggcggcgagggaggagcgccaccgcgccgtggatgtggtggagagcgagatggtgtcgttccgcagcgtggagattatgtcggcggtcagcgccaccgagcaccgtcctagccccgcgccgtcgttctgctcggtcgaacactcgacggagattgggaggaagctcgtggaccacggtgtggcgcgctccaggaagccctcgaagcttcgcctgctgaagatgaaccggccggagtggaagcaggcgttgcttgggtgcgttggcgccgtcgtcttcggcgcggtgctgccgctgtactcgtacagcctaggctcgttgccggaggtttatttcctcgccgacgatggccagatccgttccaagaccaggttgtactacttcctcttccttggcatcgccgtcgtctgcatcacggcgaacatcgtgcagcactacaacttcgcggtgatgggcgagcgcctgacggagcgtgtccggggccagatgctcgccaagatcctctccttcgaggtcgggtggttcgacgaggacgagaactcgagcgccgcggtgtgcgcgcggctggcgacacagtcgagcaaggtccgctccctcgtcggcgaccgcatgtgcctgctggtccaggcgggcgccacggcgtcgctgggcttctcgctcgcgctcgccgtgtcgtggcgcctcgccacggtgatgatggccatgcagccgctgatcatcgcgagcttctacttcaagaaggtgctcatggctgccatgtccaagaaggccaagaaggcgcaggtgcaggggagccagctcgccagcgaggccgtggtgaaccaccggacgatcaccgcgttctcgtcgcagcggcggatgctccgcctgtacgaggccgcgcaacaaggccccaagaaggacaacgtggcgcactcgtggttctccggcttctgcctgtgcctgtgccagttcagcaacaccggcagcatggcggtcgctctctggtacggaggcaagctcatggccaaggggctcatcactcccacgcacctgttccaggtgttcttcatgctcatgaccatgggaagggtcatcgccgacgccgggagcttgacgtcggacttggcgcaaggcggcgacgcggtgcgctccgtcctcgacacgctggaccgtgaaccgacgatcaaggacgacgacaacgacaacgagaggaagaagaagaaacggaaggagataaaaggcgcgatcgagttcaagaacgtgcacttcagctacccgacgcggccggaggtggccgtgctcgccggattcagcctcgagatcggcgcggggaagacggtggcgctcgtcgggccgagcgggtccggcaagtcgacggtgatcgggctgatcgagcggttctacgacgcgcagaggggctcggtcctggtcgacggcgaggacatcaggagctacagccttgcacgcctccggtcgcaggtggcgctcgtcagccaggagccgacgctcttctccgggacgatacgcgacaacatagcgtacggcgccgccgaagagcacgccaccgaggacgaggtggcccgcgccgcggcgctcgccaacgcccacgggttcatcagcgccatggagcgcgggtacgacacgcgcgtcggggagcgcggcgcgcagctgtcgggggggcagaggcagcggatcgcgctggcgcgggcggtgctgaaggacgcgaggatcctgctgctggacgaggcgacaagcgcgctggacgccgcgtcggagaggctggtgcaggacgccgtggaccggatgctgcgggggaggacgtgcgtcgtggtggcgcaccgcctctcgacggtggagaagtccgacacgatcgcggtggtgaaggacgggagggtggcggagagagggaggcaccacgagctcctcgccgtcggccgcgccgggacgtactacaacctgatcaagctccagcacggcagatcgccgtgccttagtcccatgtga

SEQ ID NO: 60192 - protein, 1271 aa, Oryza sativa subsp
MGDKEKPSFLRLVRYADAHDRCLMALGVLGSFGDGMMQPLSMLVLGDIVNSYGGAGGAGSARSAFSSGAVDKFALRLLYVAVAVGACSFLEGLCWTRTAERQASKMRRLYLEAVLSQEVAFFDAAPSSPSSPQAQAQATTFRVISTVSDDADAIQDFLGEKLPMVLANATLFFGALAVSFVFAWRLALAGLPFTLLLFVTPSVLLAGRMAAAAGEARAAYEEAGGIAQQAVSSIRTVASYTAERRTVERFRGAVARSAALGVRQGLIKGAVIGSMGVIYAVWSFLSWIGSLLVIHLHAQGGHVFVASICIVLAGMSIMMALPNLRYFIDATAAASRMQEMIEMLPPLEGAEKKGATMERIRGEIVFKDVHFSYPSRPDTLVLNGFNLTISEGATVGLVGGSGSGKSTVISLLQRFYSPDSGEISMDDHGIDTLNVEWLRSQIGLVSQEPVLFATSIRENILFGDETASLKQVVAAAKMANAHEFIVKLPHGYETHVGQFGTQLSGGQKQRIAIARALVRDPRILLLDEATSALDAESERTVQDALDRASVGRTTVIVAHRLSTLRKADTIAVLDAGRVVEAGTHDELLGMDDGGEGGVYARMVHLQKAPPVAAREERHRAVDVVESEMVSFRSVEIMSAVSATEHRPSPAPSFCSVEHSTEIGRKLVDHGVARSRKPSKLRLLKMNRPEWKQALLGCVGAVVFGAVLPLYSYSLGSLPEVYFLADDGQIRSKTRLYYFLFLGIAVVCITANIVQHYNFAVMGERLTERVRGQMLAKILSFEVGWFDEDENSSAAVCARLATQSSKVRSLVGDRMCLLVQAGATASLGFSLALAVSWRLATVMMAMQPLIIASFYFKKVLMAAMSKKAKKAQVQGSQLASEAVVNHRTITAFSSQRRMLRLYEAAQQGPKKDNVAHSWFSGFCLCLCQFSNTGSMAVALWYGGKLMAKGLITPTHLFQVFFMLMTMGRVIADAGSLTSDLAQGGDAVRSVLDTLDREPTIKDDDNDNERKKKKRKEIKGAIEFKNVHFSYPTRPEVAVLAGFSLEIGAGKTVALVGPSGSGKSTVIGLIERFYDAQRGSVLVDGEDIRSYSLARLRSQVALVSQEPTLFSGTIRDNIAYGAAEEHATEDEVARAAALANAHGFISAMERGYDTRVGERGAQLSGGQRQRIALARAVLKDARILLLDEATSALDAASERLVQDAVDRMLRGRTCVVVAHRLSTVEKSDTIAVVKDGRVAERGRHHELLAVGRAGTYYNLIKLQHGRSPCLSPM

SEQ ID NO: 60193 - DNA, 2484 bp, Paracoccidioides brasiliensis
  CDS (1)..(2484): transl_table=4
atggcacttgccgccttcactccacgagcatcttcacgtcgcattgctcagtttggatcgcgatcgcttcccttatttaactatacctccttccatgcccagagaccatcgcttgatgctagcggtggcttaagacgtcaccagtcgaacgcccccatcgtaacccaacgaccagacatcctacggcagccagacatccgaaagtcatctgcaacaaatatacatgtcactatttcatctatcgtgggacctggttgtcttcagcaggtccgattcctctcctctacgacagcacggcgaaaagaagccaaaccggagcccgcgaaaaagctgcggaagccgcagaagccgcagacagagctagaaaagaaacaagaaaccgctctagaagagatacatagaggatttgagcgtacggagaaggcatcacaagcagcgaaattaaaccttagcgcaagattatcaaaggatgcgggcgggaagaggctcggctttcgcgagatatggcggttattgaaaattgcccgtccagaggccaaaatcctgtccatggcgttactctgcttgctcatctcgtcatctatcaccatgtcgattccgttttccatcggcaagattctcgatatcgcaacgcatagcagccctgaaggtggcaatgaattgttcggcctcacactccccgtcttctacagtgtcctgggcggtgttcttttgttgggtgctgctgcaaactgtggtcgtattataattctacggattgtgggggaacgtattgttgcgcgactaagatctaagctcttcagacgtacttttatgcaggatgcggagtttttcgatgccaacagagtcggtgacttgatttcccggctaagctcggatacgataatcgtcggcaaaagtatcacgcagaatctttcagatggacttagggctgctgttagtggcgttgctgggtttggtctgatggcctttgtcagtcttaagctgtcaagcattctccttttgctgatacccccagtgtcccttggagcgttcttatacggcagatcaatcagaaatattagtcgcaagattcagaagaacctgggtagcctgaccaaaatcgcggaggagcgtctgggaaatgtgaagacaagtcagtcttttgcaggagagattttggaggtccatcgatataataggcaaaccaggagaatttttgagctgggaaagagagagtctctcgttagcgcagcgttctttagcaccaccggtttgatgggaaatatgacgattttgagtttactctatgttggtggtggaatggtccagtccggggccatttccattggagacttgacttcattcctcatgtatgcagcatacgctggatcaagcatgtttggcttgtccagcttctattcagaactgatgaagggcgttggtgctgccagtcgactattcgagctccaagaccgccatcccactattccccttactgtaggagataaagtggtttcggcaaggggagcgatccggttcaagaatttggatttcagttatcccaccagacccgcagtgactgtatttaaagacctcgactttgagattccgcaaggaagcaacgttgcaatcgtcggcccctcggggggcggtaaatccacgattgcctccttgttactgcgcttctacaaacataccagaggccagatcctgatagatgggaaggacatctcctcaatgaatgcaaagtctctacgaaggaaaatcggcgtcgtcgcgcaggagcccgtactcttctctggaactatcgctgagaacatatcctacggcaagccccatgcgacaaggacggaaattatcgcagcggcgcgcaaggccaactgtcaattcatcagtgacttccccgatggcctcgacacacacgtaggcgcccgcggcgctcaactctccggcggccaaaagcagcgaatcgccatcgcccgtgccctgattaaaaacccagacatcctcatcctcgacgaagccacgtccgccctcgatgccgaatccgagacgctggtcaacagcgctcttgccgcgttactccgcggcaacaatacgacaatcagcatcgcccaccgtctctccaccatcaagcgctccgacaccatcatcgtactcagcggtgacggccacgttgcggagcaaggttcgtatcaggaactgagcgcgcgaccggacggcgcgtttacgaagcttatggagtggcagatgagctctgaagggggggctgtgcagtcggtggttaggggaccgccgtctgagaaggaggagttgcagcagatgctgcaggaaggggaggaagattatggggagtatgatgatgatagtgatgcggagccggagaagcttgttgagagggacggcgttgctgagggagcttctaaggagaaatatgctgtggctgctgggatagaggccagtattgctacttctaagcaacagccgtcccaagaaaaatag

SEQ ID NO: 60194 - protein, 827 aa, Paracoccidioides brasiliensis
MALAAFTPRASSRRIAQFGSRSLPLFNYTSFHAQRPSLDASGGLRRHQSNAPIVTQRPDILRQPDIRKSSATNIHVTISSIVGPGCLQQVRFLSSTTARRKEAKPEPAKKLRKPQKPQTELEKKQETALEEIHRGFERTEKASQAAKLNLSARLSKDAGGKRLGFREIWRLLKIARPEAKILSMALLCLLISSSITMSIPFSIGKILDIATHSSPEGGNELFGLTLPVFYSVLGGVLLLGAAANCGRIIILRIVGERIVARLRSKLFRRTFMQDAEFFDANRVGDLISRLSSDTIIVGKSITQNLSDGLRAAVSGVAGFGLMAFVSLKLSSILLLLIPPVSLGAFLYGRSIRNISRKIQKNLGSLTKIAEERLGNVKTSQSFAGEILEVHRYNRQTRRIFELGKRESLVSAAFFSTTGLMGNMTILSLLYVGGGMVQSGAISIGDLTSFLMYAAYAGSSMFGLSSFYSELMKGVGAASRLFELQDRHPTIPLTVGDKVVSARGAIRFKNLDFSYPTRPAVTVFKDLDFEIPQGSNVAIVGPSGGGKSTIASLLLRFYKHTRGQILIDGKDISSMNAKSLRRKIGVVAQEPVLFSGTIAENISYGKPHATRTEIIAAARKANCQFISDFPDGLDTHVGARGAQLSGGQKQRIAIARALIKNPDILILDEATSALDAESETLVNSALAALLRGNNTTISIAHRLSTIKRSDTIIVLSGDGHVAEQGSYQELSARPDGAFTKLMEWQMSSEGGAVQSVVRGPPSEKEELQQMLQEGEEDYGEYDDDSDAEPEKLVERDGVAEGASKEKYAVAAGIEASIATSKQQPSQEK

SEQ ID NO: 60195 - DNA, 3768 bp, Oryza sativa subsp
  CDS (1)..(3768)
atgggcgacaaggagaagccgtcgttcctgcggctggttcgctacgccgacgcgcacgaccggtgcctgatggcgctgggcgttctgggcagcttcggcgatggcatgatgcagccgctgtcaatgctggtgctcggcgacatcgtcaacagctacggcggcgccggcggcgccggcggcgccggcagtgcccggagcgccttcagctccggcgccgtcgacaagggtctgtgctggacgagaacggcggaacggcaggcgtcaaggatgaggaggctgtacctggaggccgtcctgagccaggaggtggcgttcttcgacgccgcgccctcctcgccgtcgtcgccgcaggcccaggcccaggccaccacgttccgcgtcatctccaccgtctccgacgacgccgacgccatccaggacttcctcggcgagaagctccccatggtcctggccaacgcgacgctcttcttcggcgcgctggccgtgtcgttcgtgttcgcgtggcggctcgcgctggcgggcctcccgttcacgctcctcctcttcgtcacgccgagcgtgctcctcgccgggcgcatggccgcggcggccggggaggcccgcgtggcgtacgaggaggcgggcgggatagcgcagcaggcggtgtcgtccatccggacggtggcgtcgtacaccgcggagcggcggacggtggagcggttccgcggagcggtggcgcggagcgcggcgctcggcgtcaggcaggggctcatcaagggcgccgtgatcgggagcatgggcgtcatctacgccgtctggtccttcttgtcgtggatcggcagcctcctcgtcatccacctgcacgcccagggcggccacgtgttcgtcgcctccatctgcatcgttttggcgggaatgtcgatcatgatggcgctgccgaacctccggtacttcattgacgcgacggcggcggcgagccggatgcaagaaatgatcgaaatgctcccaccgctcgaaggggcggagaagaagggagccaccatggaaaggatcaggggcgagatcgtgttcaaagacgtgcacttctcgtacccgtcgaggccggacacgctggtgctcaacggcttcaacctgaccatctctgagggcgccaccgtcggtctcgtcggcggcagcgggtccgggaagtccaccgtgatctcgctgctgcagaggttctacagcccggactccggggagatatcgatggacgaccatggcattgacacgctcaatgtggagtggcttaggagccagatagggctagtgagccaagagcctgtactgtttgcgacctccattagggagaacatactgttcggcgacgagacggcctcgttgaagcaagtcgtcgccgcggcgaagatggccaatgcccacgagttcatcgtcaagttgccccatggatacgaaactcatgttggtcagttcgggacgcagctgtcgggagggcagaagcagcgcatcgccattgctcgagcgctcgtccgggacccgaggatcctgctgctggacgaggcgacgagcgcgctcgacgccgagtcggagcggacggtgcaggacgcgctggaccgggcgtccgtgggccggaccaccgtgatcgtagcgcaccgcctctcgacgctccgcaaggcggacacgattgcggtgctcgacgctggccgcgtcgtggaggccggcacgcacgacgagctcttggggatggacgacgggggtgaaggcggcgtgtacgccaggatggtgcacctgcagaaggcgccacccgtggcggcgagggaggagcgccaccgcgccgtggatgtggtggagagcgagatggtgtcgttccgcagcgtggagattatgtcggcggtcagcgccaccgagcaccgtcctagccccgcgccgtcgttctgctcggtcgaacactcgacggagattgggaggaagctcgtggaccacggtgtggcgcgctccaggaagccctcgaagcttcgcctgctgaagatgaaccggccggagtggaagcaggcgttgcttgggtgcgttggcgccgtcgtcttcggcgcggtgctgccgctctactcgtacagcctaggctcgttgccggaggtttatttcctcgccgacgatggccagatccgttccaagaccaggttgtactccttcctcttccttggcatcgccgtcgtctgcatcacggcgaacatcgtgcagcactacaacttcgcggtgatgggcgagcgcctgacggagcgtgtccggggccagatgctcgccaagatcctctccttcgaggtcgggtggttcgacgaggacgagaactcgagcgccgcggtgtgcgcgcggctggcgacgcagtcgagcaaggtccgctccctcgtcggcgaccgcatgtgcctgctggtccaggcgggcgccacggcgtcgctgggcttctcgctcgcgctcgccgtgtcgtggcgcctcgccacggtgatgatggccatgcagccgctgatcatcgcgagcttctacttcaagaaggtgctcatggctgccatgtccaagaaggccaagaaggcgcaggtgcaggggagccagctcgccagcgaggccgtggtgaaccaccggacgatcaccgcgttctcgtcgcagcggcggatgctccgcctgtacgaggccgcgcaacaaggccccaagaaggacaacgtggcgcactcgtggttctccggcttctgcctgtgcctgtgccagttcagcaacaccggcagcatggcggtcgctctctggtacggaggcaagctcatggccaaggggctcatcactcccacgcacctgttccaggtgttcttcatgctcatgaccatgggaagggtcatcgccgacgccgggagcttgacgtcggacttggcgcaaggcggcgacgcggtgcgctccgtcctcgacacgctggaccgtgaaccgacgatcaaggacgacgacaacgacaacgagaggaagaagaagaaacggaaggagataaaaggcgcgatcgagttcaagaacgtgcacttcagctacccgacgcggccggaggtggccgtgctctccggattcagcctcgagatcggcgcggggaagacggtggcgctcgtcgggccgagcgggtccggcaagtcgacggtgatcgggctgatcgagcggttctacgacgcgcagaggggctcggtcctggtcgacggcgaggacatcaggagctacagccttgcacgcctccggtcgcaggtggcgctcgtcagccaggagccgacgctcttctccgggacgatacgcgacaacatagcgtacggcgccgccgaagagcacgccaccgaggacgaggtggcccgcgccgcggcgctcgccaacgcccacgggttcatcagcgccatggagcgcgggtacgacacgcgcgtcggggagcgcggcgcgcagctgtcgggggggcagaggcagcggatcgcgctggcgcgggcggtgctgaaggacgcgaggatcctgctgctggacgaggcgacaagcgcgctggacgccgcgtcggagaggctggtgcaggacgccgtggaccggatgctgcgggggaggacgtgcgtcgtggtggcgcaccgcctctcgacggtggagaagtccgacacgatcgcggtggtgaaggacgggagggtggcggagagagggaggcaccacgagctcctcgccgtcggccgcgccgggacgtactacaacctgatcaagctccagcacggcagatcgccgtgccttagtcccatgtga

SEQ ID NO: 60196 - protein, 1255 aa, Oryza sativa subsp
MGDKEKPSFLRLVRYADAHDRCLMALGVLGSFGDGMMQPLSMLVLGDIVNSYGGAGGAGGAGSARSAFSSGAVDKGLCWTRTAERQASRMRRLYLEAVLSQEVAFFDAAPSSPSSPQAQAQATTFRVISTVSDDADAIQDFLGEKLPMVLANATLFFGALAVSFVFAWRLALAGLPFTLLLFVTPSVLLAGRMAAAAGEARVAYEEAGGIAQQAVSSIRTVASYTAERRTVERFRGAVARSAALGVRQGLIKGAVIGSMGVIYAVWSFLSWIGSLLVIHLHAQGGHVFVASICIVLAGMSIMMALPNLRYFIDATAAASRMQEMIEMLPPLEGAEKKGATMERIRGEIVFKDVHFSYPSRPDTLVLNGFNLTISEGATVGLVGGSGSGKSTVISLLQRFYSPDSGEISMDDHGIDTLNVEWLRSQIGLVSQEPVLFATSIRENILFGDETASLKQVVAAAKMANAHEFIVKLPHGYETHVGQFGTQLSGGQKQRIAIARALVRDPRILLLDEATSALDAESERTVQDALDRASVGRTTVIVAHRLSTLRKADTIAVLDAGRVVEAGTHDELLGMDDGGEGGVYARMVHLQKAPPVAAREERHRAVDVVESEMVSFRSVEIMSAVSATEHRPSPAPSFCSVEHSTEIGRKLVDHGVARSRKPSKLRLLKMNRPEWKQALLGCVGAVVFGAVLPLYSYSLGSLPEVYFLADDGQIRSKTRLYSFLFLGIAVVCITANIVQHYNFAVMGERLTERVRGQMLAKILSFEVGWFDEDENSSAAVCARLATQSSKVRSLVGDRMCLLVQAGATASLGFSLALAVSWRLATVMMAMQPLIIASFYFKKVLMAAMSKKAKKAQVQGSQLASEAVVNHRTITAFSSQRRMLRLYEAAQQGPKKDNVAHSWFSGFCLCLCQFSNTGSMAVALWYGGKLMAKGLITPTHLFQVFFMLMTMGRVIADAGSLTSDLAQGGDAVRSVLDTLDREPTIKDDDNDNERKKKKRKEIKGAIEFKNVHFSYPTRPEVAVLSGFSLEIGAGKTVALVGPSGSGKSTVIGLIERFYDAQRGSVLVDGEDIRSYSLARLRSQVALVSQEPTLFSGTIRDNIAYGAAEEHATEDEVARAAALANAHGFISAMERGYDTRVGERGAQLSGGQRQRIALARAVLKDARILLLDEATSALDAASERLVQDAVDRMLRGRTCVVVAHRLSTVEKSDTIAVVKDGRVAERGRHHELLAVGRAGTYYNLIKLQHGRSPCLSPM

SEQ ID NO: 60197 - DNA, 3729 bp, Oryza sativa subsp
  CDS (1)..(3729)
  misc_feature (993)..(993): n is a, g, c or t
  misc_feature (998)..(998): n is a, g, c or t
atgtctacagtccatgatgaagaccactctatttcatcatctcaatttgatgaaatggatgaaagtaatagcacaatcccagttccgtcagaatccagcaccgacgagaagccatttccattcctcgggctgctttgctacgccgatgcggtagactggctcctcatggccctgggaactgttggatctataattcatggcatggcattccccgtcggatatctccttcttgggaaagcacttgatgcttatggaaccaacataaatgatcaggagggcatggtccatgcattgtataaggtggttccgtttgtgtggtacatggcagcagctactcttcctgctggaatggtcgagatctcatgctggatatactcaagtgaaagacaattagcacgcatgcggctagcatttctgagatcagtacttaatcaagaggttggggccttcgacactgacttgaccactgcaaaaatcatcaccggagtaaccaaccacatgagtgtcatacaagatgcaattggtgagaagctcggtcatttcgttgcgagcttctccactttctttgctggtatcataattgcatttgccagctgctgggaagtcgcattgctctcctttctggtcattcctctgatcctcgtcattggagcaacatacacgaaacagatgaatggcatatcgttatctcgtaatgctatagtctcagaagcaacatctattgtagaacagactttgtcgcatattaagactgttttctcctttgttggggagaaacgggccatgagatcctttgtccggtgcatggataatcagtacaaactaagtaagaaggaggcagtgataaaagggataggactgggattgttccaagctgtgaccttctgttcatgggcactgatggtttggattggggcagtcgcagtaaccagccgaaaggcaacaggaggtggcacgatagctgccatcatgagcatcctcttcggagcaatnaaagnagtattcaaggttatcaaaagaaagccatccattagttatgagaaacatggatcagtgctaggaaaggttcatggggagataaaattccgtagggtgcatttcgcctatccatccaggcaggataagccaattctccaaggattctcattatccatccccgcaggcaaagtcgttgcacttgtaggaagcagtggctgtgggaagagcactgtgatctcactactccaaaggttctatgatccaacctcaggtagcattttaattgatggtcacagtatcaagaaacttgatctggaatccctccgaagaaacattgcttcagtctcccaggagccatcgctattttcaggcactatcaaggacaacttgaggattggtaaaatggatgcaaatgacgacgagataaccaaagcagcaagaacagctaatgtccattcatttatatccaaacttccaaatgaatacttaacagaggtaggagaaaggggagtgcagttgtcgggaggtcagaaacaacgaatagctattgcaagggcaatgctcaaggatccaccaatcctgcttctggatgaagcaacaagtgcccttgattcagagtcagaaaagctagttcaggatgcgcttgagaaggccatgagtgggaggactgtcatattgatagcacacagaatgtctacaattgtaaatgccgacacaattgttgtcgtggagaatggaaaggtagctcaaactggaactcatcaagagttgattgagaaaagcacattctactcaaatgtatgcagcatgcaaaatattgagaaggaagctggaacgagggtcgcaagctcttctgataatgtcatagaagatgaaattgatgaagtgtacgacaggcagctctctccaaagcagggacaacagaacaaattggaacaactaaactctaagcaaccaaagcaagaggtcagaaaggaaatacatcctttctttagactttggtatgggctgcagaaagacgacattgcaaagatactattagggtcatcatcagcagctatatctgggatctcaaagcccttgtttggttacttcatcatgacaattggtgtggcatattatgatctagatgcaaaaaggaaagtcagcaagtattctttgattttcttcacagctggggtgatcacgcttgccagtaacatcttccaacactatatttatggtgttgttggagaaaaggcaatgaaaatcctcagggaggccatcttttcatctgttctccgaaatgagcttggctggtttgaaaagccaaaaaatggtgtaggctttcttacctcacgcatcgtgagcgacacatcgacagtcaagaccattatatctgatagaatggcagtcattgtgcaatgcatctcttcaattctgatagcaacagtagtaagcatgtatgtcaattggaggatgggtttagtatcatgggcagtcatgccatgccatttcatcggtggccttattcaggccaaggcagccaaagggttctatggtgactctgctattgctcaccaggaacttgtctcccttgcttcagaggcagctagcaacatcagaactgtggcatcctttgtatatgaggatgaaataatcaagaaagcagaattgtcgctgcaagaacccatgcgagttaccaagatcgagagcatgaagtacggcgtagtccaagggatctcactctgcctttggaatattgcacatgcagtggcgctttggtacaccacagttctggttcagaggaagcaggcttcatttgagaacagcataagatcataccagatattctcactcacagtgccttccataacagagctatggactctgatccccatggtcatgtcagccattgcagtactcaatcctgcatttgaaatgcttgatagggacacacagattgtgccagacagaccagaaaatccaagtgatggctggctcatgggaagaactgagtttcaagatgtgagcttcaactatccatctagaccagaggtgaccattcttgatggcttcagtctagtcattgagcctggccaaagagtagcattggttggtccaagcggcgcgggaaaatcctctgtcctggcactactattgagattctatgatcctcagagagggagagtactaattgacaacaagaacataaaagactacaatctcaggtggctcaggaaacagattgggctagtccaacaagaaccaatcttgttcaattcatccatcagagataacattagctacggaagcgaagagacttcagagactgaaataattcaggctgcaatggaggcgaacattcacgaattcatcagcagcctaccaaaagggtatgacacggttgttgggagaaaaggaagccagctttcaggagggcagaaacagcggatagctattgcaagaactcttcttaagcgtccagtcattcttcttcttgatgaggcaaccagcgcacttgatggtgaatctgagagagtggtgatgagttctttaggggccaaggactggaaggacagaaatgagggatcaagcaagattacaagtatcacagtggcgcatagattgtccacggtcataaattcagacacgattgtcgtgatggagagaggcaaagtggttgaacttggtaatcaccacacactgatcactgcagatgatggtgtctactcaagactgttccatttgcaaagcaacatgaaagattga

SEQ ID NO: 60198 - protein, 1242 aa, Oryza sativa subsp
  misc_feature (331)..(331): The Xaa at location 331 stands for Ile, or Met.
  misc_feature (333)..(333): The Xaa at location 333 stands for Ala, Glu, Gly, or Val.
MSTVHDEDHSISSSQFDEMDESNSTIPVPSESSTDEKPFPFLGLLCYADAVDWLLMALGTVGSIIHGMAFPVGYLLLGKALDAYGTNINDQEGMVHALYKVVPFVWYMAAATLPAGMVEISCWIYSSERQLARMRLAFLRSVLNQEVGAFDTDLTTAKIITGVTNHMSVIQDAIGEKLGHFVASFSTFFAGIIIAFASCWEVALLSFLVIPLILVIGATYTKQMNGISLSRNAIVSEATSIVEQTLSHIKTVFSFVGEKRAMRSFVRCMDNQYKLSKKEAVIKGIGLGLFQAVTFCSWALMVWIGAVAVTSRKATGGGTIAAIMSILFGAXKXVFKVIKRKPSISYEKHGSVLGKVHGEIKFRRVHFAYPSRQDKPILQGFSLSIPAGKVVALVGSSGCGKSTVISLLQRFYDPTSGSILIDGHSIKKLDLESLRRNIASVSQEPSLFSGTIKDNLRIGKMDANDDEITKAARTANVHSFISKLPNEYLTEVGERGVQLSGGQKQRIAIARAMLKDPPILLLDEATSALDSESEKLVQDALEKAMSGRTVILIAHRMSTIVNADTIVVVENGKVAQTGTHQELIEKSTFYSNVCSMQNIEKEAGTRVASSSDNVIEDEIDEVYDRQLSPKQGQQNKLEQLNSKQPKQEVRKEIHPFFRLWYGLQKDDIAKILLGSSSAAISGISKPLFGYFIMTIGVAYYDLDAKRKVSKYSLIFFTAGVITLASNIFQHYIYGVVGEKAMKILREAIFSSVLRNELGWFEKPKNGVGFLTSRIVSDTSTVKTIISDRMAVIVQCISSILIATVVSMYVNWRMGLVSWAVMPCHFIGGLIQAKAAKGFYGDSAIAHQELVSLASEAASNIRTVASFVYEDEIIKKAELSLQEPMRVTKIESMKYGVVQGISLCLWNIAHAVALWYTTVLVQRKQASFENSIRSYQIFSLTVPSITELWTLIPMVMSAIAVLNPAFEMLDRDTQIVPDRPENPSDGWLMGRTEFQDVSFNYPSRPEVTILDGFSLVIEPGQRVALVGPSGAGKSSVLALLLRFYDPQRGRVLIDNKNIKDYNLRWLRKQIGLVQQEPILFNSSIRDNISYGSEETSETEIIQAAMEANIHEFISSLPKGYDTVVGRKGSQLSGGQKQRIAIARTLLKRPVILLLDEATSALDGESERVVMSSLGAKDWKDRNEGSSKITSITVAHRLSTVINSDTIVVMERGKVVELGNHHTLITADDGVYSRLFHLQSNMKD

SEQ ID NO: 60199 - DNA, 3909 bp, Drosophila melanogaster
  CDS (1)..(3909)
atggagcgagatgaggtgtccacctcgagcagcgagggcaaatcacaggaggaggcgcccatggcggagggtttggagcccacagagcctattgcattcctgaaactttttcgattctccacctacggggagattggctggctgttcttcggcttcataatgtgctgcattaaggcactgacccttcctgccgtggtcattatctacagtgagttcacgtccatgttggtggaccgcgccatgcagtttggcaccagttcaaatgttcatgccctgccacttttcggaggtggtaaaacactaacaaatgcctctcgggaggaaaacaatgaagccttatacgatgattccatatcgtatggaattcttctgaccattgcatccgtggtgatgttcatctcaggaattttctctgtggatgtcttcaatatggtggcgctgcgtcaggtcacaaggatgcgaataaaactgttttcatccgtgattcgtcaagacatcggttggcatgatctggccagcaagcaaaactttacccaaagcatggtggacgacgtggaaaagattcgagatggcatctcagagaaagttggtcactttgtataccttgtagttggatttatcataactgtggccatttcatttagctacggctggaaacttaccttagctgtgagctcttatatacctctggtgatcttattaaattattacgtagctaagtttcaaggcaagctgactgcccgagaacaagaatcctatgcgggagctggaaatttggcagaggaaattctgagttccatacgcactgtggtctcgtttggtggagaaaaatcagaggtgcagcgctatgagaatttcttggtcccagctcgaaaggcaagtcaatggaaaggagccttctcggggctcagcgatgcggttttgaagtccatgttgtatctgtcatgcgccggagcattttggtatggtgtcaatcttattatcgatgatcgagatgtggaaaacaaggagtatacaccggctattctgatgattgccttctttggtatcattgttggtgcggacaacatagccagaacagctcctttcctggagtcttttgccaccgcacgcggctgtgccaccaacctcttcaaggtcatcgatctgacatccaagatcgatcccctatctacagacggtaaacttttgaactacggcctacgtggtgatgtggagttccaggatgtcttctttcgatatccctctcgtccggaggtgattgtacacaggggcctaaacattaggattagagctggtcaaacagtggccttggttggttcttctggctgtggaaagtccacctgtgtccaattgctgcagaggttctacgatcctgtgtttggatcagttcttttggatgatttggacataagaaagtacaatatccaatggttgagatcgaatattgccgttgtgggtcaggaaccagtgctatttttgggcacaatagctcaaaacattagctatggtaagccaggagccacgcaaaaagagatcgaagcagctgccactcaggcgggtgcacatgaattcattaccaatctgccagagagttatcgcagtatgattggagagcggggatcccagctctctggaggtcagaaacaacgcatagccatcgctcgagcccttatccagaatccgaagatcctgctgctggatgaagccacctctgcactggattaccaatccgagaaacaggttcaacaggccttggacttggccagtaaaggtcgtacaaccattgtggtctctcatcgattgtcagctattcgaggtgcagataagattgtctttattcatgatggtaaggttctggaggaaggttcccatgatgatttaatggcgctggaaggtgcatactacaacatggttcgtgccggcgatatcaacatgcccgatgaggtagaaaaagaggacagcattgaggacaccaaacaaaaaagcctggctctgtttgagaaatcctttgagacgagtccattaaacttcgagaaaggtcaaaagaacagtgtccagtttgaggaacctataataaaggcactcatcaaggatacaaatgcccagtcagctgaggctccgccggagaaaccgaacttcttccgcactttctctaggatccttcagcttgccaaacaggaatggtgctacctgattcttggaactataagtgctgtagcagtgggatttttgtatccagctttcgcggtcatcttcggagaattctatgctgctttggctgaaaaggatccggaggacgcactgcgtcgtactgctgttctatcctgggcctgcttgggcctggcattcttgaccggattggtttgcttccttcagacctatttgtttaactacgcgggcatttggcttaccaccagaatgcgagccatgaccttcaatgcgatggtgaatcaggaagttggatggttcgacgacgagaataactcggtgggagctctatccgctcgcttatccggcgaggcagttgatatccaaggagccataggatatcccttgagtggcatgattcaagcgttgtccaacttcatttcaagtgtcagcgtagccatgtactacaactggaagttggcccttttatgtttggccaattgtcccattatagtgggatctgtaatcctagaagctaagatgatgtctaacgctgtagtgagggaaaagcaggtgattgaggaagcctgtcgcattgccaccgaatccattaccaacatacgcactgttgccggtctgcgaagggaggcggatgttatccgggagtacacagaggagatccagcgggtggaggtgctcatccgccagaagcttagatggcgaggagtcctcaactccaccatgcaggcatcagctttcttcgcgtatgcagtggctctttgttacggaggtgttttggtgtccgagggtcagctgccattccaagatattatcaaggtatcagaaacattgctgtatggttccatgatgctcgctcaatctctagcctttacgccggccttctccgccgctctgatcgcgggtcatcgcctattccaaatactggatcgcaagccaaagattcagtcacccatgggcaccattaaaaatactctcgccaagcaattaaatcttttcgagggtgtgcgctatcgaggtattcaattccggtaccctacacgacctgatgcaaagattctgaatggcttggatcttgaggtgctcaagggtcaaacggtggccttggtgggtcattccgggtgtggaaaatccacttgcgttcagctacttcagcgttactatgatcccgatgagggcactattcatatagatcacgatgatatccaacacgatctgaccctcgatggagtaaggaccaaattgggcatagtctctcaagaacccactctcttcgagcgctctatagccgaaaatatagtctatggcgacaatcggcgatctgtttccatggtggagattattgcagcagccaagagtgccaatgctcatagttttatcatttctctaccaaatggctatgatactcggatgggagccagaggtactcagctatctggtggacagaaacagcgaatcgccattgccagagcgctggtgaggaatcccaagatcctgctactcgacgaagccacctcagctttggacttgcaaagcgaacagttggtccaacaggccttggataccgcctgctcgggacgcacctgtattgtcatagcccatcgattgtcaactgtccagaatgccgatgtgatctgtgtgattcaaaatggtcaggtggtggagcagggtaaccacatgcagttgatttcacagggcggcatttacgccaagctacacaagacccaaaaggatcattga

SEQ ID NO: 60200 - protein, 1302 aa, Drosophila melanogaster
MERDEVSTSSSEGKSQEEAPMAEGLEPTEPIAFLKLFRFSTYGEIGWLFFGFIMCCIKALTLPAVVIIYSEFTSMLVDRAMQFGTSSNVHALPLFGGGKTLTNASREENNEALYDDSISYGILLTIASVVMFISGIFSVDVFNMVALRQVTRMRIKLFSSVIRQDIGWHDLASKQNFTQSMVDDVEKIRDGISEKVGHFVYLVVGFIITVAISFSYGWKLTLAVSSYIPLVILLNYYVAKFQGKLTAREQESYAGAGNLAEEILSSIRTVVSFGGEKSEVQRYENFLVPARKASQWKGAFSGLSDAVLKSMLYLSCAGAFWYGVNLIIDDRDVENKEYTPAILMIAFFGIIVGADNIARTAPFLESFATARGCATNLFKVIDLTSKIDPLSTDGKLLNYGLRGDVEFQDVFFRYPSRPEVIVHRGLNIRIRAGQTVALVGSSGCGKSTCVQLLQRFYDPVFGSVLLDDLDIRKYNIQWLRSNIAVVGQEPVLFLGTIAQNISYGKPGATQKEIEAAATQAGAHEFITNLPESYRSMIGERGSQLSGGQKQRIAIARALIQNPKILLLDEATSALDYQSEKQVQQALDLASKGRTTIVVSHRLSAIRGADKIVFIHDGKVLEEGSHDDLMALEGAYYNMVRAGDINMPDEVEKEDSIEDTKQKSLALFEKSFETSPLNFEKGQKNSVQFEEPIIKALIKDTNAQSAEAPPEKPNFFRTFSRILQLAKQEWCYLILGTISAVAVGFLYPAFAVIFGEFYAALAEKDPEDALRRTAVLSWACLGLAFLTGLVCFLQTYLFNYAGIWLTTRMRAMTFNAMVNQEVGWFDDENNSVGALSARLSGEAVDIQGAIGYPLSGMIQALSNFISSVSVAMYYNWKLALLCLANCPIIVGSVILEAKMMSNAVVREKQVIEEACRIATESITNIRTVAGLRREADVIREYTEEIQRVEVLIRQKLRWRGVLNSTMQASAFFAYAVALCYGGVLVSEGQLPFQDIIKVSETLLYGSMMLAQSLAFTPAFSAALIAGHRLFQILDRKPKIQSPMGTIKNTLAKQLNLFEGVRYRGIQFRYPTRPDAKILNGLDLEVLKGQTVALVGHSGCGKSTCVQLLQRYYDPDEGTIHIDHDDIQHDLTLDGVRTKLGIVSQEPTLFERSIAENIVYGDNRRSVSMVEIIAAAKSANAHSFIISLPNGYDTRMGARGTQLSGGQKQRIAIARALVRNPKILLLDEATSALDLQSEQLVQQALDTACSGRTCIVIAHRLSTVQNADVICVIQNGQVVEQGNHMQLISQGGIYAKLHKTQKDH

SEQ ID NO: 60201 - DNA, 2400 bp, Neurospora crassa
  CDS (1)..(2400)
atggttacgggggtagcggtgcgccgcgccgtgctgctcccccaatgcggcggtagcggcgccgggctcgcggctttgctgccgttccaacgatcgcccactatgacttcctcgattctgtccgcaaaattctgccgtccgttctcgtcagttcagcggccctcgacgacatcttttaccatcgtttcggttcctttctcatcctcccatcccggatcacgaccatgcgtacaatcccaacgttggacttcccccttcggccttctccgccagctatcgacctcacaaactcgcctacgggagcagccggccaaggaagctgcggcagagacagcagaagaggcggcaaaggacgttgaaaaggtcaaggaatatacatctgaagaacacctcaaggtacacggttttacgaaaagcgagagggcgcataaggccgcccatatcaacatgagcgctcgtctttccaaggatggcaaatcccaatcaggcaccaagcccggcttcgccgaggtctggcgtctgatcaagattgcgcgccccgaggtcaaggcgatgagtgtcgcattcgtcctgcttctcatctcgtccgcggtcaccatgtccatccccttctcgatcggcagaattctggatctttccacccagggtcccgccggcgaggttcggctcttcggtcttaccctctatcagttcttcggcggcctcgctggtcttctcactcttggtgcgacggccaactttggcagaatcatcattctccgtatcgtcggcgagcgcgtcgtggctcggttgcgcacgaatctctaccgccgcacctacgtccaggatgccgagttcttcgatgccaacagggtcggtgatctgatctcgcgactgaactccgacacggttgtcgtgggcaagagcattactcagaacgtgtctgatggtctccgttccatggttagcggagcggcgggtttcgcggccatgttctggctcagccccaagctgacatccattatcctcatcatggttccccctatcggtcttggagcggttctctacggtcgcaacattcgcaacttgagcaggcagatccagaagaacgtcggctcactgatgaagatcgccgaggaacggttgggtaacatcaagaccagccaggcctttgccgctgaagtgcaagaggtgggtcgctacaacaagcaggtcagaaagattttcgccctgggccggaaggaggccattgtctcgggtgtctttttcagcagtacgtcgtatgcaggaaatctggcgatcctggctctcttgattgtcggcgggaaccttgtgcgctcaggggccatgtctctgggcgatttgacctcgttcatgatgtatactgtctttgctggttcgagtctcttcggtgttagcggcttctactcggaactgatgaagggtgtcggcgcagcgagtcgtttgttcgagctcgaggatcgcaagccggccatcccccagaccgttggtgtgaaggttgaatctgcgcaaggtcccatcaagttctcgaatgtaacgttcgcctaccctaccagacctgcagttacgatattcaatggcctcgactttgagatcccctcgggcacaaacgtgtgcattgtaggcccttcaggcggaggtaaaagcaccgtggcctccttactcttgcgcttctataaccccacatccggtagcatcaccatcaacggcatcgacatttccaagatgaacgccaagtctctccgccgccgcatcggcatggtctcacaggagccagtcctcttttcgggtaccattgccgaaaacattgcttacggccgtccacgggctccgcgcaccgagatcattgcggctgcccagaaggccaactgcggttttattagcgacttccccgaaggcctcgagacccaggtcggcgcccgtggcgcccagctttccggtggccagaagcagcgcatcgccattgctcgcgccctcctcaaggaccccgatattcttatcttggatgaggctacctccgccttggacgccgaatccgagaccctggtcaattctgcccttgcggaactcctcaagggccgcagcaccaccatttcgattgctcacagactgtccaccattaagcgatctgacaagatcattgtgctctcgagcgagggtaccgtggctgagattggcagctacacagagctgagcgccaacaaggacagccacttcagtaagctgatggagtggcagatgagcggtggtgatgtctccccggaccaccgccctccctctggggatcctcatgtcagtgaggttgaggagattgaggaggaatttgcggaggcggagaatgacgttgacgatgcggtggagaaggatgtgaagtcgcacaaggagccagtgagggagtaa

SEQ ID NO: 60202 - protein, 799 aa, Neurospora crassa
MVTGVAVRRAVLLPQCGGSGAGLAALLPFQRSPTMTSSILSAKFCRPFSSVQRPSTTSFTIVSVPFSSSHPGSRPCVQSQRWTSPFGLLRQLSTSQTRLREQPAKEAAAETAEEAAKDVEKVKEYTSEEHLKVHGFTKSERAHKAAHINMSARLSKDGKSQSGTKPGFAEVWRLIKIARPEVKAMSVAFVLLLISSAVTMSIPFSIGRILDLSTQGPAGEVRLFGLTLYQFFGGLAGLLTLGATANFGRIIILRIVGERVVARLRTNLYRRTYVQDAEFFDANRVGDLISRLNSDTVVVGKSITQNVSDGLRSMVSGAAGFAAMFWLSPKLTSIILIMVPPIGLGAVLYGRNIRNLSRQIQKNVGSLMKIAEERLGNIKTSQAFAAEVQEVGRYNKQVRKIFALGRKEAIVSGVFFSSTSYAGNLAILALLIVGGNLVRSGAMSLGDLTSFMMYTVFAGSSLFGVSGFYSELMKGVGAASRLFELEDRKPAIPQTVGVKVESAQGPIKFSNVTFAYPTRPAVTIFNGLDFEIPSGTNVCIVGPSGGGKSTVASLLLRFYNPTSGSITINGIDISKMNAKSLRRRIGMVSQEPVLFSGTIAENIAYGRPRAPRTEIIAAAQKANCGFISDFPEGLETQVGARGAQLSGGQKQRIAIARALLKDPDILILDEATSALDAESETLVNSALAELLKGRSTTISIAHRLSTIKRSDKIIVLSSEGTVAEIGSYTELSANKDSHFSKLMEWQMSGGDVSPDHRPPSGDPHVSEVEEIEEEFAEAENDVDDAVEKDVKSHKEPVRE

SEQ ID NO: 60203 - DNA, 4329 bp, Aspergillus fumigatus
  CDS (1)..(4329)
atgggctgtacttctgtcatcccacatcgattgacgggaaccctgaattggtatcacggatcgactaccacgatccacgaattctgcagcaatcgctatcttttgtctgagctcgcggtatccaggcgttccctgtctcgcggagatcatgtcacattcaccgctagtcaatgtcggccaaaaaggctccaatgttgccaatggcactcatgcaccatcagtagtacgttgatggtatttctcatgcttgaggatctcagaataagctcacctcccgtctaccttcttgtaaagatgcaaaaagtgaccaggcatattcccaccaaggacgacttgggcaagtccttcgcctatttgcggctcctcttttccttggactacacgatcgccgatgttctgctcataattgggggcttattattcgccatttgcgccggtattcccttccctctactcggtatcgtcttcggtgacctgatcaacgacctgaatacggtgacgtgcagttcctcggatcgcgctactgcggacctctcctcggctgtgcgggcgaaggtgttgtatgtcatctacatcacaattgcaaacttttggttcatctacgcccacagcacttgctggtgtttggtgagtgagcgcctggcacgccgctaccgtcgccgttactttgagagcattatcaaacaggaggccaaattcatcgaatcacttccttcgggtgacgttgtttcgcgtctggtcagtgacattgaacttgtgcagtcgggcacgtcggagaaggtgggactcgtcatctcaactctgtcatactttgtggctgcctatgtggttgccttcatcaaagtgcccaagattgcaggcatgctagtctctgtggttccttgtttcttcttgatggcacttggcggagggcattacatcaagaaatttgcgggtcgtctggccgagaaagtcaatgcggccacatccatagcttcctccagtttgtcacacctgacacttgttcatgccttcaatgcgaacgaccggctcgagaagcgtttcgccggctacctcttgcaatcgaggaaagacgcggttcgaaaagctactactcacgcggcacaattgggctgtctttacttcattgcctattccgccaacgccctagcattttgggaaggatcccaaatgatctcaaaatcggtggccgacggaaactctggaacctctgtcggtgcggtttacaccgttatcttcgtcctcattgacgcatccttcattctcagtcaggtcgctcccttcatccacgtgttcgcctcggctgcaggcgcttcagagaggcttttgcaggtgatcaacaggccttctgccattgatgggacgtctgattcaggcgataagactgccgcatttggtgaggaggatattcgctttcgggatgttcacttcaagtacccctcacgcccggatgtccctgtcctgcaaggagtgactttcaacatcccgcccaaaaagcatacagcgattgtgggtccttccgggggtggaaagtcaacagttgttgcacttctagagcgcttctacgatcccgattcaggggatgttctgatcggcgacaagaatttccgggacataaatgttagatacctgcgcgggaatatcggctatgtacaacaagaaccttcgttgctggatcgtaccattctggaaaatattgcatatggcttagtgtcgtctgcgatggagcggcatcagcggctcgccccctttatcctcgactcgagtctgcctgatcttgccgaaaaaattcgagagggccttacagagaaggaagcactccgcgagtacgacagttgtgtcaccgagattgtggacttggtcaaagaagcggctgccaatgcgaatgcgcttggctttattgaagcactgccctatggtttcgccacaaacgtaggtacggcagggaatcagctgagcggtggccagaagcaacgaattgctctcgcccgtgctctggttcgagaaccatgcctgttgattttggacgaggcaactgcggctcttgattcgaccagtgagcagcttatccaggccgcattgaacagggtatccgagcgagttacgactgtatcaatcgcccaccgcctagcaacagccaaaaatgcgcataagatcgttgtggtccagagtggccgtgttactgaggaaggatcccacacggacttggtttcgcggggaggggtctacgcagagatggtgcggcttcagaacctgggaaagctatctctagacgatagggtaatctcgggagacatgatcagtgcactgaacgcaactcctgaaacacgacagttgttggacgaaaaacaagcttttgtcgatggtaacaggtcagacatcacggaggacacggttgttgctgacacaccgtcggactcccgcgatggaagtgaggaggaagccagaaagaaaaggaagagaacacggtctgcagggttcgtcacacggtacaccttcgccttgatccgtcccaacttgcattgggttctgctaggtcttgccatgtctgtcattatcggcggcagctactcggcagaggctattgtatttggtcacacggttggaagcttgagcccttgcaggtctgccgaagctatcagccgcgatggcaacctctacggattactcttcttcatcctcgctttggtcgagttcggtgctaatgtggtgggtggctgtgctttcggctgggctgccgataaagtgttgtaccggatccgagtgctgtctttacgctcgctactgggccaaaccgtgaaatggcacgaatcggaggatcgcacccctgggacgttgctcacatacatcactggtgacgcatcggcgttgggtggcattactggcacaaccatagggctcctgctggcgactgctgtcaacctgataggaggtttagtgatctcgttctcaattgcttggaagatcacaattgtattgtttcccacaattccagtcctgctggtgtcaggcatgatgaaactccgagtgcaaaaacaactcgccgaacgtcatcagaaggcgtttgcgaaggctacagctgtcaccattgaggccgtcgacaacatccgcgcagtttctgcattctctctggagaagcaatcgtaccaggtttatggtcgtgcacttcgaggtccctaccgggctaccatcaaagccacgttccacgggaatgcatggttagcattggcatttagcatcagcaacctggtctatgccctagcgtactggtggggttcgaaacagatcgccgagggtcgctattcccaaacgcaatttttcattgtcatgccagctctgttgtttagcacgcagtcttgtgggcagatgtttgcccttgcgccggatatctcgaaagccggggtggcttcgtccaatatcgtcgaactgctgactacccgttcggcagaggatgaagtgacacctggatcatcgcacagcttccagccttccagcagtcttctcgaggagaagaccgcagtgcaggacatcgaggcgcaggaatatgctcgctccacacggcaacgtgccgctgaaaggggaggcatgggcgcccaactgcgcgatgtccattttacttatccacatcgcccagagcgcccggtcctgaagggtctcaacattgacatcaaaccaggtcagttttgcgctctggtggggcccagcgggtcaggcaaatcgaccacgtttgccatgctggagagattttaccggcctaatgccggtgcagttgtcatcgacggtgtggacgtcactcgtcaggtcgggacagagttccgcgatgatattgcgctggttcctcagcagaacattctcttcgagggaactgttgccttcaacgttgcacttggcgcatgcccaggccacgagcccacacaagaggagattgaggaggcatgtcgcatggccaacatccacgatgtcatcatgactctgccccaggggtatcagacgatgtgcagccatgacggcaagcagttttcgggtggacagcgccagcgactgtcgattgcccgcgcattggtgcgcaagcctcgcttgctgctgctggacgagtcgacaagtgcgctagacgtggaatcggagaagcgaattcaggaagcgctggcgaccctggcaggccggaccacagtagtggccatcgcgcatcgactgaataccattcatcgggccgatcagatcttcttgatcgaggacggcagatgcattgagcaaggtacacaccagcagctgatccagcggagcgagacataccggacgagtgtgattcaccaatcgctggaaacttga

SEQ ID NO: 60204 - protein, 1442 aa, Aspergillus fumigatus
MGCTSVIPHRLTGTLNWYHGSTTTIHEFCSNRYLLSELAVSRRSLSRGDHVTFTASQCRPKRLQCCQWHSCTISSTLMVFLMLEDLRISSPPVYLLVKMQKVTRHIPTKDDLGKSFAYLRLLFSLDYTIADVLLIIGGLLFAICAGIPFPLLGIVFGDLINDLNTVTCSSSDRATADLSSAVRAKVLYVIYITIANFWFIYAHSTCWCLVSERLARRYRRRYFESIIKQEAKFIESLPSGDVVSRLVSDIELVQSGTSEKVGLVISTLSYFVAAYVVAFIKVPKIAGMLVSVVPCFFLMALGGGHYIKKFAGRLAEKVNAATSIASSSLSHLTLVHAFNANDRLEKRFAGYLLQSRKDAVRKATTHAAQLGCLYFIAYSANALAFWEGSQMISKSVADGNSGTSVGAVYTVIFVLIDASFILSQVAPFIHVFASAAGASERLLQVINRPSAIDGTSDSGDKTAAFGEEDIRFRDVHFKYPSRPDVPVLQGVTFNIPPKKHTAIVGPSGGGKSTVVALLERFYDPDSGDVLIGDKNFRDINVRYLRGNIGYVQQEPSLLDRTILENIAYGLVSSAMERHQRLAPFILDSSLPDLAEKIREGLTEKEALREYDSCVTEIVDLVKEAAANANALGFIEALPYGFATNVGTAGNQLSGGQKQRIALARALVREPCLLILDEATAALDSTSEQLIQAALNRVSERVTTVSIAHRLATAKNAHKIVVVQSGRVTEEGSHTDLVSRGGVYAEMVRLQNLGKLSLDDRVISGDMISALNATPETRQLLDEKQAFVDGNRSDITEDTVVADTPSDSRDGSEEEARKKRKRTRSAGFVTRYTFALIRPNLHWVLLGLAMSVIIGGSYSAEAIVFGHTVGSLSPCRSAEAISRDGNLYGLLFFILALVEFGANVVGGCAFGWAADKVLYRIRVLSLRSLLGQTVKWHESEDRTPGTLLTYITGDASALGGITGTTIGLLLATAVNLIGGLVISFSIAWKITIVLFPTIPVLLVSGMMKLRVQKQLAERHQKAFAKATAVTIEAVDNIRAVSAFSLEKQSYQVYGRALRGPYRATIKATFHGNAWLALAFSISNLVYALAYWWGSKQIAEGRYSQTQFFIVMPALLFSTQSCGQMFALAPDISKAGVASSNIVELLTTRSAEDEVTPGSSHSFQPSSSLLEEKTAVQDIEAQEYARSTRQRAAERGGMGAQLRDVHFTYPHRPERPVLKGLNIDIKPGQFCALVGPSGSGKSTTFAMLERFYRPNAGAVVIDGVDVTRQVGTEFRDDIALVPQQNILFEGTVAFNVALGACPGHEPTQEEIEEACRMANIHDVIMTLPQGYQTMCSHDGKQFSGGQRQRLSIARALVRKPRLLLLDESTSALDVESEKRIQEALATLAGRTTVVAIAHRLNTIHRADQIFLIEDGRCIEQGTHQQLIQRSETYRTSVIHQSLET

SEQ ID NO: 60205 - DNA, 1935 bp, Triticum monococcum
  CDS (1)..(1935)
atggtgagggagatgcgcatcaacaccgcgccccgcggcaaccgcgtgccgctcctcaacaacggggagacgtccaggatcctctccgacctcgaggagggcagcaacgtccaggcggccaacgtcggcttctgccgggtcatcaagttggcaaaacatgacgcggggaagctcgtcttcgccaccatcgcgctgctcgtcgcctctctcagtaacctcctcgttcccaaatacggaggcaagataattgatattgtgtcaagagatgttcagcggccagaggataaggcccaagccctggcggatgtgaacggcaccatattgtacattgtgctaattgttgtaaccgggtcagtttgcacagctctccgggcatggctattcaattctgctagtgagagagtcgttgctcgacttagacaggacttgttcagtcatctcgtaaaccaggaaatagcattttttgacgtgactagaacaggagagctcttaagcaggctttctgaagatacccaaattataaagaatgccgctacaacaaacctttcagaagcactgcgtaatctgactaccacagctattggtcttggctttatgttttcaacttcatggaagctaacgttgttggcacttgtaattgttccagtgatatcagttgctgtgcgtaaatttgggcgttttcttcgtgagctttcacatcagacacaagctgcggctgctgtagcttcatccatagctgaggaatcttttggtgccattcgcacagtaagagcctttgctcaagagcctcatgagatttcacgatatggcggaaaagtaaacgagacactgaagcttggtctcaagcaagctaaagttgttggactattttctggagggcttaatgctgcatcaaccctgtcggttgttgttgtagttatttatggagctaacttaaccatcaatggttacatgacaactggttctcttacgtcattcatcttatacagccttacagttggctcgtcagtctctgccttgtcaggactatacacaactgtaatgaaagcatcaggtgcaagccgtagagtttttcaactacttgatcgtgtttcctcaatgacaaacactggggataaatgtccaaaaatcgaaaatgagggggaagttgagctggacgatgtctggtttgcatatccttctcgtccttctcatatgattcttaagggaatcacattgaagctagcaccaggttcaaaggttgcacttgttgggccgagtggtggtggaaaaactacaatagcaaatttgattgaaaggttttatgaccctctaaagggaaggatcttgctaaatggagtgcctttggtagaaatttcacatcagtatctccaccaaaaggtaagcatagttagccaggagcctacactctttaactgctccatcgaagagaatattgcatatggattggagggcaaagctagctctgctgacgttgaaaatgcagccaaaatggcaaacgcgcatgacttcatatgcagcttcccagaccaatacaaaactgtcgtcggagagcgaggcatcaggttatctggtgggcagaagcagagggttgccattgcaagagctttgcttatgaacccacgagtgcttctcttagatgaagctaccagcgctctggacgccgaaagcgagtaccttgttcaggatgcaatggactcgttgatgaaagggaggaccgttcttgtgatagctcatcggctctccaccgtgaagagcgccgacacggttgccgtcatctccgagggccagattgtggagagaggcacacacgacgaactcctcgagcgcgacggcatctacacggccctggtgaagaggcagctgcagttgcccaagtttgaagggaccgccaacgggacagcagaaatagaacccagcagtaatggccaatag

SEQ ID NO: 60206 - protein, 644 aa, Triticum monococcum
MVREMRINTAPRGNRVPLLNNGETSRILSDLEEGSNVQAANVGFCRVIKLAKHDAGKLVFATIALLVASLSNLLVPKYGGKIIDIVSRDVQRPEDKAQALADVNGTILYIVLIVVTGSVCTALRAWLFNSASERVVARLRQDLFSHLVNQEIAFFDVTRTGELLSRLSEDTQIIKNAATTNLSEALRNLTTTAIGLGFMFSTSWKLTLLALVIVPVISVAVRKFGRFLRELSHQTQAAAAVASSIAEESFGAIRTVRAFAQEPHEISRYGGKVNETLKLGLKQAKVVGLFSGGLNAASTLSVVVVVIYGANLTINGYMTTGSLTSFILYSLTVGSSVSALSGLYTTVMKASGASRRVFQLLDRVSSMTNTGDKCPKIENEGEVELDDVWFAYPSRPSHMILKGITLKLAPGSKVALVGPSGGGKTTIANLIERFYDPLKGRILLNGVPLVEISHQYLHQKVSIVSQEPTLFNCSIEENIAYGLEGKASSADVENAAKMANAHDFICSFPDQYKTVVGERGIRLSGGQKQRVAIARALLMNPRVLLLDEATSALDAESEYLVQDAMDSLMKGRTVLVIAHRLSTVKSADTVAVISEGQIVERGTHDELLERDGIYTALVKRQLQLPKFEGTANGTAEIEPSSNGQ

SEQ ID NO: 60207 - DNA, 4062 bp, Venturia inaequalis
  CDS (1)..(4062)
atgagtcttggggacgtgaaaaacggctcggccgtgaacgtgaaagatggcagcaaaaccagtcgcgggtcttccgagactgaggagatagaaaaagacaatgcgagaacgcaaatgggtcaggctccggttcctggaatggatacggacccttctggaggattgaaagagttgaagaatatgcgaaagctggactcgaatgtcatagaagtcaaggatcagaacgacgatccttttcgacatcttccagaacacgagcaagaaatcctaaggcggcaaacatttattccagacgtcaaagttggctatttcacactatatcgctatgcatcgcgctgggattgggcagcatggtggctcagcgttttttgcagcatagtatcaggtgccgctatgccattgatgacagttgtcttcggtggcttgactggtctcttcgccgattactttaaaaacgtcatcacctataagcaattcaactccgaactctcacactttgtcctctactttctgtacctcgccattggaacctttgtcaccacttacatcatgacggttggatttatatacgtcggggaacgttgcacaggcaaaatcagagaacgatatctgaaggccatgctcaggcagaacatagcttttttcgataagctcggagctggagaagtcactacacgaatcacggcagataccaatctcattcaggacggcatcagtgagaagtttggtctcaccctcaatgcattggccaccttcatttcagcattcgttatcgcctttatcaagtactggaagctcaccctcattctcacttctaccgtatttgctatcaccctcgtcatgggcgtgggcagttccttcgtggtcaggtggacagttcgaagtcagacggaatatgcaaaaggaggtacaatcgcggaagaagttcttagctcggtgcggaacgcgatagccttcaacactcaggacaaattggcgaaagtgtacgactcttatctcgtgattgccgagacaaatgggcgaaaactccagatgtcattgggagcaatgattgcgtcaatgatgacactgatttacctcaactacggcctctcgttctggcaaggatcgcgtttcttggtgcagggggatatgactgtttcccaagtccttacagtactcttcgctgtcatgattggcgcattctcacttggaaacgtcgcaccaaatttcaaggcctttacttctgcggtcgccgccggtcaaaagattttcgctgccattgatcggacctctccaatggaccctgactctcctgatggcaaggttttggagaagatgagcggaccaatcgaactgcgcaatgtcaagcacatatacccgtcacgcccagaggtcgtagtcatgaacggcgtcgatttgataattcctgctggaaagcaaactgcgttggtaggagcgtttgggtcaggaaagagtcccattgtgggcttggtagaacgattctatgagccagtaggaggtgaaatgtttctcgatggacatgatattagagagatcaatcttcattggcttcgacagaacatatctcttgttcagcaagaaccagttctgttcgcgacgacaatttacgaaaacattcgtttcggactgcttgggaccgagttcgagaaggtcgaccctgaaagacagcgggatttgatcgagggcgctgcgaaaatggcaaatgcgcatgacttcatcatggttttatcagagggataccagactcacgttggtgagcgaggtttcctcttgtctgggggacaaaaacaacgtattgcgatcgctcgtgcagtcgtgtcagaccctaaaattcttctcctagatgaagccacatcagctctcgacacaaagagcgaaggcgttgtgcaagctgcactcgacaaagctgcccagggacgaacaaccatcgtgatcgctcatcgactgtccactatcaagaacgccgacaatatcgttgtcatgtcacgaggcgcgatcgtcgagcaaggtcgacactcggagctcctcgaaaggaaatcggcgtatttcaaccttgtcgaagctcagaggatcgctgcggaaatcaagaatgataaccccgaggaggtcgagattctccaagaagtcgatggtcagaaacttcaccgcgcagccacaaacgaaaagggcgagccgattgatcctgatgatgaagatccagtcggacggttgaagcgcatgcaatctggaaaatcgatatcgagtgtcgagcttggaaagcgcggaactgagcagaccccggaatactcgttattgcagctactgggggtcgtgtggtctttcaacaaaacggaatggcccattatgctcctcggtttcatttgctctgtcatcgccggaggaggaaacccagttcaggccattttcttcgcaaaggccgtttctgctttgtcgttgccacctgcacaatacgctgaacttcgaagcgagatcaacttttggtctctcatgtacctcatgcttgctggaacccaacttatcagtaatttcggacaagctactgccttcggctactgctctgagaggttaattcatagagctcgtgaccaggcatttcgccacatgctcaggcaagatatcgaattctttgatcgcgaggaaaacaacgctggctctttgacatcattcctttcgacctcatctacacaactctctggcttgagtggatcgaccctcgggaccatcttgcaagtctcgacgaccctcgtcgttgccatgaccatctctcttgctatcggttggaaacttgcattggtttgtatctccgccatccccgtcctgcttgcctgtggatttttccgattttggatgctagccaggtttcaagcaagaacaaaggcagcctacgtaaattctgctggatttgcttgcgaggctacaagcgccatccgtaccgttgcctcgctcactcgcgaagaagatgttttcgagaagtaccacgcccagctcgaggctcaggccaagtccagcttagtttccattctcaagtcatcggctctctacgccgcctcccaatcattcatcttcttctgtatcgctttgggtttctggtatggcggcactctcatcgccaagcgcgagtacagccagttccaattcttcgtctgcttcatgtccatcatcttcggagctcaatcagccggaaccatcttctctttcgctccagacatgggcaaggccaaacacgctgctgctgagcttcagactctcttcgaccgcaagcccaagattgactgttggtccgaggagggcgacagattgacatccgtggagggtcacgtcgagtttcgagacgtgcacttccgttacccgacaagacccgaacaacctgtcctccgtggcctcaacctctccatcaagcctggtcagtacgttgctctcgtcggagccagtggatgcggtaaatccaccacgattgctctcttagagcgcttctacgacccgctttcaggtggcgtttacgttgacgggcaagaagtgtcgaagctcaacgtcaacgactaccgcagctacctcgcccttgtgagtcaggaaccgactctgtaccaaggaacgatccgggagaatgttctgcttggtgccgatcgcgagggcgttcccgaagacgaaatcatcagagcttgcaaggacgctaacatctacgacttcatcatgtccttgcccgacggcttcaacactgtttgtggtcagaagggtggtctgctctcaggtgggcaaaagcaacgtatcgccattgcaagagcacttctccgcaaccccaagattctcctactcgacgaggcaacctcagccttggattccgagtcggagcaaatcgttcaacttgccttggataaggccgccaagggcagaacgacaatcgccgtcgctcaccgtctgagcacaattcaaaaggccgatgtcatctacgtcatcgatggtggcagagttgtcgaggagggaagtcacaactacttgctttcaaagaatggacgctatgccgagttggtcatgatgcaaagtcttgagaaggctggctag

SEQ ID NO: 60208 - protein, 1353 aa, Venturia inaequalis
MSLGDVKNGSAVNVKDGSKTSRGSSETEEIEKDNARTQMGQAPVPGMDTDPSGGLKELKNMRKLDSNVIEVKDQNDDPFRHLPEHEQEILRRQTFIPDVKVGYFTLYRYASRWDWAAWWLSVFCSIVSGAAMPLMTVVFGGLTGLFADYFKNVITYKQFNSELSHFVLYFLYLAIGTFVTTYIMTVGFIYVGERCTGKIRERYLKAMLRQNIAFFDKLGAGEVTTRITADTNLIQDGISEKFGLTLNALATFISAFVIAFIKYWKLTLILTSTVFAITLVMGVGSSFVVRWTVRSQTEYAKGGTIAEEVLSSVRNAIAFNTQDKLAKVYDSYLVIAETNGRKLQMSLGAMIASMMTLIYLNYGLSFWQGSRFLVQGDMTVSQVLTVLFAVMIGAFSLGNVAPNFKAFTSAVAAGQKIFAAIDRTSPMDPDSPDGKVLEKMSGPIELRNVKHIYPSRPEVVVMNGVDLIIPAGKQTALVGAFGSGKSPIVGLVERFYEPVGGEMFLDGHDIREINLHWLRQNISLVQQEPVLFATTIYENIRFGLLGTEFEKVDPERQRDLIEGAAKMANAHDFIMVLSEGYQTHVGERGFLLSGGQKQRIAIARAVVSDPKILLLDEATSALDTKSEGVVQAALDKAAQGRTTIVIAHRLSTIKNADNIVVMSRGAIVEQGRHSELLERKSAYFNLVEAQRIAAEIKNDNPEEVEILQEVDGQKLHRAATNEKGEPIDPDDEDPVGRLKRMQSGKSISSVELGKRGTEQTPEYSLLQLLGVVWSFNKTEWPIMLLGFICSVIAGGGNPVQAIFFAKAVSALSLPPAQYAELRSEINFWSLMYLMLAGTQLISNFGQATAFGYCSERLIHRARDQAFRHMLRQDIEFFDREENNAGSLTSFLSTSSTQLSGLSGSTLGTILQVSTTLVVAMTISLAIGWKLALVCISAIPVLLACGFFRFWMLARFQARTKAAYVNSAGFACEATSAIRTVASLTREEDVFEKYHAQLEAQAKSSLVSILKSSALYAASQSFIFFCIALGFWYGGTLIAKREYSQFQFFVCFMSIIFGAQSAGTIFSFAPDMGKAKHAAAELQTLFDRKPKIDCWSEEGDRLTSVEGHVEFRDVHFRYPTRPEQPVLRGLNLSIKPGQYVALVGASGCGKSTTIALLERFYDPLSGGVYVDGQEVSKLNVNDYRSYLALVSQEPTLYQGTIRENVLLGADREGVPEDEIIRACKDANIYDFIMSLPDGFNTVCGQKGGLLSGGQKQRIAIARALLRNPKILLLDEATSALDSESEQIVQLALDKAAKGRTTIAVAHRLSTIQKADVIYVIDGGRVVEEGSHNYLLSKNGRYAELVMMQSLEKAG

SEQ ID NO: 60209 - DNA, 3225 bp, Drosophila melanogaster
  CDS (1)..(3225)
atggcttccttctacggaatcagcatcctagtactctatctaccactgcaaacctacttaagccgcgtaacatcaaagctgcggctgcagacggcactcaggacggatcagcgagtacgcatgatgaacgaaatcatctcgggcatccaggttatcaagatgtacacctgggagcgtccatttggtaaacttatagggcagatgcggcgcagcgagatgagctccattcgccagatgaaccttttgcgcggcatcctgctctccttcgagataaccctgggtcgcatagccatctttgtgagccttctgggattcgtcctgggcggaggcgaactgacggcagagcgcgccttctgcgtcaccgccttctacaacatccttaggcgtactgtgagcaagttctttccgagtggaatgtcgcagttcgctgaactgttggtctcaatgcgtcgtataactaattttatgatgcgggaggaggcaaatgtaatagatatgtcggagcgaagggacgaaaaagccgaagaggagcaacatttactgaaagaagtggagaagaggtcttatcccgttggcattggcaaggaaccagataccttagtggaaatcaaagccttgagagcacgctggggccaggagcaacacgatcttgtcttaaacaacgtcaatatgtcgctgcggcgcggccaattggtagctgtgattggacccgtgggatcgggcaaatcaagcctcattcaggctattctaggagagctgccgcctgaatctggatcggtacaagtctcgggaaagtattcctacgcctcccaggagccctggcttttcaatgcatctgttcgcgacaacattctatttggcttgcccatggacaagcagcgctatcgaactgtgctcaagcggtgtgccctggagcgggatttggagttgttgcacggtgatgggacaatcgtgggcgagcgcggagcttcactgtccggtggacagcgagcgagaatatgtttggccagagctgtttaccgcagggcggatgtataccttttggacgatcctctcagcgcagtggacactcatgtgggtaggcacctgttcgatgaatgcatgcgcggcttcctgggcaaacagctggtgatacttgtcacccatcagctgcagtttctggaggacgccgatctaattgttatcatggacaagggtcacgtctcggcgtgcgggacttacgaggagatgctcaagagcgggcaggactttgcccagctcttggtggaaagtacccagaacagcgggggaggggatgagatcataacgtcgccgaacctttcccgccagagtagcgctttaagcactaaaagttccaatggaagctcatcctcgctagaatccatggtggaaaaggagaaaccaaagcccagtgcggtgtcgtcgcaggagtcgcgcagtggtggtcaaattggcttgtccatgtacaagaaatactttggcgcaggctgcggcgtcctggtttttgttgtcctgataatgctgtgtattggcactcagattctggcgtctggcggggactattttctttcctactgggttaagaacacagcttcttcatcaacgctggatatctactacttcactgccattaatgtgggcctggtcatttgtgctttgctccgaactctgcttttcttcaacatcaccatgcactcctccactgagctgcacaacaccatgttccagggcttatcacgcacggctttgtacttttttcacaccaatccctccggtcggatcctcaatcgattcgccaatgacctgggtcaggtggatgaggtgatgcccgccgttatgttggattgtatacagatcttcctcaccctgacgggcatcatctgcgtgctgtgcgtgaccaacccgtggtacttgatcaacacctttgcaatgatgttagcattttactattggcgcgatttttacctgaagacgtcgagagatgtgaagcgcttggaggccgtggctcggtcgccgatgtactcgcacttcagtgccactcttgttggacttcccacaatccgggcgatgggcgcccagcaaactctgatcggccagtatgacaactaccaggatctgcacagctccggctactacacctttgtttctaccagtcgtgccttcggctattacctagatcttttctgtgtggcgtacgtgatatcggtgatactgcacaacttcttcaatcctcctctgcacaatgctggccagataggtctggcaattacccaagcactgggtatgacaggaatggtgcagtggggcatgcgtcagtctgcggagctggagaacgcaatgacctcagtggagcgagtcttagaatacaaagatctggatcctgaaggggattttaattcgcctgcggaaaagcaacctccgaagagttggcccaaagaaggaaaattggtgaccaaggacttgagcctgagatatgagcccgataccaattcgccttgtgtgctgaagggactgagcttcacgattcagcccatggagaaagtgggcatcgtaggacgcacaggtgcgggaaagtcgtcccttatcaatgcacttttcagactatcctacaacgatggagcaatactcatcgacagtctggacacaaatgatatcggtctgcacgatttacgtagcaagatatccattattccacaggaacccgttctgttctccggcacaatgcgatacaacttggatcccttcgagcaatatcccgatgataagctttggaaggccctcgaggacgtccacctcaaggaggaaatttcggagttgccttcgggtctgcagagcatcatatctgagggcgggaccaactttagcgtaggccaacgccagttagtctgcttggcaagggccattctgcgcgagaatagaatcctagttatggacgaggcaacggcaaatgtggatcctcagacggacgccctgattcaggccaccattcgaaacaaattcaaggactgcacagtactcacgatagctcatcgtctaaacaccattatggactccgacaaagttttggtgatggatgctggtcacgtcgtcgagttcggttctccatatgagctgttgaccgcgtcaaaggctaaagtgttccatggaatggttatgcagacgggaaaggccagctttgatcatctactgaaagttgcagagaataccaaacaaaaccatatttga

SEQ ID NO: 60210 - protein, 1074 aa, Drosophila melanogaster
MASFYGISILVLYLPLQTYLSRVTSKLRLQTALRTDQRVRMMNEIISGIQVIKMYTWERPFGKLIGQMRRSEMSSIRQMNLLRGILLSFEITLGRIAIFVSLLGFVLGGGELTAERAFCVTAFYNILRRTVSKFFPSGMSQFAELLVSMRRITNFMMREEANVIDMSERRDEKAEEEQHLLKEVEKRSYPVGIGKEPDTLVEIKALRARWGQEQHDLVLNNVNMSLRRGQLVAVIGPVGSGKSSLIQAILGELPPESGSVQVSGKYSYASQEPWLFNASVRDNILFGLPMDKQRYRTVLKRCALERDLELLHGDGTIVGERGASLSGGQRARICLARAVYRRADVYLLDDPLSAVDTHVGRHLFDECMRGFLGKQLVILVTHQLQFLEDADLIVIMDKGHVSACGTYEEMLKSGQDFAQLLVESTQNSGGGDEIITSPNLSRQSSALSTKSSNGSSSSLESMVEKEKPKPSAVSSQESRSGGQIGLSMYKKYFGAGCGVLVFVVLIMLCIGTQILASGGDYFLSYWVKNTASSSTLDIYYFTAINVGLVICALLRTLLFFNITMHSSTELHNTMFQGLSRTALYFFHTNPSGRILNRFANDLGQVDEVMPAVMLDCIQIFLTLTGIICVLCVTNPWYLINTFAMMLAFYYWRDFYLKTSRDVKRLEAVARSPMYSHFSATLVGLPTIRAMGAQQTLIGQYDNYQDLHSSGYYTFVSTSRAFGYYLDLFCVAYVISVILHNFFNPPLHNAGQIGLAITQALGMTGMVQWGMRQSAELENAMTSVERVLEYKDLDPEGDFNSPAEKQPPKSWPKEGKLVTKDLSLRYEPDTNSPCVLKGLSFTIQPMEKVGIVGRTGAGKSSLINALFRLSYNDGAILIDSLDTNDIGLHDLRSKISIIPQEPVLFSGTMRYNLDPFEQYPDDKLWKALEDVHLKEEISELPSGLQSIISEGGTNFSVGQRQLVCLARAILRENRILVMDEATANVDPQTDALIQATIRNKFKDCTVLTIAHRLNTIMDSDKVLVMDAGHVVEFGSPYELLTASKAKVFHGMVMQTGKASFDHLLKVAENTKQNHI

SEQ ID NO: 60211 - DNA, 3879 bp, Rhizomucor racemosus
  CDS (1)..(3879)
atgaaagagtctaaatcaacgcaaccagatgatacattactaagagacgatactgcggatcagccagccacacaagacaccaagagcaagaagaaagagacagtatccatctttcgactattccaatttgccacaacaagagacctgctactgatctgcattgctggcttctgttcatgcactacgggtgctattcagcccatctctattctatttttcggcaatgtgctcaagaaactgggtgaagccattgtagaaggaaacgatctgatggaagcgaccatgccgatcatcaagctgtacgtgtatctaggcacaggtgtcatgacagctgcctacatctccaattgtctgtgggtcttgacgggcgagaatcaagcccgacgcattcgccaactgtacgtgcactccattctgcgccaagaaatgagctggtttgacaagtctgaggaaggatcgcttacaaccagactgtctgctgatgtgcaattgatccaagacggtatctctgaaaagtttggccagtttctcatgtgttttgcgcagttcattgcgggctgctcggtcgctttcagcaagggatggcgtctgtccattgtgatgattgcagtgacacctgctattgcatgcacaggcggtgtgatgggcattctggtcacaaagtacacagtggaaacacaagatgcctatgccgatgcaggctccatctctgagcaagtctttgctggcatccgcaccgtctactcgttttcgctgcagaatcgcttcgccaaacgctatgaagagaagctcgacaaagccatgcgagccggtatcaagcgtggcattatcctcggaacaggactcggtatattcatgttttgtctctttgccatgtacggtttatcgttttggtatggttctcgtcttgtgcacgaccatattatggacggatccactgtgctggtggtctttctgtcgatgatgatgggtgaattctcgctgctgcaactgcctaccaatcttgctgccgtgtcctctgcctctgctgcagcctacaagatctttgaaaccatcaagcgtgtgcctgatatcgacacgagctctccagacggtgtgattcctagccaagtgcttggtgaattggagtttaagcatgtcaaattcagataccccacccgacctgacaccatcattctaaaggacctcagtctcaagatcaagcctggcatgactgtggcatttgtaggaccgtcaggatctggcaagtctaccagtgtgcagctcttgcagcgattttatgatcccatgtctggttctgtgagcttggatggcaagaatctaaaggagctcaatgtcaaatggcttcgtcagcagattggcgttgtaagccaggaacccgtcttgttcaataccagtattcgccagaaccttatgatgggaagcgagaaccgcaacattagtatggaagagatcactgctgcctgcaaaaaggccaactgccatagtttcatcaagcaactgcccaagggctactcgacacttgtgggcgagcatggcggtatgctctctggcggacaaaagcagcgcattgctattgcgcgtgccatcctcaagaaccctgccattctgctactggatgaggccacctctgcgctagacactcaatccgagagactggtgcaaaaggcactggatgaagcagcagcaaatcgcacgaccattgttgttgcccatcgtctgtccactgtgcgcaatgctgatctgattgtggtgatgcaacacggcgacctgattgaacaaggcacacacgacgacttgatcgcaaagggtggtgtctactctgaactggtcaagaagcagcaaattcaaacctcatctaacaacacccacaaccgcaagaccaagcaagaagaagagcaagaagacgagatcctgctgcgtaatgaagccatggaagtcaacagaaagagttgcattgaactgaaccgtgcctccaacaacgcgtccatcatcagtgtgccagctgccagaaagagtcgcttctctgtgctggacgggtttggaagagaagctgcgtcgcgaaaagaagctcaagaaaagcacgcaaagatgaaggcgcctgtgtggaaggtctttatgcagatgcgtccacagtggggctggtgtatgcttggctctattggtgcgtgtattgcgggcaccgtgtttcctctgtacgccctcttctttgccaaggtgattaccatgctgaacgaaaacgacgacaaggactacgggcccatggagggacccaacatgtattcgttcctgtttgtcattttgggcatgtttgctttcctgggattcgctctgcaaaccgtgtcgtttgagattgctggtgccaagtacaccaaaacactgagaagcatgctgtttgtctcgtttatgaagcaagaaattggctactttgaccgcgacgagaacaatgtgggctcgcttacctccaagctggctgtggatgccaagaatgtcaatgaaatgatcacgcgtgcgtggccagatgttgtccagattgcctttacttctgccattggcatgaccattgcttttatgcacagctggaagctgacactgatcatcatgtgcatgacgccactcattgtgggtgcagctggctggaactccaaggtgcaggaaggctttgagggcagcaccaaagaggccaacgagcagtctgcagaggtcgccagcgaggccatcaaggagatccgtacagtgacagcactcaacaagcagagctactttgaggagcgatactacaatgccactgaaagaccgcatcgtttggcacagcgtaaagcatacacctcttccatcggctttgcactgctacaaggcacatcgctctacaccaacgcagtggcgttctatgcaggctccaagctgattacccaaggcaacctggatctcagcgacatggtgatcactatgatgtccatcatgatcatggcagacggcgtcggaagaagcagtatctttgtctctacctttgccaaagccaagattgcggccatcaccacatttgaggtgctcaaccgtcagccagccattgactctgaattggaaggcattgaacccgagggagaagacattgacggcgacattgatttcagcagcattgctttcagatacccggcaagacctgacattcccatctttgatggcgagttcaacctgaaaggcaagcaagggcagacaatcgctctcgtaggaccctctggcagtggtaaatcaacgaccattggcatgctccagcgatggtatgatccgcttagcggcactgtgcgtgtggataatcacaatgtcaagtcttacactttgggcaatttgcgaagccatatggccttggtgtctcaggaacctactttgtttgatatgactattggtgaaaacattcgctttggtgtggatgatagcaaggaggttactcaagaagaggtcgaggctgtctgtaaatctgccaacattcacaactttattgtttctttgcctaaaggatacgaccagagggtgggtgataaaggctcgcagctctccggtggccaaaagcaaagaatagccattgcccgtgcattgattcgcaagcctaaaatactcttgttggatgaggcaaccagcgcattggacagcgaaagcgaaaaactggtgcaaaaggccctggataacatcattcaggagggaggacgtaccaccatcacaattgcccatcgtctgtctaccattacaaatgctgatttaatttgcgtcatcaaagacggcaaagtcattgagcaaggaaaccattggcagctgctgaagctggatggtgtctacaagagcctggtgcagcagcaatcattgagctcgagttctggatga

SEQ ID NO: 60212 - protein, 1292 aa, Rhizomucor racemosus
MKESKSTQPDDTLLRDDTADQPATQDTKSKKKETVSIFRLFQFATTRDLLLICIAGFCSCTTGAIQPISILFFGNVLKKLGEAIVEGNDLMEATMPIIKLYVYLGTGVMTAAYISNCLWVLTGENQARRIRQLYVHSILRQEMSWFDKSEEGSLTTRLSADVQLIQDGISEKFGQFLMCFAQFIAGCSVAFSKGWRLSIVMIAVTPAIACTGGVMGILVTKYTVETQDAYADAGSISEQVFAGIRTVYSFSLQNRFAKRYEEKLDKAMRAGIKRGIILGTGLGIFMFCLFAMYGLSFWYGSRLVHDHIMDGSTVLVVFLSMMMGEFSLLQLPTNLAAVSSASAAAYKIFETIKRVPDIDTSSPDGVIPSQVLGELEFKHVKFRYPTRPDTIILKDLSLKIKPGMTVAFVGPSGSGKSTSVQLLQRFYDPMSGSVSLDGKNLKELNVKWLRQQIGVVSQEPVLFNTSIRQNLMMGSENRNISMEEITAACKKANCHSFIKQLPKGYSTLVGEHGGMLSGGQKQRIAIARAILKNPAILLLDEATSALDTQSERLVQKALDEAAANRTTIVVAHRLSTVRNADLIVVMQHGDLIEQGTHDDLIAKGGVYSELVKKQQIQTSSNNTHNRKTKQEEEQEDEILLRNEAMEVNRKSCIELNRASNNASIISVPAARKSRFSVLDGFGREAASRKEAQEKHAKMKAPVWKVFMQMRPQWGWCMLGSIGACIAGTVFPLYALFFAKVITMLNENDDKDYGPMEGPNMYSFLFVILGMFAFLGFALQTVSFEIAGAKYTKTLRSMLFVSFMKQEIGYFDRDENNVGSLTSKLAVDAKNVNEMITRAWPDVVQIAFTSAIGMTIAFMHSWKLTLIIMCMTPLIVGAAGWNSKVQEGFEGSTKEANEQSAEVASEAIKEIRTVTALNKQSYFEERYYNATERPHRLAQRKAYTSSIGFALLQGTSLYTNAVAFYAGSKLITQGNLDLSDMVITMMSIMIMADGVGRSSIFVSTFAKAKIAAITTFEVLNRQPAIDSELEGIEPEGEDIDGDIDFSSIAFRYPARPDIPIFDGEFNLKGKQGQTIALVGPSGSGKSTTIGMLQRWYDPLSGTVRVDNHNVKSYTLGNLRSHMALVSQEPTLFDMTIGENIRFGVDDSKEVTQEEVEAVCKSANIHNFIVSLPKGYDQRVGDKGSQLSGGQKQRIAIARALIRKPKILLLDEATSALDSESEKLVQKALDNIIQEGGRTTITIAHRLSTITNADLICVIKDGKVIEQGNHWQLLKLDGVYKSLVQQQSLSSSSG

SEQ ID NO: 60213 - DNA, 1980 bp, Arabidopsis thaliana
  CDS (1)..(1980)
atggctcagcaagtactcggctgcacgagccgccccatccgcgtttctcttcaccggtgttctgttattaccaccagtgacactatcagaaggaagaatctccgattcgttagaaacccgagattgtcgttttctcttcaatcttcaactagaaattatcgtctgccttcgattaattgctcgacggtgaatggagcagtagcggaaactgcggaatattacgaaggagaaggagataacgtttcacttgctgagaaaatccggcaatgtattgatttcctccggacgattttaccaggtggaagctggtggagtttctccgatgaagttgatggtaggttcattgctaagcctgtgactgtttggcgtgcgttaagtcggatgtgggaacttgtggctgaggatcgttgggttatcttcgctgcgttttccactcttatagtagccgcggtgcgtggttcttccttgctttcagagataactattccgcattttttaacagcttcgatcttctcggcacaaagtggtgatatcgctgtgtttcatcgaaatgtcaagctcttggatatatcatttttcgactctcaaactgttggtgacttaacaagcagacttggctcagactgtcagcaagtctcgagggtcatcggaaatgatctgaacatgatatttcgcaatgttcttcagggtacaggggcattgatttatttgctaattttgtcttggccccttgggctgtgcacattggtgatatgctgtattttggctgcggttatgttcgtttatgggatgtaccaaaagaagacagcgaagctaattcaggagatcacagcttctgcaaatgaagtcgctcaagagacatactctttgatgagaaccgttcgtgtatatgggacagagaagcaagagtttaaaaggtacaatcactggcttcagagattggcggatataagtttgagacagagtgctgcatatggtatttggaactggagcttcaacactctataccatgcaactcagattattgctgtcctggttggaggattgtctatcttagctggtcaaataacagcagagcagctgacaaagtttctgttgtatagtgagtggttaatctatgctacatggtgggtgggagataatttatcatctttgatgcaatcggttggagcaagtgaaaaggttttccaaatgatggatctcaagccaagaacgagactgcagagactgacaggacatatcgagtttgtagatgtgtcatttagctacccttcaagagatgaggtagcggtggttcaaaacgtaaacatttccgtgcatcctggtgaagtggtagcaatcgttggtctaagtggcagtggcaaaagtacactggttaatcttttgctgcaactctacgaaccaacaagtggtcagattctactagatggggttcctttgaaagagttggatgtcaagtggcttaggcaaagaatcggatacgtggggcaggaaccaaagctcttccgcacagacatcagttcgaacatcaagtacggatgtgatcgtaatatatcgcaagaagatataatatcggctgcaaagcaagcctatgcacatgactttatcacagcacttccgaatggttacaacacaattgttgatgatgatctactcagtggagggcagaaacaacggattgccattgctcgtgccatccttagagatcctagaatcctcatcctcgatgaagccacaagtgcactcgatgcagagagcgaacacaatgttaagggcgtacttcgttctatcggaaacgactcagcaacaaagagaagcgtcatagtgatagcacacagactttctacaattcaagctgcggatagaatagtggctatggacagtggacgagtcgtcgagatgggcagtcacaaagaacttttgagcaaagatggcttatacgcgagattgacgaagagacaaaacgatgccgtcttatga

SEQ ID NO: 60214 - protein, 659 aa, Arabidopsis thaliana
MAQQVLGCTSRPIRVSLHRCSVITTSDTIRRKNLRFVRNPRLSFSLQSSTRNYRLPSINCSTVNGAVAETAEYYEGEGDNVSLAEKIRQCIDFLRTILPGGSWWSFSDEVDGRFIAKPVTVWRALSRMWELVAEDRWVIFAAFSTLIVAAVRGSSLLSEITIPHFLTASIFSAQSGDIAVFHRNVKLLDISFFDSQTVGDLTSRLGSDCQQVSRVIGNDLNMIFRNVLQGTGALIYLLILSWPLGLCTLVICCILAAVMFVYGMYQKKTAKLIQEITASANEVAQETYSLMRTVRVYGTEKQEFKRYNHWLQRLADISLRQSAAYGIWNWSFNTLYHATQIIAVLVGGLSILAGQITAEQLTKFLLYSEWLIYATWWVGDNLSSLMQSVGASEKVFQMMDLKPRTRLQRLTGHIEFVDVSFSYPSRDEVAVVQNVNISVHPGEVVAIVGLSGSGKSTLVNLLLQLYEPTSGQILLDGVPLKELDVKWLRQRIGYVGQEPKLFRTDISSNIKYGCDRNISQEDIISAAKQAYAHDFITALPNGYNTIVDDDLLSGGQKQRIAIARAILRDPRILILDEATSALDAESEHNVKGVLRSIGNDSATKRSVIVIAHRLSTIQAADRIVAMDSGRVVEMGSHKELLSKDGLYARLTKRQNDAVL

SEQ ID NO: 60215 - DNA, 1317 bp, Arabidopsis thaliana
  CDS (1)..(1317)
atgatatttcgcaatgttcttcagggtacaggggcattgatttatttgctaattttgtcttggccccttgggctgtgcacattggtgatatgctgtattttggctgcggttatgttcgtttatgggatgtaccaaaagaagacagcgaagctaattcaggagatcacagcttctgcaaatgaagtcgctcaagagacatactctttgatgagaaccgttcgtgtatatgggacagagaagcaagagtttaaaaggtacaatcactggcttcagagattggcggatataagtttgagacagagtgctgcatatggtatttggaactggagcttcaacactctataccatgcaactcagattattgctgtcctggttggaggattgtctatcttagctggtcaaataacagcagagcagctgacaaagtttctgttgtatagtgagtggttaatctatgctacatggtgggtgggagataatttatcatctttgatgcaatcggttggagcaagtgaaaaggttttccaaatgatggatctcaagccaagaacgagactgcagagactgacaggacatatcgagtttgtagatgtgtcatttagctacccttcaagagatgaggtagcggtggttcaaaacgtaaacatttccgtgcatcctggtgaagtggtagcaatcgttggtctaagtggcagtggcaaaagtacactggttaatcttttgctgcaactctacgaaccaacaagtggtcagattctactagatggggttcctttgaaagagttggatgtcaagtggcttaggcaaagaatcggatacgtggggcaggaaccaaagctcttccgcacagacatcagttcgaacatcaagtacggatgtgatcgtaatatatcgcaagaagatataatatcggctgcaaagcaagcctatgcacatgactttatcacagcacttccgaatggttacaacacaattgttgatgatgatctactcagtggagggcagaaacaacggattgccattgctcgtgccatccttagagatcctagaatcctcatcctcgatgaagccacaagtgcactcgatgcagagagcgaacacaatgttaagggcgtacttcgttctatcggaaacgactcagcaacaaagagaagcgtcatagtgatagcacacagactttctacaattcaagctgcggatagaatagtggctatggacagtggacgagtcgtcgagatgggcagtcacaaagaacttttgagcaaagatggcttatacgcgagattgacgaagagacaaaacgatgccgtcttatga

SEQ ID NO: 60216 - protein, 438 aa, Arabidopsis thaliana
MIFRNVLQGTGALIYLLILSWPLGLCTLVICCILAAVMFVYGMYQKKTAKLIQEITASANEVAQETYSLMRTVRVYGTEKQEFKRYNHWLQRLADISLRQSAAYGIWNWSFNTLYHATQIIAVLVGGLSILAGQITAEQLTKFLLYSEWLIYATWWVGDNLSSLMQSVGASEKVFQMMDLKPRTRLQRLTGHIEFVDVSFSYPSRDEVAVVQNVNISVHPGEVVAIVGLSGSGKSTLVNLLLQLYEPTSGQILLDGVPLKELDVKWLRQRIGYVGQEPKLFRTDISSNIKYGCDRNISQEDIISAAKQAYAHDFITALPNGYNTIVDDDLLSGGQKQRIAIARAILRDPRILILDEATSALDAESEHNVKGVLRSIGNDSATKRSVIVIAHRLSTIQAADRIVAMDSGRVVEMGSHKELLSKDGLYARLTKRQNDAVL

SEQ ID NO: 60217 - DNA, 3996 bp, Trichophyton rubrum; identical to SEQ ID NO: 7615
  CDS (1)..(3996)

SEQ ID NO: 60218 - protein, 1331 aa, Trichophyton rubrum; identical to SEQ ID NO: 7616

SEQ ID NO: 60219 - DNA, 2118 bp, Escherichia coli
  CDS (1)..(2118): transl_table=11
atgagtaaatgtagttctcataatagtctgtatgcactgatattgcttgcacaatatcataatataactgtcaatgctgaaactataaggcatcagtataatacccacacacaagattttggggtgactgaatggttactggcagcgaaatccattggcttaaaagcaaaatatgtagaaaaacatttttccagattgtcaataatttctttacctgcgttgatatggcgggatgacggtaagcattatatattatctcgtgttactaaagattcatcacgctatcttgtttatgatccagaacagcatcagtcactaacttttagtcgggatgagttcgaaaaactgtatcagggaaaagtcattctggttacgtcaagagcaacagtagtcggagagttagctaaatttgatttttcctggtttatcccctctgttgtgaaatacaggaggattttacttgaggtgttaactgtttctgcttttattcagtttcttgcgttaataacacctcttttttttcaggttgtaatggataaggttttagttcaccgggggttttcaacgttaaatattatcacaatagcatttattatagtgatactttttgaagtgatattaaccggagccagaacttatattttctctcatactacaagtcgtattgacgtcgaactgggtgctaagttattcagacatttgcttgcattgcctgtttcatattttgaaaatcgcagggtcggagagaccgttgccagagtaagggaactggagcaaattcgtaattttttaaccggacaagcgttgacatcagttcttgatctgtttttttctgtaatatttttttgtgtcatgtggtattacagtcctcaattaacactggttatattattgtcactaccttgttatgttatatggtcattgtttatatcacccttattacgtcgacgtcttgatgataagtttctcaggaatgcagaaaatcaagcttttcttgtcgaaacggtaacagcaataaatacaattaaatccatggcagtatcgccacagatgattgctacatgggataaacaactggccgggtatgttgcttccagtttcagggtaaatctggttgcaatgacagggcagcaggggatacagctgatacagaaaagtgtaatggtaattagtctatggatgggagcacatcttgtcatatcgggagagataagcatcgggcagttaatcgcgtttaatatgcttgcaggtcaggtcattgctcctgttatcagactggctcatctttggcaggattttcagcaagttggtatttctgttgagcgccttggggatgtattaaatacaccggtagagaaaaagtcaggcagaaatatactgccggaaattcagggggatatcgaatttaaaaatgtcagatttcggtattcttctgacggtaatgttattttgaataatattaatttatacatatcaaagggggatgttatcggtatagttggccgttctggttcaggaaaaagtacattaacaaaactgcttcagcgcttttatataccagagaccggacagattttaattgatgggcatgatttatcacttgcagatccagaatggttacgacgccagattggtgttgtattacaggaaaatatactattaaatcgtagtattatcgataatattacattagcttctccggctgtatctatggaacaggctattgaggcagccagacttgcaggtgcccatgattttattacagaactaaaagaagggtacaatactattgttggagaacagggcgttggtctttcaggagggcagcgccaacggatcgcaatagcccgggctcttgttacaaatcctcgaattcttatttttgatgaagcaaccagtgctcttgattatgagtcggaaaatataataatgaaaaatatgtcaagaatatgtaagaacagaaccgtaattattattgcacacaggttgtcaactgtaaaaaatgcaaacagaataattgttatggataatggatttatttctgaagatggcacacataaagagcttatctccaaaaaagacagtttatatgcatatttatatcagttgcaggcataa

SEQ ID NO: 60220 - protein, 705 aa, Escherichia coli
MSKCSSHNSLYALILLAQYHNITVNAETIRHQYNTHTQDFGVTEWLLAAKSIGLKAKYVEKHFSRLSIISLPALIWRDDGKHYILSRVTKDSSRYLVYDPEQHQSLTFSRDEFEKLYQGKVILVTSRATVVGELAKFDFSWFIPSVVKYRRILLEVLTVSAFIQFLALITPLFFQVVMDKVLVHRGFSTLNIITIAFIIVILFEVILTGARTYIFSHTTSRIDVELGAKLFRHLLALPVSYFENRRVGETVARVRELEQIRNFLTGQALTSVLDLFFSVIFFCVMWYYSPQLTLVILLSLPCYVIWSLFISPLLRRRLDDKFLRNAENQAFLVETVTAINTIKSMAVSPQMIATWDKQLAGYVASSFRVNLVAMTGQQGIQLIQKSVMVISLWMGAHLVISGEISIGQLIAFNMLAGQVIAPVIRLAHLWQDFQQVGISVERLGDVLNTPVEKKSGRNILPEIQGDIEFKNVRFRYSSDGNVILNNINLYISKGDVIGIVGRSGSGKSTLTKLLQRFYIPETGQILIDGHDLSLADPEWLRRQIGVVLQENILLNRSIIDNITLASPAVSMEQAIEAARLAGAHDFITELKEGYNTIVGEQGVGLSGGQRQRIAIARALVTNPRILIFDEATSALDYESENIIMKNMSRICKNRTVIIIAHRLSTVKNANRIIVMDNGFISEDGTHKELISKKDSLYAYLYQLQA

SEQ ID NO: 60221 - DNA, 3750 bp, Gossypium hirsutum
  CDS (1)..(3750)
atgacaccttcggccggttcattttccggcgaccgagatgatgacggcgatgccacgaagaagaagaagaagcaacggaaagttccattgttgaagctgttttcatttgctgatttttatgaccatgtgttaatgggattgggatcactaggtgcatgtgtgcatggtgcttcggtgcctgttttcttcattttctttggcaaattgattaacattataggaatggcttatcttttccctaaagaagcttctcataaagttgcaaagtattcgttggattttgtatatctcagtgtcgctattttattttcatcatggatagaggtggcttgttggatgcataccggagaaagacaagcggcaaaaatgaggatggcatatctaaaatcaatgctaaatcaagatataagtttatttgacacagaagcttcaactggagaggtcatttctgcaattacaagtgacattattgttgttcaagatgccctttctgagaaggttgggaatttcatgcattatataagcagattcatagcaggtttcagcattggctttgctagagtatggcaaatcagccttgtaactctctccatagtcccattgatagcccttgctggtggcatttatgcttatgttgccactggtctcattgctcgagttcgaaactcatatgtcaaagctggtgaaattgcagaagaggtgattgggaatgtaagaacagtacaagcatttgcaggggaagaaagggctgtgaaatcatacaaggatgctttgatgaacacatacacatatggtaaaaaagctgggttaacaaagggtcttggccttggttcactgcattgtgtgcttttcgtttcgtgggcattgcttgtttggttcacaagtattgttgttcataaaaacatcgcaaatggtggggattctttcactacaatgcttaatgttgtcatttctggcctgtcgttaggacaagcggcaccagacatatctgcgtttattcgagcaagggcagctgcgtatcctatattcgagatgatagagaggaacacagttagtaaaaccagctcgaaaacgggccgtaaactaagcaaagtggaggggaacattgagctcaagaatgtatctttcagttatccgtctcgccccgatgtggtcatcttcgataggttctgccttaacatacctactggaaagattgtagctcttgtcggagggagtggctcggggaaaagtacggtcatatcattaatcgaaaggttttacgagccacttgcaggagaaatattgttggatgggaataatatcaagggccttgacctcaaatggcttagacaacaaattggtttggttaatcaagagcctgctctttttgctactaccattagggagaacattctatacggaaaagacgatgctacagtcgatgaaataacgcgtgccgcaaaactttctgaggccattgcctttattaacaatctccctgatagatttgagactcaggttggtgaaagaggaatacaactatcaggtggacagaagcaaaggattgcgatatctcgggcaatagtgaaaaatccacctattcttttactcgatgaagcaacgagtgcccttgatgcagaatccgaaaagagtgtgcaagaggcacttgatcgtgtgatggtggggcgaacgacggtggtggtagctcacaggctttctactattaggaatgcagatgtgattgctgttgttcaaaatgggaagattgttgaaaccggtactcatgatgagcttatttcgaacccgaacagtacttactcttcgctcgttcagcatcaagagacatcgcctttgcaacgctacccttcacaaggtcctactttaagtaggccactcagtgtgagttattcacgagaattatcccgaacaaggacgagctttggtgcaagttttcgttctgaaagagactcagttagccgtgctggtgctgatggaatcgatgcagggaaacaaccttatgtttcacctggaagactgtattctatgataggacctgactggtattatgggttctttggtaccgttaccgcattgattgccggagctcaaatgcctctatttgctctcggggtttctcaagctctcgtagcctattacatggactgggaaacaacgtgccacgaagtcaagaagatcgccatcctgttttgttgtgcttctgtcataacggtcatcgttcatgcaatagagcacctatgttttggcatcatgggagaacgactcactcttcgtgtgcgtgaagggatgttttcagccatcttgaaaaacgagattggatggttcgatgacttaaacaacgcaagttccatgcttgcatctcgtctcgaaaccgacgccacgtttctaagaggtgtagtcgtggaccggacatcgattctcatacaaaacgtaggcttggtcattgctgccttcatcattgcattcatcttaaactggagaatcacacttattatcttggccacttttccattgatcataagtggtcacattagcgagaaactattcatgcaaggctacggcggtaacttgagcaaagcatatctaaaagcaaacatgatcgccggcgaggctgtcagtaatatgcgaactgtcgctgcattttgcgctgaggaaaagatccttgatctttatgcccgtgagctcatagagccttcggaacgttcatttaagcgtggtcaaattgcagggatattctatgggatttcccagttcttcatcttctcatcttatggccttgccttatggtatggttctgttttaatggggaaggagctagctagctttaaatcggtcatgaaatcgttcatggtgttgattgtgacggcattagccatgggagaaacgttggcactggtcccggaccttctaaaagggaaccaaatggtggcatcggtgttcgagattatggaccggaagacgcaggttgttggggatgctggcgaagagctaacaaatgtggaaggtaccattgagctaaagggtgttcactttagttatccgtcgagaccggatgtggtgatattcaaggattttgatctgaaagttcgttcagggaagagtatggcgcttgtgggacaaagcggatccggtaagagctcagttcttgctcttatacttcggttctacgatccaacatctgggaaagtgatgattgatggcagagacgttaagaaactaaagctcaaatcccttcggaaacatatcggattagtccaacaagaaccagctcttttcgccacttcaatatacgaaaacatcctatacggcaaagaaggagcatctgaatctgaagtggtcgaagcggctaaactcgccaatgcacatagtttcataagttccctccccgaaggttactcaacaaaagtcggcgagcgaggggtacaactctcgggtggccagaaacaaagagtagccattgctcgagctgtcctcaagaaccccgaaatcttgctgctcgacgaagccactagtgctctcgacgtcgagtcggagcgcgtggtgcagcaagctctcgaccggttaatgaggaaccgaacaacggtaatggtggctcataggctgtcgacaattaaaaatgcggatcgaatatcggtcattcagggtggacgaataattgagcaagggacacattcgagcttaatcgaaaatcggaatggaccgtactttaagttaatcaaccttcagcagcagcagcaaatggaacaatag

SEQ ID NO: 60222 - protein, 1249 aa, Gossypium hirsutum
MTPSAGSFSGDRDDDGDATKKKKKQRKVPLLKLFSFADFYDHVLMGLGSLGACVHGASVPVFFIFFGKLINIIGMAYLFPKEASHKVAKYSLDFVYLSVAILFSSWIEVACWMHTGERQAAKMRMAYLKSMLNQDISLFDTEASTGEVISAITSDIIVVQDALSEKVGNFMHYISRFIAGFSIGFARVWQISLVTLSIVPLIALAGGIYAYVATGLIARVRNSYVKAGEIAEEVIGNVRTVQAFAGEERAVKSYKDALMNTYTYGKKAGLTKGLGLGSLHCVLFVSWALLVWFTSIVVHKNIANGGDSFTTMLNVVISGLSLGQAAPDISAFIRARAAAYPIFEMIERNTVSKTSSKTGRKLSKVEGNIELKNVSFSYPSRPDVVIFDRFCLNIPTGKIVALVGGSGSGKSTVISLIERFYEPLAGEILLDGNNIKGLDLKWLRQQIGLVNQEPALFATTIRENILYGKDDATVDEITRAAKLSEAIAFINNLPDRFETQVGERGIQLSGGQKQRIAISRAIVKNPPILLLDEATSALDAESEKSVQEALDRVMVGRTTVVVAHRLSTIRNADVIAVVQNGKIVETGTHDELISNPNSTYSSLVQHQETSPLQRYPSQGPTLSRPLSVSYSRELSRTRTSFGASFRSERDSVSRAGADGIDAGKQPYVSPGRLYSMIGPDWYYGFFGTVTALIAGAQMPLFALGVSQALVAYYMDWETTCHEVKKIAILFCCASVITVIVHAIEHLCFGIMGERLTLRVREGMFSAILKNEIGWFDDLNNASSMLASRLETDATFLRGVVVDRTSILIQNVGLVIAAFIIAFILNWRITLIILATFPLIISGHISEKLFMQGYGGNLSKAYLKANMIAGEAVSNMRTVAAFCAEEKILDLYARELIEPSERSFKRGQIAGIFYGISQFFIFSSYGLALWYGSVLMGKELASFKSVMKSFMVLIVTALAMGETLALVPDLLKGNQMVASVFEIMDRKTQVVGDAGEELTNVEGTIELKGVHFSYPSRPDVVIFKDFDLKVRSGKSMALVGQSGSGKSSVLALILRFYDPTSGKVMIDGRDVKKLKLKSLRKHIGLVQQEPALFATSIYENILYGKEGASESEVVEAAKLANAHSFISSLPEGYSTKVGERGVQLSGGQKQRVAIARAVLKNPEILLLDEATSALDVESERVVQQALDRLMRNRTTVMVAHRLSTIKNADRISVIQGGRIIEQGTHSSLIENRNGPYFKLINLQQQQQMEQ

SEQ ID NO: 60223 - DNA, 1830 bp, Drosophila melanogaster; identical to SEQ ID NO: 7619
  CDS (1)..(1830)

SEQ ID NO: 60224 - protein, 609 aa, Drosophila melanogaster; identical to SEQ ID NO: 7620

SEQ ID NO: 60225 - DNA, 4047 bp, Emericella nidulans
  CDS (1)..(4047)
atgtccccgctagagacaaatcccctttcgccagagactgctatgcgcgaacctgctgagacttcaacgacggaggagcaagcttctacaccacacgctgcggacgagaagaaaatcctcagcgacctctcggctccatctagtactacagcaacccccgcagacaaggagcaccgtcctaaatcgtcgtccagcaataatgcggtctcggtcaacgaagtcgatgcgcttattgcgcacctgccagaagacgagaggcaggtcttgaagacgcagctggaggagatcaaagtaaacatctccttcttcggtctctggcggtatgcaacaaagatggatatacttatcatggtaatcagtacaatctgtgccattgctgccggtgctgcattgcctctattcacgatcctcttcggttcgctagcgtcgactttccagaggataatgttatatcaaatctcgtacgacgagttctatgatgaattgaccaagaacgtactgtacttcgtatacctcggtatcggcgagtttgtcactgtctatgttagtactgttggcttcatctataccggagaacacgccacgcagaagatccgcgagtattaccttgagtctatcctgcgccagaacattggctattttgataaactcggtgccggggaagtgaccacccgtataacagccgatacaaaccttatccaggatggcatttcggagaaggtcggtctcactttgactgccctggcgacattcgtgacagcattcattatcgcctacgtcaaatactggaagttggctctaatttgcagctcaacaattgtggccctcgttctcaccatgggcggtggttctcagtttatcatcaagtacagcaaaaagtcgcttgacagctacggtgcaggcggcactgttgcggaagaggtcatcagctccatcagaaatgccacagcgtttggcacccaagacaagcttgcgaagcagtatgaggtccacttagacgaagctgagaaatggggaacaaagaaccagattgtcatgggtttcatgattggcgccatgtttggccttatgtactcgaactacggtcttggcttctggatgggttctcgtttcctggtagatggtgcagtcgatgtgggtgatattctcacagttctcatggccatcttgatcggatcgttctccttggggaacgttagtccaaatgctcaagcatttacaaacgctgtggccgcggccgcaaagatatttggaacgatcgatcgccagtccccattagatccatattcgaacgaagggaagacgctcgaccattttgagggccacattgagttacgcaatgtcaagcatatttacccatctagacccgaggtcaccgtcatggaggatgtttctctgtcaatgcccgctggaaaaacaaccgctttagtcggcccctctggctctggaaaaagtacggtggtcggcttggttgagcgattctacatgcctgttcgcggtacggttttgctggatggccatgacatcaaggacctcaatctccgctggcttcgccaacagatctctttggttagccaggagcctgttctttttggcacgacgatttataagaatattaggcacggtctcatcggcacaaagtacgagaatgaatccgaggataaggtccgggaactcatcgagaacgcggcaaaaatggcgaatgctcatgactttattactgccttgcctgaaggttatgagaccaatgttgggcagcgtggctttctcctttcaggtggccagaaacagcgcattgcaatcgcccgtgccgttgttagtgacccaaaaatcctgctcctggatgaagctacttcggccttggacacaaaatccgaaggcgtggttcaagcagctttggagagggcagctgaaggccgaactactattgtgatcgctcatcgcctttccacgatcaaaacggcgcacaacattgtggttctggtcaatggcaaaattgctgaacaaggaactcacgatgaattggttgaccgcggaggcgcttatcgcaaacttgtggaggctcaacgtatcaatgaacagaaggaagctgacgccttggaggacgccgacgctgaggatctcacgaatgcagatattgccaaaatcaaaactgcgtcaagcgcatcatccgatctcgacggaaaacccacaaccattgaccgcacgggcacccacaagtctgtttccagcgcgattctttctaaaagaccccccgaaacaactccgaaatactcattatggacgctgctcaaatttgttgcttccttcaaccgccctgaaatcccgtacatgctcatcggtcttgtcttctcagtgttagctggtggtggccaacccacgcaagcagtgctatatgctaaagccatcagcacactctcgctcccagaatcacaatatagcaagcttcgacatgatgcggatttctggtcattgatgttcttcgtggttggtatcattcagtttatcacgcagtcaaccaatggtgctgcatttgccgtatgctccgagagacttattcgtcgcgcgagaagcactgcctttcggacgatactccgtcaagacattgctttctttgacaaggaagagaatagcaccggcgctctgacctctttcctgtccaccgagacgaagcatctctccggtgttagcggtgtgactctaggcacgatcttgatgacctccacgaccctaggagcggctatcattattgccctggcgattgggtggaaattggccttagtttgtatctcggttgtgccggttctcctggcatgcggtttctaccgattctatatgctagcccagtttcaatcacgctccaagcttgcttatgagggatctgcaaactttgcttgcgaggctacatcgtctatccgcacagttgcgtcattaacccgggaaagggatgtctgggagatttaccatgcccagcttgacgcacaaggcaggaccagtctaatctctgtcttgaggtcatccctgttatatgcgtcgtcgcaggcacttgttttcttctgcgttgcgctcgggttttggtacggagggacacttcttggtcaccacgagtatgacattttccgcttctttgtttgtttctccgagattctctttggtgctcaatccgcgggcaccgtcttttcctttgcaccagacatgggcaaggcgaagaatgcggccgccgaattccgacgactgttcgaccgaaagccacaaattgataactggtctgaagagggcgagaagctcgaaacggtggaaggtgaaatcgaatttaggaacgtgcacttcagatacccgacccgcccagaacagcctgtcctgcgcggcttggacctgaccgtgaagcctggacaatatgttgcgcttgtcggacccagcggttgtggcaagagtaccaccattgcattgcttgagcgcttttacgatgcgattgccgggtccatccttgttgatgggaaggacataagtaaactaaatatcaactcctaccgcagctttctgtcactggtcagccaggagccgacactgtaccagggcaccatcaaggaaaacatcttacttggtattgtcgaagatgacgtaccggaagaattcttgattaaggcttgcaaggacgctaatatctacgacttcatcatgtcgctcccggagggctttaatacagttgttggcagcaagggaggcatgttgtctggcggccaaaagcaacgtgtggccattgcccgagcccttcttcgggatcccaaaatccttcttctcgatgaagcgacgtcagccctcgactccgagtcagaaaaggtcgtccaggcggctttggatgccgctgcccgaggccgaaccacaatcgccgttgcacaccgactcagcacgattcaaaaggcggacgttatctatgttttcgaccaaggcaagatcgtcgaaagcggaacgcacagcgaactggtccagaaaaagggccggtactacgagctggtcaacttgcagagcttgggcaagggccattga

SEQ ID NO: 60226 - protein, 1348 aa, Emericella nidulans
MSPLETNPLSPETAMREPAETSTTEEQASTPHAADEKKILSDLSAPSSTTATPADKEHRPKSSSSNNAVSVNEVDALIAHLPEDERQVLKTQLEEIKVNISFFGLWRYATKMDILIMVISTICAIAAGAALPLFTILFGSLASTFQRIMLYQISYDEFYDELTKNVLYFVYLGIGEFVTVYVSTVGFIYTGEHATQKIREYYLESILRQNIGYFDKLGAGEVTTRITADTNLIQDGISEKVGLTLTALATFVTAFIIAYVKYWKLALICSSTIVALVLTMGGGSQFIIKYSKKSLDSYGAGGTVAEEVISSIRNATAFGTQDKLAKQYEVHLDEAEKWGTKNQIVMGFMIGAMFGLMYSNYGLGFWMGSRFLVDGAVDVGDILTVLMAILIGSFSLGNVSPNAQAFTNAVAAAAKIFGTIDRQSPLDPYSNEGKTLDHFEGHIELRNVKHIYPSRPEVTVMEDVSLSMPAGKTTALVGPSGSGKSTVVGLVERFYMPVRGTVLLDGHDIKDLNLRWLRQQISLVSQEPVLFGTTIYKNIRHGLIGTKYENESEDKVRELIENAAKMANAHDFITALPEGYETNVGQRGFLLSGGQKQRIAIARAVVSDPKILLLDEATSALDTKSEGVVQAALERAAEGRTTIVIAHRLSTIKTAHNIVVLVNGKIAEQGTHDELVDRGGAYRKLVEAQRINEQKEADALEDADAEDLTNADIAKIKTASSASSDLDGKPTTIDRTGTHKSVSSAILSKRPPETTPKYSLWTLLKFVASFNRPEIPYMLIGLVFSVLAGGGQPTQAVLYAKAISTLSLPESQYSKLRHDADFWSLMFFVVGIIQFITQSTNGAAFAVCSERLIRRARSTAFRTILRQDIAFFDKEENSTGALTSFLSTETKHLSGVSGVTLGTILMTSTTLGAAIIIALAIGWKLALVCISVVPVLLACGFYRFYMLAQFQSRSKLAYEGSANFACEATSSIRTVASLTRERDVWEIYHAQLDAQGRTSLISVLRSSLLYASSQALVFFCVALGFWYGGTLLGHHEYDIFRFFVCFSEILFGAQSAGTVFSFAPDMGKAKNAAAEFRRLFDRKPQIDNWSEEGEKLETVEGEIEFRNVHFRYPTRPEQPVLRGLDLTVKPGQYVALVGPSGCGKSTTIALLERFYDAIAGSILVDGKDISKLNINSYRSFLSLVSQEPTLYQGTIKENILLGIVEDDVPEEFLIKACKDANIYDFIMSLPEGFNTVVGSKGGMLSGGQKQRVAIARALLRDPKILLLDEATSALDSESEKVVQAALDAAARGRTTIAVAHRLSTIQKADVIYVFDQGKIVESGTHSELVQKKGRYYELVNLQSLGKGH

SEQ ID NO: 60227 - DNA, 3855 bp, Emericella nidulans
  CDS (1)..(3855)
atgaagtccacggctgagagtaaagagactccgtctcaggacgagtcgaccaccagtgtaccatgcacggaggcgcctctggtcgaggaaggggaggaagcaagctttggcgcatacaagaggatctttacattcgccggcaggacagaacttatccttcaggccgttgctatccttgctgcatgcgcctctggagcaggaattgcgcttcaaaacctcatcttcggccagttcgtcaccgtcatcaccgatttcaccaacggaatctcaacgccggcagactttcgtgacaatgccgccgagttggccctctactttgtatacctgggcatcgcgcggctcgtcctctcctacacctacaacaccctcctaacctacgcggcctaccgcatcgtccgcaatatccgacacgcctatctcaaagcggcgctgagccaagaagtggcatactacgatttcggtagcgggggctccatcgccgcgcaggcaacttcgaacggcaaactgatccaggccggcgcctcggataagatcggtcttctcttccagggcctcgcagcattcgtgacgctttcattatcgcgtttgtggtgcaagtggaaactcactctgatctgcatctgcatccccgtagccacgatcggcacgacgggggtggtagctgcggtcgaggctgggcacgagacgaggatcttgcagatacatgcgcaggcgaattcgtttgccgagggtattctggcgggtgtgaaggctgttcatgcttttgggatgcgggatagtctggtcaggaagtttgatgaatatctggtggaggcgcataaggtcggtaagaagatctcgccgctgcttggtcttctcttctcggcggagtatacgatcatctaccttggatatgggctggcgttttggcaggggatccatatgttcggcaggggggagattgggactgctggggatatctttacggttttgctctctgtcgtcattgcgtcaatcaacctgactttactggcgccgtattcaattgaatttagcagggctgcttcagcggctgcgcaactgttccgactcatagatcgagagtctgaaatcaacccatacgggaaggaaggcctcgagccggaacgggtattaggcgacgtcgagctcgagaatgttacgttctcgtatcccacgaggccggggattaccgtcctcgataacttcagtctcaaggtcccagcgggaaaggtgactgccctggtagggcaatctggatcggggaagagcacgatcgtgggattgctcgagcggtggtataacccgacctctggggcgatcagactcgacgggaacctgatcagtgagctcaatgttggctggctgcggaggaatgtgcggctcgtacagcaggagccggtgctcttccagggaagcgtgttcgataacatcaggtacggcctcgtcgggacgccgtgggagaatgcctctcgggaagagcagatggaacgggtgcaggaggccgcgaagttggcatatgcgcacgaattcatctctgagctgaccgacggatacgatacgctgatcggcgaacggggtggtctgctttctggaggccagaagcagcgggttgcgattgcccgcagcgtcgtttctcaaccgaaggtccttctgctggatgaagcaaccagtgctcttgatccgcatgcagagacgattgttcagaaggctctggacaaagcagctgaggggcgcacgacgattgtcattgctcacaaacttgctacgatccgcaaggcggacaatatcgttgtcatgagcaagggtcacattgtcgagcaaggcacacacgagtcactgatagccaaggacggcgtctatgccggtctggtcaaaatccagaacctggcagtgaatgcttcagcacatgacaatgtaaatgaggagggtgaaggcgaagatgtcgctctcctggaggtcaccgaaacagcagtaacccgctacccaacctccatccgcggtcgaatgaactccataaaggaccgcgacgattatgagaaccacaagcacatggatatgctggccgccttagcttatctcgtccgcgaatgtccagaactgaaatgggcctatctcgtcgtgctactggggtgtcttggtggttgcgccatgtaccccggccaagctatcttgatgtctcgcgttgtcgaggtcttcacgctctcgggagacgctatgctagacaaaggagacttctatgccagtatgctgatcgttctcgcggccgggtgtctgatctgttacttagctgtcggatatgcaaccaacactatagcccagcatcttagtcattggtttcgacgcctcattctgcacgacatgctgcgacaggatatccagttctttgaccgtgaagagaacactaccggtgcgctggtaagccgtatcgattcgtacccgcatgcaattctcgaactgatgggctacaacatcgccctggtcgtgattgctgtcctgcaggtggtaacctgtggcatcctggccattgcattctcctggaaactagggctggtcgttgtctttggcggtattccaccccttgtcggtgctgggatggtacgaatccgcgtcgactcccgcctcgatcgccagacatcgaagaaatatggcaccagctcgtccattgcctctgaagctgtaaacgctatccggaccgtttcgtcccttgcaatcgaagagacggtgctacgtcgatacacggaggaactagaccacgctgtctcgtcttcggtgaaacccatggctgccacgatgatttgtttcgggctgacgcagtgcattgagtactggtttcaggcgctgggattctggtatgggtgtcgtcttgtgtcgctgggggagactagcatgtatagtttctttgtcgcattcctcagtgtgttctttgcgggtcaggcgtcagcgcagctgttccagtggtcgaccagtattacaaagggaatcaatgcgacgaactacatcgcttggttgcaccagctccaaccaacagtgcgcgagacgccggagaaccacgataaaggccctggatctggggcgccgattgctatggacaatgtgcgcttctcgtaccctctacggccagacgcccctatcctgaaaggggtgaatctgaagataaacaaaggccaattcatcgctttcgtcggctcctccggctgcggcaaatccaccatgattgccatgctcgagcgcttctacgatccaacaacagggagcatcacaatcgacgcttccaccctcaccgacataaaccccatatcctaccgaaatattgtggcactggtgcagcaagagccaacccttttccaagggacaatacgggacaacatctcgcttggcgtcttcaacccgaatacgcagcctttcttttctgataaggatgcagtgaagtccgtgtctgatgagcagattgagtcggccctccgcgcagctaatgcctgggactttgtctcctcattgccgcaggggatctacacgcccgctggctcaggcgggtcccaactctctggggggcagcggcaacgcattgccattgcccgcgcgctcatccgagatccaaagatcttactccttgacgaggctacgagtgccctggatacagagagtgagaagatcgtgcagaaggctctcgagggggcggccagggacggggaccggcttacggttgctgttgcgcatcgattaagcacgattaaggatgctaatgttatctgtgtattctttggaggaaagattgcggagatgggaacgcatcaagagttaatagttaggggggggctgtatagacggatgtgtgaggcgcaggccttggactaa

SEQ ID NO: 60228 - protein, 1284 aa, Emericella nidulans
MKSTAESKETPSQDESTTSVPCTEAPLVEEGEEASFGAYKRIFTFAGRTELILQAVAILAACASGAGIALQNLIFGQFVTVITDFTNGISTPADFRDNAAELALYFVYLGIARLVLSYTYNTLLTYAAYRIVRNIRHAYLKAALSQEVAYYDFGSGGSIAAQATSNGKLIQAGASDKIGLLFQGLAAFVTLSLSRLWCKWKLTLICICIPVATIGTTGVVAAVEAGHETRILQIHAQANSFAEGILAGVKAVHAFGMRDSLVRKFDEYLVEAHKVGKKISPLLGLLFSAEYTIIYLGYGLAFWQGIHMFGRGEIGTAGDIFTVLLSVVIASINLTLLAPYSIEFSRAASAAAQLFRLIDRESEINPYGKEGLEPERVLGDVELENVTFSYPTRPGITVLDNFSLKVPAGKVTALVGQSGSGKSTIVGLLERWYNPTSGAIRLDGNLISELNVGWLRRNVRLVQQEPVLFQGSVFDNIRYGLVGTPWENASREEQMERVQEAAKLAYAHEFISELTDGYDTLIGERGGLLSGGQKQRVAIARSVVSQPKVLLLDEATSALDPHAETIVQKALDKAAEGRTTIVIAHKLATIRKADNIVVMSKGHIVEQGTHESLIAKDGVYAGLVKIQNLAVNASAHDNVNEEGEGEDVALLEVTETAVTRYPTSIRGRMNSIKDRDDYENHKHMDMLAALAYLVRECPELKWAYLVVLLGCLGGCAMYPGQAILMSRVVEVFTLSGDAMLDKGDFYASMLIVLAAGCLICYLAVGYATNTIAQHLSHWFRRLILHDMLRQDIQFFDREENTTGALVSRIDSYPHAILELMGYNIALVVIAVLQVVTCGILAIAFSWKLGLVVVFGGIPPLVGAGMVRIRVDSRLDRQTSKKYGTSSSIASEAVNAIRTVSSLAIEETVLRRYTEELDHAVSSSVKPMAATMICFGLTQCIEYWFQALGFWYGCRLVSLGETSMYSFFVAFLSVFFAGQASAQLFQWSTSITKGINATNYIAWLHQLQPTVRETPENHDKGPGSGAPIAMDNVRFSYPLRPDAPILKGVNLKINKGQFIAFVGSSGCGKSTMIAMLERFYDPTTGSITIDASTLTDINPISYRNIVALVQQEPTLFQGTIRDNISLGVFNPNTQPFFSDKDAVKSVSDEQIESALRAANAWDFVSSLPQGIYTPAGSGGSQLSGGQRQRIAIARALIRDPKILLLDEATSALDTESEKIVQKALEGAARDGDRLTVAVAHRLSTIKDANVICVFFGGKIAEMGTHQELIVRGGLYRRMCEAQALD

SEQ ID NO: 60229 - DNA, 1905 bp, Arabidopsis thaliana
  CDS (1)..(1905)
atgtcatttctcctcctaacaccgccgccgtgtcttctcattcctccgccgccgctatctcatcgccggagctcatctctctttctcaaacatccatttcaaccatctccgagacctttgagcttctgtaaaccctccgctctccgtctccgagccaatacaacagtcaattcactaaaagccctcgaaactattaaaccctatcttcaatcggaatctaaaaccgtcctacttggctggctctgcagctgtgtctctgttgtctcgctttctcagattgttcctaggctcggctccttcacttccaaccttaacgcaaacgccgcgagcttgacgaagctcaaaggcgaatgtctcgttttggcgggtctggttttggctaaggttgttgcttattatctgcagcaagcgtttctttgggaagctgctttgaatactgtttacaagattcgggttttcgcgtataggagggttttagagagagaactagagttctttgaaggtggcaatgggatttcatcaggagacattgcttacaggatcactgctgaagcttctgaagttgctgacactatctatgctcttctcaacacagttgtgcccagtgctattcagatatctgtaatgacggcacatatgattgttgcaagtcctgccttgacactagtctctgcaatggtgataccatctgttgcgcttcttatagcatatcttggtgaccggcttcgtaagatatctagaaaagcacagattgcctctgctcaactttctacctacttgaatgaggttcttcctgcaattttgtttgtcaaggctaataacgcagagatctctgagagtgtgaggtttcagaggtttgctcgtgctgacctagatgaacggtttaagaagaagaaaatgaagtcacttatccctcagattgttcaagttatgtatctcggatcattgtcgatattttgtgttggagctgttatccttgcaggctcttctttaagctctagtgcaattgtttccttcgtggcatcattagctttcttgatcgatcctgtccaggatttgggaaaagcttataatgaattgaaacaaggagagccagcgatagaacgtttgtttgatttgacctctttggaatctaaggtgatcgagagacctgaggccattcaattggaaaaagttgctggagaagttgagttatgcgatatatcatttaaatatgacgaaaatatgcttcccgttttggatgggttaaatcttcatattaaagcaggagagactgtagctcttgttggaccatctggaggaggaaagacaacactgatcaaattgctcctccgcctttacgaaccttcatctggctctatcatcattgacaaaattgacatcaaggatatcaaactggaaagtttgaggaaacatgttggtctagtttcacaggacacaactctgttttcagggacaattgctgacaacattgggtacagagatctcacgacaggaattgacatgaagagagttgagcttgctgcaaaaactgcaaatgctgatgaatttatcagaaacctaccagagggatacaacacaggagttggtcccaggggttcaagcttaagcggaggccagaagcaaagactagctatcgcaagagcgctctatcagaaatcatccatactgattttggatgaagcaacatcagcattggatagtttgtcggagttgctagtcagagaagctcttgaacgtgtaatgcaagaccatacggtgatagtgattgcacatagactggagacagtgatgatggcgcagagagtgttcttggtagagaggggaaaactaaaggaattgaatcgctcttctctgttaagtactcacaaagactcactgacatcagctggactcgtgatttga

SEQ ID NO: 60230 - protein, 634 aa, Arabidopsis thaliana
MSFLLLTPPPCLLIPPPPLSHRRSSSLFLKHPFQPSPRPLSFCKPSALRLRANTTVNSLKALETIKPYLQSESKTVLLGWLCSCVSVVSLSQIVPRLGSFTSNLNANAASLTKLKGECLVLAGLVLAKVVAYYLQQAFLWEAALNTVYKIRVFAYRRVLERELEFFEGGNGISSGDIAYRITAEASEVADTIYALLNTVVPSAIQISVMTAHMIVASPALTLVSAMVIPSVALLIAYLGDRLRKISRKAQIASAQLSTYLNEVLPAILFVKANNAEISESVRFQRFARADLDERFKKKKMKSLIPQIVQVMYLGSLSIFCVGAVILAGSSLSSSAIVSFVASLAFLIDPVQDLGKAYNELKQGEPAIERLFDLTSLESKVIERPEAIQLEKVAGEVELCDISFKYDENMLPVLDGLNLHIKAGETVALVGPSGGGKTTLIKLLLRLYEPSSGSIIIDKIDIKDIKLESLRKHVGLVSQDTTLFSGTIADNIGYRDLTTGIDMKRVELAAKTANADEFIRNLPEGYNTGVGPRGSSLSGGQKQRLAIARALYQKSSILILDEATSALDSLSELLVREALERVMQDHTVIVIAHRLETVMMAQRVFLVERGKLKELNRSSLLSTHKDSLTSAGLVI

SEQ ID NO: 60231 - DNA, 2205 bp, Cryptococcus neoformans
  CDS (1)..(2205)
atgagcttcggctcctgcagtcgacatgcgctttttaccccaggagccttgccaggctcatttaggaccatgactacgtcatgcgttaagagggtctatacagcacaaatacgtggcggggatgccttgggcaagcgtttaccttcggtctcctccttcccaggacagctgccaaggcatggatcacattttcaatcattagcattcttttcgacatcacgtcggcgccaaactccacccccaccatcaccacctaccacctctcaatccccaaccgtaccttcaaaagcgtcgactactccccccacctcgctcaatacctccaaacccgttgctacagaatcacaagataagacggactggtctatcattgccaagctagctggtaatatctggccgaagaacaaccccaatgttaaatttcgcgtcattggtgctcttacgttgcttgttgcaggcaaagtcttgaacgtccaagtgccattcttcttcaagaccattgtggatagcttgaacgtgcccataacagagtcaactacagtttgggttttggccggtgctagtatcgctggatatggtgccgcgagagtcttgaccaccctctttggggagcttcgaaatgcagtctttgcctctgtcgcccagaatgctatccgaaaagtggcccgagagactttcgagcacctcttgaatatggatatgaagttccacctggaacgtcaaactggcggtctcacccgagctatcgaccgtggaaccaagggtatctccttcattctttcctctatcgttttccacgtgatccccactgctcttgagatttccatggtctgcggtatcctctcgtggaagtttggctgggattttgcagccgttactgcgattaccatgctcctctacacttggttcaccatcaagacaacagcttggaggacaacgttcaggaagcaggcaaacgcggcagataataagggtgcgacagttgcggtagacagcttgatcaattatgaagctgtcaagtcttttaacaacgagaagtacgaggttgctcagtatgataccaccctcaaagcttatgaaaaggcttccgtcaagattgcaacttctctcgctgctctcaactctggccaaaatttcatcttctccagcgccttgactatgatgatgttgcttggtgctcaggggattgtcaagggtacaatgactgtgggtgacctcgtcctcgtaaaccaacttgtcttccagctttcccttcccctcaacttcctcggcacagtttaccgcgaacttcgtcaaagtcttatcgacatggatgtcatgtttaaccttcagtctcttgattctgcgaccaaagactcacctactgccaaacctcttcatctcaagggtggagagattgagttccggaatgttgcttttgcctaccatcccgaacgccctattttccgcgacctttctttcaagatcccagccggtcagaaagtagccatcgttggtccgtctggctgcggtaaatccaccgtattccggcttcttttccgtttctacgattccagctcgggacaaattttgatcgatgggcaagacatcaaaactgtgactctcgactctctccgtcgatctattggtgttgtcccgcaagacactcccctcttccacgcagatatcctccacaacattcgttacggtaatctcgaggctacagatgaacaggtctatgaagccgcgagaaaggctcacgtggaaggaacaatccagcgtttgccggaaaagtatgccaccaaggttggagaacgtggattgatgatttccggtggagagaagcaacgattggctgttgcgagggtgttgttgaaggatccccctgttttattctttgatgaagccaccagcgcactggacgtatataccgagacagagttgatgaggaacatcaactccatcttgacggggcagggcaaaaccagtgtgtttatcgctcatcgtttgaggacaatatcagacgcggacctgatcatcgtccttcaggacggttatgttgctgaacagggtactcatgagcaactcttggcgatgccaggaggagtgtatcacggattatggcaagctcaactcaccgaaagcactcaacccactgaggaggagattgagaggcaaagggaagagctagaggttgtagacgagaagaaaaagcagcaaacgtag

SEQ ID NO: 60232 - protein, 734 aa, Cryptococcus neoformans
MSFGSCSRHALFTPGALPGSFRTMTTSCVKRVYTAQIRGGDALGKRLPSVSSFPGQLPRHGSHFQSLAFFSTSRRRQTPPPPSPPTTSQSPTVPSKASTTPPTSLNTSKPVATESQDKTDWSIIAKLAGNIWPKNNPNVKFRVIGALTLLVAGKVLNVQVPFFFKTIVDSLNVPITESTTVWVLAGASIAGYGAARVLTTLFGELRNAVFASVAQNAIRKVARETFEHLLNMDMKFHLERQTGGLTRAIDRGTKGISFILSSIVFHVIPTALEISMVCGILSWKFGWDFAAVTAITMLLYTWFTIKTTAWRTTFRKQANAADNKGATVAVDSLINYEAVKSFNNEKYEVAQYDTTLKAYEKASVKIATSLAALNSGQNFIFSSALTMMMLLGAQGIVKGTMTVGDLVLVNQLVFQLSLPLNFLGTVYRELRQSLIDMDVMFNLQSLDSATKDSPTAKPLHLKGGEIEFRNVAFAYHPERPIFRDLSFKIPAGQKVAIVGPSGCGKSTVFRLLFRFYDSSSGQILIDGQDIKTVTLDSLRRSIGVVPQDTPLFHADILHNIRYGNLEATDEQVYEAARKAHVEGTIQRLPEKYATKVGERGLMISGGEKQRLAVARVLLKDPPVLFFDEATSALDVYTETELMRNINSILTGQGKTSVFIAHRLRTISDADLIIVLQDGYVAEQGTHEQLLAMPGGVYHGLWQAQLTESTQPTEEEIERQREELEVVDEKKKQQT

SEQ ID NO: 60233 - DNA, 2163 bp, Kluyveromyces lactis
  CDS (1)..(2163)
atgattatgttccgttcactatcagtgacacctgtttggaaggctggtttaagcttatcacatcgttcgattcctattaactccagattatcatcggtgaggaattatatctcaatcggatgtgctaataaaacgggcagcaggcttcttcgttccgcaggggtatcaagtcagtacaaagatttcaggaggtttaacagttccagtaatggtaatggtaccgacaagaatgcttctgttgcaccgaaaactgaggtcaagaagattgttcccccaaaaccatcaactaatggtaaatcaaagactccgaccatttcggaattgcgtattatgaaagatctatttaagtatatctggcccagcggtgataacaaggtcaaaattagagtgttaattgcattggcgctattgataggtgccaagttgttgaatgttcaagttccttttttcttcaaacagaccatcgattcgatgaatattgaatggggtccagatgtggctactgtgctcccagttgcgataacaatgactattctctcgtacggtgctgctagattcggtgctgttatgtttggtgagttgaggaacgcagttttcgctaaggtggcccaaaacgctatcaggaaagtctcattacaaacgttccaacatttaatgaagttagatctgggatggcatctaagtagacaaactggtgggttgactcgtgccatggatagaggtaccaagggtatctcatatgttctcagtgctatggttttccatatgattccaatcacgtttgaaatatccgtggtttgtggtatcttgacgtaccagttcggttcctcgttcgctgcaatgactttcgtcacaatgttactatactcgttctttactttcaagactactgcatggagaaccgagttcagaagaagtgccaaccgtgctgataacaaggctgcgtcagtggcattggattcgttgatcaatttcgaagccgtgaaatatttcaacaatgaggagtacttggctaacaaataccaccagtctctttccaaataccgtgattcacaaatcaaagtggcacaatctctagcgtttttaaacgcaggtcagaattttatttttacttcagcattgacagcgatgatgtacatgggtgcttcaggtgtcatggagggagcacttacagttggtgacttggttttgatcaatcaactagttttccaattatcagtaccgctaaatttcttgggttctgtgtacagagaattgaaacaatcattaattgatatggaatcacttttcaaattgcagaagaatccaatcttgatcaagaatacagagagacctttaatgttacctgagcacttaccttgtgagattaaattcgaaaacgtcacgtttggatatcaaccagatagaaatatcttgaaaaacgcaacgtttaccatagcgcctggtaaaaagactgccatcgtgggacccagtggttccggtaagtctaccatactaaggctagtgttcagattctacgacccgcaacaggggaggatccttttagatgggaaagatattcgtgaattggatcttgacgaattaagaagaatcgttggtgttgttccacaggataccccattgttcaatgataccatttgggagaacgtgaaatttggaagaatcaacgctactgacaacgagatcgtgactgcaatcgaaaaagcccaactctctgacttgattcacaagctaccgaagggaacagagaccattgtcggtgaaagaggtttgatgatcagtggtggtgagaaacaaaggcttgccattgcccgtgttttattaaaggataccccaataatgttcttcgatgaagctacaagcgcactagatactcatacggagcaatcgctactgaagacaattaaagagaacttctctgatgtcgccaaaacaagtgtctacatcgcacatagactacggacaatcgctgacgccgataaaatcatcgtcttggaaaacggtgcagtaagagaagaaggtacccataacgctcttctcgccaatccaaactccctgtacagcgaactatggaacatacaagagaacctagacatgctagaggacgaactcgaagatgaactcaaattagagaaggaaccgagaacttctaagaaggattaa

SEQ ID NO: 60234 - protein, 720 aa, Kluyveromyces lactis
MIMFRSLSVTPVWKAGLSLSHRSIPINSRLSSVRNYISIGCANKTGSRLLRSAGVSSQYKDFRRFNSSSNGNGTDKNASVAPKTEVKKIVPPKPSTNGKSKTPTISELRIMKDLFKYIWPSGDNKVKIRVLIALALLIGAKLLNVQVPFFFKQTIDSMNIEWGPDVATVLPVAITMTILSYGAARFGAVMFGELRNAVFAKVAQNAIRKVSLQTFQHLMKLDLGWHLSRQTGGLTRAMDRGTKGISYVLSAMVFHMIPITFEISVVCGILTYQFGSSFAAMTFVTMLLYSFFTFKTTAWRTEFRRSANRADNKAASVALDSLINFEAVKYFNNEEYLANKYHQSLSKYRDSQIKVAQSLAFLNAGQNFIFTSALTAMMYMGASGVMEGALTVGDLVLINQLVFQLSVPLNFLGSVYRELKQSLIDMESLFKLQKNPILIKNTERPLMLPEHLPCEIKFENVTFGYQPDRNILKNATFTIAPGKKTAIVGPSGSGKSTILRLVFRFYDPQQGRILLDGKDIRELDLDELRRIVGVVPQDTPLFNDTIWENVKFGRINATDNEIVTAIEKAQLSDLIHKLPKGTETIVGERGLMISGGEKQRLAIARVLLKDTPIMFFDEATSALDTHTEQSLLKTIKENFSDVAKTSVYIAHRLRTIADADKIIVLENGAVREEGTHNALLANPNSLYSELWNIQENLDMLEDELEDELKLEKEPRTSKKD

SEQ ID NO: 60235 - DNA, 4680 bp, Saccharomyces cerevisiae
  CDS (1)..(4680)
atgtcttcactagaagtggtagatgggtgcccctatggataccgaccatatccagatagtggcacaaatgcattaaatccatgttttatatcagtaatatccgcctggcaagccgtctttttcctattgattggtagctatcaattgtggaaactttataagaacaataaagtaccacccagatttaagaactttcctacattaccaagtaaaatcaacagtcgacatctaacgcatttgaccaatgtttgctttcagtccacgcttataatttgtgaactggccttggtatcccaatctagcgatagggtttatccatttatactaaagaaggctctgtacttgaatctccttttcaatttgggtatttctctccctactcaatacttagcttattttaaaagtacattttcaatgggcaaccagcttttctattacatgtttcaaattcttctacagctcttcttgatattgcagaggtactatcatggttctagtaacgaaaggcttactgttattagcggacaaactgctatgattttagaagtgctccttcttttcaattctgtggcaatttttatttatgatctatgcatttttgagccaattaacgaattatctgaatactacaagaaaaatgggtggtatccccccgttcatgtactatcctatattacatttatctggatgaacaaactgattgtggaaacttaccgtaacaagaaaatcaaagatcctaaccagttaccattgccgccagtagatctgaatattaagtcgataagtaaggaatttaaggctaactgggaattggaaaaatggttgaatagaaattctctttggagggccatttggaagtcatttggtaggactatttctgtggctatgctgtatgaaacgacatctgatttactttctgtagtacagccccagtttctacggatattcatagatggtttgaacccggaaacatcttctaaatatcctcctttaaatggtgtatttattgctctaacccttttcgtaatcagcgtggtttctgtgttcctcaccaatcaattttatattggaatttttgaggctggtttggggataagaggctctttagcttctttagtgtatcagaagtccttaagattgacgctagcagagcgtaacgaaaaatctactggtgacatcttaaatttgatgtctgtggatgtgttaaggatccagcggtttttcgaaaatgcccaaaccattattggcgctcctattcagattattgttgtattaacttccctgtactggttgctaggaaaggctgttattggagggttggttactatggctattatgatgcctatcaatgccttcttatctagaaaggtaaaaaagctatcaaaaactcaaatgaagtataaggacatgagaatcaagactattacagagcttttgaatgctataaaatctattaaattatacgcctgggaggaacctatgatggcaagattgaatcatgttcgtaatgatatggagttgaaaaattttcggaaaattggtatagtgagcaatctgatatattttgcgtggaattgtgtacctttaatggtgacatgttccacatttggcttattttctttatttagtgattctccgttatctcctgccattgtcttcccttcattatctttatttaatattttgaacagtgccatctattccgttccatccatgataaataccattatagagacaagcgtttctatggaaagattaaagtcattcctacttagtgacgaaattgatgattcgttcatcgaacgtattgatccttcagcggatgaaagagcgttacctgctatagagatgaataatattacatttttatggaaatcaaaagaagtattaacatctagccaatctggagataatttgaggacagatgaagagtctattatcggatcttctcaaattgcgttgaagaatatcgatcattttgaagcaaaaaggggtgatttagtttgtgttgttggtcgggtaggagctggtaaatcaacatttttgaaggcaattcttggtcaacttccttgcatgagtggttctagggactcgataccacctaaactgatcattagatcatcgtctgtagcctactgttcacaagaatcctggataatgaacgcatctgtaagagaaaacattctatttggtcacaagttcgaccaagattattatgacctcactattaaagcatgtcaattgctacccgatttgaaaatactaccagatggtgatgaaactttggtaggtgaaaagggcatttccctatcaggcggtcagaaggcccgtctttcattagccagagcggtgtactcgagagcagatatttatttgttggatgacattttatctgctgttgatgcagaagttagtaaaaatattattgaatatgttttgatcggaaagacggctttattaaaaaataaaacaattattttaactaccaatactgtatcaattttaaaacattcgcagatgatatatgcgctagaaaacggtgaaattgttgaacaagggaattatgaggatgtaatgaaccgtaagaacaatacttcaaaactgaaaaaattactagaggaatttgattctccgattgataatggaaatgaaagcgatgtccaaactgaacaccgatccgaaagtgaagtggatgaacctctgcagcttaaagtaactgaatcagaaactgaggatgaggttgttactgagagtgaattagaactaatcaaagccaattctagaagagcttctctagctacgctaagacctagaccctttgtgggagcacaattggattccgtgaagaaaacggcgcaaaaggccgagaagacagaggtgggaagagtcaaaacaaagatttatcttgcgtatattaaggcttgtggagttttaggtgttgttttatttttcttgtttatgatattaacaagggttttcgacttagcagagaatttttggttaaagtactggtcagaatctaatgaaaaaaatggttcaaatgaaagggtttggatgtttgttggtgtgtattccttaatcggagtagcatcggccgcattcaataatttacggagtattatgatgctactgtattgttctattaggggttctaagaaactgcatgaaagcatggccaaatctgtaattagaagtcctatgactttctttgagactacaccagttggaaggatcataaacaggttctcatctgatatggatgcagtggacagtaatctacagtacattttctccttttttttcaaatcaatactaacctatttggttactgttatattagtcgggtacaatatgccatggtttttagtgttcaatatgtttttggtggttatctatatttactatcaaacattttacattgtgctatctagggagctaaaaagattgatcagtatatcttactctccgattatgtccttaatgagtgagagcttgaacggttattctattattgatgcatacgatcattttgagagattcatctatctaaattatgaaaaaatccaatacaacgttgattttgtcttcaactttagatcaacgaatagatggttatccgtgagattgcaaactattggtgctacaattgttttggctactgcaatcttagcactagcaacaatgaatactaaaaggcaactaagttcgggtatggttggtctactaatgagctattcattagaggttacaggttcattgacttggattgtaaggacaactgtgacgattgaaaccaacattgtatcagtggagagaattgttgagtactgcgaattaccacctgaagcacagtccattaaccctgaaaagaggccagatgaaaattggccatcaaagggtggtattgaattcaaaaactattccacaaaatacagagaaaatttggatccagtgctgaataatattaacgtgaagattgagccatgtgaaaaggttgggattgttggcagaacaggtgcagggaagtctacactgagcctggcattatttagaatactagaacctaccgaaggtaaaattattattgacggcattgatatatccgacataggtctgttcgatttaagaagccatttggcaattattcctcaggatgcacaagcttttgaaggtacagtaaagaccaatttggaccctttcaatcgttattcagaagatgaacttaaaagggctgttgagcaggcacatttaaagcctcatctggaaaaaatgctgcacagtaaaccaagaggtgatgattctaatgaagaggatggcaatgttaatgatattctggatgtcaagattaatgagaacggtagtaacttgtcagtggggcaaagacaactactatgtttggcaagagcgctgctaaaccgttccaaaatattggtccttgatgaagcaacggcttctgtggatatggaaaccgataaaattatccaagacactataagaagagaatttaaggaccgtaccatcttaacaattgcacatcgtatcgacactgtattggacagtgataagataattgttcttgaccagggtagtgtgagggaattcgattcaccctcgaaattgttatccgataaaacgtctattttttacagtctttgtgagaaaggtgggtatttgaaataa

SEQ ID NO: 60236 - protein, 1559 aa, Saccharomyces cerevisiae
MSSLEVVDGCPYGYRPYPDSGTNALNPCFISVISAWQAVFFLLIGSYQLWKLYKNNKVPPRFKNFPTLPSKINSRHLTHLTNVCFQSTLIICELALVSQSSDRVYPFILKKALYLNLLFNLGISLPTQYLAYFKSTFSMGNQLFYYMFQILLQLFLILQRYYHGSSNERLTVISGQTAMILEVLLLFNSVAIFIYDLCIFEPINELSEYYKKNGWYPPVHVLSYITFIWMNKLIVETYRNKKIKDPNQLPLPPVDLNIKSISKEFKANWELEKWLNRNSLWRAIWKSFGRTISVAMLYETTSDLLSVVQPQFLRIFIDGLNPETSSKYPPLNGVFIALTLFVISVVSVFLTNQFYIGIFEAGLGIRGSLASLVYQKSLRLTLAERNEKSTGDILNLMSVDVLRIQRFFENAQTIIGAPIQIIVVLTSLYWLLGKAVIGGLVTMAIMMPINAFLSRKVKKLSKTQMKYKDMRIKTITELLNAIKSIKLYAWEEPMMARLNHVRNDMELKNFRKIGIVSNLIYFAWNCVPLMVTCSTFGLFSLFSDSPLSPAIVFPSLSLFNILNSAIYSVPSMINTIIETSVSMERLKSFLLSDEIDDSFIERIDPSADERALPAIEMNNITFLWKSKEVLTSSQSGDNLRTDEESIIGSSQIALKNIDHFEAKRGDLVCVVGRVGAGKSTFLKAILGQLPCMSGSRDSIPPKLIIRSSSVAYCSQESWIMNASVRENILFGHKFDQDYYDLTIKACQLLPDLKILPDGDETLVGEKGISLSGGQKARLSLARAVYSRADIYLLDDILSAVDAEVSKNIIEYVLIGKTALLKNKTIILTTNTVSILKHSQMIYALENGEIVEQGNYEDVMNRKNNTSKLKKLLEEFDSPIDNGNESDVQTEHRSESEVDEPLQLKVTESETEDEVVTESELELIKANSRRASLATLRPRPFVGAQLDSVKKTAQKAEKTEVGRVKTKIYLAYIKACGVLGVVLFFLFMILTRVFDLAENFWLKYWSESNEKNGSNERVWMFVGVYSLIGVASAAFNNLRSIMMLLYCSIRGSKKLHESMAKSVIRSPMTFFETTPVGRIINRFSSDMDAVDSNLQYIFSFFFKSILTYLVTVILVGYNMPWFLVFNMFLVVIYIYYQTFYIVLSRELKRLISISYSPIMSLMSESLNGYSIIDAYDHFERFIYLNYEKIQYNVDFVFNFRSTNRWLSVRLQTIGATIVLATAILALATMNTKRQLSSGMVGLLMSYSLEVTGSLTWIVRTTVTIETNIVSVERIVEYCELPPEAQSINPEKRPDENWPSKGGIEFKNYSTKYRENLDPVLNNINVKIEPCEKVGIVGRTGAGKSTLSLALFRILEPTEGKIIIDGIDISDIGLFDLRSHLAIIPQDAQAFEGTVKTNLDPFNRYSEDELKRAVEQAHLKPHLEKMLHSKPRGDDSNEEDGNVNDILDVKINENGSNLSVGQRQLLCLARALLNRSKILVLDEATASVDMETDKIIQDTIRREFKDRTILTIAHRIDTVLDSDKIIVLDQGSVREFDSPSKLLSDKTSIFYSLCEKGGYLK

SEQ ID NO: 60237 - DNA, 4011 bp, Schizosaccharomyces pombe
  CDS (1)..(4011)
atgcacattcattcagatttatcactccctcagtttgaacacgcatccattgaccctccttcctattcaccacaaaaatcttcgtttgaagaaaagaaacacaactttagtatcaccaataaatctttagaaacacttcgaagtcaagaatctccttgttcgactacatttcctgtttcagatcgtaaagatgcattgttgaatattcctactgttgttgatgatgaatttcaacataccgaggagcttgcaggcgtctcttcgtggtctgattttttttatttatttcatttttctgatattcctttaatttttggcactctcatctttacttgtctttctgctgccttagagcctttgatgacttggacgaccggcaaggtgtttgacgctctctcacagtatgcaacctcgcaaattacactgggcaaaatgatctctcttattaactttaattctctattaatcacgatatttggtcttgcttcttgcgtatttagttttggtgttcgctttctatggcaatatttgagtgctattgctggaaagagagctcgatcattatgttttcacgttttatcaagcaaatcctcaactttctactctttaacggaaagcaaaagtgggctagtcaattcagtcgatcgatgcatacaattttacgaaaagtcaattagtcttcccatgtttcatattgcggaaaacctagctatttctttatcttgtcttatcatttcttttcgctatagctggtctcttacattggttgttttagcatcctatcctatcattattctagtagttggattcatcaattcttttttatcctcagcttatgaaaaagacaggaagtcttcagaaaaggctgcttccatcttagaaaaatctatatctgcgatccaaacagttatctttcactctatgcaggacactgagtatagatactttgcagatgcctgcagtactagtagtaaatcttttttgagattctctttcttagatgcatttcaaggaggagtttcacaattttttctttactctgtcttttttcaaggtctttggtttggcaatcatttggccacaacgaaaagggtaaatgtggggcaagtcgttactgtttttggctcttgtttatcagtggcttcctcattacagcaaattttaccagctataccagatttgattaaaggaaaatttagctctcattttattaaaacattatgtgaaagccatgatcctatagaggctgcgaagcgttcagcggctaaaataaaaagcatatcgtttgaacgaggttttcgctttgataatgtctcctttgcatatccttctcgagatgagaacttgtttagtttaattaacgtgtctgtgttcataccttttggagagttggtacatattattggtccaagtggctctggtaagagtacctttatcagtcttttgttgcgttacttttctccaacttacggaaatatatatttggatgactttcctttggaagaaatagatgaacatgtccttggctctactattacactggtgtgtcagcaacctgtcatttttgacatgactatacgtgagaacattattatgaggaatgaaaatgctagcgagtcagattttgaagaagtttgcagattggcacttgttgacgaatttgctcttacatttgatcaaagctatgatacaccttgtaaggaagcttcgcttagtggaggtcaacagcaaagaatcgcattagctagagctttgcttcgtgacacggagattttaatacttgatgagccaactagcgctcttgatccaatcactaaaaatctcgtcatggatgctattcgagctcatcgcaagggaaaaactacattagtaattactcacgatatgtctcaaattaacaacgatgaattggttttggtgatagataagggtcatttaatacagagatgcgctaggaaggaattggtgttgtttgaggattttgaaaacaatgtatcaatcgatgaaaaggttttgaaggaagaagctgataatccgtttattttaccaaatgaggaatcactgcttgaaaagtattggattaattacaatgaaagtttttcgcagttatccagagagtcattattcaccagtttagaatctccattcaccgatatagaatctcctacaattgtgtcgcgaagaaaaattgttgagcaaaggaagttgcgtatggaaaaagaatcctttcaagaaacgaatgtagaccaaactttccatttatttgatgacaaagagcatgcatgttcgttaacattaatctttaagagtatttggaaagtcaaaaagctaaggtggttttttcttcttggtttgctcacgtctttgatacaaggtgctagtgttcctatatttgcttacgttatttcaaagtgcttaaatttgtttatgcaaattgatccatcgattggagtagcattttggtcttcaatggttttggtcgttgctgctggatcgggggcttcctatttttttagtcattatattttttcaatatctgctaaaatttggtgtgatcactaccggttattagctgttaaagtacttttcactcaggatcaagcttggttcgatcaaatcgaaaattatccactcgtgttatctaaaatacttgttaacaatatcagtgatatgcgaaacatgattagttctctcattgaggaggtttttattgcatttactatggcgattattggaatagcatggtctttcgcaactggctggagattggctgctgtactggttgcagtaagcccaattttatgtctgacttccagaatgttttcatatatatatgtcagcactgagcggatgtgtcaagatgttgtaatatcgactacctctatccttcataaaacgatcgtcaatttggatacaattaaaggatattcggtgctatctttttttcgagaaaatcataaaaattctttgcgcaaaagctgggaagctttcaaaaggcgagccttttggactagtcttgggtttgctattaacaactctcttttgtattttgtcagagctcttctcttttattgttcttccatatttatatccaaagaattttatactgttgaacaaatggtccaggtgctgtctttggctacttttacattgttgatggcttctacttgcatcatgtctttgcccaatgtatcagctagccgaatcgcgactagtagagttctgaaactcagttcattgaagccaggaaatcttcataaaagtggatatctaaaatttcctcttgtaggaaaaatagaattcgatggagtatcgtttgcatacccagactccgagcgtaaccacttagcgctgaataatgtatcattgtctattgaagctagagaaaaggttgcaattgttggaatttctggatctggaaaatctactttggtagaactattgagaaagacttacccttcagaggatatttacattgatgggtatccgctaactaacatcgatactaattggttgcttaaaaaggttgccattgtagatcaaaaacctcatcttctaggttctacaattttggagagtttgctatatggtgttgacagagatattaattctgttatggatgcacttgacaaaacttacatgactgaggtaatacaaaaccttcctaacggcttagatactcctttgcttgaatttagcaaaaatttttccggtggtcagatccaacgccttgcgtttgcaagagctcttctacggaaccccagacttttaatattggatgaatgtacgtctgctttagatagcaagtcaagccttcttctagaaaaaacaattcaaaacttgagttgtacagttttgataattacacaccaaccctcattaatgaaattggcagacaggatcattgtaatggattctggaattgtcaaggaatctggcagtttcgatgaactaatgaatcgacatacacatttttggaaattaatacaccgcggtgaatggattgagtga

SEQ ID NO: 60238 - protein, 1336 aa, Schizosaccharomyces pombe
MHIHSDLSLPQFEHASIDPPSYSPQKSSFEEKKHNFSITNKSLETLRSQESPCSTTFPVSDRKDALLNIPTVVDDEFQHTEELAGVSSWSDFFYLFHFSDIPLIFGTLIFTCLSAALEPLMTWTTGKVFDALSQYATSQITLGKMISLINFNSLLITIFGLASCVFSFGVRFLWQYLSAIAGKRARSLCFHVLSSKSSTFYSLTESKSGLVNSVDRCIQFYEKSISLPMFHIAENLAISLSCLIISFRYSWSLTLVVLASYPIIILVVGFINSFLSSAYEKDRKSSEKAASILEKSISAIQTVIFHSMQDTEYRYFADACSTSSKSFLRFSFLDAFQGGVSQFFLYSVFFQGLWFGNHLATTKRVNVGQVVTVFGSCLSVASSLQQILPAIPDLIKGKFSSHFIKTLCESHDPIEAAKRSAAKIKSISFERGFRFDNVSFAYPSRDENLFSLINVSVFIPFGELVHIIGPSGSGKSTFISLLLRYFSPTYGNIYLDDFPLEEIDEHVLGSTITLVCQQPVIFDMTIRENIIMRNENASESDFEEVCRLALVDEFALTFDQSYDTPCKEASLSGGQQQRIALARALLRDTEILILDEPTSALDPITKNLVMDAIRAHRKGKTTLVITHDMSQINNDELVLVIDKGHLIQRCARKELVLFEDFENNVSIDEKVLKEEADNPFILPNEESLLEKYWINYNESFSQLSRESLFTSLESPFTDIESPTIVSRRKIVEQRKLRMEKESFQETNVDQTFHLFDDKEHACSLTLIFKSIWKVKKLRWFFLLGLLTSLIQGASVPIFAYVISKCLNLFMQIDPSIGVAFWSSMVLVVAAGSGASYFFSHYIFSISAKIWCDHYRLLAVKVLFTQDQAWFDQIENYPLVLSKILVNNISDMRNMISSLIEEVFIAFTMAIIGIAWSFATGWRLAAVLVAVSPILCLTSRMFSYIYVSTERMCQDVVISTTSILHKTIVNLDTIKGYSVLSFFRENHKNSLRKSWEAFKRRAFWTSLGFAINNSLLYFVRALLFYCSSIFISKEFYTVEQMVQVLSLATFTLLMASTCIMSLPNVSASRIATSRVLKLSSLKPGNLHKSGYLKFPLVGKIEFDGVSFAYPDSERNHLALNNVSLSIEAREKVAIVGISGSGKSTLVELLRKTYPSEDIYIDGYPLTNIDTNWLLKKVAIVDQKPHLLGSTILESLLYGVDRDINSVMDALDKTYMTEVIQNLPNGLDTPLLEFSKNFSGGQIQRLAFARALLRNPRLLILDECTSALDSKSSLLLEKTIQNLSCTVLIITHQPSLMKLADRIIVMDSGIVKESGSFDELMNRHTHFWKLIHRGEWIE

SEQ ID NO: 60239 - DNA, 2058 bp, Candida albicans
  CDS (1)..(2058): transl_table=12
atgattggaatgaatagattgatattttctaaagcttttacgagttcttgtaaaagtgtgggaaaagtaccttttgcaaaatcaataactagagccaatacccgctatttcaaaccaacatcgatactacaacaaattagattcaattctaaactgtcaacggcaccaaacacagaagccaattctaatggctcaacaaattctcaatcggatacaaaaaaaccacgacccaaattaactagtgaaatcttcaagcttttaagattagcaaagccggaatcgaaattgattttttttgccttgatatgtttagtaacaacttcagctacaagtatggctttacctttaatgattgggaaaattatagacacaacaaaaaaagacgacgatgatgacaaagacaatgacaacgacgataaagatgacacacaaccaagcgataagttaatatttggtcttcctcaaccacagttttattcagcattaggggtgttattcatagttagtgccagtaccaattttggtagaatatatttattaaggtctgtaggggaaagattagtggcacgattgagatcacgtttatttctgaagattttagctcaggatgcttatttttttgacttaggaccctcgaaaactggtatgaaaacgggtgatttgatatcaagaattgcaagtgacacacaaatcatttctaaaagtcttagtatgaatatcagtgacggaataagagcaattataagtggatgtgtgggattatccatgatgtgctacgtttcttggaaattatctttgtgcatgagtttgattttcccaccattaattaccatgtcatggttctatggtagaaaaatcaaggcattgtccaaactaatccaggagaatattggagatatgactaaggtgactgaagagaaattgaatggtgtcaaagtgatacaaacattttctcaacaacaatctgttgttcattcctataatcaagaaatcaaaaatatttttaatagttcaatgagagaggctaaattagcaggatttttctactcgactaacgggttcattggaaatgttaccatgattggattattgataatgggtaccaagttgataggtgcaggagaattaactgtgggagatttgtcaagttttatgatgtatgctgtatatactggtacgtctgtttttggacttggaaatttttatactgagttgatgaaaggtataggggctgctgaaagagtttttgaattagtggaatatcaaccgagaatttccaatcatttagggaaaaaagtggatgagttgaatggagatattgagttcaagggaattgatttcacatatccatctcgtccggagtctggtatctttaaagacttgaatcttcatattaagcaaggagaaaatgtttgtttggtaggaccatcgggaagtgggaaatctactgtgagtcaattgctcttgagattttatgaccctgaaaagggtactattcaaattggcgatgatgttattacagatcttaacttgaaccactatagatcaaaattgggatacgttcaacaagaacctttgttgtttagtggtactatcaaggaaaatatcttgtttgggaaagaagatgctactgatgaagaaatcaataatgctttaaacttaagttatgcttctaactttgtcagacatttaccagatggtctagataccaagattggtgcttcaaattctacgcaattgagtggaggacaaaaacagagagtgtcattagcaagaacattgatacgtgaccccaaaattttaattttagacgaggcaacctcagcattggattctgtcagtgaagaaatagttatgctgaatttgattcaattgaataagaatagaggtgtgacattgatttcaattgcccatcgtttatcgacaattaaaaatagtgatagaattattgtgtttaaccaagatggccagatagtagaggatggtaaattcaatgaattgcataatgatccaaacagtcagttcaataaattgttgaaaagccattctttagaataa

SEQ ID NO: 60240 - protein, 685 aa, Candida albicans
MIGMNRLIFSKAFTSSCKSVGKVPFAKSITRANTRYFKPTSILQQIRFNSKSSTAPNTEANSNGSTNSQSDTKKPRPKLTSEIFKLLRLAKPESKLIFFALICLVTTSATSMALPLMIGKIIDTTKKDDDDDKDNDNDDKDDTQPSDKLIFGLPQPQFYSALGVLFIVSASTNFGRIYLLRSVGERLVARLRSRLFSKILAQDAYFFDLGPSKTGMKTGDLISRIASDTQIISKSLSMNISDGIRAIISGCVGLSMMCYVSWKLSLCMSLIFPPLITMSWFYGRKIKALSKLIQENIGDMTKVTEEKLNGVKVIQTFSQQQSVVHSYNQEIKNIFNSSMREAKLAGFFYSTNGFIGNVTMIGLLIMGTKLIGAGELTVGDLSSFMMYAVYTGTSVFGLGNFYTELMKGIGAAERVFELVEYQPRISNHLGKKVDELNGDIEFKGIDFTYPSRPESGIFKDLNLHIKQGENVCLVGPSGSGKSTVSQLLLRFYDPEKGTIQIGDDVITDLNLNHYRSKLGYVQQEPLLFSGTIKENILFGKEDATDEEINNALNLSYASNFVRHLPDGLDTKIGASNSTQLSGGQKQRVSLARTLIRDPKILILDEATSALDSVSEEIVMSNLIQLNKNRGVTLISIAHRLSTIKNSDRIIVFNQDGQIVEDGKFNELHNDPNSQFNKLLKSHSLE

SEQ ID NO: 60241 - DNA, 2463 bp, Saccharomyces cerevisiae
  CDS (142)..(2463)
atgaaaacttacgtacttttatacgggaaactaataatgactacaatgatattgaatactggccgcttcgaagagtggtataaagtttgtatcattgcattaaaagaaaaagaaatatatgtcccatcatcgccaatcgcaatgttgaatggtcgtttaccacttttgcggctgggcatatgcagaaacatgctgtcccgtccccgactggctaaactgccatctataaggtttcggtctttggtcaccccttcttcatcgcagctcattcctctcagtcggttgtgtttaaggtcacctgcagttggaaaatcactaattttacaaagttttagatgtaattcatccaaaacagttccagaaacttctctgccttcagcctctcccatatctaaaggatcagcaaggtcggcacatgcaaaggagcaatctaaaactgatgactataaagatataataaggttatttatgttggcgaaacgggattggaaactgcttcttacagccatacttcttttaaccatatcatgttccataggcatgtctattcctaaagtcataggtattgtccttgacacacttaagacgtcatctggatcagatttttttgatttgaagataccgattttttctttgcctttatatgagtttctttccttttttactgttgctttactgattggttgtgctgctaattttggtagatttatattattgaggatactaagtgagcgtgttgttgcacgcctaagggcaaatgtcattaaaaaaacgcttcatcaagacgcagaattcttcgacaaccataaagttggggatttaatttctcgtttaggatctgatgcttatgttgtttcaagatcaatgacccagaaggtctcggatggggtcaaagccctaatttgtggggttgttggcgtggggatgatgtgttctttgtcacctcaactatcaatattgttactattcttcactccacctgttctttttagtgcctcagtgttcgggaagcaaattagaaacacctctaaagaccttcaagaagctactggtcaattgactagagtcgctgaagaacaactctctggtatcaagacggttcagtcgtttgttgctgaaggtaatgaattgtctaggtataacgttgcaattagagatatttttcaggtgggaaaaactgcggcatttacaaacgcaaagttttttactacaactagtctcttaggtgacctaagttttttaaccgtccttgcgtatggctcctatcttgttttacaatcacagctctccattggtgatctgactgcatttatgctgtacacagaatatacggggaatgcggtattcggcctttctaccttctattcggaaattatgcagggtgctggggccgcttccaggttgtttgaattaacagataggaaaccttccatttcaccgactgtgggacacaagtataaaccagatcgtggtgttatcgaatttaaagatgtttcatttagctaccctacaaggccttctgttcaaatattcaagaatttaaattttaaaattgcgccaggatcgagtgtttgtattgtgggcccttcaggtcgtggtaaatctacaattgcactcttactgctaagatattataatcccactactgggactattacgatagataaccaagatatctctaaattgaattgtaaatccctaagaaggcatattggtatcgttcagcaagagccggtactgatgtcaggtactattagggataatatcacttatgggttgacatataccccaacaaaggaagaaatcaggtcagtagcaaagcagtgcttttgccataactttatcacaaaatttccgaacacatacgatacggtaattggtcctcacggcaccttactaagtggaggacaaaagcagcgtattgcgattgcaagggctctaatcaaaaagccaactattttgattcttgatgaagctacatcagctttagatgttgaaagtgaaggagccattaactatacgtttggtcaactaatgaaatcaaaatcgatgactattgttagcatcgcgcacaggctaagtacgatcagaagatcagagaatgttattgtccttggccatgatggatcagtggtagaaatgggcaaattcaaagaattgtatgcgaatccaacaagtgctttatcgcaattacttaatgagaaagcggctcctgggccatctgaccaacaactgcaaatagagaaggtcatcgaaaaggaagatttgaatgagagtaaggagcatgatgaccagaaaaaggacgataatgacgataatgataataatcatgataacgacagcaataaccagtctccagagacgaaagacaataattcagatgatattgaaaaatctgtcgaacatctcctgaaagacgcggcaaaggaggctaatccaattaagatcacaccacaaccgtga

SEQ ID NO: 60242 - protein, 773 aa, Saccharomyces cerevisiae
MLNGRLPLLRLGICRNMLSRPRLAKLPSIRFRSLVTPSSSQLIPLSRLCLRSPAVGKSLILQSFRCNSSKTVPETSLPSASPISKGSARSAHAKEQSKTDDYKDIIRLFMLAKRDWKLLLTAILLLTISCSIGMSIPKVIGIVLDTLKTSSGSDFFDLKIPIFSLPLYEFLSFFTVALLIGCAANFGRFILLRILSERVVARLRANVIKKTLHQDAEFFDNHKVGDLISRLGSDAYVVSRSMTQKVSDGVKALICGVVGVGMMCSLSPQLSILLLFFTPPVLFSASVFGKQIRNTSKDLQEATGQLTRVAEEQLSGIKTVQSFVAEGNELSRYNVAIRDIFQVGKTAAFTNAKFFTTTSLLGDLSFLTVLAYGSYLVLQSQLSIGDLTAFMLYTEYTGNAVFGLSTFYSEIMQGAGAASRLFELTDRKPSISPTVGHKYKPDRGVIEFKDVSFSYPTRPSVQIFKNLNFKIAPGSSVCIVGPSGRGKSTIALLLLRYYNPTTGTITIDNQDISKLNCKSLRRHIGIVQQEPVLMSGTIRDNITYGLTYTPTKEEIRSVAKQCFCHNFITKFPNTYDTVIGPHGTLLSGGQKQRIAIARALIKKPTILILDEATSALDVESEGAINYTFGQLMKSKSMTIVSIAHRLSTIRRSENVIVLGHDGSVVEMGKFKELYANPTSALSQLLNEKAAPGPSDQQLQIEKVIEKEDLNESKEHDDQKKDDNDDNDNNHDNDSNNQSPETKDNNSDDIEKSVEHLLKDAAKEANPIKITPQP

SEQ ID NO: 60243 - DNA, 3744 bp, Arabidopsis thaliana
  CDS (1)..(3744)
atggataacatagaaccaccctttagtggaaacatccatgctgagaccgaagtaaagaaggaggagaagaaaaagatgaagaaggaatcggtgtcattgatgggtttgtttagtgcagctgataatgttgattactttctgatgtttcttgggggtttaggcacgtgtattcatggcggtacgcttccgctcttcttcgtgttcttcgggggaatgctagattctcttgggaagctttctacagacccgaatgccatatcttctcgcgtttcacagaatgctctgtacttggtctacttaggattggtcaatttggtatcagcctggattggagttgcttgttggatgcaaacaggggaaagacaaacagcgcgattgcgtataaattatctcaaatcaatcttagcaaaagatattactttctttgatactgaagctagagattcaaacttcattttccacatctcaagcgacgcaatcttggttcaagatgccattggcgataagaccggccatgttttgcggtacctatgtcagttcatcgcgggatttgtcatcggttttttgtcagtatggcaactaacgttgcttacgttaggagtggttccactgatagcaattgcaggaggagggtatgctatagtcatgtctacaatatcagagaagagtgaggctgcttatgctgatgcaggaaaagttgcagaagaggtcatgtcacaggtgagaacagtgtatgcatttgtaggagaagagaaagctgtaaaatcttactcaaattctctcaagaaagctctgaaactcagtaaaagaagtggtcttgctaaaggtttaggagttggattaacatatagcctcttgttctgtgcttgggcattgcttttttggtatgcaagtcttcttgtacgccatggcaaaaccaacggcgcaaaagccttcacaacaatcctcaatgtcatttacagcggattcgccttaggtcaagccgtgcctagcttatccgcaatttctaaaggcagagttgctgctgcaaatattttcaaaatgataggaaacaacaatcttgaaagctctgagagattagaaaacggaacaacattgcaaaacgtagttggcaagattgagttttgtggagtttcgttcgcatatccttcgagaccaaacatggtttttgagaatcttagtttcacgatacattcaggcaagacttttgcatttgtcggtccaagtggttcggggaaaagcacaatcatatcaatggtgcaacgtttctatgaacctagatcaggggagattctcttggatggaaatgacatcaagaacctgaagctgaaatggttgagagaacagatgggattagtgagtcaagaaccagcattattcgccacaacaatagcttctaatattcttctcggtaaagagaaagccaatatggatcagatcatagaagctgctaaagcagccaacgcagattctttcattaaatcattacctaatggttacaatactcaggttggagaaggaggaactcaactttcaggagggcagaaacagaggattgctattgctcgggcggttctaagaaatccaaagatattacttttagatgaagcaacaagcgctcttgatgccgaatcagagaagattgttcagcaagcacttgacaatgtcatggaaaaaagaacaacaatcgtcattgcacatagattatccaccattcgaaatgttgacaagattgttgtcttgagagatggtcaagttagggaaaccggaagtcactcagaactgatatcaagaggaggagattatgccactcttgtaaattgtcaagacacagaacctcaagaaaacttgagatcagtcatgtatgaatcttgtaggtctcaagctggatcatatagttcaagaagagtttttagctcaagaaggacttcaagcttcagggaagaccaagagaagactgaaaaagattcaaaaggcgaagatttaataagctcgtcctcaatgatatgggaactaataaagttgaatgctccagaatggctttatgcattacttggctcaattggtgccgttcttgccggatcacaaccggcattgttctccatggggcttgcttacgtgttaaccacgttttattcaccttttcctagtctgatcaagcgtgaagtcgataaggtagctattatctttgttggagctggaatagtaacagcgcctatatacattctccaacattacttctatacactaatgggagagcgtcttacttctcgggttcgcttatccttgttctcagcgattctttcaaatgagattggatggtttgatctggatgagaacaacactggctcactcacttcaatcttagctgctgatgcaaccttggtgaggagtgctatagcggatcgtctatcgacaatagtccaaaacttgtctcttacaatcacagccttagcacttgcctttttctacagttggcgtgttgcagctgtcgtaacagcttgttttcctcttctcattgccgcttcacttaccgagcaattatttctaaaaggctttggaggagattacacaagggcttactctagggcaacttcattggcgcgtgaagcgatttcgaatataagaaccgtcgctgcatttagtgctgaaaagcaaatctcagaacagtttacttgtgaactaagcaaacccaccaagagtgccttactcagaggtcatatctcgggatttggatacggtttgtcacagtgtctcgcgttctgttcctacgcacttggtctctggtatatctcagttctgattaagcgcaacgagaccaactttgaggatagtatcaaatctttcatggtattgctcgtcactgcttactccgtagcggaaacgcttgcgttaaccccagatatcgtgaagggcacacaagcactcgggtccgtatttagggttttacatagagagactgaaatacctccagaccagcctaactcaagattggtcactcatatcaaaggagatatagagtttagaaacgtgagctttgcgtatcccactagacccgaaatcgccattttcaaaaatctaaatctccgagtttcagccgggaagagtcttgcggtcgtgggacctagtggttcgggaaagagcacagtgatcggactaatcatgagattctacgatccgagcaacggaaatctctgtatcgatgggcatgatataaaatctgtaaacctacgtagcttgcgcaagaagctagcgttagttcagcaagaaccggctctgttttcaacatccatacacgagaacatcaagtatgggaacgagaacgcgtcagaggcagagatcattgaagccgcaaaagccgcgaacgcgcacgagttcataagcaggatggaagaagggtacatgactcacgtgggtgataagggagtgcagttatcaggtgggcaaaaacagagagtggctatcgcacgggcagttctaaaagatccttcagtgcttctccttgatgaggcaacaagtgctttggatacgagcgcagagaaacaggtccaagaggcgctagacaagttgatgaagggacgaaccacgattctggtggctcacaggctctcgaccataagaaaagcagacacaatcgttgtattgcataaaggaaaagttgtggagaaaggaagtcacagagaacttgtatctaaatccgatgggttttataagaaattgacgagtcttcaagaagcggtgtga

SEQ ID NO: 60244 - protein, 1247 aa, Arabidopsis thaliana
MDNIEPPFSGNIHAETEVKKEEKKKMKKESVSLMGLFSAADNVDYFLMFLGGLGTCIHGGTLPLFFVFFGGMLDSLGKLSTDPNAISSRVSQNALYLVYLGLVNLVSAWIGVACWMQTGERQTARLRINYLKSILAKDITFFDTEARDSNFIFHISSDAILVQDAIGDKTGHVLRYLCQFIAGFVIGFLSVWQLTLLTLGVVPLIAIAGGGYAIVMSTISEKSEAAYADAGKVAEEVMSQVRTVYAFVGEEKAVKSYSNSLKKALKLSKRSGLAKGLGVGLTYSLLFCAWALLFWYASLLVRHGKTNGAKAFTTILNVIYSGFALGQAVPSLSAISKGRVAAANIFKMIGNNNLESSERLENGTTLQNVVGKIEFCGVSFAYPSRPNMVFENLSFTIHSGKTFAFVGPSGSGKSTIISMVQRFYEPRSGEILLDGNDIKNLKLKWLREQMGLVSQEPALFATTIASNILLGKEKANMDQIIEAAKAANADSFIKSLPNGYNTQVGEGGTQLSGGQKQRIAIARAVLRNPKILLLDEATSALDAESEKIVQQALDNVMEKRTTIVIAHRLSTIRNVDKIVVLRDGQVRETGSHSELISRGGDYATLVNCQDTEPQENLRSVMYESCRSQAGSYSSRRVFSSRRTSSFREDQEKTEKDSKGEDLISSSSMIWELIKLNAPEWLYALLGSIGAVLAGSQPALFSMGLAYVLTTFYSPFPSLIKREVDKVAIIFVGAGIVTAPIYILQHYFYTLMGERLTSRVRLSLFSAILSNEIGWFDLDENNTGSLTSILAADATLVRSAIADRLSTIVQNLSLTITALALAFFYSWRVAAVVTACFPLLIAASLTEQLFLKGFGGDYTRAYSRATSLAREAISNIRTVAAFSAEKQISEQFTCELSKPTKSALLRGHISGFGYGLSQCLAFCSYALGLWYISVLIKRNETNFEDSIKSFMVLLVTAYSVAETLALTPDIVKGTQALGSVFRVLHRETEIPPDQPNSRLVTHIKGDIEFRNVSFAYPTRPEIAIFKNLNLRVSAGKSLAVVGPSGSGKSTVIGLIMRFYDPSNGNLCIDGHDIKSVNLRSLRKKLALVQQEPALFSTSIHENIKYGNENASEAEIIEAAKAANAHEFISRMEEGYMTHVGDKGVQLSGGQKQRVAIARAVLKDPSVLLLDEATSALDTSAEKQVQEALDKLMKGRTTILVAHRLSTIRKADTIVVLHKGKVVEKGSHRELVSKSDGFYKKLTSLQEAV

SEQ ID NO: 60245 - DNA, 3702 bp, Arabidopsis thaliana
  CDS (1)..(3702)
atgcagccgtccggtgatccggcgccggaaaaggagaaagagatgacgcagccaaaagtgtcactgcttaagctcttctccttcgcagatttctatgattgtgttctaatgactcttggatccgtaggagcgtgcattcatggcgcctcggttccaatctttttcatcttctttggcaaactcatcaatattatcggtcttgcttatcttttcccaaaacaagcctctcacagagtcgccaagtactcgttggattttgtatacttgagtgtggctatactattttcatcatggttagaggttgcatgttggatgcatacgggagagaggcaagcggcgaagatgaggagagcttatctcaggtcaatgttaagccaagacataagcttattcgacaccgaagcttctacaggagaagtcatctccgccatcacctccgacatcctcgtcgtccaagatgctctctccgagaaggtagggaatttcttgcactacataagccggttcatagccggttttgcaattggattcactagtgtatggcaaataagtcttgtcactctatccatagtccccttaatcgctctagctggcggcatctatgcgttcgtcgccatcggacttattgctcgtgtccggaaatcatacatcaaggctggtgagattgcagaagaggtgatcgggaatgtgaggaccgtacaagcattcaccggtgaagaaagggcggtgagattataccgagaagcgctggagaatacgtataagtacgggagaaaagctggtttaaccaaaggattaggtcttggatcgatgcactgtgtcttgtttctatcttgggccttgctcgtatggttcacaagtgttgtggtccacaaggatatcgccgatggtggcaaatcattcactaccatgctcaacgttgtcatcgccggcctgtctcttggacaagcggcgcccgatatttctgcgtttgtacgggcaaaagccgctgcttatccaattttcaagatgattgaacggaacacggtgacaaaaacaagcgcaaaatctggccgtaaactagggaaagtagacgggcacattcaattcaaagacgcgactttcagttacccatctcgccctgatgtggtgatcttcgacaggttaaacctagctatccctgccgggaaaattgtggcacttgttggaggaagcggatcagggaagagcacggtcatatctttgatagagcggttctacgagcctatttctggagcagtgttgctagacgggaacaatatcagtgagctggatattaagtggttaagaggacagattggtttggttaaccaagaaccagctctgtttgcaacaacgattcgtgagaacattctgtatggcaaagacgacgcaactgctgaggagatcacccgtgccgcaaagctctcggaagccatttctttcatcaacaacctccctgaaggatttgagactcaggttggcgagagagggattcaactatctggcggacagaaacaaaggattgctatatcaagagcaattgtgaagaatccatcgatactcttactcgacgaagcaacaagtgctttagacgcagagtcggagaagagcgtgcaagaagcgctggatcgagtgatggttgggagaacaacggtggtggtggctcacagactctcaacggtaagaaatgctgacatcatagcagttgtacacgaaggtaaaatagttgagtttggaaaccacgagaatctcatatctaatcccgacggagcctactcttctcttcttcgtctccaagagactgcctcattgcagcgtaacccttccttgaatcgcacgctaagcagaccacatagtataaaatactcgcgggaactatcaagaacaagatccagcttctgttcagagagggaatcggtaactcgaccggatggggctgatccatccaaaaaagtgaaagtaacggtgggacgtctttactctatgatccgtccggactggatgtatggcgtgtgtggcacgatatgtgcctttatcgctggatctcaaatgccccttttcgcgcttggcgtctcgcaagccttagtttcctattacagtggttgggatgagactcaaaaagagatcaagaagatcgctatcctcttctgctgcgcgtccgttatcactctaattgtctacaccattgagcatatctgctttggcactatgggcgagcgtctcactctccgtgtccgcgaaaatatgttcagagcaatcttgaagaatgaaatcgggtggtttgatgaggtggacaacacaagctcaatgttggcatcgcggcttgagagcgatgcaactttgcttaaaaccatagtggtcgataggtcaacgattctactgcagaacttaggtctagttgtgacctcttttatcatagcatttatactcaactggcgtctcactcttgtcgtcttggccacatacccattggttataagcggacatatcagcgagaaacttttcatgcaaggatatggaggagacttgaacaaagcatacttaaaggccaacatgttggccggtgagtctgttagcaacatccgcacggtcgctgccttctgtgctgaggaaaagattctagaactttattcaagagagcttttagaaccttccaaaagttctttcaggcgtggacaaattgcaggacttttctacggtgtctctcagttcttcattttctcttcctatggcctcgccctctggtacggatcaactttgatggacaaaggattagcgggcttcaaatcagtgatgaaaacattcatggttttgattgtgacggcgttagcgatgggtgagacattggctctagctccggatctgctgaaaggaaaccagatggttgcgtccgtgtttgagatcttggaccggaaaactcagatcgttggagaaaccagcgaggagctgaacaatgtggaaggcacgattgagctcaaaggcgtccactttagctacccttcgagaccagatgttgtaattttccgggactttgatctgatagttcgtgccggaaagagcatggcgctcgttggacagagtggatctgggaaaagttctgttatttcactcattctccggttctatgacccgactgctggaaaagtcatgatagagggaaaagacatcaagaaactagatttgaaagcattgaggaaacacattggtcttgttcaacaagaaccagcacttttcgccacaacaatctacgagaacattttgtatggaaacgaaggagcatctcaatctgaagtcgtcgaatcagctatgctcgcaaatgctcacagcttcattacctctctcccagaaggttactctaccaaagtcggtgaacgtggagttcaaatgtcaggcgggcagagacagaggatcgctatcgctagagccattctcaagaatccagcaattctattacttgacgaagccacaagcgctttggacgttgaatctgagcgtgtggtacaacaagcattggatcggttaatggctaaccggacgactgtggtagttgctcacaggctatcgacgatcaagaacgctgacacgataagtgtattacacggaggtaagatcgtagagcaaggcagccaccgtaagctcgttctaaacaagagtggtccatattttaaacttatcagtcttcagcagcagcaacaaccttaa

SEQ ID NO: 60246 - protein, 1233 aa, Arabidopsis thaliana
MQPSGDPAPEKEKEMTQPKVSLLKLFSFADFYDCVLMTLGSVGACIHGASVPIFFIFFGKLINIIGLAYLFPKQASHRVAKYSLDFVYLSVAILFSSWLEVACWMHTGERQAAKMRRAYLRSMLSQDISLFDTEASTGEVISAITSDILVVQDALSEKVGNFLHYISRFIAGFAIGFTSVWQISLVTLSIVPLIALAGGIYAFVAIGLIARVRKSYIKAGEIAEEVIGNVRTVQAFTGEERAVRLYREALENTYKYGRKAGLTKGLGLGSMHCVLFLSWALLVWFTSVVVHKDIADGGKSFTTMLNVVIAGLSLGQAAPDISAFVRAKAAAYPIFKMIERNTVTKTSAKSGRKLGKVDGHIQFKDATFSYPSRPDVVIFDRLNLAIPAGKIVALVGGSGSGKSTVISLIERFYEPISGAVLLDGNNISELDIKWLRGQIGLVNQEPALFATTIRENILYGKDDATAEEITRAAKLSEAISFINNLPEGFETQVGERGIQLSGGQKQRIAISRAIVKNPSILLLDEATSALDAESEKSVQEALDRVMVGRTTVVVAHRLSTVRNADIIAVVHEGKIVEFGNHENLISNPDGAYSSLLRLQETASLQRNPSLNRTLSRPHSIKYSRELSRTRSSFCSERESVTRPDGADPSKKVKVTVGRLYSMIRPDWMYGVCGTICAFIAGSQMPLFALGVSQALVSYYSGWDETQKEIKKIAILFCCASVITLIVYTIEHICFGTMGERLTLRVRENMFRAILKNEIGWFDEVDNTSSMLASRLESDATLLKTIVVDRSTILLQNLGLVVTSFIIAFILNWRLTLVVLATYPLVISGHISEKLFMQGYGGDLNKAYLKANMLAGESVSNIRTVAAFCAEEKILELYSRELLEPSKSSFRRGQIAGLFYGVSQFFIFSSYGLALWYGSTLMDKGLAGFKSVMKTFMVLIVTALAMGETLALAPDLLKGNQMVASVFEILDRKTQIVGETSEELNNVEGTIELKGVHFSYPSRPDVVIFRDFDLIVRAGKSMALVGQSGSGKSSVISLILRFYDPTAGKVMIEGKDIKKLDLKALRKHIGLVQQEPALFATTIYENILYGNEGASQSEVVESAMLANAHSFITSLPEGYSTKVGERGVQMSGGQRQRIAIARAILKNPAILLLDEATSALDVESERVVQQALDRLMANRTTVVVAHRLSTIKNADTISVLHGGKIVEQGSHRKLVLNKSGPYFKLISLQQQQQP

SEQ ID NO: 60247 - DNA, 3909 bp, Drosophila melanogaster
  CDS (1)..(3909)
atggtcaagaaggaggaatcacggctgccacaagctggtgactttcagcttaaggaaggatcagtcgtggatgcgacccgaaagtacagttactttgatctgttcagatactcaaccagatgcgagcgcttcctgttggtagtcagtctgctggtggccaccgctgcgtccgcatttattccctacttcatgattatctacggagagttcacatccctgctcgtggaccgaacagtcggcgtgggcacatcctcgccagcctttgctctgcccatgtttggtggcggtcagcaattgacaaatgccagcaaagaggagaacaaccaggcgatcattgatgatgcgactgcctttggcattggcagtctggtgggatctgtggccatgttcctgctcatcacactggccatcgacttggccaaccggatagccctcaaccaaatcgatcgcatccgaaagctcttcctggaggcaatgctgcgacaggacatcgcctggtacgacaccagttcgggctccaacttcgccagcaaaatgacagaagacctggacaaactgaaggaaggcattggcgagaaaatagtgattgtggtattcctgatcatgacctttgtgattggaatagtgtctgctttcgtctacggatggaagctcaccctggtcgttctgagttgtgtgcccttcatcattgcagccaccagtgtggtggctcgactccagggatcgctggccgagaaggagctgaagtcctactccgatgcagccaacgtggtcgaggaggtattcagtggaattcgcacagtgttcgcattcagtggtcaggagaaggagaaggaacgctttggcaagctgctcattcccgcagagaatacgggtcgcaagaagggtctatactcgggcatggggaacgctctgtcctggctgatcatctacctgtgcatggcccttgccatctggtatggtgtgacgctcattctggacgagcgtgatcttcccgatcgcgtttatactccggccgttctggtcattgtcctgttcgccgtgatcatgggtgcccagaatctcggttttgcctctccacacgtggaagccattgctgtggccacggcagctggccagaccctgttcaacatcatcgatcgtccgtcgcaggtggatccaatggacgagaagggaaacaggccggagaataccgctggacacattcgtttcgagggcatacgcttccgttaccccgcccgtccggatgtggagatcctcaagggtctgaccgtcgatgtgcttccgggtcagacggtggccttcgtgggcgcatctgggtgtggcaagagcaccctcatccaactgatgcagcggttctacgaccccgaagcgggcagtgtcaaactggatggacgggatcttcgaacactgaatgtgggctggttgcgttcgcagatcggagtggtgggccaggaaccggttctcttcgccaccaccattggcgagaatatccgatacggaagaccatcggccactcaggcggatatagagaaggcggcgcgagcggccaactgtcatgatttcatcactcgcctacccaagggctacgacacccaggtgggcgagaagggcgctcagatttctggtggccagaagcagcggattgccattgcccgggctttggttcgacagccccaagtgcttcttctcgacgaggccacctctgccctggatcccacctctgagaagcgggtgcaaagtgccctagaactggccagccagggaccaaccactctagttgtggcccaccgactgtccaccatcaccaatgccgacaagattgtcttcctcaaggacggtgtagtggcggagcagggtacgcacgaggagctcatggagcgacgtggtctctactgcgaactggtgagcatcacccagcggaaggaggccacggaggcggacgagggagcggttgccgggcgacctctgcagaagtcgcagaacctgtctgacgaggaaaccgatgatgacgaggaagatgaagaggaggacgaagagccggagctgcagacttcgggcagctccagggacagcggattcagagccagcacgcgacgcaagcgtcgctcgcagcgtcgcaagaagaagaaggacaaggaagtggtatccaaggtgtccttcactcaactaatgaagcttaattctccggagtggcgtttcattgtcgtcggaggcattgcatccgtaatgcatggcgccacattcccgctttggggtctcttctttggcgacttctttggaatcctctcggacggtgacgatgacgttgtgcgagccgaggtcctgaaaatctccatgatctttgtgggcattggcttgatggccggactgggcaacatgctccagacctacatgttcacaacggccggcgtgaagatgacaacgcgattgcgtaaaagggcttttggaacgattattggtcaggatattgcctacttcgatgacgagcggaattcagtgggagcactgtgctcccggctggccagcgattgttccaacgttcagggtgcaaccggagctcgtgtgggcacaatgctccaggccgtggccactcttgtggtcggaatggtcgtcggtttcgttttctcctggcaacagacgctcctcacactggtcaccctgcccctggtctgtttgtccgtctacttggagggccgttttatcatgaagagcgcccagaaggctaaggcgtcgatcgaggaggcttctcaagtggcagtcgaagctattaccaatatccgaacggtcaatggtctttgcctggagcgccaggtcttggatcagtacgttcagcagatcgatcgcgtggatgtcgcctgcaggcgcaaggttcgcttccgtggtctggttttcgctctgggacaggcggctcctttcctggcttacggcatctccatgtactatggtggtattctggtggcagaggagcgaatgaactatgaggacatcatcaaggtggccgaggctctgatctttggctcctggatgttgggacaggccctggcctacgcgccaaatgtaaacgatgctattctgtccgccggacgcctaatggatctcttcaagcgcacctccacgcagcccaatccgccacagagtccctacaatacagttgagaaatccgagggagacattgtctatgaaaacgtgggtttcgaatatcccaccaggaagggcactcccattctgcagggcctaaatctcaccatcaagaaatcgacgacggtagctctggtgggtccatctggttccggcaagtccacctgcgtgcaactgctgctccgctactacgatcccgtatcgggatccgtgaatctgagcggagtgccaagcacggaattcccattggacacactgcgctccaagctgggcctggtctcgcaggaacccgtgctcttcgatcgcaccattgccgagaacatagcttatggcaacaatttccgtgacgatgtgtccatgcaggagattattgaggcggccaagaagtcgaatatccacaactttataagtgctttgccccaaggctacgacacccgactgggcaagacctcgcagctctctggaggtcagaagcagcgcatcgccatcgctcgagccctggtcagaaacccgaagatactcatcctggacgaggcaacctctgcgctggacttggagagcgagaaggtggtgcaacaggcgctggatgaggcgagatcaggccgcacatgcctgacgattgcgcatcgtctgaccaccgtgcggaatgcggatctcatctgtgtgctaaaacgcggcgtggtagtggagcacggcacccacgatgagttgatggcattgaacaaaatctacgccaatctctatctgatgcaacaggtgtcgggctaa

SEQ ID NO: 60248 - protein, 1302 aa, Drosophila melanogaster
MVKKEESRLPQAGDFQLKEGSVVDATRKYSYFDLFRYSTRCERFLLVVSLLVATAASAFIPYFMIIYGEFTSLLVDRTVGVGTSSPAFALPMFGGGQQLTNASKEENNQAIIDDATAFGIGSLVGSVAMFLLITLAIDLANRIALNQIDRIRKLFLEAMLRQDIAWYDTSSGSNFASKMTEDLDKLKEGIGEKIVIVVFLIMTFVIGIVSAFVYGWKLTLVVLSCVPFIIAATSVVARLQGSLAEKELKSYSDAANVVEEVFSGIRTVFAFSGQEKEKERFGKLLIPAENTGRKKGLYSGMGNALSWLIIYLCMALAIWYGVTLILDERDLPDRVYTPAVLVIVLFAVIMGAQNLGFASPHVEAIAVATAAGQTLFNIIDRPSQVDPMDEKGNRPENTAGHIRFEGIRFRYPARPDVEILKGLTVDVLPGQTVAFVGASGCGKSTLIQLMQRFYDPEAGSVKLDGRDLRTLNVGWLRSQIGVVGQEPVLFATTIGENIRYGRPSATQADIEKAARAANCHDFITRLPKGYDTQVGEKGAQISGGQKQRIAIARALVRQPQVLLLDEATSALDPTSEKRVQSALELASQGPTTLVVAHRLSTITNADKIVFLKDGVVAEQGTHEELMERRGLYCELVSITQRKEATEADEGAVAGRPLQKSQNLSDEETDDDEEDEEEDEEPELQTSGSSRDSGFRASTRRKRRSQRRKKKKDKEVVSKVSFTQLMKLNSPEWRFIVVGGIASVMHGATFPLWGLFFGDFFGILSDGDDDVVRAEVLKISMIFVGIGLMAGLGNMLQTYMFTTAGVKMTTRLRKRAFGTIIGQDIAYFDDERNSVGALCSRLASDCSNVQGATGARVGTMLQAVATLVVGMVVGFVFSWQQTLLTLVTLPLVCLSVYLEGRFIMKSAQKAKASIEEASQVAVEAITNIRTVNGLCLERQVLDQYVQQIDRVDVACRRKVRFRGLVFALGQAAPFLAYGISMYYGGILVAEERMNYEDIIKVAEALIFGSWMLGQALAYAPNVNDAILSAGRLMDLFKRTSTQPNPPQSPYNTVEKSEGDIVYENVGFEYPTRKGTPILQGLNLTIKKSTTVALVGPSGSGKSTCVQLLLRYYDPVSGSVNLSGVPSTEFPLDTLRSKLGLVSQEPVLFDRTIAENIAYGNNFRDDVSMQEIIEAAKKSNIHNFISALPQGYDTRLGKTSQLSGGQKQRIAIARALVRNPKILILDEATSALDLESEKVVQQALDEARSGRTCLTIAHRLTTVRNADLICVLKRGVVVEHGTHDELMALNKIYANLYLMQQVSG

SEQ ID NO: 60249 - DNA, 3861 bp, Arabidopsis thaliana
  CDS (1)..(3861)
atggcttcagagagcggcttaaatggagatccaaatatactagaagaggtttctgagaccaaaagagacaaggaagaagaagaagaagtgaagaaaacagagaagaaagacgaggaacatgagaaaaccaaaacggtgccgttttataagctctttgcttttgcagattcctttgatttcctcttgatgatcctcgggacgcttggatctattggaaatggtcttggcttccctcttatgaccttactgttcggagatctcattgatgcttttggagagaatcagactaatacaacagacaaagtctccaaagttgctctgaagtttgtatggcttggaatcggtactttcgcagctgcttttctccaattgtctggctggatgatttctggagagagacaagcagcgagaataaggagtttgtatctaaagacaatcttaagacaagatatagcctttttcgacatcgatacaaatacaggagaagttgttggaagaatgtccggtgacactgtgctaatccaagatgccatgggagaaaaggtgggaaaagctatacaacttctagcaacatttgtaggaggctttgtgatagctttcgtaagaggatggcttctaacgttggtcatgttatcttcaattcctctacttgtaatggctggtgcacttctggctatcgtcattgctaaaacagcttctcgtggacaaactgcttacgccaaagctgccactgtagttgagcaaacaattggttctataagaacggttgcatcatttacaggagagaaacaagcgataagcaattacaataaacatcttgtcactgcttataaagcaggagtcattgaaggtggttcaactggattgggtcttggaacgctctttcttgtagtcttttgtagctacgctttagcagtatggtatggaggaaagttgatattggataaaggctacacaggaggacaagttctcaatatcatcatcgctgttttaactggatccatgtcgttaggtcaaacatcgccttgcttaagcgcatttgcagctggacaagccgcggcttacaagatgtttgagacaattgagagaagacctaacatagattcttatagtacaaatggtaaagttttggatgacattaagggagatattgagctcaaagatgtttactttacttacccagcgagacccgatgagcaaatatttcgcggattctctctgtttatctcgagtggtacaacggtggctttagttggacaaagtgggagcgggaaatctactgttgtgagtctgattgagaggttttacgatccacaagctggtgacgttctcatagatggtattaacttaaaagagtttcagctaaaatggattagaagcaagattggacttgtgagtcaagaaccagttttgttcactgcaagcatcaaggataacattgcgtacggcaaagaagacgcaacaaccgaagagattaaagcagctgcagagctagcaaacgcatctaaatttgtggataagctaccacagggtttggatacaatggttggagaacatggtactcagctttccggtggacaaaaacagagaatcgcggtggctagagcaatcttaaaagatccaagaatcttacttttagatgaagctacaagcgcgcttgatgcagaatctgagagagtggttcaagaagcgcttgatagaattatggttaaccggactactgttgtggtcgctcatcggttaagcactgtgcgaaatgcggatatgatcgctgtgatccaccaaggcaagatcgtcgagaaaggttctcacacggaactactaaaggacccggaaggagcttattctcagctgattcgtctacaagaagagaagaaatctgatgagaatgcagcggaggagcaaaagatgtcatcaattgaatcattcaaacaatctagtctgagaaaatcgtctctaggccggtctctaagcaaaggaggatcatccagaggaaacagcagccgccattctttcaatatgtttggttttccagcaggaattgacggaaacgtcgttcaagatcaagaagaggatgatactacacaaccaaaaaccgaaccaaaaaaagtctccattttcagaattgctgctctaaacaaaccagagattccggtgctaatacttggatcaatatccgcagcagcaaatggcgttatccttccaatctttggcatactaatctccagcgtaatcaaagcgtttttccaaccacctaaaaagctaaaagaagatacaagcttctgggcaatcatattcatggttcttggtttcgcatccatcattgcatacccagcacaaaccttcttctttgccatagctggatgtaaactagtgcagaggatcagaagtatgtgttttgagaaagtggttcacatggaagttggatggttcgacgagccagagaattctagtggaaccataggagcaaggctatcagcagatgctgccacaatccgtggtctagttggagactctttggctcagacagttcagaatctttcatctatattggctggtttgatcattgcatttttggcttgttggcaattagctttcgtggtcctcgcgatgctcccgcttatcgcactcaatggatttctttatatgaagttcatgaaaggtttcagcgctgatgcaaagaaaatgtacggggaagcaagccaagtagcgaatgacgcggtagggagcataagaaccgttgcttcattctgtgcagaagacaaggtgatgaacatgtactcaaagaaatgtgaaggtccaatgaagaatgggattcgtcaaggcatagtcagtggtattggtttcggcttctctttcttcgtcctcttctcttcttacgctgccagtttctacgttggagcacgccttgtcgatgatggcaaaacaaccttcgactctgttttcagggttttctttgctttgacaatggcggcaatggcgatatctcaatcgagttcgttatctccagattccagcaaagccgatgtagctgctgcctcgattttcgcaataatggacagggaatcaaagattgacccaagtgtggaatcaggaagagtgttggataatgttaaaggagacattgagcttcgtcatgttagtttcaaatacccagcaagaccagatgttcaaatcttccaagacctctgtctaagcattcgagctggaaagacagttgctttggttggagaaagcggtagcgggaaatcaacggtgattgcattgttgcagaggttttacgatccagattcaggtgagatcactcttgacggtgtagagatcaagagcctaagactaaaatggctaagacaacaaacgggacttgtgagccaagaaccaatcttgttcaacgagacaattagagccaacattgcttatggcaaaggaggagacgcgagtgaatccgaaatcgtatcttcagctgaattatcaaacgcccatggattcatcagtggtctgcaacagggttatgatacgatggtgggagaaagaggaattcaattatcaggcggacaaaagcaacgagtagctatagccagagccatcgtcaaagatccaaaggtgttgctgctcgacgaagccacgagtgctcttgacgctgagtctgagcgtgtggttcaggacgcgctagaccgtgttatggtaaaccggactacgattgtggtagctcaccggttatcgacgattaagaatgctgacgtaattgccgtcgttaagaacggcgtcatcgttgagaaaggaaagcacgacacgttgatcaatatcaaagacggagtttatgcttcgttagttcagcttcatctaaccgcggcttcttga

SEQ ID NO: 60250 - protein, 1286 aa, Arabidopsis thaliana
MASESGLNGDPNILEEVSETKRDKEEEEEVKKTEKKDEEHEKTKTVPFYKLFAFADSFDFLLMILGTLGSIGNGLGFPLMTLLFGDLIDAFGENQTNTTDKVSKVALKFVWLGIGTFAAAFLQLSGWMISGERQAARIRSLYLKTILRQDIAFFDIDTNTGEVVGRMSGDTVLIQDAMGEKVGKAIQLLATFVGGFVIAFVRGWLLTLVMLSSIPLLVMAGALLAIVIAKTASRGQTAYAKAATVVEQTIGSIRTVASFTGEKQAISNYNKHLVTAYKAGVIEGGSTGLGLGTLFLVVFCSYALAVWYGGKLILDKGYTGGQVLNIIIAVLTGSMSLGQTSPCLSAFAAGQAAAYKMFETIERRPNIDSYSTNGKVLDDIKGDIELKDVYFTYPARPDEQIFRGFSLFISSGTTVALVGQSGSGKSTVVSLIERFYDPQAGDVLIDGINLKEFQLKWIRSKIGLVSQEPVLFTASIKDNIAYGKEDATTEEIKAAAELANASKFVDKLPQGLDTMVGEHGTQLSGGQKQRIAVARAILKDPRILLLDEATSALDAESERVVQEALDRIMVNRTTVVVAHRLSTVRNADMIAVIHQGKIVEKGSHTELLKDPEGAYSQLIRLQEEKKSDENAAEEQKMSSIESFKQSSLRKSSLGRSLSKGGSSRGNSSRHSFNMFGFPAGIDGNVVQDQEEDDTTQPKTEPKKVSIFRIAALNKPEIPVLILGSISAAANGVILPIFGILISSVIKAFFQPPKKLKEDTSFWAIIFMVLGFASIIAYPAQTFFFAIAGCKLVQRIRSMCFEKVVHMEVGWFDEPENSSGTIGARLSADAATIRGLVGDSLAQTVQNLSSILAGLIIAFLACWQLAFVVLAMLPLIALNGFLYMKFMKGFSADAKKMYGEASQVANDAVGSIRTVASFCAEDKVMNMYSKKCEGPMKNGIRQGIVSGIGFGFSFFVLFSSYAASFYVGARLVDDGKTTFDSVFRVFFALTMAAMAISQSSSLSPDSSKADVAAASIFAIMDRESKIDPSVESGRVLDNVKGDIELRHVSFKYPARPDVQIFQDLCLSIRAGKTVALVGESGSGKSTVIALLQRFYDPDSGEITLDGVEIKSLRLKWLRQQTGLVSQEPILFNETIRANIAYGKGGDASESEIVSSAELSNAHGFISGLQQGYDTMVGERGIQLSGGQKQRVAIARAIVKDPKVLLLDEATSALDAESERVVQDALDRVMVNRTTIVVAHRLSTIKNADVIAVVKNGVIVEKGKHDTLINIKDGVYASLVQLHLTAAS

SEQ ID NO: 60251 - DNA, 3909 bp, Drosophila melanogaster
  CDS (1)..(3909)
atggagcgagatgaggtgtccacctcgagcagcgagggcaaatcacaggaggaggcgcccatggcggagggtttggagcccacagagcctattgctttcctgaaactttttcgattttccacctacggggagattggctggctgttcttcggcttcataatgtgctgcattaaggcactgacccttcctgccgtggtcattatctacagtgagttcacgtccatgttggtggaccgcgccatgcagtttggcaccagttcaaatgttcatgccctgccacttttcggaggtggtaaaacactaacaaatgcctctcgggaggaaaacaatgaagccttatacgatgattccatatcgtatggaattcttctgaccattgcatccgtggtgatgttcatctcaggaattttctctgtggatgtcttcaatatggtggcgctgcgtcaggtcacaaggatgcgaataaaactgttttcatccgtgattcgtcaagacatcggttggcatgatctggccagcaagcaaaactttacccaaagcatggtggacgacgtggaaaagattcgagatggcatctcagagaaagttggtcactttgtataccttgtagttggatttatcataactgtggccatttcatttagctacggctggaaacttaccttagctgtgagctcttatatacctctggtgatcttattaaattattacgtagctaagttccaaggcaagttgactgcccgagaacaagaatcctatgcgggagctggaaatttggcagaggaaattctgagttccatacgcactgtggtctcgtttggtggagaaaaatcagaggtgcagcgctatgagaatttcttggtcccagctcgaaaggcaagtcaatggaaaggagccttctcggggctcagcgatgcggttttgaagtccatgttgtatctgtcatgcgccggagcattttggtatggtgtcaatcttattatcgatgatcgaaatgtggaaaacaaggagtatacaccggctattctgatgattgccttctttggtatcattgttggtgcggacaacatagccagaacagctcctttcctggagtcttttgccaccgcacgcggctgtgccaccaacctcttcaaggtcatcgatctgacatccaagatcgatcccctatctacagacggtaaacttttgaactacggcctacgtggtgatgtggagttccaggatgtcttctttcgatatccctctcgtccggaggtgattgtacacaggggcctaaacattaggattagagctggtcaaacagtggccttggttggttcttctggctgtggaaagtccacctgtgtccaattgctccagaggttctacgatcctgtgtttggatcagttcttttggatgatttggacataagaaagtacaatatccaatggttgagatcgaatattgccgttgtgggtcaggaaccagtgctatttttgggcacaatagcacaaaacattagctatggtaagccaggagccacgcaaaaagagattgaagcagctgccactcaggcgggtgcacatgaattcattaccaatctgccagagagttatcgcagtatgattggagagcggggatcccagctctctggaggtcagaaacaacgcatagccatcgctcgagcccttatccagaatccgaagatcctgctgctggatgaagccacctctgcactggattaccaatccgagaaacaggttcaacaggccttggacttggccagtaaaggtcgtacaaccattgtggtctctcatcgattgtcagctattcgaggtgcagataagattgtctttattcatgatggtaaggttctggaggaaggttcccatgatgatttaatggcgctggaaggtgcatactacaacatggttcgtgccggcgatatcaacatgcccgatgaggtagaaaaagaggacagcattgaggacaccaaacaaaaaagcctggctctgtttgagaaatcctttgagacgagtccattaaacttcgagaaaggtcaaaagaacagtgtccagtttgaggaacctataataaaggcactcatcaaggatacaaatgcccagtcagctgaggctccgccggagaaaccgaacttcttccgcactttctctaggatccttcagcttgccaaacaggaatggtgctacctgattcttggaactataagtgctgtagcagtgggatttttgtatccagctttcgcggtcatcttcggagaattctatgctgctttggctgaaaaggatccggaggacgcactgcgtcgtactgctgttctatcctgggcctgcttgggcctggcattcttgaccggattggtttgcttccttcagacctatttgtttaactacgcgggcatttggcttaccaccagaatgcgagccatgaccttcaatgcgatggtgaatcaggaagttggatggttcgacgacgagaataactcggtgggagctctatccgctcgcttatccggcgaggcagttgatatccaaggagccataggatatcccttgagtggcatgattcaagcgttgtccaacttcatttcaagtgtcagcgtagccatgtactacaactggaagttggcccttttatgtttggccaattgtcccattatagtgggatctgtaatcctagaagctaagatgatgtctaacgctgtagtgagggaaaagcaggtgattgaggaagcctgtcgcattgccaccgaatccattaccaacatacgcactgttgccggtctgcgaagggaggcggatgttatccgggagtacacagaggagatccagcgggtggaggtgctcatccgccagaagcttagatggcgaggagtcctcaactccaccatgcaggcatcagctttcttcgcgtatgcagtggctctttgttacggaggtgttttggtgtccgagggtcagctgccattccaagatattatcaaggtatcagaaacattgctgtatggttccatgatgctcgctcaatctctagcctttacgccggccttctccgccgctctgatcgcgggtcatcgcctattccaaatactggatcgcaagccaaagattcagtcacccatgggcaccattaaaaatactctcgccaagcaattaaatcttttcgagggtgtgcgctatcgaggtattcaattccggtaccctacacgacctgatgcaaagattctgaatggcttggatcttgaggtgctcaagggtcaaacggtggccttggtgggtcattccgggtgtggaaaatccacttgcgttcagctacttcagcgttactatgatcccgatgagggcactattcatatagatcacgatgatatccaacacgatctgaccctcgatggagtaaggaccaaattgggcatagtctctcaagaacccactctcttcgagcgctctatagccgaaaatatagcctatggcgacaatcggcgatctgtttccatggtggagattattgcagcagccaagagtgccaatgctcatagttttatcatttctctaccaaatggctatgatactcggatgggagccagaggtactcagctatctggtggacagaaacagcgaatcgccattgccagagcgctggtgaggaatcccaagatcctgctactcgacgaagccacctcagctttggacttgcaaagcgaacagttggtccaacaggccttggataccgcctgctcgggacgcacctgtattgtcatagcccatcgattgtcaactgtccagaatgccgatgtgatctgtgtgattcaaaatggtcaggtggtggagcagggtaaccacatgcagttgatttcacagggcggcatttacgccaagctacacaagacccaaaaggatcattga

SEQ ID NO: 60252 - protein, 1302 aa, Drosophila melanogaster
MERDEVSTSSSEGKSQEEAPMAEGLEPTEPIAFLKLFRFSTYGEIGWLFFGFIMCCIKALTLPAVVIIYSEFTSMLVDRAMQFGTSSNVHALPLFGGGKTLTNASREENNEALYDDSISYGILLTIASVVMFISGIFSVDVFNMVALRQVTRMRIKLFSSVIRQDIGWHDLASKQNFTQSMVDDVEKIRDGISEKVGHFVYLVVGFIITVAISFSYGWKLTLAVSSYIPLVILLNYYVAKFQGKLTAREQESYAGAGNLAEEILSSIRTVVSFGGEKSEVQRYENFLVPARKASQWKGAFSGLSDAVLKSMLYLSCAGAFWYGVNLIIDDRNVENKEYTPAILMIAFFGIIVGADNIARTAPFLESFATARGCATNLFKVIDLTSKIDPLSTDGKLLNYGLRGDVEFQDVFFRYPSRPEVIVHRGLNIRIRAGQTVALVGSSGCGKSTCVQLLQRFYDPVFGSVLLDDLDIRKYNIQWLRSNIAVVGQEPVLFLGTIAQNISYGKPGATQKEIEAAATQAGAHEFITNLPESYRSMIGERGSQLSGGQKQRIAIARALIQNPKILLLDEATSALDYQSEKQVQQALDLASKGRTTIVVSHRLSAIRGADKIVFIHDGKVLEEGSHDDLMALEGAYYNMVRAGDINMPDEVEKEDSIEDTKQKSLALFEKSFETSPLNFEKGQKNSVQFEEPIIKALIKDTNAQSAEAPPEKPNFFRTFSRILQLAKQEWCYLILGTISAVAVGFLYPAFAVIFGEFYAALAEKDPEDALRRTAVLSWACLGLAFLTGLVCFLQTYLFNYAGIWLTTRMRAMTFNAMVNQEVGWFDDENNSVGALSARLSGEAVDIQGAIGYPLSGMIQALSNFISSVSVAMYYNWKLALLCLANCPIIVGSVILEAKMMSNAVVREKQVIEEACRIATESITNIRTVAGLRREADVIREYTEEIQRVEVLIRQKLRWRGVLNSTMQASAFFAYAVALCYGGVLVSEGQLPFQDIIKVSETLLYGSMMLAQSLAFTPAFSAALIAGHRLFQILDRKPKIQSPMGTIKNTLAKQLNLFEGVRYRGIQFRYPTRPDAKILNGLDLEVLKGQTVALVGHSGCGKSTCVQLLQRYYDPDEGTIHIDHDDIQHDLTLDGVRTKLGIVSQEPTLFERSIAENIAYGDNRRSVSMVEIIAAAKSANAHSFIISLPNGYDTRMGARGTQLSGGQKQRIAIARALVRNPKILLLDEATSALDLQSEQLVQQALDTACSGRTCIVIAHRLSTVQNADVICVIQNGQVVEQGNHMQLISQGGIYAKLHKTQKDH

SEQ ID NO: 60253 - DNA, 3747 bp, Arabidopsis thaliana
  CDS (1)..(3747)
atggcggagaaagcgaagaagaagaaaaatggaggaggaggaaatcagagaatagcgttttacaagcttttcacgtttgcagatcggtacgacatcgttttaatggtcatcgggaccctctccgccatggccaacggcttaactcagccgtttatgtcaatactcatggggcagctcattaacgtttttggtttctctgatcatgatcacgtgtttaaagaagtctccaaggttgctgtgaagtttctttatcttgcagcctacgccggtgttgtgtccttcctgcaggtctcatgctggatggtaactggggagcgtcaatccactagaatccgccgtctatacctaaaaacaattttaagacaagacattggatttttcgatactgagacaaataccggtgaagtcatcggaagaatgtcaggagacaccattcttattcaagattccatgggagaaaaggttgggaaattcacacagctcgtttcgtcattcgttggtggattcacggttgcttttatagttggaatgaaactcacattggctcttcttccgtgcgttcctctgatcgtgggcacaggtggagcaatgacctatatcatgtcaaaaaaggctcaacgtgttcaactggcttacacagaagctggaaacgtagtacaacaagccgttgggtcaattagaacagttgtggctttcactggggagaaacaatcaatgggaaaatatgagaagaagcttgagatagcctacaaatctatggttaaacaagggctatactccggtctaggcattgggataatgatggttgtggtatattgtacttatggttttgcgatttggtacggtgctaggcagataatagagaaaggatatactggaggtcaagtcatgaacgtgattacgtcaatcttgactggaggaatggcgttggggcagacattgccttctcttaactcttttgcggccggaacagctgcagcttacaaaatgtttgagactatcaaaagaaaaccaaagatcgatgcttatgacatgagtggtgaggttttagaagaaattaaaggtgacattgagctaagagacgtgtactttcgatatccggctagacctgacgtgcagatatttgttggattttcgttgactgtaccgaatggcatgaccgtggctttggtgggacagagcggtagcggaaaatcaactgtgatcagtttaattgagaggttctacgatccggaatcaggagaagttttaatagatggaattgacttaaagaaatttcaagtgaaatggatcagaagtaagattggtctcgtaagccaagaacctatactatttgctaccacaattagggagaacattgtttacggcaaaaaagatgcgtccgaccaagaaattagaaccgcacttaagctcgccaacgctagtaacttcatcgacaaacttccgcagggtttggaaacgatggtaggagagcatgggacgcaattatccggtgggcaaaagcagaggattgcgattgcgagggcgattttgaaaaacccaaaaatattgcttcttgatgaagctacaagcgctttggacgcagaatctgaacgcattgttcaagatgctcttgtaaagctaatgttgagcaggaccactgtagtggtggctcaccgacttaccaccattagaaccgctgatatgatcgctgttgtgcagcagggaaaagtcattgagaaaggaactcatgatgagatgattaaagatcccgaaggaacatattcacagctagttcgtctacaagaaggatctaagaaagaagaagcaatagacaaggaaccagaaaagtgtgaaatgagtttggaaatcgaaagttcggatagccaaaatggaatccattccggcactctcacatcaccatctggtttaccgggagtgattagcttggaccagacggaagagttccacgagaatatatcttccaccaaaactcaaacggttaagaaaggcaaggaagtatcattaagaaggcttgctcaccttaacaaaccggagatttcggttttgttgctcggttcattggctgcagtgattcacggtattgtgttccctgttcaaggtttgcttttgtctcgcacaatcaggatattctttgagccttcaaataaactaaagaatgattctcttttctgggctctcatttttgtcgcccttggcttaaccgacctgattgtgattccgttacaaaactacttattcgctatcgctggagcaaaactaatcaaacgtatcagatcgttgtcgtttgatagagtcttgcaccaagatataagttggttcgacgatactaaaaattctagcggtgtgattggagcgaggttgtccacggatgcttctacagtgaagagtatagtaggagatgtgttagggttgatcatgcaaaatatggcgactataattggagcatttattatagcgtttacggctaattggttattagctttaatggcccttttggtggcaccagtaatgttttttcaaggatactaccagatcaagtttataacgggttttggagcaaaagcaagaggaaaatatgaagaggctagccaggttgcgagtgacgcggtgagcagcataagaacagttgcatcgttctgcgcagaggataaagtgatggatttataccaagagaaatgtgacgaaccaaagcaacaaggcttcaaattaggactggtgagtggtttgtgctatggtggctcatacttggctctctatgtcatcgagtccgtatgctttctcggcggttcctggttgattcagaacaggagggcaacgttcggagaattctttcaggttttcttcgcgttaactttgacagccgtaggagtgactcaaactagtactatggcacctgacataaacaaagcaaaagactctgctgcttcgatattcgatatcctcgatagtaaaccgaaaatcgattcgagttccgagaaagggacaatattaccaatcgtccacggcgatatcgagttgcaacatgttagtttccggtatcctatgcgaccggatatacagatttttagtgacttgtgcttaactatctcatctggacagaccgttgcattggttggagaaagcgggagcggtaaatcgacggtgataagcttactagagagattctacgatccggattcaggcaagattcttttagatcaagttgaaattcaatcgttaaaattgagttggttaagggaacaaatgggtttggttagtcaagaaccggttctgttcaatgagacaataggatcaaacatagcatatggtaaaatcggaggagccacagaggaagagattataaccgcggcaaaagcggctaatgtgcataacttcatcagctcattgcctcaaggctacgaaacgtccgttggtgaacgtggagtacaattatccggtggtcaaaaacagaggatcgcgatcgctcgggctattctcaaggatcctaaaattttgttgcttgatgaagcgacaagcgcgttggatgcagagtctgagcgggtggtgcaagatgcgcttgatcaggtgatggtgaacaggaccacggttgtggtggctcacctgctcactaccattaaggacgctgatatgatcgcggttgtgaagaacggtgtgatcgcggagagtgggagacatgaaacgttaatggagatttcaggtggtgcttatgcatcgcttgtagcttttaatatgagtgcaaactga

SEQ ID NO: 60254 - protein, 1248 aa, Arabidopsis thaliana
MAEKAKKKKNGGGGNQRIAFYKLFTFADRYDIVLMVIGTLSAMANGLTQPFMSILMGQLINVFGFSDHDHVFKEVSKVAVKFLYLAAYAGVVSFLQVSCWMVTGERQSTRIRRLYLKTILRQDIGFFDTETNTGEVIGRMSGDTILIQDSMGEKVGKFTQLVSSFVGGFTVAFIVGMKLTLALLPCVPLIVGTGGAMTYIMSKKAQRVQLAYTEAGNVVQQAVGSIRTVVAFTGEKQSMGKYEKKLEIAYKSMVKQGLYSGLGIGIMMVVVYCTYGFAIWYGARQIIEKGYTGGQVMNVITSILTGGMALGQTLPSLNSFAAGTAAAYKMFETIKRKPKIDAYDMSGEVLEEIKGDIELRDVYFRYPARPDVQIFVGFSLTVPNGMTVALVGQSGSGKSTVISLIERFYDPESGEVLIDGIDLKKFQVKWIRSKIGLVSQEPILFATTIRENIVYGKKDASDQEIRTALKLANASNFIDKLPQGLETMVGEHGTQLSGGQKQRIAIARAILKNPKILLLDEATSALDAESERIVQDALVKLMLSRTTVVVAHRLTTIRTADMIAVVQQGKVIEKGTHDEMIKDPEGTYSQLVRLQEGSKKEEAIDKEPEKCEMSLEIESSDSQNGIHSGTLTSPSGLPGVISLDQTEEFHENISSTKTQTVKKGKEVSLRRLAHLNKPEISVLLLGSLAAVIHGIVFPVQGLLLSRTIRIFFEPSNKLKNDSLFWALIFVALGLTDLIVIPLQNYLFAIAGAKLIKRIRSLSFDRVLHQDISWFDDTKNSSGVIGARLSTDASTVKSIVGDVLGLIMQNMATIIGAFIIAFTANWLLALMALLVAPVMFFQGYYQIKFITGFGAKARGKYEEASQVASDAVSSIRTVASFCAEDKVMDLYQEKCDEPKQQGFKLGLVSGLCYGGSYLALYVIESVCFLGGSWLIQNRRATFGEFFQVFFALTLTAVGVTQTSTMAPDINKAKDSAASIFDILDSKPKIDSSSEKGTILPIVHGDIELQHVSFRYPMRPDIQIFSDLCLTISSGQTVALVGESGSGKSTVISLLERFYDPDSGKILLDQVEIQSLKLSWLREQMGLVSQEPVLFNETIGSNIAYGKIGGATEEEIITAAKAANVHNFISSLPQGYETSVGERGVQLSGGQKQRIAIARAILKDPKILLLDEATSALDAESERVVQDALDQVMVNRTTVVVAHLLTTIKDADMIAVVKNGVIAESGRHETLMEISGGAYASLVAFNMSAN

SEQ ID NO: 60255 - DNA, 1725 bp, Acinetobacter sp; identical to SEQ ID NO: 7635
  CDS (1)..(1725): transl_table=11

SEQ ID NO: 60256 - protein, 574 aa, Acinetobacter sp; identical to SEQ ID NO: 7636

SEQ ID NO: 60257 - DNA, 1770 bp, Alkalilimnicola ehrlichei; identical to SEQ ID NO: 7637
  CDS (1)..(1770): transl_table=11

SEQ ID NO: 60258 - protein, 589 aa, Alkalilimnicola ehrlichei; identical to SEQ ID NO: 7638

SEQ ID NO: 60259 - DNA, 1755 bp, Chromobacterium violaceum
  CDS (1)..(1755): transl_table=11
atgaaagattcgttcaagaatagttgggccatctaccggcggctgctgggctatctgctgggctactggaaagtgctgctgctgtcgatgctgtcgatggcggtggcggcgctgaccgagccggcggtcgccaagctgctcaagccgctgatagacggcggcttcgtcaacaaggatccgcaggtgatcatgtgggtgccgctggccatcatcggcatctacctgatacgcggcttggccggcttcatcaacgaatacaccgccagctggctgacggggcaactggtgcagcggctcaggcagcagatgttcgccaagctggtgaatctgccggcgcgctattacgacgagcaccagtccggccggctgatgtcgcgcatcaccaacgacgtcaaccaggtgaccgaggccggtttcaacgtgatcaccgtcacggtgcgcgacggcctgaccgcgctcggcatgctggggctgatgctgaccaccgactggcagctgacgctgatctgcctggtggtgatgccggcggtcacctattgcatgcggctggtcgggcagcgcctgcgcggcctggcgcgccagaaccagcagcacatggcgcagatgacccaggtgctggcggagagcatccagtgccagcgcgcgatcaaggtgtacggcggacaagagcgcgagatggcgcggttcgaccacacggcgacgtcggtgcgccgcaaccaggtcaagcagagcgccgcgagcgccgccaataccggcgtcacgcagctgatgatcgcgtgcgcgctggcggcgattttgtacttcgccggtctgcgcgcccagcatggcggactgaccgccggcgacttcatggtgttcctgaccgcgatgctgggcttgttcgccccggtgaagcggatttccagcgtatcgcaagcgatgcagcgcggcttggcggcggcggagtcggtattcgccttcatcgacgagccgggggagccggacgacggcgccagcgccttgccggccacacgcggccggctgagcttcgatgcggtcagctttgcctatcccaatgtcgatagcccggcgctgtcgggaatcgacctggaaatccagccgggcgaaactgtggcgctggtgggttcgtcaggcagcggcaagaccacgctggctagcctggtgccccgtttctacgagccttcggccgggcgcctgctgctggacggcgtgccattggccgatatcccgctgcggcaactgcgcggccatatcgcgctggtcagccagcaggtggagctgttcaacgacacggtggcggccaatatcgcctatggcagggaagacgcgtcgcgggaggaaatcgtcgaggcggcgagagcggccaatgcgatggagttcatcgaaggcctgcctgatgggctggaaaccgtgatcggcgagaacggcgcccggctgtcaggcgggcagcgccagcggctggcgatcgcgcgcgcgctgctgaagaatgcgccgctgctgatcctggacgaggcgacctcggcgctggatacccagtcggagcggctggtgcaggcggcgctggaaaacctgatgaagaaccgcaccaccatcgtcatcgcgcaccggctgtccaccatcgagaacgccgaccgcatcgtggtgatgcaccagggccgtctggccgaacaggggcgccaccaggcgctgctggagcaaggcggcttgtacgccaggctgcacagcctgcagttcagcgagccgcaggcggactga

SEQ ID NO: 60260 - protein, 584 aa, Chromobacterium violaceum
MKDSFKNSWAIYRRLLGYLLGYWKVLLLSMLSMAVAALTEPAVAKLLKPLIDGGFVNKDPQVIMWVPLAIIGIYLIRGLAGFINEYTASWLTGQLVQRLRQQMFAKLVNLPARYYDEHQSGRLMSRITNDVNQVTEAGFNVITVTVRDGLTALGMLGLMLTTDWQLTLICLVVMPAVTYCMRLVGQRLRGLARQNQQHMAQMTQVLAESIQCQRAIKVYGGQEREMARFDHTATSVRRNQVKQSAASAANTGVTQLMIACALAAILYFAGLRAQHGGLTAGDFMVFLTAMLGLFAPVKRISSVSQAMQRGLAAAESVFAFIDEPGEPDDGASALPATRGRLSFDAVSFAYPNVDSPALSGIDLEIQPGETVALVGSSGSGKTTLASLVPRFYEPSAGRLLLDGVPLADIPLRQLRGHIALVSQQVELFNDTVAANIAYGREDASREEIVEAARAANAMEFIEGLPDGLETVIGENGARLSGGQRQRLAIARALLKNAPLLILDEATSALDTQSERLVQAALENLMKNRTTIVIAHRLSTIENADRIVVMHQGRLAEQGRHQALLEQGGLYARLHSLQFSEPQAD

SEQ ID NO: 60261 - DNA, 1869 bp, Neisseria gonorrhoeae
  CDS (1)..(1869): transl_table=11
atgatagaaaaactgactttcggactgtttaaaaaagaagacgcgcgcagctttatgcgcctgatggcgtacgtccgcccctacaaaatccgcatcgttgccgccctgattgccattttcggcgttgccgccaccgaaagctatcttgccgccttcatcgcccccctgatcaaccacggcttttccgcgcccgccgcgccgcccgatctgtccgccgccgccggcatcctttccaccctgcaaaactggcgcgaacagtttacctatatggtttgggggacggaaaacaaaatctggaccgtcccgctctttctcatcatcctcgtcgtcatccgtggcatctgccgctttaccagcacctatctgatgacttgggtctccgtgatgaccatcagcaaaatccgcaaagatatgtttgccaaaatgctgaccctttcctcccgctaccatcaggaaacgccgtccggcaccgtactgatgaatatgctcaacctgaccgaacagtcggtcagcaacgccagcgacatcttcaccgtcctcacgcgcgacacgatgatcgttaccggcctgaccatcgtcctgctttacctcaactggcagctcagcctcatcgtcgtcctgatgttccccctgctctccctgctctcgcgctactaccgcgaccgtctgaaacacgtcatttccgactcgcaaaaaagcataggcacgatgaacaacgtgattgccgaaacccatcagggacaccgcgtcgtcaagctgttcaacgggcaggcgcaggcggcaaaccggttcgacgcggtcaaccgcaccatcgtccgcctcagcaaaaaaatcacgcaggcaacggcggcacattccccgttcagcgaactgattgcctcgatcgccctcgccgtcgtcatcttcatcgccctgtggcaaagccaaaacggctacaccaccatcggcgaatttatggcattcatcgtcgcgatgctgcaaatgtacgcccccatcaaaagccttgccaacatcagcatccctatgcagacgatgttcctcgccgccgacggcgtatgtgcatttctcgacaccccgcccgaacaggacaaaggcacgctcgcgccgcagcgtgtcgaagggcgcatcagcttccgcaacgtcgatgtcgaataccgttcagacggcatcaaagccctcgacaacttcaacctcgacatcagacaaggcgaacgcgtcgccctggtcggacgttccggcagcggcaaatccaccgtcgtcaaccttctgccccgctttgtcgaaccgtctgccggcaacatctgcatagacggtatcgacatcgccgacatcaaactcgactgcctgcgcgcccaattcgccctcgtctcccaagacgtattcctgtttgacgacaccctgtttgaaaacgtccgatacagccgtcccgacgcgggcgaagccgaagtcctgtccgccctccaagccgccaacctgcaaagcctgatcgacgcatccccgctcggactgcaccagcccatcggatcgaacggcagcaacttatccggcggacagcggcaacgcgtcgccatcgcccgcgccattttgaaagacgcgccgatattattattggacgaagccaccagcgcattggacaacgaatccgaacgcctcgtccaacaagcgctcgaacgcctgatggaaaaccgcaccggcatcatcgtcgcccaccgcctgaccaccgtcgaatccgccgaccgcatcatcgtcatggatggcggcaaaatcatcgaacaaggcacacacgatcaactcatgttccaaaacggctactacaccatgctgaggaacatctccggaaaagataccgccgccgttcagacggcataa

SEQ ID NO: 60262 - protein, 622 aa, Neisseria gonorrhoeae
MIEKLTFGLFKKEDARSFMRLMAYVRPYKIRIVAALIAIFGVAATESYLAAFIAPLINHGFSAPAAPPDLSAAAGILSTLQNWREQFTYMVWGTENKIWTVPLFLIILVVIRGICRFTSTYLMTWVSVMTISKIRKDMFAKMLTLSSRYHQETPSGTVLMNMLNLTEQSVSNASDIFTVLTRDTMIVTGLTIVLLYLNWQLSLIVVLMFPLLSLLSRYYRDRLKHVISDSQKSIGTMNNVIAETHQGHRVVKLFNGQAQAANRFDAVNRTIVRLSKKITQATAAHSPFSELIASIALAVVIFIALWQSQNGYTTIGEFMAFIVAMLQMYAPIKSLANISIPMQTMFLAADGVCAFLDTPPEQDKGTLAPQRVEGRISFRNVDVEYRSDGIKALDNFNLDIRQGERVALVGRSGSGKSTVVNLLPRFVEPSAGNICIDGIDIADIKLDCLRAQFALVSQDVFLFDDTLFENVRYSRPDAGEAEVLSALQAANLQSLIDASPLGLHQPIGSNGSNLSGGQRQRVAIARAILKDAPILLLDEATSALDNESERLVQQALERLMENRTGIIVAHRLTTVESADRIIVMDGGKIIEQGTHDQLMFQNGYYTMLRNISGKDTAAVQTA

SEQ ID NO: 60263 - DNA, 1866 bp, Neisseria meningitidis serogroup B
  CDS (1)..(1866): transl_table=11
atgatagaaaaactgactttcggactgtttaaaaaagaagacgcgcgcagctttatgcgcctgatggcgtacgtccgcccctacaaaatccgcatcgttgccgccctgattgccattttcggcgttgccgccaccgaaagctaccttgccgccttcatcgcccccctgattaaccacggcttttccgcacctgccgcgccgcccgagctgtctgccgccgccggcatcatttccaccctgcaaaactggcgcgaacagtttacctatatggtttgggggacggaaaacaaaatctggaccgtcccgctcttcctcatcatcctcgtcgtcatccgtggcatctgccgctttaccagcacctatctgatgacttgggtctccgtgatgaccatcagcaaaatccgcaaagatatgtttgccaaaatgctgaccctttcctcccgctaccatcaggaaacgccgtccggcaccgtactgatgaatatgctcaacctgaccgaacagtcggtcagcaacgccagcgacatcttcaccgtcctcacgcgcgacacgatgatcgttaccggcctgaccatcgtcctgctttacctcaactggcagctcagcctcatcgtcgtcctgatgttccccctgctctccctgctctcgcgctactaccgcgaccgtctgaaacacgtcatttccgactcgcaaaaaagcataggcacgatgaacaacgtgattgccgaaacccatcagggacaccgcgtcgtcaagctgttcaacgggcaggcgcaggcggcaaaccggttcgacgcggtcaaccgcaccatcgtccgcctcagcaaaaaaatcacgcaggcaacggcggcacattccccgttcagcgaactgatcgcctcgatcgccctcgccgtcgtcatcttcatcgccctgtggcaaagccaaaacggctacaccaccatcggcgaatttatggcattcatcgtcgcgatgctgcaaatgtacgcccccatcaaaagccttgccaacatcagcatccctatgcagacgatgttcctcgccgccgacggtgtatgtgcatttctcgacaccccgcccgaacaggacaagggcacgctcgcaccgcagcgtgtcgaagggcgcatcagcttccgcaacgtcgatgtcgaataccgttcagacggcatcaaagccctcgacaacttcaacctcgacatcagacaaggcgaacgcgtcgccctggtcggacgttccggcagcggcaaatccaccgtcgtcaacctgctgccccgctttgtcgaaccgtctgccggcaacatctgcatagacggtatcgacatcgccgacatcaaactcgactgcctgcgcgcccaattcgccctcgtctcccaagacgtattcctgtttgacgacaccctgtttgaaaacgtccgatacagccgtcccgacgcgggcgaagccgaagtcctgttcgccctccaaaccgccaacctgcaaagcctgattgacagctccccgctcggactgcaccagcccatcggatcgaacggcagcaacttatccggcggacagcggcaacgcgtcgccattgcccgcgccattttgaaagacgcgccgatattattattggacgaagccaccagcgcattagacaacgaatccgaacgcctcgtccaacaggcgctcgaacgcctgatggaaaaccgcaccggcatcatcgtcgcccaccgcctgaccaccatcgaaggggccgaccgcatcatcgtgatggacgacggcaaaatcatcgaacaaggcacacacgaacaactgatgtcccaaaacggttactacacgatgttacgcaatatctcaaacaaagatgccgccgtccggacggcataa

SEQ ID NO: 60264 - protein, 621 aa, Neisseria meningitidis serogroup B
MIEKLTFGLFKKEDARSFMRLMAYVRPYKIRIVAALIAIFGVAATESYLAAFIAPLINHGFSAPAAPPELSAAAGIISTLQNWREQFTYMVWGTENKIWTVPLFLIILVVIRGICRFTSTYLMTWVSVMTISKIRKDMFAKMLTLSSRYHQETPSGTVLMNMLNLTEQSVSNASDIFTVLTRDTMIVTGLTIVLLYLNWQLSLIVVLMFPLLSLLSRYYRDRLKHVISDSQKSIGTMNNVIAETHQGHRVVKLFNGQAQAANRFDAVNRTIVRLSKKITQATAAHSPFSELIASIALAVVIFIALWQSQNGYTTIGEFMAFIVAMLQMYAPIKSLANISIPMQTMFLAADGVCAFLDTPPEQDKGTLAPQRVEGRISFRNVDVEYRSDGIKALDNFNLDIRQGERVALVGRSGSGKSTVVNLLPRFVEPSAGNICIDGIDIADIKLDCLRAQFALVSQDVFLFDDTLFENVRYSRPDAGEAEVLFALQTANLQSLIDSSPLGLHQPIGSNGSNLSGGQRQRVAIARAILKDAPILLLDEATSALDNESERLVQQALERLMENRTGIIVAHRLTTIEGADRIIVMDDGKIIEQGTHEQLMSQNGYYTMLRNISNKDAAVRTA

SEQ ID NO: 60265 - DNA, 1806 bp, Syntrophus aciditrophicus; identical to SEQ ID NO: 7651
  CDS (1)..(1806): transl_table=11

SEQ ID NO: 60266 - protein, 601 aa, Syntrophus aciditrophicus; identical to SEQ ID NO: 7652

SEQ ID NO: 60267 - DNA, 4089 bp, Schizosaccharomyces pombe
  CDS (1)..(4089)
atgtctttgcatagtaaaaaatccacttctacggttaaggataacgaacattctttggacctttctatcaaaagcataccttcaaatgaaaaaaacttttcaacagagaaaagcgagaatgaggcttctgaaagccacgtggtagatgttgtcaaagatccttttgaacagtatactcctgaagaacaagaaatcctttacaaacaaattaatgacacacctgccaaactttctggataccctagaatcctttcatacgccgataaatgggatattatgctgcaattggcaggcaccattactggtattggtgccggcctgggtatgccattgatgtcccttgtatccggtcagctggctcaagcttttaccgaccttgcctctggcaaaggagcgtcatctttccaacacactgtagatcacttttgtctttattttatttacatcgcaattggtgtctttggctgttcatatatttacactgtaacctttattattgcaggagagcggattgcccgtcgtattcgacaagattatttgcatgccattctttcccaaaatatcggttatttcgatcgtctaggtgccggtgaaattaccactcgaattactactgatacaaactttattcaagatggtttaggtgagaaggtcggattggtgttctttgcaatagcaacctttgtatctggttttgttatcgcttttattcgtcattggaagttcacattgatattgagttcaatgtttccagccatttgtggtggtatcggcttgggtgttccctttattaccaaaaacaccaaaggtcaaatcgccgtcgttgccgaatccagtacatttgtggaagaagtgttttccaatatcagaaatgcttttgcttttggtacccaagatattcttgcaaaattgtacaataagtacttaataactgcacaacgcttcggtatcaataaggcaattgcaatgggtttaatggttggatggatgttctttgttgcgtatggtgtttacggtcttgcattttgggaaggtggacgcctcctacatgcaggtgatttagatgttagcaaattaattggctgctttttcgccgtccttattgcttcctatagtttggccaacatttctcctaagatgcagtcatttgttagttgtgcctcagccgctaaaaagattttcgacacaattgatcgtgttagtccaattaatgcttttacacctactggtgatgtagtcaaagatattaaaggggagatcgaattgaaaaatattcgatttgtttatcctactcgtcctgaagttttagtgctggataacttttctttggtatgcccttctggtaaaattactgctttagtaggtgccagtggtagcggcaaatccacgatcattggacttgttgagcgattttacgaccccattggtgggcaggttttcttagatggtaaagaccttagaacgctgaacgttgcttcgctgagaaatcaaatatctttggtacaacaagaaccggttctgtttgctacaactgtgtttgaaaatataacttatggcctgcctgatacaattaaaggtaccttgtctaaggaagaattggaaagaagagtttatgatgccgctaagcttgccaacgcttacgactttattatgacattacccgagcaattttcaactaatgttggacaacgcggtttccttatgtcaggaggacaaaaacaaagaattgcaatcgctagggccgttattagtgatcccaagatcttattgttggacgaagccacaagtgctttagactctaagagtgaagtgcttgttcagaaagctctagataatgcatcgagatctcgtaccactatcgttattgctcatcgtctttctacaattcgtaacgctgataatattgtcgtagtgaatgcaggaaaaattgttgaacagggctcccacaatgaattgttagatctgaatggtgcttatgctagactagtagaagctcaaaagctatcaggtggagaaaaagaccaggaaatggtcgaggaagaactggaggatgctccgagggaaatacccataacgtcttttggtgacgatgatgaagataatgatatggctagcctcgaggcccctatgatgtcccataatacggatactgatacgttgaataataaactcaacgagaaagataatgtcgtgtttgaagacaaaacccttcagcatgtagcttccgaaattgttccaaacctacctcctgcagatgtcggtgaacttaatgaggagcctaaaaagtccaaaaagtcaaagaaaaacaaccatgagattaattcgttaacagcgttatggttcattcattcttttgtacggacaatgatagagattatttgtctattaattggtattttggcttctatgatttgtggtgcagcttaccctgttcaggcagctgtttttgcaagatttctcaatatcttcactgatctctcatccacagactttttacacaaagtaaacgtgtttgctgtttattggcttattctagctattgttcaattcttcgcttatgcaatttccaattttgcaatgacttatgcaatggaagcagttttgcaaagaattcgttatcatctatttcgaacattgcttcgtcaagatgttgagtttttcgaccgtagtgagaacacagttggtgctattactacttctttatcaacgaaaattcagtctttggagggattgagcggcccgactttaggaacctttttccaaattttgaccaatatcatttcagttacgattttatctttggctacaggatggaagttgggtttggtgaccctttcgacctcccctgttatcattactgctggttattaccgtgtacgtgctcttgatcaagtccaagagaagttgtctgctgcctacaaagagtcagctgcgttcgcatgcgagtcaacttcagccattcgtacagtcgctagtcttaatcgcgaagaaaacgtttttgctgagtattgtgattctctcatcaaacctggccgtgagtcggcaatcgcatcattgaaatctggtttattcttttctgctgctcaaggtgttacctttttgattaacgcattgacattttggtatggttctaccttaatgcgcaagggcgaatataacatcgttcagttttatacttgttttattgcaattgtctttggtatacaacaagctggtcaattctttggttactcagcagatgtaacaaaagcaaaggctgctgccggtgaaattaagtatttgtccgaatcaaaacctaaaattgatacatggtcgacggaaggaaagaaagttgaatcccttcaaagtgcagcaattgaattcaggcaagttgaatttagttaccctaccagaaggcatattaaagttcttcgtggtttgaacctcactgtgaagcccgggcagtttgtcgcattcgtaggatcttctggctgtggtaaatctacgaccattgggcttatcgagcgtttctacgattgcgacaatggagctgtattggtggacggtgttaatgttcgtgactataacattaacgactaccgcaaacaaattgcccttgtctctcaagagccaacgttgtaccaaggtactgttcgtgagaacattgttttgggcgcatctaaagatgtctctgaagaagagatgattgaagcttgcaagaaggccaatattcatgagtttattcttggattgcccaacggttataacacactttgcggtcaaaagggctcttccttatctggtggtcaaaaacagcgtattgccattgctagagcattaattagaaatccaaagattctccttttagatgaagcaaccagtgctttagacagtcatagcgaaaaggtcgttcaagaagctttaaatgccgcctctcaaggtagaaccacggtagcaattgctcatcgtttgtcttctatccaagatgcagactgtattttcgtatttgatggtggtgttatcgctgaagctggtactcatgccgagcttgttaaacagcgcggtcgttactatgaacttgtggttgaacagggattgaacaaagcataa

SEQ ID NO: 60268 - protein, 1362 aa, Schizosaccharomyces pombe
MSLHSKKSTSTVKDNEHSLDLSIKSIPSNEKNFSTEKSENEASESHVVDVVKDPFEQYTPEEQEILYKQINDTPAKLSGYPRILSYADKWDIMLQLAGTITGIGAGLGMPLMSLVSGQLAQAFTDLASGKGASSFQHTVDHFCLYFIYIAIGVFGCSYIYTVTFIIAGERIARRIRQDYLHAILSQNIGYFDRLGAGEITTRITTDTNFIQDGLGEKVGLVFFAIATFVSGFVIAFIRHWKFTLILSSMFPAICGGIGLGVPFITKNTKGQIAVVAESSTFVEEVFSNIRNAFAFGTQDILAKLYNKYLITAQRFGINKAIAMGLMVGWMFFVAYGVYGLAFWEGGRLLHAGDLDVSKLIGCFFAVLIASYSLANISPKMQSFVSCASAAKKIFDTIDRVSPINAFTPTGDVVKDIKGEIELKNIRFVYPTRPEVLVLDNFSLVCPSGKITALVGASGSGKSTIIGLVERFYDPIGGQVFLDGKDLRTLNVASLRNQISLVQQEPVLFATTVFENITYGLPDTIKGTLSKEELERRVYDAAKLANAYDFIMTLPEQFSTNVGQRGFLMSGGQKQRIAIARAVISDPKILLLDEATSALDSKSEVLVQKALDNASRSRTTIVIAHRLSTIRNADNIVVVNAGKIVEQGSHNELLDLNGAYARLVEAQKLSGGEKDQEMVEEELEDAPREIPITSFGDDDEDNDMASLEAPMMSHNTDTDTLNNKLNEKDNVVFEDKTLQHVASEIVPNLPPADVGELNEEPKKSKKSKKNNHEINSLTALWFIHSFVRTMIEIICLLIGILASMICGAAYPVQAAVFARFLNIFTDLSSTDFLHKVNVFAVYWLILAIVQFFAYAISNFAMTYAMEAVLQRIRYHLFRTLLRQDVEFFDRSENTVGAITTSLSTKIQSLEGLSGPTLGTFFQILTNIISVTILSLATGWKLGLVTLSTSPVIITAGYYRVRALDQVQEKLSAAYKESAAFACESTSAIRTVASLNREENVFAEYCDSLIKPGRESAIASLKSGLFFSAAQGVTFLINALTFWYGSTLMRKGEYNIVQFYTCFIAIVFGIQQAGQFFGYSADVTKAKAAAGEIKYLSESKPKIDTWSTEGKKVESLQSAAIEFRQVEFSYPTRRHIKVLRGLNLTVKPGQFVAFVGSSGCGKSTTIGLIERFYDCDNGAVLVDGVNVRDYNINDYRKQIALVSQEPTLYQGTVRENIVLGASKDVSEEEMIEACKKANIHEFILGLPNGYNTLCGQKGSSLSGGQKQRIAIARALIRNPKILLLDEATSALDSHSEKVVQEALNAASQGRTTVAIAHRLSSIQDADCIFVFDGGVIAEAGTHAELVKQRGRYYELVVEQGLNKA

SEQ ID NO: 60269 - DNA, 2181 bp, Schizosaccharomyces pombe
  CDS (1)..(2181)
atggatccaatacgttttggactttcgagagtaccattcgctcactgctacaataaacgcgtaatatttcgagcaaactatttagtaccgttgacttggttgaaaaacaacgtggcttacaaaagtacgaatactctattacttcccacgccaaatgcagaatattatagtaccagtaagttatcttcacaggttaatgtgagcctaaactcgttatctcaaaaggcctcaagtggttctaagatatatccttttaaaaatagttttccgttacctttttctagatctattcttcctatacgatcacttgcttttttaaagttgtgtgtgcgacataattctacagttccatcaaaagatgagcaagcacaggatatctcaaaaataaatacaaatggtacattacaaacaccaaacaagaaagtcaatgtttttcgtctcttcacactagcaaggggtcagggatggaatttttttattgctggatctcttctcttagtttcctccggcgttacaatgtccattccctacattgttggcaaaatcttagacgctggctcgtcaggcgattcttctgtcacgcatatcatgggaattccttctggtacgttttatattggtttgttgggtttatttttccttggttcagcttgtaactttggtagaatcatcaccttgcgtctactgagtgaaagaattgtcagtcgtcttcgagcacgcttgtttgctaaatgcatgtcattagatggagcattttttgactttcataaacatggggatctcatatcccgtcttacgacggattcgagtattgtcggtaagtctttatcaatgtacttaagtgatggtcttcgtagctcagttagtgcaattgctggaatagggatgatgctctacgtatccatgagactcactggatatatgtccctaattgtacccccaattgcattgggagctttcttttatggagagtatgttcggaaactttccaggactacacaagatgctctcggtgatttaacaagggtttcagaagagaaactcgcaaatgttcggactacacaggcttttctaggagaaagacaagaagtaaatcgttacaacgattacattcgaaatctctttgtcctggcaaagcgagaggcttttgctagcggtattttcttcgggtcaacagggttccttgggaacgcaactgtaatcgctattcttgcgttaggcggaagaatggttgctgcaggtgatataactgtaggacagctaagttcatttttgctgtataccgtttatgccggtggaagcattgttggcttatcaggatgttttactgatattatgaaaggtctgggagctgctagtcggttatttgaacttttagatgctaaaccgaagatagctccaaccgttgggattcccgttccagtcacagtcggaaaggcaatactttcgttcagaaatgttgggtttgcatacccaactcgtccttcagcttcaatatttgataacttatctttcgacattcatccaggcaccaatgttgctatagtcgcacctagtggcggtggaaaatccaccatctcacagctccttttgcgcttttacgcacctagtagtgggaaaatattagctgacggagttgacatctctacatataatgttcatcaatggcgcagtcattttggtttagttggacaagaaccggttttattttctggtacaattggcgaaaatattgcttacggtaaatctaacgcatctcaagaggaaatcgaagatgctgccaaacgagcgaattgtagttttgtgctttctttcccggagaaatggtctacgcaagtcgggactcgtggtttacaactaagcgggggacaaaaacaacgcattgcaattgctagggcacttcttcgaaatccagcatttttaattttggatgaagctacttcagcattagacggtgaagcagaagtaatggtggataaaacgattcaatctttgatgcataatcgtagtatgactaccattacgattgctcacaaattggctactattcgccgagctgatcaaataattgttgttggagacgggaaagttttggagcaagggtcttttgaacgattgtctcgtcctggtaccaacttttacaagttaatgagatggcagcttggaaaagttgaaccttga

SEQ ID NO: 60270 - protein, 726 aa, Schizosaccharomyces pombe
MDPIRFGLSRVPFAHCYNKRVIFRANYLVPLTWLKNNVAYKSTNTLLLPTPNAEYYSTSKLSSQVNVSLNSLSQKASSGSKIYPFKNSFPLPFSRSILPIRSLAFLKLCVRHNSTVPSKDEQAQDISKINTNGTLQTPNKKVNVFRLFTLARGQGWNFFIAGSLLLVSSGVTMSIPYIVGKILDAGSSGDSSVTHIMGIPSGTFYIGLLGLFFLGSACNFGRIITLRLLSERIVSRLRARLFAKCMSLDGAFFDFHKHGDLISRLTTDSSIVGKSLSMYLSDGLRSSVSAIAGIGMMLYVSMRLTGYMSLIVPPIALGAFFYGEYVRKLSRTTQDALGDLTRVSEEKLANVRTTQAFLGERQEVNRYNDYIRNLFVLAKREAFASGIFFGSTGFLGNATVIAILALGGRMVAAGDITVGQLSSFLLYTVYAGGSIVGLSGCFTDIMKGLGAASRLFELLDAKPKIAPTVGIPVPVTVGKAILSFRNVGFAYPTRPSASIFDNLSFDIHPGTNVAIVAPSGGGKSTISQLLLRFYAPSSGKILADGVDISTYNVHQWRSHFGLVGQEPVLFSGTIGENIAYGKSNASQEEIEDAAKRANCSFVLSFPEKWSTQVGTRGLQLSGGQKQRIAIARALLRNPAFLILDEATSALDGEAEVMVDKTIQSLMHNRSMTTITIAHKLATIRRADQIIVVGDGKVLEQGSFERLSRPGTNFYKLMRWQLGKVEP

SEQ ID NO: 60271 - DNA, 3858 bp, Oryza sativa
  CDS (1)..(3858)
atgccggagtcttggagagacgcggaggcgaacgcgtcgtcgtcggcctccgtcgccgcggcggactcgagcccggggaatggcaagggcggtggcggcggcggcggcgccgcggtggcgaggggagagcgggcggcgtcggcgtcggcgtcggcgcgggtgccgttccacaagctgttcgcgttcgcggacaagacggacgcggcgctgatggcgctggggacgctgggcgcggtggcgaacggcgccgcgctgccgttcatgacggtgctcttcggcaacctcatcgacgccttcggcggcgcgatgggcatccacgacgtcgtcaaccgggtgtccatggtctccctcgagttcatctacctcgccatcgcctccgccgtcgcctccttcgtccaggtgacatgctggatgatcaccggagagcggcaggcggcgaggatacggaacctgtacctcaagaccatcctgaggcaggagatcgccttcttcgacaagtacaccaacaccggcgaggtcgtcggcaggatgtccggcgacaccgtgctcatccaggacgccatgggcgagaaggttggcaagttcattcagctggtggtgacgttcttgggcggattcatcgtcgccttcgcgcaggggtggctcctcaccctggtcatgatggcgaccatcccgccgctcgtcgtcgcgggggccgtcatgtccaacgtcgtcgcaaagatggcgtccctcggccaggcggcgtacgccgagtcgtcggtggtggtggagcagaccatcggatccatcagaacagttgcatctttcaccggggagaagcaggcagtggagaagtacaacaagtccctgaaaagcgcctacaaatcaggcgttcgggagggcctcgcagccgggcttggcatgggcacggtcatggtgctcctcttctgcggctactcgctggggatatggtatggtgccaagctcatcttgctcaagggatataccggcgccaaggtcatgaatgtcatctttgcagtgctaacaggatctctagcactagggcaggcatcaccaagcatgaaagcttttgcaggtgggcaggctgctgcatacaaaatgttcgagacaataaacagaaaaccagagatcgatgcatacagcaccacaggaatgaagcccgatgacattcgaggggatattgagtttagggacgtatatttctcctatccaactaggcctgatgagcaaatattcagaggtttctccctttccatacccagtggcacaacagttgcattggtcggtcagagtgggagtggtaaatcaacggttatcagcctaatcgaaaggttttacgaccctcagcttggtgatgttctcatagatggtgtgaatctcaaggaattccagcttaggtggatcagaagtaaaattggccttgtcagccaagaaccagtcctatttgctgctagcataaaggaaaacatagcttatggcaaagacaatgcaacggatcaagaaattagagctgcagctgagcttgcgaatgcctctaaattcatagataaaatgcctcagggccttgatacttcagttggtgaacatgggactcagctttctggtgggcagaagcaaagaattgccatagcaagagcaattctaaaagatccaaggatcctactgctagatgaagctacaagcgctctggatgctgagtctgagaggattgtgcaggaggctcttgacagggtcatgactaacagaacaactgtcatagttgcacaccgcttgagtacagttagaaatgctgacaccatcgctgtcattcatcaaggaacattagtggaaaaaggtccacaccatgagcttctgaaggatcctgaaggagcttacagccaactgataaagctgcaggaagcaaaccggcaggacaagtctgaccgaaagggtgactctggagctcgttcaggcaaacaattgtcaataaatcagtctgctagccgcagccggaggtcatcccgtgataacagccaccattcattctctgtaccatttggtatgcccctagggattgacatccaggatggttcctctgataatctatgtgatgggatgccacaggatgtgcctctaagtcgtcttgcgtctctgaacaagccagaaattccagtgctcatactaggttccattgcatctgtcatcagcggagtaatcttcccaatctttgctatactgctgtcaaatgtgatcaaagcattctatgaacccccacatctgctgaggaaagattcgcagttctggtcatccatgttcttggtgtttggcgcagtatactttttgtcacttccagttagttcgtaccttttctctatagctgggtgcaggttgatcaaaaggataagattgatgacatttgagaaggtggtaaatatggagatcgaatggtttgatcacccagaaaactcaagtggagcaattggtgcaaggctatcagctgatgcagctaaagttagggggcttgtgggtgatgcacttcaattagttgtacaaaacacaacaaccttgattgctggtttagtcattgcctttgtatcaaactgggagttatcactcatcatcttagctttaataccactcattggtctaaatggatggatccagatgaaattcattcagggtttcagtgcagatgcaaagatgatgtatgaggaggcaagtcaagtggcaaatgatgcagtaagcagtataagaaccgtagtctccttctcagcagaagaaaaggttatggatttgtacaagaagaaatgtgaaggccccctaaggacagggattagaacagggattataagtggaattggctttggtgtttcatttttcttgctatttggtgtatatgcagctagcttttatgctggtgctcggcttgttgaggaaaacaagacaacttttcctaaagttttcagggtttttcttgctcttgctatggcagcgattggggtgtcgcaatcaagtacccttacatcagattcttccaaagcaaaatcagctgtgtcttcgatatttgcaattgtggatcgtaaatctaggatagacccaagtgaggatgcaggggtaactgtcgaaacactgcacggcaatattgagttccagcatgttagcttcagatatccaaccaggccagatgttgagatattccgagacttgtgcttgacaattcattctgggaagaccgttgcacttgttggggagagtggtagtggcaaatcaacagcaatttcattgcttcagaggttttatgatcctgacgtaggacatatactgctagatggtgtggacattcagaagtttcagctaaagtggctgaggcaacaaatgggtctggtgagtcaagaacctgccctcttcaacgacacagtacgagcaaatattgcttatgggaaggagggagaagcaacagaatcagaaatcattgaagcagccaaattggcaaatgcccacaagttcattagttcctcgcatcagggttatggcacaacagttggagagcggggagctcagttgtctggaggccaaaagcagcgtatcgcgatcgctcgtgcgattgtgaaggatcccaagatccttctgctggatgaagcaaccagtgcgctggatgctgaatccgaaagggtggttcaagacgcgctggacagagtgatggtcaaccggacaaccgtgatcgttgctcaccgtttgtctacaatacaaaatgcggatttgatcgcagtcgtcaagaatggagtgatcatcgagaagggaaagcacgataccttgatgaacatcaaggatggcgcctacgcctccctcgtcgcccttcattcagcagcttcttcatag

SEQ ID NO: 60272 - protein, 1285 aa, Oryza sativa
MPESWRDAEANASSSASVAAADSSPGNGKGGGGGGGAAVARGERAASASASARVPFHKLFAFADKTDAALMALGTLGAVANGAALPFMTVLFGNLIDAFGGAMGIHDVVNRVSMVSLEFIYLAIASAVASFVQVTCWMITGERQAARIRNLYLKTILRQEIAFFDKYTNTGEVVGRMSGDTVLIQDAMGEKVGKFIQLVVTFLGGFIVAFAQGWLLTLVMMATIPPLVVAGAVMSNVVAKMASLGQAAYAESSVVVEQTIGSIRTVASFTGEKQAVEKYNKSLKSAYKSGVREGLAAGLGMGTVMVLLFCGYSLGIWYGAKLILLKGYTGAKVMNVIFAVLTGSLALGQASPSMKAFAGGQAAAYKMFETINRKPEIDAYSTTGMKPDDIRGDIEFRDVYFSYPTRPDEQIFRGFSLSIPSGTTVALVGQSGSGKSTVISLIERFYDPQLGDVLIDGVNLKEFQLRWIRSKIGLVSQEPVLFAASIKENIAYGKDNATDQEIRAAAELANASKFIDKMPQGLDTSVGEHGTQLSGGQKQRIAIARAILKDPRILLLDEATSALDAESERIVQEALDRVMTNRTTVIVAHRLSTVRNADTIAVIHQGTLVEKGPHHELLKDPEGAYSQLIKLQEANRQDKSDRKGDSGARSGKQLSINQSASRSRRSSRDNSHHSFSVPFGMPLGIDIQDGSSDNLCDGMPQDVPLSRLASLNKPEIPVLILGSIASVISGVIFPIFAILLSNVIKAFYEPPHLLRKDSQFWSSMFLVFGAVYFLSLPVSSYLFSIAGCRLIKRIRLMTFEKVVNMEIEWFDHPENSSGAIGARLSADAAKVRGLVGDALQLVVQNTTTLIAGLVIAFVSNWELSLIILALIPLIGLNGWIQMKFIQGFSADAKMMYEEASQVANDAVSSIRTVVSFSAEEKVMDLYKKKCEGPLRTGIRTGIISGIGFGVSFFLLFGVYAASFYAGARLVEENKTTFPKVFRVFLALAMAAIGVSQSSTLTSDSSKAKSAVSSIFAIVDRKSRIDPSEDAGVTVETLHGNIEFQHVSFRYPTRPDVEIFRDLCLTIHSGKTVALVGESGSGKSTAISLLQRFYDPDVGHILLDGVDIQKFQLKWLRQQMGLVSQEPALFNDTVRANIAYGKEGEATESEIIEAAKLANAHKFISSSHQGYGTTVGERGAQLSGGQKQRIAIARAIVKDPKILLLDEATSALDAESERVVQDALDRVMVNRTTVIVAHRLSTIQNADLIAVVKNGVIIEKGKHDTLMNIKDGAYASLVALHSAASS

SEQ ID NO: 60273 - DNA, 1494 bp, Oryza sativa
  CDS (1)..(1494)
atgatattggtcaaacgaatgagagaaatgctgtttgattctattctttctcaggacattgctttttttgatgaagaaactgttggtgatttgacaagtaggcttggttctgactgccagcaagtgtcacgagtcattggcaatgatcttaatcttatctcacgcaatttgcttcagggtgtaggcgcactaatttatctgctagtcttatcttggccacttggaatgtgcactatgttgatttgtgcgacattgtcgaccattatgctagttcatggacggtatcagaaaagagcagccaaatttgcacaggagttcactgcaagtgccaacaatgttgctcaagaggtgataagtttggttcggacagtacgggtttatggaacagaaaagcaggagtttaaaagatatgcaaagtggctagataagctatatgatgtaagctttcggcaaacaatggcttatggaggctggagcttgagtttgaactatctataccattctactcaggtcattgcagtgttgattggagggatatccatcatggctgggaagctaactgctgagcaactgacaaaattcatactctatgctgagtggctaattttgtcaacatggtggattggagacaactggtcctctctgatgcagtctgttggagcaagtgaaaaggtcttccgtttgatggatctacttcctagcagacagcttagttctgaaggccacaggttacagaagttggaaggccggattcagtatgccgatgtatcattttcatatccatcaagacctacggtaccaattctgggtggattgaatctaacacttcatccaaatgaagtagttgcaattgttggtcttagtggaagtggaaagagtactgtagttaacctactacttcggctatatgaacctacagatgggcaaatattagtagatggtgtcccactcagtgagcttgacatcagatggttcagggaaaggattggttttgttggacaggaacctaggctattccgaatggatattagttctaatattaggtatggttgtccaagagaagttagcaatgaagaagtggagtgggctgcaaagcaggcatatgctcacgatttcataatgtctctccctgatggttataacaccattgtcgatgatgctcttcttagtggaggccaaaagcaacgcgttgctattgcgagggcccttcttagggacccatccatcttggtattagatgaagccactagtgcacttgatgctgagagtgaacattatgtgaagaatgtaatcacaaagtttagtactgatcctaaggctagaagaaccgtgatcatcatagctcacagactatctacaattcaagcggctgatagaattatcgtgatggaaaatggtaatattgtggaggatggaaaccacagcgagcttattaataagcacgatggtttgtattccagattagctaggcgacaaaacgacgccctcgattag

SEQ ID NO: 60274 - protein, 497 aa, Oryza sativa
MILVKRMREMLFDSILSQDIAFFDEETVGDLTSRLGSDCQQVSRVIGNDLNLISRNLLQGVGALIYLLVLSWPLGMCTMLICATLSTIMLVHGRYQKRAAKFAQEFTASANNVAQEVISLVRTVRVYGTEKQEFKRYAKWLDKLYDVSFRQTMAYGGWSLSLNYLYHSTQVIAVLIGGISIMAGKLTAEQLTKFILYAEWLILSTWWIGDNWSSLMQSVGASEKVFRLMDLLPSRQLSSEGHRLQKLEGRIQYADVSFSYPSRPTVPILGGLNLTLHPNEVVAIVGLSGSGKSTVVNLLLRLYEPTDGQILVDGVPLSELDIRWFRERIGFVGQEPRLFRMDISSNIRYGCPREVSNEEVEWAAKQAYAHDFIMSLPDGYNTIVDDALLSGGQKQRVAIARALLRDPSILVLDEATSALDAESEHYVKNVITKFSTDPKARRTVIIIAHRLSTIQAADRIIVMENGNIVEDGNHSELINKHDGLYSRLARRQNDALD

SEQ ID NO: 60275 - DNA, 3795 bp, Oryza sativa
  CDS (1)..(3795)
atgagctcgccggtgcatggcgtgcaggagcatcggcagagcggcggcggcgagaagaaggcggagcagggagagaaggaggcggcggcgaaggtggagaaggtgccgttcctgaagctgttctcgttcgccgaccggtgggactacgtgctgatggcggtggggtcgctgggcgcgtgcgcgcacggcgcctccgtccccgtcttcttcatcttcttcggcaagctcatcaacatcatcggcctcgcctacctcttccccaccaccgtctccggccgcgtcgccaagtactcgctggacttcgtgtacctcggcatcgtcatactcttctcgtcgtggaccgaggtggcgtgctggatgcacacgggggagcggcaggcggcgaagatgcgccaggcgtacctccggtcgatgctggaccaggacattgccgtcttcgacaccgaggcctccaccggcgaggtcatcaacgccatcaccagcgacatcctcgtcgtccaggacgccatctccgagaaggtgggcaatttcatgcactacatcagccggttcctggccggcttcgccatcggcttctcgcaggtgtggcagatcagcctcgtcaccctcgccatcgtcccgctcatcgccatcgccggcggcatctacgcctacgtcaccatcggcctcatggcgcgcgtccgcaagtcctacgtcaaggccggcgagatcgccgaggaggtgatcggcaacgtgcggacggtgcaggcgttcgtcggcgaggagaaggcagtgaggacgtaccgggaggcgctgctgaggacgtacaagtacggcaagaggggcggcctcgccaagggtctcggcctcggctccatgcactcggtgctcttcctctcctgggcgctgctcatctggttcaccagcgtcgtcgtccacaagaacatctccaacggcggcgagtccttcaccaccatgctcaacgtcgtcatcgccggcctgtcgctcgggcaggcggcgcccaacatatcgacgttcctccgggcgaggacagcggcgtacccgatcttccagatgatcgagaggaacaccgtcaacaaggcgagctccaaggccggccgcacgctgccgtcggtcgacggccacatccagttccgcgacgtgcggttcgcgtacccgtcacggccggacgtcgtcatcctcgacaggttcagcctggacttcccggcgggcaagatcgtcgcgctcgtcggcgggagtggctccggcaagagcaccgtggtctcgctcatcgagcggttctacgagcctctcacgggcgcggtactgctcgacggccacgacatcaaggacctcgacgtgaagtggctgcgccagcagattggcctcgtcaaccaggaacccgcgctgttcgccacgagcatccgggagaacatactctacggcaagggggacgccagcatggatgagatcaaccacgcggcgaagctgtcggaggcgatcaccttcatcaaccacctccccgaccggtacgagacgcaggtcggcgagcgcgggatacagctctccggcggacagaagcagcggatcgcgatctcgagggcgatactgaagaacccgtcgatactgctcctcgacgaggcgacgagcgcgctcgacgccgagtccgagaagagcgtgcaggaggcgctggaccgcgtcatggtcggccgcaccaccgtggtgatcgcgcaccggctgtccaccatccggaacgccgacacgatcgccgtcgtggacagcggcaggatcgtcgagaccggcacgcacgagcagctgatggcgaaccctcgcagcgcctacgcctcgctgatccagctgcaggaagcagctcagctccagaacaagcaatctttctccgacagcgccagcctcagccgaccactaagctccaagtattcgagggagctatcgaggacgagcatgggtgggagcttccgctcagagaaggactcggttagccggtacggcaccgtggaggcgcacgacgaaggagggcacaagagcaagccggtgtcgatgaagaagctctactccatgatacggccggactggttcttcggcgtgtcgggcaccgtcagcgccttcgtcgccggctcgcagatgccgctgttcgcgctcggcgtcacacaggcgctcgtgtcctactacatggggtgggagaccacgaagcgggaggtgcgcaagatcgcggtgctcttctgctgcggggccgtgctcaccgtggtgttccacgcgatcgagcacctcagcttcggcatcatgggggagcggctcacgctgcgcgtccgggagaggatgttcgcggccatcctccggaacgagatcgggtggttcgacgacaccagccacacgagctcgatgctgtcgtcgcggctcgagacggacgccacgctcgtgcgcaccatcgtcgtcgaccgctccaccatcctgctgcagaacatcggcatgatcgtgacgtcgctcatcatcgccttcatcatcaactggcggatcactctcgtcgttctcgccacataccccctcatggtcagcggccacatcagcgagaaaatgttcatgaaaggctacgggggcaaccttggcaagtcgtatctgaaagccaacatgctggccgcggaggcagtgagcaacatccgaacggtggcggccttctgcgctgaggagaaggtgataaagctctacgccgacgagctgaaggagccagcgaagcagtcattccggcgaggccagggcgccgggctcttctacggagtttcccagttcttcctcttctcttcctacgcgttggctttatggtatggttcggagctgatgagcaaggagatggccagcttcaagtcggtgatgaagtcattcatggtgctgatcgtgacggcgctggccatgggggagacgctggcgatggcgccggacatcatcaaggggaaccagatggtgtcgtcggtgttcgagatcctggacaggaagaccgacgtcctgatcgacgccggcaacgacgtcaagagagtcgagggcgtgatcgagctgaggggcgtcgagttccggtacccggcgcggcccgaggtggtggtgttcaagggcctcgacctcctcatgaaggccggcaagagcatggcgctcgtcggcatgagcggctccggcaagagcaccgtgctctcgctcatcctccgcttctacgaccccatcgccgggaaagtcttgatcgacgggaaggacatcaggaaggtgaagctcaagtcgctgaggaagcacatcggcctggtgcagcaagagccggcgctgttcgcgacgaccatctacgacaacatcctctacgggaaagacggcgcgacggaggcggaggtggtcgacgcggcgaagctggcgaacgcgcactccttcatcagcgcgctgccggagggctaccggacgagagtcggggagcgcggcgtgcagctctccggcgggcagcggcagcggatcgccatcgcgcgcgccatcgtgaaggacccggccatcctgctcctggacgaggcgacgagcgcgctggacgtggagtcggagcgcgtcgtgcagcaggcgctggaccgggtgatgaggaaccggaccaccgtgatggtggcgcaccggctgtcgacgatcaagaacgccgacgtcatctcggtgctgcaggacggcaagatcatcgagcagggtgctcaccaccagctcatcgagaacaggaacggcgcctaccacaagctcgtcagcttgcagcagcagcaacagcagcaggaccagatgcagaggcattga

SEQ ID NO: 60276 - protein, 1264 aa, Oryza sativa
MSSPVHGVQEHRQSGGGEKKAEQGEKEAAAKVEKVPFLKLFSFADRWDYVLMAVGSLGACAHGASVPVFFIFFGKLINIIGLAYLFPTTVSGRVAKYSLDFVYLGIVILFSSWTEVACWMHTGERQAAKMRQAYLRSMLDQDIAVFDTEASTGEVINAITSDILVVQDAISEKVGNFMHYISRFLAGFAIGFSQVWQISLVTLAIVPLIAIAGGIYAYVTIGLMARVRKSYVKAGEIAEEVIGNVRTVQAFVGEEKAVRTYREALLRTYKYGKRGGLAKGLGLGSMHSVLFLSWALLIWFTSVVVHKNISNGGESFTTMLNVVIAGLSLGQAAPNISTFLRARTAAYPIFQMIERNTVNKASSKAGRTLPSVDGHIQFRDVRFAYPSRPDVVILDRFSLDFPAGKIVALVGGSGSGKSTVVSLIERFYEPLTGAVLLDGHDIKDLDVKWLRQQIGLVNQEPALFATSIRENILYGKGDASMDEINHAAKLSEAITFINHLPDRYETQVGERGIQLSGGQKQRIAISRAILKNPSILLLDEATSALDAESEKSVQEALDRVMVGRTTVVIAHRLSTIRNADTIAVVDSGRIVETGTHEQLMANPRSAYASLIQLQEAAQLQNKQSFSDSASLSRPLSSKYSRELSRTSMGGSFRSEKDSVSRYGTVEAHDEGGHKSKPVSMKKLYSMIRPDWFFGVSGTVSAFVAGSQMPLFALGVTQALVSYYMGWETTKREVRKIAVLFCCGAVLTVVFHAIEHLSFGIMGERLTLRVRERMFAAILRNEIGWFDDTSHTSSMLSSRLETDATLVRTIVVDRSTILLQNIGMIVTSLIIAFIINWRITLVVLATYPLMVSGHISEKMFMKGYGGNLGKSYLKANMLAAEAVSNIRTVAAFCAEEKVIKLYADELKEPAKQSFRRGQGAGLFYGVSQFFLFSSYALALWYGSELMSKEMASFKSVMKSFMVLIVTALAMGETLAMAPDIIKGNQMVSSVFEILDRKTDVLIDAGNDVKRVEGVIELRGVEFRYPARPEVVVFKGLDLLMKAGKSMALVGMSGSGKSTVLSLILRFYDPIAGKVLIDGKDIRKVKLKSLRKHIGLVQQEPALFATTIYDNILYGKDGATEAEVVDAAKLANAHSFISALPEGYRTRVGERGVQLSGGQRQRIAIARAIVKDPAILLLDEATSALDVESERVVQQALDRVMRNRTTVMVAHRLSTIKNADVISVLQDGKIIEQGAHHQLIENRNGAYHKLVSLQQQQQQQDQMQRH

SEQ ID NO: 60277 - DNA, 4449 bp, Oryza sativa
  CDS (1)..(4449)
atgtcgtggcagagctcagtgtcctggcagccggacacgtcgtgggcgcagccccacggcctcggcgccgccgtcgggccctgggcgcccgccaggatggggagcgccggccgccgtggccccgcgctgttccggcggacggcgagggagtactacgtgtcgaggcggtccgcccgcccgcgctaccgcgacgtctcctcgtcggcgcacaggcccgtcgccgccgccgccggcggcggtggcggcaggcggctggagctgcagagcgtggtgaccgacgcgagccgcgccatcgtcgtggtgccgaacacctccttcgccagcaacgacgacagcgtcgtcgtcgccgactccgccgtctactccgcgcccggccatgacgccggccgaggaggacgagccatggtgaggtacagcgacaccaacgccgccgccgccgcctcccgcgaggtctccttctcgcgcgacaaccacgaccagctctacgtctccgcggcgcggcgtgacccgcccagcttcggctacgacatcagcgtcgcgtccttcagcggccagagccggtacgaggacgccgtcggcgactacgacgacgacgacgacgagatcgacgtgagggtcgggaagcccgtcggcgtcgcggggcttttcaagtactcgacggccatggacatcgtcctcctcgtgctcgggtgcgtcggcgccatgatcaacggcggctcgctgccatggtactcctacctgttcggtaacttcgtcaacaagatcgtcaacgtcgacaagacgcagatgatgaaggacgtcaagcagattagtgtgtacatggcgttccttgctgcagttgtcgtcgtaggagcctatcttgagatcacctgctggaggatcatcggcgagaggtcggcgctgcggatgcggcgagagtacctgaaggcggtgctgaggcaggagatcggattcttcgacacggaggtgagcaccggcgaggtgatgcacagcatctccggcgatgtcgcccaaatccaagaagtcatgggagagaagattccaggattcgtgcaccacgtcttcaccttcgtcttcggctacgtggtcggcttcgccaaatcgtggaggatcgctctcgccgtcttcgccgtcacgcctgccatgatggcgtgcggcatggcctacaaggccatctatggcggcctcaccgccaaggaagaggcatcgtaccagcgtgccggcgacgtggcgcagcaggcgatcagctcgatcaggacggtgatgtcgttcgtcatggaggagcggctcgccggcgagtacgccgagtggctggacaaggcggcgccgatcggcgtcaagatggggttcgccaagggcgccggcatgggggtgatctacctggtgacctactcccagtgggcgctggcgctctggtacggctccaggctcgtcgccaacggcgagatcaagggcggcgacgccatcgcctgcttcttcggcgtcatggtcggaggaaggcacgcacatcaacctcctcgcaccgcttcttgttgtcgtcaatggcgccggtcgccggagtttcgtggttggggcttggcgctgacgctgtcgtacatggcgcagttcgcgcagggcacggtggcggcggggcgggtgttcgaggtcatcgaccgggtgccggagatcgacgcgtacggcgccggcgggcgggcgctgccggcggtgaaggggcggatggagttcaaggacgtggagttcgcgtacccgtcgcggccggacgccatggtgctgtacaacctcaacctggtcatccccgccgccaagacgctggcgctcgtcggcgtcagcggcggcggcaagtccaccatgttcgcgctcatcgagcgcttctacgacccgactcgaggtgagagggaatggccattgacgcgcacgcagagcacgaccatggcgagatcgtcggtgatcgatgacgaagcttttgcgtccgtggggtgtgcagggtcgatcacgttggacggccatgacctcgcgtcgctgaacctccggtggctccggtcgcagatcgggctcgtcgggcaggagcccgtcctcttctccacctccatcatcgagaacgtcatgatggggaaggagaacgccacgcgccacgacgccatctcggcgtgcgccatggccaacgtccacaccttcgtcctcgccctccccgacggctacgacactcaggttggggaccgtggggcccagctgtcggggggacagaagcagcggatcgcgctggcgcgcgccatcatccgcgacccgcgcatcctgctgctggacgagccaaccagcgcgctggacacccagtcggaggccgtggtgcagcagtccatcgaccgcctcgccgccggccgcaccgtcgtcgtcatcgcgcaccgcctcgccaccgtccgcaacgccgacaccatcgcggtgctcgaccgcggcgccgtcgtcgagtccggccgccacgccgacctcatggcccgccgcgggccctactccgcgctggtcagcctcgcctccgacagcggcggcgccaggccagacctcgccggcgctgcagcggcgtacaccagcttcaccgacgagtcggggtacgacgtgtcggtgtccaagtcgaggtacggcttccagacgattcgagaagaggaggagaagaaggattcgcaggacgccaaggtgagggtctccgagatatggaggctgcagcggcgggaaggtccattgctgattttggggttcttgatgggcatacacgccggcgcggtgttctcggtgttcccgctgctgctgggccaggcggtggaggtgtacttcgacgccgacacggcgaggatgaagcggcaggtggagtacctggccatggcggtggtcggcctcggcgtggcctgcatcctgaccatgacggggcagcaggggctgtgcggctgggcgggcgcccggctcaccatgcgcgtccgggaccgcctcttccgcgccatcatgcggcaggagcccgcgtggttcgacgaggaggacaacgcgatgggcgtcctggtgacgcggctcgcgcgggacgccgtcgcgttccgctccatgttcggcgaccgctacgccgtgctgctcatggccgtcggctcggccggcgtggggctcggcatttgcttcgggctggactggcggctcacgctggtggccacggcgtgcacgccgctgacgctcggcgccagctacctcaacctgctcatcaacgtgggcgccaggtccgacgacggcgcgtacgcccgcgccagcggcatcgccgccggcgccgtgtcgaacgtgcgcaccgtcgcggcgctctgcgcccagggcagcgtcgtcggcacgttcaaccgcgcgctggacgggccggcggccaaggccagccggagatcgcagctcatgggcgtcatcctcgggctctcccagggcgccatgtacggcgcctacacggcgacgctctgcgccggcgcccacttcatcaacaatggcgtgtccaccttcggcgacgtgtccaagatcttcctcatcctcgtcctcagctccttctccgtcggccagctcgccggcctcgcccctgacacctccggcgccccggcggccatcgccggcatactaaccatcctcaagcgacgtccggcgatcaccggagactccaccaagcgaaggatcacgatcaaggacgggaagcccatcgacgtggagctccggaaggtgacgttcgcgtacccgtcgcggccggaggtgacggtgctgagcggcttctcgctgcgggtgaaggccggcacgacggtggcggtggtcggcgcgagcgggagcgggaagtcgacggtggtgtggctggtgcagcggttctacgacccgggcgacgggaaggtggtggtcggcggcgtggacgcgcgggagcttgacctcaagtggctccgcggcgagtgcgccatggtgggccaggagccggccctcttcagcgggtccatccgagacaacatcgggttcggcaacccaaaggcctcgtgggccgaaatcgaggaggccgccaaggaggccaacatccacaagttcatctccgccctcccccaaggctacgaaacccaggttggggagagtggggtgcagttgtcaggtgggcagaagcagaggatcgcgatcgcgcgggcgatcgtgaagcaggcgaggatactgctgctggacgaggcgagcagcgcgctggacctggagtccgagcggcacgtgcaggaggccctgaggagggcctcgcggcgcgccacggcgatcaccgtggcgcaccgcctctccaccgtgcgcgacgccgaccgcatcgccgtcgtcagcgccggcagggtcgtcgagttcggcggccatgacgccctcctcgccggccacggcgacggcctctacgctgccatggtgaaggcggagacggaggcacaagcgttcaagtaa

SEQ ID NO: 60278 - protein, 1482 aa, Oryza sativa
MSWQSSVSWQPDTSWAQPHGLGAAVGPWAPARMGSAGRRGPALFRRTAREYYVSRRSARPRYRDVSSSAHRPVAAAAGGGGGRRLELQSVVTDASRAIVVVPNTSFASNDDSVVVADSAVYSAPGHDAGRGGRAMVRYSDTNAAAAASREVSFSRDNHDQLYVSAARRDPPSFGYDISVASFSGQSRYEDAVGDYDDDDDEIDVRVGKPVGVAGLFKYSTAMDIVLLVLGCVGAMINGGSLPWYSYLFGNFVNKIVNVDKTQMMKDVKQISVYMAFLAAVVVVGAYLEITCWRIIGERSALRMRREYLKAVLRQEIGFFDTEVSTGEVMHSISGDVAQIQEVMGEKIPGFVHHVFTFVFGYVVGFAKSWRIALAVFAVTPAMMACGMAYKAIYGGLTAKEEASYQRAGDVAQQAISSIRTVMSFVMEERLAGEYAEWLDKAAPIGVKMGFAKGAGMGVIYLVTYSQWALALWYGSRLVANGEIKGGDAIACFFGVMVGGRHAHQPPRTASCCRQWRRSPEFRGWGLALTLSYMAQFAQGTVAAGRVFEVIDRVPEIDAYGAGGRALPAVKGRMEFKDVEFAYPSRPDAMVLYNLNLVIPAAKTLALVGVSGGGKSTMFALIERFYDPTRGEREWPLTRTQSTTMARSSVIDDEAFASVGCAGSITLDGHDLASLNLRWLRSQIGLVGQEPVLFSTSIIENVMMGKENATRHDAISACAMANVHTFVLALPDGYDTQVGDRGAQLSGGQKQRIALARAIIRDPRILLLDEPTSALDTQSEAVVQQSIDRLAAGRTVVVIAHRLATVRNADTIAVLDRGAVVESGRHADLMARRGPYSALVSLASDSGGARPDLAGAAAAYTSFTDESGYDVSVSKSRYGFQTIREEEEKKDSQDAKVRVSEIWRLQRREGPLLILGFLMGIHAGAVFSVFPLLLGQAVEVYFDADTARMKRQVEYLAMAVVGLGVACILTMTGQQGLCGWAGARLTMRVRDRLFRAIMRQEPAWFDEEDNAMGVLVTRLARDAVAFRSMFGDRYAVLLMAVGSAGVGLGICFGLDWRLTLVATACTPLTLGASYLNLLINVGARSDDGAYARASGIAAGAVSNVRTVAALCAQGSVVGTFNRALDGPAAKASRRSQLMGVILGLSQGAMYGAYTATLCAGAHFINNGVSTFGDVSKIFLILVLSSFSVGQLAGLAPDTSGAPAAIAGILTILKRRPAITGDSTKRRITIKDGKPIDVELRKVTFAYPSRPEVTVLSGFSLRVKAGTTVAVVGASGSGKSTVVWLVQRFYDPGDGKVVVGGVDARELDLKWLRGECAMVGQEPALFSGSIRDNIGFGNPKASWAEIEEAAKEANIHKFISALPQGYETQVGESGVQLSGGQKQRIAIARAIVKQARILLLDEASSALDLESERHVQEALRRASRRATAITVAHRLSTVRDADRIAVVSAGRVVEFGGHDALLAGHGDGLYAAMVKAETEAQAFK

SEQ ID NO: 60279 - DNA, 4236 bp, Oryza sativa
  CDS (1)..(4236)
atgatgccgacggggctgtttggatgggcgtctccgcatgtgcagccgcttaccccggtgtccgaggtgtcggagccgccggagtcgccttcgccgtacggggatgggccggcgggggatgctggggtgggggcgagggaaggggaaggcctcggccccggcgaggaggaggtggaggacgacgaggtcgagcccccgccctccgcggtgtcgttctggaggctgttcgagttcgctgacggaatcgactgggcgctcatggtcgctggcgctctcgccgccgcggcacacggcgctgctcttgttatctacctccactactttggcaggtccttgaatttgctcgactctgaacgggttgagtctgctctccacggccgcagtgatgaactccttcaccggtttaaggagcatgctctgtatattgtctatatagctggtggtgtgtttgctgcaggatggatagaggtgtcctgttggattcttactggggaacggcagactgctgtcataagatcaaaatatgttcaggtcttgctaaatcaagacatgagtttctttgatacgtatggaaacaacggtgatatagttagtcaagtgctgagcgatgtattgcttattcagtcagccatcagtgagaaagttgggaactacatacacaatatggctacatttgttggtggtcttgttgttgggctgatcaattgttggcaaataactcttctaacacttgccactggtcccttgattgttgctgctggaggaatatctaacatatttcttcacaggctggccgagaacattcaagatgcatatgctgaagcagctagtattgctgagcaggccattgcatacatcaggacgctatatgcttttacaaatgaaactctggcaaagtactcatatgctacgtctcttcaagcaactctgagatatggaatattgataagccttgtgcaagggattggccttggatttacttatgggcttgccatttgttcttgtgctctgcaactttgggttggaaggcacctgattgctcggggaaaagctgatggtggtcaagttgtggtagctttgttctccgtaattctaagtggccttggtttgaaccaagcagctacgaacttctattcatttgaacaaggacgtattgctgcttatagactgtatgagatgataagccgttcaacttccagcaccaatcaagaaggctccaccttgcctctagtgcaagggaacattgaattcaggaatgtgtattttagttatctctcccggcctgaaattccaattttaagtggtttctttctcactgtacctgccagaaaaactgttgcacttgttggtagaaacggctcagggaaaagtagcataattcctctaatggagagattctatgatccaaccttaggagaagtacttttggatggggaaaatataaaaaatttgaaagtagaatggttgagaagccaaattggtctagtgacccaagaacccgcattgttgagtttgagcattcgggaaaatattgcttacggaagatctgctacctttgatcagatagaagaggcagctaagacagcacatgcccatgggttcattagttcacttgaaaagggatatgaaacccaggtgggtcgagctggtatggccctgagtgatgaacaaaagatcaaaatttctattgcccgggccgtgctttcaaacccttcaattcttttgcttgatgaggtcacaggagggcttgattttgaagctgaaaaagctgtgcaagaagcattagatgttctcatgttgggaaggtcaaccattataatagctcggcgtctcagcctcattaaaaatgctgattacatagctgtgatggaggagggacatcttgttgaaatggggacacatgatgaactcctgaacttggatggcctttatgctgagcttttaaggtgtgaggaagcaacaaagcttcccaagaggatgccaaccaagaatggcaaggagcgtaagtcactccaaattgaggatctgtcggccagccaaagttttcaagaatcatcctctcccaagatggccaaatcaccttctcttcaaagaacacatggaatgcttcagttttggcgatcagacacaaacaaaaactctcatgattccccgaaggatcagagcccaccttcagaacaaactatagacaacgggatacctttggttgcaaccgagagagtgccatccatcaagagacaggatagttttgaaatgaaattgcccgatcttccaaaagttgacatccatcccattcaacgacagtcttcaaaaaattcagaacctgactcacctatatctcctctcttaacttctgatccaaagaacgagcgatcacattcacaaacttttagtaggccgcagagtgaacgggatgatacaagttctgaacagagtgaaccagaagagttgcaacaccataaacctccatccttttggagacttgcagcacttagtattgctgaatggccctatgcacttttaggcacaatcggtgcggctatatttggttccttcaatccactgcttgcttacacaatagcactaatagtgtcagcatattaccgaatagatgttagcgacatgcaccatgaagtgaacaggtggtgcttattcatagtaggcatgggtgttattacagtgctggtcaactggttgcaacatttctattttggaataatgggagagaagatgaccgagcgcataagaagaatgatgttctctgcaattctgcgcaatgaagttggatggtttgacaaagaggagaacagtgctgatacactatccatgcgcttggcaaatgatgctacatttgtccgtgccgcattcagtaatcgcctttccatattcatacaagacaccgctgcagtttcagtggctcttcttattggaatgctgttgggatggcgggttgcacttgttgctcttgcaactttacctgttcttgtcatctctgctattgctcagaaattgtggcttgctggcttctcaaaaggaatccaggaaatgcatagaaaggcctcactagttcttgaagacgcagtccgaaacatttacactgttgtagccttctgtgctgggaacaagataatggaactatacaggttacatctttgtaagatactgaagcagagtctattgcaaggattggccataggttttggctttggattctcgcagtttcttctttttgcctgcaatgcccttcttctttggtacactgccatttcagtggacaagcagcgactcacaattgccacagggttaaaagagtacattctcttttcatttgcatcatttgcattggtggagccttttggactcgctccttacattcttaaaaggcggaagtctctcatttcagtgtttcaaatcattgaccgggaaccaaagattgatcctgatgataacaccggtttaaaaccacctaatgtttacgggagcattgaattcaagaatgttgatttctcttatccagctcgtcctgaaattcttgtgctgagcaattttaatcttaaagtgagtggtggacaaacagttgccgtggtaggggtttcaggatcggggaagagcactataatttctttaattgagagattctatgacccagtgactggccaagttctgttggatggccgagatataaaatcattcaacctgagatggttgcgaagtcacatgggcctaattcagcaagagccagttattttctcgacaacgataagagagaacattatttatgcaaggcacaatgcaacagaggctgagatgaaggaagctgcgaggatagcaaatgcccaccatttcattagcagcttgccacatggctacgacactcatgttggaatgaggggggttgaccttacagctgggcagaagcaacgaattgcaattgctagggtggttttgaagaatgcacctattttgttgttagatgaggccagctccgcaattgagtctgaatcaagtagggtggtgcaggaagctcttgacacattggtcatggggaacaaaacaaccatcctcattgcgcacagggcagcgatgatgaagcatgtggataacattgtcgtcctaaatggtggtaggatagttgagcagggtacacatgactctctgatggacctgaatggtctctatgttagattgatgcaaccccattttggcaagggccttcgccagcatcggctaatgtaa

SEQ ID NO: 60280 - protein, 1411 aa, Oryza sativa
MMPTGLFGWASPHVQPLTPVSEVSEPPESPSPYGDGPAGDAGVGAREGEGLGPGEEEVEDDEVEPPPSAVSFWRLFEFADGIDWALMVAGALAAAAHGAALVIYLHYFGRSLNLLDSERVESALHGRSDELLHRFKEHALYIVYIAGGVFAAGWIEVSCWILTGERQTAVIRSKYVQVLLNQDMSFFDTYGNNGDIVSQVLSDVLLIQSAISEKVGNYIHNMATFVGGLVVGLINCWQITLLTLATGPLIVAAGGISNIFLHRLAENIQDAYAEAASIAEQAIAYIRTLYAFTNETLAKYSYATSLQATLRYGILISLVQGIGLGFTYGLAICSCALQLWVGRHLIARGKADGGQVVVALFSVILSGLGLNQAATNFYSFEQGRIAAYRLYEMISRSTSSTNQEGSTLPLVQGNIEFRNVYFSYLSRPEIPILSGFFLTVPARKTVALVGRNGSGKSSIIPLMERFYDPTLGEVLLDGENIKNLKVEWLRSQIGLVTQEPALLSLSIRENIAYGRSATFDQIEEAAKTAHAHGFISSLEKGYETQVGRAGMALSDEQKIKISIARAVLSNPSILLLDEVTGGLDFEAEKAVQEALDVLMLGRSTIIIARRLSLIKNADYIAVMEEGHLVEMGTHDELLNLDGLYAELLRCEEATKLPKRMPTKNGKERKSLQIEDLSASQSFQESSSPKMAKSPSLQRTHGMLQFWRSDTNKNSHDSPKDQSPPSEQTIDNGIPLVATERVPSIKRQDSFEMKLPDLPKVDIHPIQRQSSKNSEPDSPISPLLTSDPKNERSHSQTFSRPQSERDDTSSEQSEPEELQHHKPPSFWRLAALSIAEWPYALLGTIGAAIFGSFNPLLAYTIALIVSAYYRIDVSDMHHEVNRWCLFIVGMGVITVLVNWLQHFYFGIMGEKMTERIRRMMFSAILRNEVGWFDKEENSADTLSMRLANDATFVRAAFSNRLSIFIQDTAAVSVALLIGMLLGWRVALVALATLPVLVISAIAQKLWLAGFSKGIQEMHRKASLVLEDAVRNIYTVVAFCAGNKIMELYRLHLCKILKQSLLQGLAIGFGFGFSQFLLFACNALLLWYTAISVDKQRLTIATGLKEYILFSFASFALVEPFGLAPYILKRRKSLISVFQIIDREPKIDPDDNTGLKPPNVYGSIEFKNVDFSYPARPEILVLSNFNLKVSGGQTVAVVGVSGSGKSTIISLIERFYDPVTGQVLLDGRDIKSFNLRWLRSHMGLIQQEPVIFSTTIRENIIYARHNATEAEMKEAARIANAHHFISSLPHGYDTHVGMRGVDLTAGQKQRIAIARVVLKNAPILLLDEASSAIESESSRVVQEALDTLVMGNKTTILIAHRAAMMKHVDNIVVLNGGRIVEQGTHDSLMDLNGLYVRLMQPHFGKGLRQHRLM

SEQ ID NO: 60281 - DNA, 3840 bp, Oryza sativa
  CDS (1)..(3840)
atgggcgacaaggagaagccgtcgttcctgcggctggttcgctacgccgacgcgcacgaccggtgcctgatggcgctgggcgttctgggcagcttcggcgatggcatgatgcagccgctgtcaatgctggtgctcggcgacatcgtcaacagctacggcggcgccggcggcgccggcagtgcccggagcgccttcagctccggcgccgtcgacaagggtctgtgctggacgagaacggcggaacggcaggcgtcaaagatgaggaggctgtacctggaggccgtcctgagccaggaggtggcgttcttcgacgccgcgccctcctcgccgtcgtcgccgcaggcccaggcccaggccaccacgttccgcgtcatctccaccgtctccgacgacgccgacgccatccaggacttcctcggcgagaagctccccatggtcctggccaacgcgacgctcttcttcggcgcgctggccgtgtcgttcgtgttcgcgtggcggctcgcgctggcgggcctcccgttcacgctcctcctcttcgtcacgccgagcgtgctcctcgccgggcgcatggccgcggcggccggggaggcccgcgcggcgtacgaggaggcgggcgggatagcgcagcaggcggtgtcgtccatccggacggtggcgtcgtacaccgctgagcggcggacggtggagcggttccgcggcgcggtggcgcggagcgcggcgctcggcgtcaggcaggggctcatcaagggcgccgtgatcgggagcatgggcgtcatctacgccgtctggtccttcttgtcgtggatcggcagcctcctcgtcatccacctgcacgcccagggcggccacgtgttcgtcgcctccatctgcatcgttttggcgggaatgtcgatcatgatggcgctgccgaacctccggtacttcattgacgcgacggcggcggcgagccggatgcaagaaatgatcgaaatgctcccaccgctcgaaggggcggagaagaagggagccaccatggaaaggatcaggggcgagatcgtgttcaaagacgtgcacttctcgtacccgtcgaggccggacacgctggtgctcaacggcttcaacctgaccatctctgagggcgccaccgtcggtctcgtcggcggcagcgggtccgggaagtccaccgtgatctcgctgctgcagaggttctacagcccggactccggggagatatcgatggacgaccatggcattgacacgctcaatgtggagtggcttaggagccagatagggctagtgagccaagagcctgtactgtttgcgacctccattagggagaacatactgttcggcgacgagacggcctcgttgaagcaagtcgtcgccgcggcgaagatggccaatgcccacgagttcatcgtcaagttgccccatggatacgaaactcatgtacacaagcaacagcaatttttacagtgcatgctacagcacgctgaatcttatggtgtattttttttttctccggtgcaggttggtcagttcgggacgcagctgtcgggagggcagaagcagcgcatcgccattgctcgagcgctcgtccgggacccgaggatcctgctgctggacgaggcgacgagcgcgctcgacgccgagtcggagcggacggtgcaggacgcgctggaccgggcgtccgtgggccggaccaccgtgatcgtagcgcaccgcctctcgacgctccgcaaggcggacacgattgcggtgctcgacgctggccgcgtcgtggaggccggcacgcacgacgagctcttggggatggacgacgggggtgaaggcggcgtgtacgccaggatggtgcacctgcagaaggcgccacccgtggcggcgagggaggagcgccaccgcgccgtggatgtggtggagagcgagatggtgtcgttccgcagcgtggagattatgtcggcggtcagcgccaccgagcaccgtcctagccccgcgccgtcgttctgctcggtcgaacactcgacggagattgggaggaagctcgtggaccacggtgtggcgcgctccaggaagccctcgaagcttcgcctgctgaagatgaaccggccggagtggaagcaggcgttgcttgggtgcgttggcgccgtcgtcttcggcgcggtgctgccgctgtactcgtacagcctaggctcgttgccggaggtttatttcctcgccgacgatggccagatccgttccaagaccaggttgtactacttcctcttccttggcatcgccgtcgtctgcatcacggcgaacatcgtgcagcactacaacttcgcggtgatgggcgagcgcctgacggagcgtgtccggggccagatgctcgccaagatcctctccttcgaggtcgggtggttcgacgaggacgagaactcgagcgccgcggtgtgcgcgcggctggcgacacagtcgagcaaggtccgctccctcgtcggcgaccgcatgtgcctgctggtccaggcgggcgccacggcgtcgctgggcttctcgctcgcgctcgccgtgtcgtggcgcctcgccacggtgatgatggccatgcagccgctgatcatcgcgagcttctacttcaagaaggtgctcatggctgccatgtccaagaaggccaagaaggcgcaggtgcaggggagccagctcgccagcgaggccgtggtgaaccaccggacgatcaccgcgttctcgtcgcagcggcggatgctccgcctgtacgaggccgcgcaacaaggccccaagaaggacaacgtggcgcactcgtggttctccggcttctgcctgtgcctgtgccagttcagcaacaccggcagcatggcggtcgctctctggtacggaggcaagctcatggccaaggggctcatcactcccacgcacctgttccaggtgttcttcatgctcatgaccatgggaagggtcatcgccgacgccgggagcttgacgtcggacttggcgcaaggcggcgacgcggtgcgctccgtcctcgacacgctggaccgtgaaccgacgatcaaggacgacgacaacgacaacgagaggaagaagaagaaacggaaggagataaaaggcgcgatcgagttcaagaacgtgcacttcagctacccgacgcggccggaggtggccgtgctcgccggattcagcctcgagatcggcgcggggaagacggtggcgctcgtcgggccgagcgggtccggcaagtcgacggtgatcgggctgatcgagcggttctacgacgcgcagaggggctcggtcctggtcgacggcgaggacatcaggagctacagccttgcacgcctccggtcgcaggtggcgctcgtcagccaggagccgacgctcttctccgggacgatacgcgacaacatagcgtacggcgccgccgaagagcacgccaccgaggacgaggtggcccgcgccgcggcgctcgccaacgcccacgggttcatcagcgccatggagcgcgggtacgacacgcgcgtcggggagcgcggcgcgcagctgtcgggggggcagaggcagcggatcgcgctggcgcgggcggtgctgaaggacgcgaggatcctgctgctggacgaggcgacaagcgcgctggacgccgcgtcggagaggctggtgcaggacgccgtggaccggatgctgcgggggaggacgtgcgtcgtggtggcgcaccgcctctcgacggtggagaagtccgacacgatcgcggtggtgaaggacgggagggtggcggagagagggaggcaccacgagctcctcgccgtcggccgcgccgggacgtactacaacctgatcaagctccagcacggcagatcgccgtgccttagtcccatgtga

SEQ ID NO: 60282 - protein, 1279 aa, Oryza sativa
MGDKEKPSFLRLVRYADAHDRCLMALGVLGSFGDGMMQPLSMLVLGDIVNSYGGAGGAGSARSAFSSGAVDKGLCWTRTAERQASKMRRLYLEAVLSQEVAFFDAAPSSPSSPQAQAQATTFRVISTVSDDADAIQDFLGEKLPMVLANATLFFGALAVSFVFAWRLALAGLPFTLLLFVTPSVLLAGRMAAAAGEARAAYEEAGGIAQQAVSSIRTVASYTAERRTVERFRGAVARSAALGVRQGLIKGAVIGSMGVIYAVWSFLSWIGSLLVIHLHAQGGHVFVASICIVLAGMSIMMALPNLRYFIDATAAASRMQEMIEMLPPLEGAEKKGATMERIRGEIVFKDVHFSYPSRPDTLVLNGFNLTISEGATVGLVGGSGSGKSTVISLLQRFYSPDSGEISMDDHGIDTLNVEWLRSQIGLVSQEPVLFATSIRENILFGDETASLKQVVAAAKMANAHEFIVKLPHGYETHVHKQQQFLQCMLQHAESYGVFFFSPVQVGQFGTQLSGGQKQRIAIARALVRDPRILLLDEATSALDAESERTVQDALDRASVGRTTVIVAHRLSTLRKADTIAVLDAGRVVEAGTHDELLGMDDGGEGGVYARMVHLQKAPPVAAREERHRAVDVVESEMVSFRSVEIMSAVSATEHRPSPAPSFCSVEHSTEIGRKLVDHGVARSRKPSKLRLLKMNRPEWKQALLGCVGAVVFGAVLPLYSYSLGSLPEVYFLADDGQIRSKTRLYYFLFLGIAVVCITANIVQHYNFAVMGERLTERVRGQMLAKILSFEVGWFDEDENSSAAVCARLATQSSKVRSLVGDRMCLLVQAGATASLGFSLALAVSWRLATVMMAMQPLIIASFYFKKVLMAAMSKKAKKAQVQGSQLASEAVVNHRTITAFSSQRRMLRLYEAAQQGPKKDNVAHSWFSGFCLCLCQFSNTGSMAVALWYGGKLMAKGLITPTHLFQVFFMLMTMGRVIADAGSLTSDLAQGGDAVRSVLDTLDREPTIKDDDNDNERKKKKRKEIKGAIEFKNVHFSYPTRPEVAVLAGFSLEIGAGKTVALVGPSGSGKSTVIGLIERFYDAQRGSVLVDGEDIRSYSLARLRSQVALVSQEPTLFSGTIRDNIAYGAAEEHATEDEVARAAALANAHGFISAMERGYDTRVGERGAQLSGGQRQRIALARAVLKDARILLLDEATSALDAASERLVQDAVDRMLRGRTCVVVAHRLSTVEKSDTIAVVKDGRVAERGRHHELLAVGRAGTYYNLIKLQHGRSPCLSPM

SEQ ID NO: 60283 - DNA, 3738 bp, Oryza sativa
  CDS (1)..(3738)
atgtctacagtccatgatgaagaccactctatttcatcatctcaatttgatgaaatggatgaaagtaatagcacaatcccagttccgtcagaatccagcaccgacgagaagccatttccattcctcgggctgctttgctacgccgatgcggtagactggctcctcatggccctgggaactgttggatctataattcatggcatggcattccccgtcggatatctccttcttgggaaagcacttgatgcttatggaaccaacataaatgatcaggagggcatggtccatgcattgtataaggtggttccgtttgtgtggtacatggcagcagctactcttcctgctggaatggtcgagatctcatgctggatatactcaagtgaaagacaattagcacgcatgcggctagcatttctgagatcagtacttaatcaagaggttggggccttcgacactgacttgaccactgcaaaaatcatcaccggagtaaccaaccacatgagtgtcatacaagatgcaattggtgagaagctcggtcatttcgttgcgagcttctccactttctttgctggtatcataattgcatttgccagctgctgggaagtcgcattgctctcctttctggtcattcctctgatcctcgtcattggagcaacatacacgaaacagatgaatggcatatcgttatctcgtaatgctatagtctcagaagcaacatctattgtagaacagactttgtcgcatattaagactgttttctcctttgttggggagaaacgggccatgagatcctttgtccggtgcatggataatcagtacaaactaagtaagaaggaggcagtgataaaagggataggactgggattgttccaagctgtgaccttctgttcatgggcactgatggtttggattggggcagtcgcagtaaccagccgaaaggcaacaggaggtggcacgatagctgccatcatgagcatcctcttcggagcaatatcaattacttatgctgcaccagaccttcagacctttaatcaagcaaaagctgcaggaaaagaagtattcaaggttatcaaaagaaagccatccattagttatgagaaacatggatcagtgctaggaaaggttcatggggagataaaattccgtagggtgcatttcgcctatccatccaggcaggataagccaattctccaaggattctcattatccatccccgcaggcaaagtcgttgcacttgtaggaagcagtggctgtgggaagagcactgtgatctcactactccaaaggttctatgatccaacctcaggtagcattttaattgatggtcacagtatcaagaaacttgatctggaatccctccgaagaaacattgcttcagtctcccaggagccatcgctattttcaggcactatcaaggacaacttgaggattggtaaaatggatgcaaatgacgacgagataaccaaagcagcaagaacagctaatgtccattcatttatatccaaacttccaaatgaatacttaacagaggtaggagaaaggggagtgcagttgtcgggaggtcagaaacaacgaatagctattgcaagggcaatgctcaaggatccaccaatcctgcttctggatgaagcaacaagtgcccttgattcagagtcagaaaagctagttcaggatgcgcttgagaaggccatgagtgggaggactgtcatattgatagcacacagaatgtctacaattgtaaatgccgacacaattgttgtcgtggagaatggaaaggtagctcaaactggaactcatcaagagttgattgagaaaagcacattctactcaaatgtatgcagcatgcaaaatattgagaaggaagctggaacgagggtcgcaagctcttctgataatgtcatagaagatgaaattgatgaagtgtacgacaggcagctctctccaaagcagggacaacagaacaaattggaacaactaaactctaagcaaccaaagcaagagaaagacgacattgcaaagatactattagggtcatcatcagcagctatatctgggatctcaaagcccttgtttggttacttcatcatgacaattggtgtggcatattatgatctagatgcaaaaaggaaagtcagcaagtattctttgattttcttcacagctggggtgatcacgcttgccagtaacatcttccaacactatatttatggtgttgttggagaaaaggcaatgaaaatcctcagggaggccatcttttcatctgttctccgaaatgagcttggctggtttgaaaagccaaaaaatggtgtaggctttcttacctcacgcatcgtgagcgacacatcgacagtcaagaccattatatctgatagaatggcagtcattgtgcaatgcatctcttcaattctgatagcaacagtagtaagcatgtatgtcaattggaggatgggtttagtatcatgggcagtcatgccatgccatttcatcggtggccttattcaggccaaggcagccaaagggttctatggtgactctgctattgctcaccaggaacttgtctcccttgcttcagaggcagctagcaacatcagaactgtggcatcctttgtatatgaggatgaaataatcaagaaagcagaattgtcgctgcaagaacccatgcgagttaccaagatcgagagcatgaagtacggcgtagtccaagggatctcactctgcctttggaatattgcacatgcagtggcgctttggtacaccacagttctggttcagaggaagcaggcttcatttgagaacagcataagatcataccagatattctcactcacagtgccttccataacagagctatggactctgatccccatggtcatgtcagccattgcagtactcaatcctgcatttgaaatgcttgatagggacacacagattgtgccagacagaccagaaaatccaagtgatggctggctcatgggaagaactgagtttcaagatgtgagcttcaactatccatctagaccagaggtgaccattcttgatggcttcagtctagtcattgagcctggccaaagagtagcattggttggtccaagcggcgcgggaaaatcctctgtcctggcactactattgagattctatgatcctcagagagggagagtactaattgacaacaagaacataaaagactacaatctcaggtggctcaggaaacagattgggctagtccaacaagaaccaatcttgttcaattcatccatcagagataacattagctacggaagcgaagagacttcagagactgaaataattcaggctgcaatggaggcgaacattcacgaattcatcagcagcctaccaaaagggtatgacacggttgttggggagaaaggaagccagctttcaggagggcagaaacagcggatagctattgcaagaactcttcttaagcgtccagtcattcttcttcttgatgaggcaaccagcgcacttgatggtgaatctgagagagtggtgatgagttctttaggggccaaggactggaaggacagaaatgagggatcaagcaagattacaagtatcacagtggcgcatagattgtccacggtcataaattcagacacgattgtcgtgatggagagaggcaaagtggttgaacttggtaatcaccacacactgatcactgcagatgatggtgtctactcaagactgttccatttgcaaagcaacatgaaagattga

SEQ ID NO: 60284 - protein, 1245 aa, Oryza sativa
MSTVHDEDHSISSSQFDEMDESNSTIPVPSESSTDEKPFPFLGLLCYADAVDWLLMALGTVGSIIHGMAFPVGYLLLGKALDAYGTNINDQEGMVHALYKVVPFVWYMAAATLPAGMVEISCWIYSSERQLARMRLAFLRSVLNQEVGAFDTDLTTAKIITGVTNHMSVIQDAIGEKLGHFVASFSTFFAGIIIAFASCWEVALLSFLVIPLILVIGATYTKQMNGISLSRNAIVSEATSIVEQTLSHIKTVFSFVGEKRAMRSFVRCMDNQYKLSKKEAVIKGIGLGLFQAVTFCSWALMVWIGAVAVTSRKATGGGTIAAIMSILFGAISITYAAPDLQTFNQAKAAGKEVFKVIKRKPSISYEKHGSVLGKVHGEIKFRRVHFAYPSRQDKPILQGFSLSIPAGKVVALVGSSGCGKSTVISLLQRFYDPTSGSILIDGHSIKKLDLESLRRNIASVSQEPSLFSGTIKDNLRIGKMDANDDEITKAARTANVHSFISKLPNEYLTEVGERGVQLSGGQKQRIAIARAMLKDPPILLLDEATSALDSESEKLVQDALEKAMSGRTVILIAHRMSTIVNADTIVVVENGKVAQTGTHQELIEKSTFYSNVCSMQNIEKEAGTRVASSSDNVIEDEIDEVYDRQLSPKQGQQNKLEQLNSKQPKQEKDDIAKILLGSSSAAISGISKPLFGYFIMTIGVAYYDLDAKRKVSKYSLIFFTAGVITLASNIFQHYIYGVVGEKAMKILREAIFSSVLRNELGWFEKPKNGVGFLTSRIVSDTSTVKTIISDRMAVIVQCISSILIATVVSMYVNWRMGLVSWAVMPCHFIGGLIQAKAAKGFYGDSAIAHQELVSLASEAASNIRTVASFVYEDEIIKKAELSLQEPMRVTKIESMKYGVVQGISLCLWNIAHAVALWYTTVLVQRKQASFENSIRSYQIFSLTVPSITELWTLIPMVMSAIAVLNPAFEMLDRDTQIVPDRPENPSDGWLMGRTEFQDVSFNYPSRPEVTILDGFSLVIEPGQRVALVGPSGAGKSSVLALLLRFYDPQRGRVLIDNKNIKDYNLRWLRKQIGLVQQEPILFNSSIRDNISYGSEETSETEIIQAAMEANIHEFISSLPKGYDTVVGEKGSQLSGGQKQRIAIARTLLKRPVILLLDEATSALDGESERVVMSSLGAKDWKDRNEGSSKITSITVAHRLSTVINSDTIVVMERGKVVELGNHHTLITADDGVYSRLFHLQSNMKD

SEQ ID NO: 60285 - DNA, 4035 bp, Oryza sativa
  CDS (1)..(4035)
atggaggaggagataaagggccgcgtcgtcgtcctcggcgccgatgccgccgccgacccggagctcgaggccttccatctcccctccgccgaccagcccccgcactcgcacctcctccaccaccaccattctccacaatcccatcctcaacctgatgcaccagcagcagcagcgccaccgccacctgctccccttactcctcctcctcctaagtcgccgccgccgcctccccacatccaaaccaccgaccttccaccgcccaagcccctcccgccggccccgctccgtcaactcttcagcttcgccgacggcctcgactacgtcctcatgaccctgggcacgctgggcgccctcgtccacggctgctccctcccggtcttcctccgcttcttcgccgacctcgtcgactccttcggctcccacgccgcccacccggacaccatgctccgcctcgtcgtcaagtacgccttctacttcctcgtcgtcggcgccgccatctgggcctcctcctgggccgagatctcctgctggatgtggaccggcgagcggcagtccacccggatgcgcatccgctacctccacgccgccctccaccaggacgtctccttcttcgacaccgacgtccgcacctccgacgtcatccacgccatcaacgccgacgctgtcgtcgtccaggacgccatcagcgagaagctcggcaacctcatccactacctcgccaccttcgtctccggcttcgtcgtcggattcaccgccgcctggcagctcgccctcgtcaccctcgccgtcgtcccgctcatcgccgtcatcggcggcctcagcgccgccgcgctcgccaagctctcctccaggagccaggacgcgctgtccgacgccagcggcatcgcggagcaggcgctggcgcagatacgcatcgtgcagtcgttcgtgggcgaggagcgggtgatgcgggcctactcggcggcgctggccgtggcgcagcggatcggctaccgctccggcttcgccaagggcatcggactgggcggcacctacttcaccgtcttctgctgctacgcgctgctcctctggtacgggggtcacctcgtccgacgcgcccacaccaacggaggcctcgccatcgccaccatgttctcagtaatgataggcggcctggctcttgggcagtcggctccgagcatggcggcgttcgccaaggcgcgggtggcggcggcgaagatattccggatgatggagcacaagccgagcatggagcgggagggcggggtggagctggaggcggtgacggggcgggtggagctgcgggatgtggagttctcgtacccgtcgcggccagacgtggggatcctgcgggggttgtcgctgagcgtgccggcggggaagacgatcgcgctggtggggagctccgggtcagggaagagcacggtggtgtcgctgatcgagaggttctacgagcccaacgccgggaccatcctgctggacggccacgacctgagggacctcaacctgcggtggctgcgccgccagattggtctggtgagccaggagccggcgctgttcgccaccaccatccgggagaacctgctgctggggagggacggcgccacgcaggaggagttggaggaggccgccagggtcgccaacgcccactccttcatcgtcaagctccccgacgcctacaacacgcaggttggggagcgcgggctgcagttgtcgggcgggcagaagcagcggatcgccatcgcgcgcgccatgctccggaacccggccatcctgctgctggacgaggccaccagcgcgctggactcggagtcggagaagctggtgcaggaggcgctggaccgcttcatgatcgggcgcaccacgctggtgatcgcgcaccgcctctccaccatccgcaaggccgacctcgtggccgtcctccagggcggggccatctccgaggtgggcacgcacgacgagctcatggcccgcggggatggcacctacgccaggctcatccgaatgcaggagcaggcgcacgaggccgcgctcgtcgccgctcgccggagcagcgcgcgaccatccagcgcccgcaactccgtcagctcgcccatcatcacgcgtaactcctcctacggccgttccccctactcccgccgcctctccgacgccgacttcatcaccggcctcggcctcggagtcgacagcaagcagcagcagcagcagcactacttccgcgtgcaggccagctccttctggcggctggccaagatgaactcgcccgagtgggggtacgcgctcgtcgcgtcgctgggctccatggtgtgcggctccttcagcgccatcttcgcctacgtcctcagcgccgtgctcagcgtgtactacgcccccgacgccgcctacatggaccgccagatcgccaagtactgctacctcctcatcggcatgtcctccgccgccctgctcttcaacactgtccagcacctcttctgggacaccgtcggcgagaacctcaccaagcgcgtccgcgagaggatgctcgccgccgtgctccgcaacgagatcgcctggttcgacatggaggacaactccagcgcccgcatcgccgccaggctggcgctggacgcccagaacgtgcgctccgccatcggcgaccgcatctccatcatcgtccagaactcggcgctcatgctggtggcctgcaccgccggcttcgtcctgcagtggcgcctcgcgctggtgctgctggccgtcttcccgctggtggtggccgccaccgttctgcagaagatgttcctcaaggggttctcgggcgacctggagcgggcgcacgcgagggcgacgcagatcgcgggagaggcggtggcgaacgtgcgcaccgtggcggcgttcgggtcggaggcgaagatcgtggggctgttcgaggcgaacctggcggggccgctccggcggtgcttctggaaggggcagatcgccgggagcgggtacggggtggcgcagttcctgctgtacgcgtcgtacgcgctggggctgtggtacgcggcgtggctggtgaagcacggcgtgtcggacttctccaagaccatccgggtgttcatggtgctgatggtgtcggccaacggcgccgcggagacgctgacgctggcgccggacttcgtgaagggcgggcgggcgatgcaggcggtgttcgaggcgatggaccggaggacagagatcgagccggacgacgtggacgcggcggcggtgccggagcggccccggggggaggttgagctgaagcacgtggacttcgcgtacccgtcgcggccggaggtgcaggtgttccgggacctgagcctgagggcgcgggcggggcggacgctggcgctggtgggggcgagcgggtgcggcaagagctcggtgctggcgctggtgcagcgcttctacgagcccaactccgggcgggtgctcctggacggccgggacctgcgcaagttcaacctgcggtccctgcgtcgcgccatggcgctggtgccgcaggagcccttccttttcgcggccaccatccacgacaacatcgcgtacgggcgcgagggggcgacggaggcggaggtggtggaggcggcgacggcggccaacgcgcacaagttcatatcggcgctgccggaggggtacgggacgttggtcggggagcgcggggtgcagctgtcgggcgggcagcgccagcggatcgccatcgcgcgggcgctggtgaagcaggcgcccatcctgctgctggacgaggccaccagcgcgctggacgccgagtcggagcggagcgtgcaggaggcgctcgcctcctcctctggctccggccgcaccaccatcgtggtggcccaccgtctggccaccgtccgcaacgcccacaccatcgccgtcatcgacgacggcaaggtggcggagcagggctcgcactcccacctgctcaaccaccaccccgatggctgctacgcgcgcatgctgcagctccagcgcctctcccactcccacgttgcgccgggcccctcctcctcaacaacaacacacggcacctag

SEQ ID NO: 60286 - protein, 1344 aa, Oryza sativa
MEEEIKGRVVVLGADAAADPELEAFHLPSADQPPHSHLLHHHHSPQSHPQPDAPAAAAPPPPAPLTPPPPKSPPPPPHIQTTDLPPPKPLPPAPLRQLFSFADGLDYVLMTLGTLGALVHGCSLPVFLRFFADLVDSFGSHAAHPDTMLRLVVKYAFYFLVVGAAIWASSWAEISCWMWTGERQSTRMRIRYLHAALHQDVSFFDTDVRTSDVIHAINADAVVVQDAISEKLGNLIHYLATFVSGFVVGFTAAWQLALVTLAVVPLIAVIGGLSAAALAKLSSRSQDALSDASGIAEQALAQIRIVQSFVGEERVMRAYSAALAVAQRIGYRSGFAKGIGLGGTYFTVFCCYALLLWYGGHLVRRAHTNGGLAIATMFSVMIGGLALGQSAPSMAAFAKARVAAAKIFRMMEHKPSMEREGGVELEAVTGRVELRDVEFSYPSRPDVGILRGLSLSVPAGKTIALVGSSGSGKSTVVSLIERFYEPNAGTILLDGHDLRDLNLRWLRRQIGLVSQEPALFATTIRENLLLGRDGATQEELEEAARVANAHSFIVKLPDAYNTQVGERGLQLSGGQKQRIAIARAMLRNPAILLLDEATSALDSESEKLVQEALDRFMIGRTTLVIAHRLSTIRKADLVAVLQGGAISEVGTHDELMARGDGTYARLIRMQEQAHEAALVAARRSSARPSSARNSVSSPIITRNSSYGRSPYSRRLSDADFITGLGLGVDSKQQQQQHYFRVQASSFWRLAKMNSPEWGYALVASLGSMVCGSFSAIFAYVLSAVLSVYYAPDAAYMDRQIAKYCYLLIGMSSAALLFNTVQHLFWDTVGENLTKRVRERMLAAVLRNEIAWFDMEDNSSARIAARLALDAQNVRSAIGDRISIIVQNSALMLVACTAGFVLQWRLALVLLAVFPLVVAATVLQKMFLKGFSGDLERAHARATQIAGEAVANVRTVAAFGSEAKIVGLFEANLAGPLRRCFWKGQIAGSGYGVAQFLLYASYALGLWYAAWLVKHGVSDFSKTIRVFMVLMVSANGAAETLTLAPDFVKGGRAMQAVFEAMDRRTEIEPDDVDAAAVPERPRGEVELKHVDFAYPSRPEVQVFRDLSLRARAGRTLALVGASGCGKSSVLALVQRFYEPNSGRVLLDGRDLRKFNLRSLRRAMALVPQEPFLFAATIHDNIAYGREGATEAEVVEAATAANAHKFISALPEGYGTLVGERGVQLSGGQRQRIAIARALVKQAPILLLDEATSALDAESERSVQEALASSSGSGRTTIVVAHRLATVRNAHTIAVIDDGKVAEQGSHSHLLNHHPDGCYARMLQLQRLSHSHVAPGPSSSTTTHGT

SEQ ID NO: 60287 - DNA, 1902 bp, Glycine max; identical to SEQ ID NO: 7665
  CDS (1)..(1902)

SEQ ID NO: 60288 - protein, 633 aa, Glycine max; identical to SEQ ID NO: 7666

SEQ ID NO: 60289 - DNA, 3867 bp, Glycine max; identical to SEQ ID NO: 7667
  CDS (1)..(3867)

SEQ ID NO: 60290 - protein, 1288 aa, Glycine max; identical to SEQ ID NO: 7668

SEQ ID NO: 60291 - DNA, 4140 bp, Zea mays; identical to SEQ ID NO: 7669
  CDS (1)..(4140)

SEQ ID NO: 60292 - protein, 1379 aa, Zea mays; identical to SEQ ID NO: 7670

SEQ ID NO: 60293 - DNA, 1947 bp, Zea mays; identical to SEQ ID NO: 7673
  CDS (1)..(1947)

SEQ ID NO: 60294 - protein, 648 aa, Zea mays; identical to SEQ ID NO: 7674

SEQ ID NO: 60295 - DNA, 1947 bp, Zea mays; identical to SEQ ID NO: 7677
  CDS (1)..(1947)

SEQ ID NO: 60296 - protein, 648 aa, Zea mays; identical to SEQ ID NO: 7678

SEQ ID NO: 60297 - DNA, 20 bp, Artificial sequence
  primer
atgcaagctataggtgctag

SEQ ID NO: 60298 - DNA, 23 bp, Artificial sequence
  primer
ttaaccacaacctgtcccatttg

SEQ ID NO: 60299 - protein, 277 aa, Artificial sequence
  consensus sequence
  Variant (2)..(2): Xaa in position 2 is any amino acid
  Variant (4)..(4): Xaa in position 4 is any amino acid
  Variant (6)..(20): Xaa in position 6 to 20 is any amino acid
  Variant (21)..(28): Xaa in position 21 to 28 is any or no amino acid
  Variant (30)..(34): Xaa in position 30 to 34 is any amino acid
  Variant (37)..(37): Xaa in position 37 is any amino acid
  Variant (40)..(40): Xaa in position 40 is any amino acid
  Variant (45)..(47): Xaa in position 45 to 47 is any amino acid
  Variant (49)..(50): Xaa in position 49 to 50 is any amino acid
  Variant (52)..(52): Xaa in position 52 is any amino acid
  Variant (54)..(56): Xaa in position 54 to 56 is any amino acid
  Variant (57)..(57): Xaa in position 57 is any or no amino acid
  Variant (59)..(61): Xaa in position 59 to 61 is any amino acid
  Variant (62)..(62): Xaa in position 62 is any or no amino acid
  Variant (64)..(74): Xaa in position 64 to 74 is any amino acid
  Variant (75)..(76): Xaa in position 75 to 76 is any or no amino acid
  Variant (78)..(81): Xaa in position 78 to 81 is any amino acid
  Variant (82)..(84): Xaa in position 82 to 84 is any or no amino acid
  Variant (86)..(86): Xaa in position 86 is any amino acid
  Variant (88)..(90): Xaa in position 88 to 90 is any amino acid
  Variant (93)..(98): Xaa in position 93 to 98 is any amino acid
  Variant (100)..(100): Xaa in position 100 is any amino acid
  Variant (101)..(102): Xaa in position 101 to 102 is any or no amino acid
  Variant (104)..(105): Xaa in position 104 to 105 is any amino acid
  Variant (106)..(129): Xaa in position 106 to 129 is any or no amino acid
  Variant (131)..(136): Xaa in position 131 to 136 is any amino acid
  Variant (137)..(138): Xaa in position 137 to 138 is any or no amino acid
  Variant (140)..(144): Xaa in position 140 to 144 is any amino acid
  Variant (145)..(171): Xaa in position 145 to 171 is any or no amino acid
  Variant (173)..(174): Xaa in position 173 to 174 is any amino acid
  Variant (175)..(178): Xaa in position 175 to 178 is any or no amino acid
  Variant (183)..(183): Xaa in position 183 is any amino acid
  Variant (186)..(188): Xaa in position 186 to 188 is any amino acid
  Variant (192)..(198): Xaa in position 192 to 198 is any amino acid
  Variant (199)..(199): Xaa in position 199 is any or no amino acid
  Variant (201)..(201): Xaa in position 201 is any amino acid
  Variant (208)..(209): Xaa in position 208 to 209 is any amino acid
  Variant (211)..(213): Xaa in position 211 to 213 is any amino acid
  Variant (215)..(220): Xaa in position 215 to 220 is any amino acid
  Variant (221)..(241): Xaa in position 221 to 241 is any or no amino acid
  Variant (246)..(246): Xaa in position 246 is any amino acid
  Variant (248)..(251): Xaa in position 248 to 251 is any amino acid
  Variant (253)..(253): Xaa in position 253 is any amino acid
  Variant (255)..(255): Xaa in position 255 is any amino acid
  Variant (257)..(258): Xaa in position 257 to 258 is any amino acid
  Variant (259)..(265): Xaa in position 259 to 265 is any or no amino acid
  Variant (267)..(268): Xaa in position 267 to 268 is any amino acid
  Variant (269)..(269): Xaa in position 269 is any or no amino acid
  Variant (271)..(271): Xaa in position 271 is any amino acid
  Variant (273)..(276): Xaa in position 273 to 276 is any amino acid
VXFXYXXXXXXXXXXXXXXXXXXXXXXXGXXXXXVGXSGXGKSTXXXLXXRXYXXXXGXXXXDXXXXXXXXXXXXXRXXXXXXXVXQXXXLFXXXXXXNXXXGXXXXXXXXXXXXXXXXXXXXXXXXXXAXXXXXXXXFXXXXXXXXXXXXXXXXXXXXXXXXXXXXXXXXGXXXXXXSGGQXQRXXXARAXXXXXXXXLXLDEATSXXDXXXEXXXXXXXXXXXXXXXXXXXXXXXXXXXAHRLXTXXXXDXIXVXXXXXXXXXGXXXEXGXXXXL

SEQ ID NO: 60300 - protein, 22 aa, Artificial sequence
  protein pattern
  Variant (2)..(6): Xaa in position 2 to 6 is any amino acid
  Variant (7)..(7): Xaa in position 7 is any or no amino acid
  Variant (10)..(10): Xaa in position 10 is any amino acid
  Variant (11)..(11): Xaa in position 11 is Ser or Thr
  Variant (13)..(13): Xaa in position 13 is any amino acid
  Variant (16)..(17): Xaa in position 16 to 17 is Ser or Thr
  Variant (18)..(21): Xaa in position 18 to 21 is any amino acid
  Variant (22)..(22): Xaa in position 22 is Ile, Leu, Met or Val
GXXXXXXVGXXGXGKXXXXXXX

SEQ ID NO: 60301 - DNA, 1857 bp, Thermus thermophilus
  CDS (1)..(1857): transl_table=11
atgccgcagcggttcaaccctttcaacctgctccttctcgtcctgttggggtatctcgtctacacggccctaagcggaccaccggcccccaccctcgcctacacggagttccgggagctggtgcgccaggggaaagtggcggaggtgaccctggaggagacccgcatcaccggtctcctcaaggccccggagcgcttccccacggcccaggggaccgtccaggtctcccggcgcttccaggttcccctgccccccgcccaggtccaagaccccgaactcctccgcttcctggaggaaaacggggtgacgatcgtgaccaaggccccctccatctggccccaggtcctcctctacgtgggccccacgctcatcctcatcgccttcttctggttcttcttcatgcgggcccaggggggcgcggggcaggtgatgcagttcggccagagccgggccaagctctacggcaaggaacgcaaggtgaacaccaccttcaaggacgtggccggccacgaggaggccaagcgggagctcatggaggtggtggacttcctcaagaacccgaagaagtacctggagatcggggccgagatccccaagggggtgctcctcgtgggcccacccggcacgggcaagaccctcctcgcccgggcggtggcgggggaggcgggggtgcccttcttctccgtctccgccagcgagttcatggagatgttcgtgggcgtgggggcgagccgggtgcggagcctctttgaggacgcccgcaggaacgccccgagcatcatcttcattgacgagctggactccatcggccgcaagcggggcgcggggatcgggggcggccacgacgagcgggagcagaccctgaaccagatcctctcggagatggacgggtttgagaaggacacctccgtcatcgtcctcgccgccaccaaccgccccgacatcctggaccccgccctccttagacccgggcgctttgaccgccaggtggtggtgggcctcccctccctggaggagcgcaaggagatcctcctcgtccacatgcggggcaagcccatcgccgaggacgtggacgccctggagctcgcccacctcaccccgggcttctccggggcggacctcaggaacctggtgaacgaggccgccctcctcgccgcccggaacggggagaagaggatccgcaaggagcacttcctcaaggccctggacaagatcgtcctcggcctggagcggtccgccctgaagctctccgaggaggaaaggcgggccgtggcctaccacgaggcggggcacgccgtggtgggggaggtcctgccccacgccgacaagacggagaaggtctccatcgtcccccgggggatggccctgggggcccgctggagcaagcccgaggagcgggtcctggtctcccgggagcacctcatggacgagctcgccgtgctcatggcgggccgggtggcggaggagctcttcacgggcaccgtgaccacgggggcccaggacgacttcaagcgggccacagggatcgccaagcggatggtcctggactggggcatgggggagcacttcaaaaacgtcgcctggggctcggactcggggcccgtcttcctcggggaggagatcgccaagaagaaggaccactccgaggagacggcccgcctcattgaccaggacatcatgaagatcctggacgaggcctacgagcgggccaggaaggtgctctccacccaccgggaggcggtgcacaagatcgccgaggagctcctccgggaggagaccatccccggggaccgggtgagggcgatcctccgggagacccaggcggtggagcgggccgaggacctagggcaggaataa

SEQ ID NO: 60302 - protein, 618 aa, Thermus thermophilus
MPQRFNPFNLLLLVLLGYLVYTALSGPPAPTLAYTEFRELVRQGKVAEVTLEETRITGLLKAPERFPTAQGTVQVSRRFQVPLPPAQVQDPELLRFLEENGVTIVTKAPSIWPQVLLYVGPTLILIAFFWFFFMRAQGGAGQVMQFGQSRAKLYGKERKVNTTFKDVAGHEEAKRELMEVVDFLKNPKKYLEIGAEIPKGVLLVGPPGTGKTLLARAVAGEAGVPFFSVSASEFMEMFVGVGASRVRSLFEDARRNAPSIIFIDELDSIGRKRGAGIGGGHDEREQTLNQILSEMDGFEKDTSVIVLAATNRPDILDPALLRPGRFDRQVVVGLPSLEERKEILLVHMRGKPIAEDVDALELAHLTPGFSGADLRNLVNEAALLAARNGEKRIRKEHFLKALDKIVLGLERSALKLSEEERRAVAYHEAGHAVVGEVLPHADKTEKVSIVPRGMALGARWSKPEERVLVSREHLMDELAVLMAGRVAEELFTGTVTTGAQDDFKRATGIAKRMVLDWGMGEHFKNVAWGSDSGPVFLGEEIAKKKDHSEETARLIDQDIMKILDEAYERARKVLSTHREAVHKIAEELLREETIPGDRVRAILRETQAVERAEDLGQE

SEQ ID NO: 60303 - DNA, 3132 bp, Glycine max
  CDS (789)..(2873)
  misc_feature (3107)..(3107): n is a, g, c or t
ctccttgaatttgataaaataattattgattcttacagtgtacaagtcagagcgtattttatagtacaaacataattctgtgacttgcgtgtatgattatgcaacatataattcggcttttccatcaatgaatagactcatgaactcttcaccatccacagtttctttttctatgagaagttgagcaagcttgtgaaggatatcaatgtgagttgagataatatgtgttgccctagaatatgctctctctaccagttccctcacttccgcatccactacatccgcagttgccatggagtaatccttttgcgatgacatctgttgacccaagaatggatttccaccaggtccaccaatggcaacttgtccaatttttttgctgaatccaaatctctcaaccatctgccttgccactcgtgaaacttgcatgaagtcgtttgatgctccggtggtgacattttcctggccaaaaataacctcttcggcaacccttccacccagggcaacagccatctgattttcaaggtaacttctactgtacaatccagactcgagcctctcttcgctgggagcaaaaaatgtgagaccaccagcttggccaagatatcaattattcctcgtggctacagggtcatattcaggcattatcacgtacacgcgagagaagaccaggaaaaatctatggcatagaatccagcaagtcgggcatatatagacgctttgtcggaaacggtgagggtgtgtttcaaaatcgaaaatctagagcaaagtgattgattccagttccaatggccttgggcaccagcgccttgatcggaaggaaggttcttgtctcacccccaacccccaaaacaaccaaatcatctactccgctacaattccttttcaagagaagcatcttaaatgctcacaattcacaagctgctctagctgcccttatcttttcctccgcgagcctctctgtgaccccacaagcccttgccgctgataacgtcacccctccccctgtaattgaagcccaacagagccaattaaacccctccaactcatcctcccctttctcacagaacctcctcctcacagctccaaagccacaagcctcctccgacctccccgaaggcaccaactggcgctacagcgagttcttgaacgccgtcaagaagggtaaagtcgagcgagtcaggttcagcaaagacggttccgccctccagctaaccgccattgacggccgtcgcgcctccgttattgtccccaatgacccggacctcatcgacatcctcgccatgaacggcgtcgacatttccgtcgccgagggcgaatcccccaacagcttgttcaacatcataggcaacttgctcttccccttactcgcattcgcgggcctgttcttcctcttccgcagagcccaaggcgggcccggcgggcctggcgggctgggagggcccatggacttcgggcggaacaagtccaagttccaggaagtccccgagaccggcgtgagcttcgctgacgtggcaggcgcggaccaagcgaagcttgaattacaagaggttgttgatttcttgaagaatcccgataagtacaccgcgctgggcgcgaagattccgaaagggtgtcttttggtgggcccaccgggaaccggaaagacccttctggcgagggctgtggcgggggaagctggggtgccgtttttctcgtgcgcggcttcggagttcgttgaactttttgtgggagttggtgcgtcgagggtgagagatttgtttgagaaggcgaaggggaaggcgccgtgcattgttttcattgatgagattgacgccgttgggaggcagagaggggcggggctcggaggtgggaatgacgagagggaacagactattaaccagcttctgacggagatggatggcttttctggcaattctggtgttattgttttggctgccactaacagaccggatgttcttgattcggcgttgttgaggcctggccggttcgacaggcaagttactgtggatagacctgatgttgccggcagagttaaaattcttcaggtgcattctagaggaaaagcacttgcaaaggatgttgactttgaaaaaattgcaaggagaacccctggattcactggggctgatctgcagaatctgatgaatgaagcggctattcttgcagccaggcgtgacctcaaggaaataagtaaagatgagatatctgatgcgcttgaaaggatcatagctggacctgagaagaaaaatgctgttgtctcagatgagaagaagaaattagtagcctatcatgaggctggccatgctctagtgggtgctttaatgccagaatatgaccctgtagccaagatatcaattattcctcgtggccaagctggtggtctcacattttttgctcccagcgaagagaggctcgagtctggattgtacagtagaagttaccttgaaaatcagatggctgttgccctgggtggaagggttgccgaagaggttatttttggccaggaaaatgtcaccaccggagcatcaaacgacttcatgcaagtttcacgagtggcaaggcagatggttgagagatttggattcagcaaaaaaattggacaagttgccattggtggacctggtggaaatccattcttgggtcaacagatgtcatcgcaaaaggattactccatggcaactgcggatgtagtggatgcggaagtgagggaactggtagagagagcatattctagggcaacacatattatctcaactcacattgatatccttcacaagcttgctcaacttctcatagaaaaagaaactgtggatggtgaagagttcatgagtctattcattgatggaaaagccgaattatatgttgcataatcatacacgcaagtcacagaattatgtttgtactataaaatacgctctgacttgtacactgtaagaatcaataattattttatcaaattcaaggagaaaaaacaattagcacagcagcttacgcaataaataaataaaaaatatggttctacggctgagttacactttcgaatgagcagatcataacgaactgtatacaagtatagaacgatttcaactgctgaaaccccattnttttaacagaatgttatgaacctat

SEQ ID NO: 60304 - protein, 694 aa, Glycine max
MALGTSALIGRKVLVSPPTPKTTKSSTPLQFLFKRSILNAHNSQAALAALIFSSASLSVTPQALAADNVTPPPVIEAQQSQLNPSNSSSPFSQNLLLTAPKPQASSDLPEGTNWRYSEFLNAVKKGKVERVRFSKDGSALQLTAIDGRRASVIVPNDPDLIDILAMNGVDISVAEGESPNSLFNIIGNLLFPLLAFAGLFFLFRRAQGGPGGPGGLGGPMDFGRNKSKFQEVPETGVSFADVAGADQAKLELQEVVDFLKNPDKYTALGAKIPKGCLLVGPPGTGKTLLARAVAGEAGVPFFSCAASEFVELFVGVGASRVRDLFEKAKGKAPCIVFIDEIDAVGRQRGAGLGGGNDEREQTINQLLTEMDGFSGNSGVIVLAATNRPDVLDSALLRPGRFDRQVTVDRPDVAGRVKILQVHSRGKALAKDVDFEKIARRTPGFTGADLQNLMNEAAILAARRDLKEISKDEISDALERIIAGPEKKNAVVSDEKKKLVAYHEAGHALVGALMPEYDPVAKISIIPRGQAGGLTFFAPSEERLESGLYSRSYLENQMAVALGGRVAEEVIFGQENVTTGASNDFMQVSRVARQMVERFGFSKKIGQVAIGGPGGNPFLGQQMSSQKDYSMATADVVDAEVRELVERAYSRATHIISTHIDILHKLAQLLIEKETVDGEEFMSLFIDGKAELYVA

SEQ ID NO: 60305 - DNA, 2455 bp, Sorghum bicolor
  CDS (100)..(2169)
aaaaaaaaaaaatacaacggtcccgcctcccacctcagtacctctacctcacccacccagccatcccccaagaaggcaagaactatctactcatcagccatggcgccgccgtcggtgtcgtcctcccacctcctcatcaccgcctcgctcccaaagcccaagccttcctccctccgcccgccgcggctccctctcgccaagcccctccccacgggtgcggcgctcctcgctctcgcggcctcgcccgcgctcgccgccgacgcgcctacccccgccccggttcccccggctccggctcccgcgcccgagctccaggccgaggcgcccacgccgaccgccaatcccttctccacctccctcctgacagcccccaagccctccgcggcggcctccgacctccccgagggcgcgcagtggcggtacagcgagttcttgtccgccgtcaagcggggaaaagtcgagcgcgtgcgcttcaccaaggacgggggcctgctccagctgacggccgtcgacggccgccgcgccaccgtggtggtccccaacgacccggacctcattgacatcctcgccaccaacggcgtcgacatctccgtctccgagggcgagtccgctggccccggcggcttcgtcgccttcgtcggcaacctcctcttcccgttcctcgccttcgcgggcctcttcttcctcttccgccgcgcgcagggcgggcctggcgctggccccggcgggctcggcgggcccatggacttcggccgctccaagagcaagttccaggaggtgcctgagacgggcgtcacgttcctcgacgtcgctggtgcggaccaggccaagctcgagctgcaggaggtcgttgatttccttaagaaccccgataagtacaccgcgctcggagccaagatccccaaggggtgcctcctcgttggtccgcctgggactgggaagaccctcctcgcgcgtgccgtcgctggggaggctggggtgcccttcttctcctgcgcggcctctgagttcgtcgagctcttcgtcggtgtcggtgcctccagggtgcgcgacctcttcgagaaggccaaggccaaggcgccctgcattgtcttcattgatgagattgatgccgtcgggaggcagcgtggtgccggacttggtgggggtaatgacgagagggagcagaccattaatcagctcttgacggagatggatggcttcgctggcaacagcggtgtcattgtgcttgccgccaccaataggcctgatgtgctggactcggcactcctccggccagggaggttcgataggcaggtcaccgttgacaggccagatgttgcagggcgcgtcaagattcttgaggttcactcccgaggaaaggctttggcaaaagatgtcgactttgagaaaattgctagaaggactcctggtttcactggtgctgacctccaaaacctcatgaatgaggctgccatccttgctgctcgccgtgatcttaaggaaattagcaaggatgagatctctgatgctcttgagagaatcattgctggccccgagaagaaaaatgctgttgtttctgaggagaagaagaggcttgtcgcttaccatgaggctggtcatgcccttgttggcgccctcatgccagagtatgatccagtagccaagatttccatcattcctcgtggacaggctggtggactcacattctttgccccaagcgaagaaaggctagaatctggattgtacagcaggagctatcttgagaaccaaatggctgtagcccttggtggcagggttgctgaagaggtgatctttggccaagaaaatgtgacaacaggagcttccaacgattttatgcaagtgtcacgtgtcgcaagacaaatggtcgaaagatttggattcagtaagaagatcggccaagttgcgattgggggacctggtggaaaccctttcttggggcaacagatgtcgagccagaaggactactcgatggcaactgctgatgttgtggatgctgaggtgagggaactcgtggagaaggcctactctagagcaacgcagatcatcaccacgcacattgacatcctccacaagctcgctcaactcctgatcgagaaggagactgtggacggggaggagttcatgagcttgttcattgacggccaggctgagttgtttgtcgcttgagaattgagatatcacaaggcgtacggctagctagctcgtcgcagtgtatatgcttttgagtgatttgtgcgagagcaatcacaaagggaaatggagagcccagcttgtaggaaccacattgatgtagccaaagatgtttttgcatacctgtatagcactagctgattgtaaaaagcatctactgactttgagcaagtaaaatgtcactgcttacaattatagcacacggttgacctgtctccagtgaaaatagatatgctcatctcatgctactgggctaaaaaaa

SEQ ID NO: 60306 - protein, 689 aa, Sorghum bicolor
MAPPSVSSSHLLITASLPKPKPSSLRPPRLPLAKPLPTGAALLALAASPALAADAPTPAPVPPAPAPAPELQAEAPTPTANPFSTSLLTAPKPSAAASDLPEGAQWRYSEFLSAVKRGKVERVRFTKDGGLLQLTAVDGRRATVVVPNDPDLIDILATNGVDISVSEGESAGPGGFVAFVGNLLFPFLAFAGLFFLFRRAQGGPGAGPGGLGGPMDFGRSKSKFQEVPETGVTFLDVAGADQAKLELQEVVDFLKNPDKYTALGAKIPKGCLLVGPPGTGKTLLARAVAGEAGVPFFSCAASEFVELFVGVGASRVRDLFEKAKAKAPCIVFIDEIDAVGRQRGAGLGGGNDEREQTINQLLTEMDGFAGNSGVIVLAATNRPDVLDSALLRPGRFDRQVTVDRPDVAGRVKILEVHSRGKALAKDVDFEKIARRTPGFTGADLQNLMNEAAILAARRDLKEISKDEISDALERIIAGPEKKNAVVSEEKKRLVAYHEAGHALVGALMPEYDPVAKISIIPRGQAGGLTFFAPSEERLESGLYSRSYLENQMAVALGGRVAEEVIFGQENVTTGASNDFMQVSRVARQMVERFGFSKKIGQVAIGGPGGNPFLGQQMSSQKDYSMATADVVDAEVRELVEKAYSRATQIITTHIDILHKLAQLLIEKETVDGEEFMSLFIDGQAELFVA

SEQ ID NO: 60307 - DNA, 2446 bp, Nicotiana tabacum
  CDS (21)..(2165)
aacaccttccaaaaatagttatggccaattctctcctctcttccaacttcatgggttctcaaatctttgtctctcctcccacccctaaaacaacaaagtatttccattttcactccaaaagaaagtctttaatccctcaatcaattctcaacaaaaaacccaattcagataattcaaagaatattccttcaaaagctgctttagctgctttactcttttcttcaatcactccacatgcctatgctcttgataatactacccctacagtaccaacccctcaagtgattcaagctgaagcagccaatcccaccacttcaaatccattctctcaaaatataatcttgaatgctccaaagcctcaagcacagaccaatcctgaacttccagaagtttctcaatggagatacagtgaattcttgaatgctgtgaaaaagggtaaagttgaaagggtccgattcagtaaagacggatctgccctcctgcttactgctgttgatggccgtagagctactgtaactgtgcctaatgacccggatttaattgacattttggctatgaatggtgttgatatatcagtttctgaaggtgattctgctggtaatgggttgtttaatttaattggaaatttattcccttttattgcttttgctggattgttctatcttttccagagatctcaaggtgggcctggtgggccaggtgggcttggtggccccatggattttggtaggtcaaagtcaaagtttcaagaagttcctgaaactggagtgacttttgctgatgttgctggtgctgatcaagctaaattggagttacaagaagtggttgattttttaaagaatcctgataagtatactgctttaggtgctaaaataccaaaagggtgtcttttggtgggaccacctggtacaggaaagacacttttggctagagcagttgctggtgaagctggtgtaccatttttctcatgtgcagcatcagagtttgttgagttgtttgttggtgttggagcttctagagtgagggatttgttcgagaaggcgaagtcgaaagcgccttgcattgtgtttattgatgagattgatgctgtggggaggcagagaggtgcaggaatgggaggtgggaatgatgagagagagcagactattaatcaactcttgactgaaatggatgggttttctggaaatagtggagtaattgttttggctgcaaccaataggcctgatgttcttgattctgcattgttgagacctgggaggttcgatcgacaagtgactgtcgacaggcctgatgttgctggtagaatcaagattcttcaggtgcattctagaggaaaggcccttgcaaaggatgtggactttgagaagattgccaggagaacaccgggtttcactggtgcagatttgcaaaacttgatgaatgaagcagcgatccttgcagctaggcgtgaactaaaggaaataagtaaaaatgagatatctgatgctttggagaggataattgctggaccggagaagaaaaatgctgttgtctcagaggagaagaagaagctggtagcttatcatgaggccgcccatgccttggttggtgcacttatgcccgagtatgatcctgttcccaagatatctattattcctcggggccaagctggtggtcttaccttctttgcccctagcgaagaaagacttgagtcgggcttgtacagcaggagctacctagagaatcaaatggcagttgcacttggtggaagggttgctgaggaggttatttttggacaagacaacgtaacaactggggcatctaacgatttcatgcttgtttcacgagtggcaaggcagatggttgagagattagggttcaccacaaagatcggacaggttgccattggaggaggtggaggaaatcctttcctaggtcaacagatgtcaacccagaaagactactccatggcaacagccgatgtggttgatgctgaagtaagggaattggttgaaagagcatatgaaagggcaacacagattatcacaacacacattgacatcctacacaagcttgctcagctgttgatagagaaagaaactgttgatggtgaagagttcatgagccttttcatcgatggcaaggccgagctatacatttcttgggtctctaaggaggaggattagtttctggcttaacaagacttgatgtatctggtggttgagagtggtaaattgctgatgcaagagaaataggcataatacatagtgctttagactgaagaaattgcattgcagaaccaacattttcttccataagtttggccacttgcctttctgtaccatcacttgaccacttttcccaggctggttggttatttccaacttcactgctctcttcctaaataagacaagccacaaaaagggataaattattaattgataggttggacaattctgcaaaaaaa

SEQ ID NO: 60308 - protein, 714 aa, Nicotiana tabacum
MANSLLSSNFMGSQIFVSPPTPKTTKYFHFHSKRKSLIPQSILNKKPNSDNSKNIPSKAALAALLFSSITPHAYALDNTTPTVPTPQVIQAEAANPTTSNPFSQNIILNAPKPQAQTNPELPEVSQWRYSEFLNAVKKGKVERVRFSKDGSALLLTAVDGRRATVTVPNDPDLIDILAMNGVDISVSEGDSAGNGLFNLIGNLFPFIAFAGLFYLFQRSQGGPGGPGGLGGPMDFGRSKSKFQEVPETGVTFADVAGADQAKLELQEVVDFLKNPDKYTALGAKIPKGCLLVGPPGTGKTLLARAVAGEAGVPFFSCAASEFVELFVGVGASRVRDLFEKAKSKAPCIVFIDEIDAVGRQRGAGMGGGNDEREQTINQLLTEMDGFSGNSGVIVLAATNRPDVLDSALLRPGRFDRQVTVDRPDVAGRIKILQVHSRGKALAKDVDFEKIARRTPGFTGADLQNLMNEAAILAARRELKEISKNEISDALERIIAGPEKKNAVVSEEKKKLVAYHEAAHALVGALMPEYDPVPKISIIPRGQAGGLTFFAPSEERLESGLYSRSYLENQMAVALGGRVAEEVIFGQDNVTTGASNDFMLVSRVARQMVERLGFTTKIGQVAIGGGGGNPFLGQQMSTQKDYSMATADVVDAEVRELVERAYERATQIITTHIDILHKLAQLLIEKETVDGEEFMSLFIDGKAELYISWVSKEED

SEQ ID NO: 60309 - DNA, 1935 bp, Klebsiella pneumoniae subsp. pneumoniae MGH 78578
  CDS (1)..(1935): transl_table=11
atggcgaaaaacctaatactctggctggtcattgccgttgtgctgatgtcagtattccagagctttgggcccagcgagtcgaatggccgcaaggtggattattctaccttcctgcaagaggtcaatcaggaccaggttcgcgaagcgcgtatcaacggacgtgagatcaacgttaccaagaaagatagtaaccgttacacgacttacattccggttaacgatccgaagctgctcgataacctgttgactaaaaacgtcaaagttgttggcgaaccaccagaagagccgagcctgctggcttccatcttcatctcctggttcccaatgctgctgctgatcggcgtctggatcttctttatgcggcaaatgcagggcggcggcgggaagggcgcgatgtccttcggcaaaagcaaagcccgtatgttgacggaagaccagatcaaaaccacttttgcagacgttgccgggtgtgacgaagcgaaagaggaagtcggcgagctggtagaatacctgcgtgagccgagccgcttccagaaactgggcggtaaaatcccgaaaggcgtcctgatggtcggccctccgggtaccggtaaaacgctgctggcgaaagcgatcgctggtgaagcgaaggtaccgttctttaccatttccggttctgacttcgtcgaaatgttcgtcggtgtgggcgcttctcgtgtgcgtgacatgttcgaacaggctaagaaagccgcgccttgcatcatcttcatcgatgaaatcgacgccgtcggccgccagcgtggcgcaggcctgggcggtggtcacgatgaacgtgagcagaccctgaaccagatgctggttgagatggacggcttcgaaggtaacgaaggtatcatcgttatcgcggcgactaaccgtccggacgttcttgaccccgcgctgttgcgtccgggccgttttgaccgccaggtggtggttggcctgccggatgttcgcggtcgtgagcagatcctgaaagtgcatatgcgtcgcgttccgctggcgccggatatcgatgcggcaatcattgcgcgcggtaccccgggcttctccggtgcggatctggccaacctggtcaacgaagcggcgctgtttgctgcccgcggcaacaaacgcgttgtgtcgatggttgagttcgagaaagcgaaagacaaaatcatgatgggtgcggaacgtcgctccatggtgatgacggaagcgcagaaagagtctactgcttatcatgaagcgggccacgcgattattggtcgcctggtgccggagcacgatccggtgcacaaagtgacgattatcccgcgcggtcgtgcgctgggtgtgaccttcttcctgccggaaggcgatgcaatcagcgccagccgtcagaaactggaaagccagatctccaccctgtacggcggtcgtctggcggaagagattatctacggtccggaacatgtttctaccggtgcgtccaacgatattaaagtggcgacgaacctggcgcgtaacatggtgacccagtggggcttctccgacaaactcggtccgctgctgtatgcggaagaagagggtgaagtcttcctcggccgtagcgtcgcgaaagcgaagcatatgtccgatgaaaccgcgcgtatcatcgaccaggaagtgaaatcgctgattgagcgtaactacggtcgtgctcgccagctgctgaacgacaacatggacattctgcacgcgatgaaagatgcgctcatgaagtatgagaccatcgatgcgccgcagattgacgacctgatggctcgtcgcgaagttcgtccgccagcgggttgggaagaaccaggttcttctaacaactctgacaacaatggcacgcctcgtgcgccgcgtccggttgatgaaccgcgtacgccgaacccgggcaacaccatgtcagagcagctgggcgacaagtaa

SEQ ID NO: 60310 - protein, 644 aa, Klebsiella pneumoniae subsp. pneumoniae MGH 78578
MAKNLILWLVIAVVLMSVFQSFGPSESNGRKVDYSTFLQEVNQDQVREARINGREINVTKKDSNRYTTYIPVNDPKLLDNLLTKNVKVVGEPPEEPSLLASIFISWFPMLLLIGVWIFFMRQMQGGGGKGAMSFGKSKARMLTEDQIKTTFADVAGCDEAKEEVGELVEYLREPSRFQKLGGKIPKGVLMVGPPGTGKTLLAKAIAGEAKVPFFTISGSDFVEMFVGVGASRVRDMFEQAKKAAPCIIFIDEIDAVGRQRGAGLGGGHDEREQTLNQMLVEMDGFEGNEGIIVIAATNRPDVLDPALLRPGRFDRQVVVGLPDVRGREQILKVHMRRVPLAPDIDAAIIARGTPGFSGADLANLVNEAALFAARGNKRVVSMVEFEKAKDKIMMGAERRSMVMTEAQKESTAYHEAGHAIIGRLVPEHDPVHKVTIIPRGRALGVTFFLPEGDAISASRQKLESQISTLYGGRLAEEIIYGPEHVSTGASNDIKVATNLARNMVTQWGFSDKLGPLLYAEEEGEVFLGRSVAKAKHMSDETARIIDQEVKSLIERNYGRARQLLNDNMDILHAMKDALMKYETIDAPQIDDLMARREVRPPAGWEEPGSSNNSDNNGTPRAPRPVDEPRTPNPGNTMSEQLGDK

SEQ ID NO: 60311 - DNA, 1923 bp, Xanthobacter autotrophicus Py2
  CDS (1)..(1923): transl_table=11
atgaacgccaatctacgcaatttcgccctttgggtgatcatcgtcctcctgcttcttgccctgttctcgctgttcaacagcccggggcagcgcacgaacgcgaacgagatctccttctcgcagctcctcaacgacgttgacgccggcaaggtgcgcgaggtcgtgatcgaggggccgaatatcaccggcacctattccgaccgttccggcagcttccagacctacgcgccgaacgatccgtccctcgtgcagcggctgtacggcaagggcgtgcagatcaccgcccgcgcgccgtcggacaatgtgccgtggttcgtgagcctgctggtgtcctggctgccgttcctggccctcatcggcgtgtggatcttcctgtcgcgccagatgcagggcgctggcggcaaggccatgggcttcggcaagagccgcgccaagctgctgaccgaggcgcacggccgcgtcaccttcgacgacgtggccggcatcgacgaggccaagagcgacctcaccgagatcgtggacttcctgcgtgacccgcagaaattccagcgcctcggcggccgcatcccgcgcggcgtgctgctggtcggccctcctggtaccggcaagacgctgctggcccgcgccatcgccggcgaggccaacgtgccgttcttcaccatctccggctcggacttcgtggagatgttcgtgggcgtcggcgccagccgcgtgcgcgacatgttcgagcaggcgaagaagaacgcgccctgcatcatcttcatcgacgagatcgacgcggtgggtcgccatcgcggcgccggcctgggcggcggcaatgacgagcgtgagcagaccctcaaccagctgctggtggagatggacggcttcgaggcgaacgagggcatcatcctcatcgccgccaccaaccgtccggatgtgctcgatccggcgctgctgcgtcccggccgcttcgaccgccaggtcatcgtgccgaacccggacgtggtgggccgcgagcagatcctgaaggtgcacgcccgcaagatcccggtcgccccggacgtgaacctgaagaccatcgcccgcggcacccctggcttctccggcgcggaccttgccaacctctgcaacgaggcggcgctgatggcggcccggcgcaacaagcgcatggtcaccatggccgagttcgaggacgccaaggacaaggtcatgatgggcgcggaacgccgctccctcgtcatgaccgaggaagagaagatgctgaccgcctatcacgagggcggccacgccctcgtggcgctgaaggtgccggccaccgacccggtgcacaaggccaccatcattccgcgtggccgggccctcggcatggtcatgcagctgcccgagcgggacaagctttccatgtcctacgagcagatgacctcgcgccttgccatcatcatgggcgggcgcgtggcggaagagctgatcttcggccacgacaaggtgacctccggcgccgcctccgatatcgagcaggcgacccgcctcgccaagctgatggtgacgcgctggggcttctcggcggatctcggcaccgtggcctatggcgacaaccaggacgaggtgttcctgggcatgtcggtgtcgcgccagcagaacgtgtccgaggccaccgcccagaccatcgaccgcgaggtgcgtcgcctcgtggacgagggccacgccgaggccaagcgcatcctcaccgagcaccaggacgaacttgagatcctggcgcgcggcctgctggaatacgagacgctctcgggcgacgagatcatcgaccttctggacggcaagacgccgaaccgggaaagcgtgatcgagccgtcgaacccgcgcagctcgggcattcccaccaccaagcgcccccgtcagggcggcgccggcggctccatcgagccccagccccaggcctga

SEQ ID NO: 60312 - protein, 640 aa, Xanthobacter autotrophicus Py2
MNANLRNFALWVIIVLLLLALFSLFNSPGQRTNANEISFSQLLNDVDAGKVREVVIEGPNITGTYSDRSGSFQTYAPNDPSLVQRLYGKGVQITARAPSDNVPWFVSLLVSWLPFLALIGVWIFLSRQMQGAGGKAMGFGKSRAKLLTEAHGRVTFDDVAGIDEAKSDLTEIVDFLRDPQKFQRLGGRIPRGVLLVGPPGTGKTLLARAIAGEANVPFFTISGSDFVEMFVGVGASRVRDMFEQAKKNAPCIIFIDEIDAVGRHRGAGLGGGNDEREQTLNQLLVEMDGFEANEGIILIAATNRPDVLDPALLRPGRFDRQVIVPNPDVVGREQILKVHARKIPVAPDVNLKTIARGTPGFSGADLANLCNEAALMAARRNKRMVTMAEFEDAKDKVMMGAERRSLVMTEEEKMLTAYHEGGHALVALKVPATDPVHKATIIPRGRALGMVMQLPERDKLSMSYEQMTSRLAIIMGGRVAEELIFGHDKVTSGAASDIEQATRLAKLMVTRWGFSADLGTVAYGDNQDEVFLGMSVSRQQNVSEATAQTIDREVRRLVDEGHAEAKRILTEHQDELEILARGLLEYETLSGDEIIDLLDGKTPNRESVIEPSNPRSSGIPTTKRPRQGGAGGSIEPQPQA

SEQ ID NO: 60313 - DNA, 2148 bp, Oryza sativa (japonica cultivar-group)
  CDS (1)..(2148)
atggcgtggcggcgcgtcctttcgcaggtcgcaaggaaccgatccgcatatgcaatctgcaatgaaataatatatgccaacccatcgaggattcttagaggtgacaccatagcaggtggaacacttagaaacttacatgagaggtatcagtcaagctatgttggtagctttgcacgcaggatgcgacagatggactcaccaagtgaagcctctctgctgaaagaaatatataggagtgatccagaacgtgtcatacagatatttgaaagccaaccttcattgcattccaatccttcagcacttgctgagtatgtaaaagctcttgtcagggttgataggttggaggatagcaccttgctgaaaacattgcagagaggaattgctgcttcagcaagggaggaagaaaaccttggtagtgtttcagaaaatcttggtagtgtttcagcatttagaagtgctggtcaagtgacaaaagatggaattcttggcactgcaaatgcacccattcacatggttacagcagaaacaggtcaatttaaggaacagctttggcgtacctttcgaagtatagcgctaacattcctcctgatttctggcattggagctcttattgaggatagaggaataagcaaaggccttggtctaaatgaagaggttcaaccaagcatggaatctaatacgaaattcagtgatgtaaagggtgtcgatgaagccaaagctgaacttgaggaaatagttcactacctccgagatcccaagcgttttacacgtcttggtggaaaactgccaaaaggtgtcttgctggttggtcctcctggcactggaaagaccatgttagcaagggctattgctggggaagctggtgttcctttcttctcatgcagtggtagtgaatttgaggagatgtttgtaggcgtaggagctagaagagtcagggacctttttgctgcagctaaaaaacgttctccctgtatcatattcatggatgaaattgatgcgatcggtgggagtagaaatccaaaggatcaacagtatatgaagatgacgttgaaccagttgcttgtcgagctggatggctttaagcagaatgaggggataattgttattgctgcaaccaactttcctgagtccctagataaagcactagtgagacctgggcgctttgaccggcatattgttgttccaaatccagatgttgaaggccggcggcaaatcctagagtcccatatgtcaaaggtcttgaagagtgatgatgtggatttgatgatcattgccaggggaacacctggattctcaggtgcagaccttgctaacttggttaatgtggctgctcttaaagctgccatggatggggcaaaagccgttacaatgaatgatcttgagtatgccaaggaccggatcatgatgggcagtgagcgcaagtcagcagttatttctgatgaatcccggaaattgacggcgtaccatgagggagggcacgcccttgttgccatccacactgaaggtgctcaccctgttcacaaagctaccatagttcccaggggaatggcccttggaatggtggcccaactcccggataaagatgagacaagcgtgtcacggaaacagatgctggcaaggctggatgtgtgcatgggagggcgggtggcggaggagcttatttttggggatagcgaggtgacatctggcgcttcatctgattttcagcaagcaactgcagtggcaagagcaatggtaaccaaatatggtatgagcaagcagcttggctttgtttcttacaattatgaggatgatggaaagagcatgagcaccgaaacgagactcctgattgagaaggaggtcaagtgtttcgtggagaatgcttacaacaatgcaaagaatattctcatcaaacacaacaaggagctccatgctctagccaatgcgctgcttgagcacgagacgctcaccggtgcccaaataaagaacatattggcccaagtaaacaacaagcagcagcaggagcatgctattgaagctccacagaagacaccagctgtaccatcatctccagctgcatcagctgcagcggcagcggcagctgcagcagccgcagcacagcaagctgcagcgaaagcgaagggtgaaatcgccggtatcggatcttag

SEQ ID NO: 60314 - protein, 715 aa, Oryza sativa (japonica cultivar-group)
MAWRRVLSQVARNRSAYAICNEIIYANPSRILRGDTIAGGTLRNLHERYQSSYVGSFARRMRQMDSPSEASLLKEIYRSDPERVIQIFESQPSLHSNPSALAEYVKALVRVDRLEDSTLLKTLQRGIAASAREEENLGSVSENLGSVSAFRSAGQVTKDGILGTANAPIHMVTAETGQFKEQLWRTFRSIALTFLLISGIGALIEDRGISKGLGLNEEVQPSMESNTKFSDVKGVDEAKAELEEIVHYLRDPKRFTRLGGKLPKGVLLVGPPGTGKTMLARAIAGEAGVPFFSCSGSEFEEMFVGVGARRVRDLFAAAKKRSPCIIFMDEIDAIGGSRNPKDQQYMKMTLNQLLVELDGFKQNEGIIVIAATNFPESLDKALVRPGRFDRHIVVPNPDVEGRRQILESHMSKVLKSDDVDLMIIARGTPGFSGADLANLVNVAALKAAMDGAKAVTMNDLEYAKDRIMMGSERKSAVISDESRKLTAYHEGGHALVAIHTEGAHPVHKATIVPRGMALGMVAQLPDKDETSVSRKQMLARLDVCMGGRVAEELIFGDSEVTSGASSDFQQATAVARAMVTKYGMSKQLGFVSYNYEDDGKSMSTETRLLIEKEVKCFVENAYNNAKNILIKHNKELHALANALLEHETLTGAQIKNILAQVNNKQQQEHAIEAPQKTPAVPSSPAASAAAAAAAAAAAAQQAAAKAKGEIAGIGS

SEQ ID NO: 60315 - DNA, 2409 bp, Oryza sativa (japonica cultivar-group)
  CDS (1)..(2409)
atgagcctctcctccctctcccgcgccctcgcccggtccgcgcgctcctcccggcagcgccagggttctctgctcggggggcatggcgggctccgtgcttcgtcgccgccgctgccctgcggcgagttgggttttctgcgcagctatgtgacgtcagttatcgggaatcgggcagcggtggcctccggggcagggaagggtggggactggaggttcctgcttgctagccggcagttccggcggctattctccgacaagtcgaagaaaaaccacgggaagcattcggaggaggagaataaaggtaaaggggatgagagtgacaagtccgactcaaagaagcaatccagttcaggtgatcaatggaatttcgaggagagcattaaacaattcaaggacatgattgctcctttattcctttttggcctattattgttatctgcatcagcatcttcatcagagcaggagataagcttccaagaattcaagaataagttgttggaacctggtttagttgaccacattgttgtttcaaacaagtcaattgctaaggtttacgtcaggagttcaccttcaattgatcgaattcaggatagtgatatccatataactacaagtcatcttcctgggatagagtctcctagcagctacaagtattacttcaatattggaagtgttgactcctttgaagagaagttacaagaggcccagaaagcattggagatagatccacactattatgtcccaatcacttacactactgaagcaaaatggtttgaggaagtaatgaagtatgtcccaaccgttctaattattggattaatatatttgcttgggaaaaggatacaaaatggatttactgttgggggtggtcctgggaaaggaggccgtagcattttcagtattggaaaagttcaagtgacaaaattggataaaaactccaaaaataaggtgttctttaaggatgtagctggctgtgatgaagccaaacaagaaattatggaatttgttcatttcctgaaaaatcccaagaaatatgaagaactgggagcaaaaataccaaagggtgctcttcttgttggtcccccaggcacaggaaagactctccttgctaaagctactgcaggagagtctggtgtgcccttcttgtctatttctggttcagacttcatggaaatgtttgttggtgttggaccatccagggtgcggaacttatttcaagaagctcggcagtgttcacctagtattgtattcattgatgaaattgatgcaatcggccgtgctagaggccgtggaggtttttctggtggacatgatgagcgtgaaagcacattgaaccagttacttgtagagatggatgggtttggaactacatctggtgttgttgttcttgctggtaccaataggcctgacatcctggataaggctttgctaagaccaggaagatttgatcgtcagataagtattgataaaccagacataaagggtcgtgatcaaatatttcgcatctaccttaaaaagctgaaactggacaaggaaccatcattttattcacaaagattagctgctttgacacctggatttgctggagctgacattgccaatgtttgtaatgaggcagctttaattgctgcaagaagtgagggcacactcattacaatgcaacattttgaatctgcaattgatagggttatcggaggcttggaaaagaaaaacaaggtgattagcaagttggagcggcgaactgttgcttaccatgaatctggtcatgctgttgctggatggtttttggagcatgccgagccactactgaaggtcacaattgttcctcgtggaacagctgctttaggttttgctcagtatgtgccaaatgacaatcttttgatgactaaagagcagctttttgacatgacctgcatgacactaggtggccgagctgctgaggaggtcttgattggaaagatctcgactggtgcacagaatgatctggagaaagttactaagatgacttatgcccaggttgcagtatatggcttcagcgaaaaggttggccttctttctttccctcaaagggaggatggttttgagatgagcaaaccatatagcagccagacggcatccatcattgacactgaggtgagggaatgggtcgctaaggcctatgaaaaaactgttgagcttataaaacaacataaagatcaagttgcacaaatcgccgagctgctgcttgagaaagaggttctccaccaggatgatcttgtccaggttctaggggaacgcccattcaagacactcgagccaactaattatgatcgattcaaacaaggttttcaagatgaagacagcaataggaatgctgaattgtcaaatgcagatggagcatcatcccttggagaggctgtggcatcataa

SEQ ID NO: 60316 - protein, 802 aa, Oryza sativa (japonica cultivar-group)
MSLSSLSRALARSARSSRQRQGSLLGGHGGLRASSPPLPCGELGFLRSYVTSVIGNRAAVASGAGKGGDWRFLLASRQFRRLFSDKSKKNHGKHSEEENKGKGDESDKSDSKKQSSSGDQWNFEESIKQFKDMIAPLFLFGLLLLSASASSSEQEISFQEFKNKLLEPGLVDHIVVSNKSIAKVYVRSSPSIDRIQDSDIHITTSHLPGIESPSSYKYYFNIGSVDSFEEKLQEAQKALEIDPHYYVPITYTTEAKWFEEVMKYVPTVLIIGLIYLLGKRIQNGFTVGGGPGKGGRSIFSIGKVQVTKLDKNSKNKVFFKDVAGCDEAKQEIMEFVHFLKNPKKYEELGAKIPKGALLVGPPGTGKTLLAKATAGESGVPFLSISGSDFMEMFVGVGPSRVRNLFQEARQCSPSIVFIDEIDAIGRARGRGGFSGGHDERESTLNQLLVEMDGFGTTSGVVVLAGTNRPDILDKALLRPGRFDRQISIDKPDIKGRDQIFRIYLKKLKLDKEPSFYSQRLAALTPGFAGADIANVCNEAALIAARSEGTLITMQHFESAIDRVIGGLEKKNKVISKLERRTVAYHESGHAVAGWFLEHAEPLLKVTIVPRGTAALGFAQYVPNDNLLMTKEQLFDMTCMTLGGRAAEEVLIGKISTGAQNDLEKVTKMTYAQVAVYGFSEKVGLLSFPQREDGFEMSKPYSSQTASIIDTEVREWVAKAYEKTVELIKQHKDQVAQIAELLLEKEVLHQDDLVQVLGERPFKTLEPTNYDRFKQGFQDEDSNRNAELSNADGASSLGEAVAS

SEQ ID NO: 60317 - DNA, 2442 bp, Arabidopsis thaliana
  CDS (1)..(2442)
atgatattctccaagcttggttcttccctcgctcgatcctcacgttctaagggatttgtgtacggcggtggtgtgagatcggcggtatttaaccaagggaggttacgagcgccgcagaatctcgaggcggccgtcaatcaggtggatggtggattagggtttttgaggcggcactttgcttcttttgctgctcgaaagggactagaagccggtgatttaagccgtgctttcgctaaccctagattgcgtcggttcttttctagtcaaaccccaaagaagaagaattatgagaactactatccaaaagacagtaagaaagcacccaagaatgagcagaaatctgaatccagagatggttcaaagaaaaatgaaaacgaaaatgctggggacgcgttctcaaatgaatatcaaaatatgttaattcctcttatggccattgctttaatcctttctactttctctcttggttcccgagaacagcaacagattagtttccaggagttcaaaaacaagctcctcgaggctggtttagtggatcacatagatgtttccaataaagaagtcgcaaaagtctatgtgaggagttcaccaaaaagccaaacaacggaagaagttgttcaaggtcctggtaatggagttcctgctaaaggacgtggtggtcagtataagtactactttaatattggtagtgttgaatcatttgaggagaaactagaagaggcccaagaagctataggcgttaattctcatgactttgttcctgtcacctacgtcagtgaaactatctggtaccaggaactattgagatttgcaccgactttacttctcgtggctacgctaatttttggggcaagacggatgcaaggtggactgggaggtttaggcggacctggtgggaaggctggccgtggaattttcaatatagggaaagctcaaataacgagagcagataaaaactccaagaataagatatattttaaagatgttgcgggatgcgaggaggctaaacaagaaattatggaatttgtgcatttccttcagaacccaaagaaatatgaagatttgggagctaaaatcccaaaaggtgcgcttttagttggcccacccgggactggaaagacccttctagcaaaagctactgcaggagaatcagctgtaccgtttctctcaatatctggttcagatttcatggagatgtttgttggtgttggaccttccagagtgagaaacttgtttcaagaggctagacagtgtgcacctagcataatatttattgatgagatcgatgcgattggccgtgcgaggggacgtggaggtttctctggtggaaatgatgagcgtgaaagcacacttaatcaactgctagttgaaatggatggatttggtactaccgctggagttgtcgtccttgctgggactaacaggccagatattcttgataaagctttattacggcctggccggtttgatcgccagataaccatagataaacctgatattaaaggccgtgatcagatattccagatatacctgaagaagatcaaacttgatcacgagccctcatattactcacaaaggcttgcagccctcactcccggatttgctggagctgacattgcgaatgtctgtaacgaggcggctcttattgctgccagacatgaaggagcaacagttacaatggcgcactttgactctgcaatcgatcgtgttattggtggtctggagaagaaaaaccgggtaataagcaagctggagcgccgtacagttgcatatcatgaatctggccatgcggttgctgggtggttcctggaacatgcggaaccgttgctaaaggtgactattgttcctcgtggcacagcagcgctcggatttgcccagtatgttccaaatgaaaacttgctcatgacaaaagaacaactctttgatatgacttgcatgactctcgggggccgggcagctgaacaggtattgattggaagaatatccactggggctcagaacgatctggaaaaggtgactaagatgacttatgcgcaagtggcagtgtacggattcagcgacaagataggattgctttcattcccacaacgggaagacgagttctccaagccgtacagcaacagaaccggtgcgatgatagatgaagaggtccgagaatgggtggggaaagcttacaagcggacggttgagctgatagaggaacacaaagagcaagtggctcagatcgctgagctcttgctagagaaggaggttttgcatcaggatgatctcactaaagtattgggcgagcgtccgtttaagtcgggtgagacaacgaattacgacaggtttaaatctggatttgaagagtcggagaaggagagccagaaggagtctgtgccggtgaagcctgtggaggatgatggaattccgcctcttgagccacaggtagttccgacgtag

SEQ ID NO: 60318 - protein, 813 aa, Arabidopsis thaliana
MIFSKLGSSLARSSRSKGFVYGGGVRSAVFNQGRLRAPQNLEAAVNQVDGGLGFLRRHFASFAARKGLEAGDLSRAFANPRLRRFFSSQTPKKKNYENYYPKDSKKAPKNEQKSESRDGSKKNENENAGDAFSNEYQNMLIPLMAIALILSTFSLGSREQQQISFQEFKNKLLEAGLVDHIDVSNKEVAKVYVRSSPKSQTTEEVVQGPGNGVPAKGRGGQYKYYFNIGSVESFEEKLEEAQEAIGVNSHDFVPVTYVSETIWYQELLRFAPTLLLVATLIFGARRMQGGLGGLGGPGGKAGRGIFNIGKAQITRADKNSKNKIYFKDVAGCEEAKQEIMEFVHFLQNPKKYEDLGAKIPKGALLVGPPGTGKTLLAKATAGESAVPFLSISGSDFMEMFVGVGPSRVRNLFQEARQCAPSIIFIDEIDAIGRARGRGGFSGGNDERESTLNQLLVEMDGFGTTAGVVVLAGTNRPDILDKALLRPGRFDRQITIDKPDIKGRDQIFQIYLKKIKLDHEPSYYSQRLAALTPGFAGADIANVCNEAALIAARHEGATVTMAHFDSAIDRVIGGLEKKNRVISKLERRTVAYHESGHAVAGWFLEHAEPLLKVTIVPRGTAALGFAQYVPNENLLMTKEQLFDMTCMTLGGRAAEQVLIGRISTGAQNDLEKVTKMTYAQVAVYGFSDKIGLLSFPQREDEFSKPYSNRTGAMIDEEVREWVGKAYKRTVELIEEHKEQVAQIAELLLEKEVLHQDDLTKVLGERPFKSGETTNYDRFKSGFEESEKESQKESVPVKPVEDDGIPPLEPQVVPT

SEQ ID NO: 60319 - DNA, 1920 bp, Borrelia burgdorferi B31
  CDS (1)..(1920): transl_table=11
atgaatggcaataataatatgaataacaatggaaaatctaacaacaaaaaaaagaataaaaattggattttaggacttgttgttgtttttctaatttcagcaatatttatgtcatattttataagggggggggaaagctataaaaatgttccttatagcacttttcagagttatttagacaatggtctagttgagtctgtagtaataattgataaaaatttgattcaatttgtcgtcaagggttctaactttgcaaagtcttatttttctaccagcattccctatcttgatataaatttactttcagaactaaaaaataaaaaagttgagcttagctcagggaaaagtcaagcttctctgattggggttttattacaaactttgccatggattttgttttttattttctttttctttatatttcgtcaaactcaaggtggcggtgggaaggtttttacatttgggaaaagtaatgctcaaaagtatgaagctggaaagaataaaatcacctttaaagatgtggctggtcaagaagaggttaagcaagagcttcgagaagttgtcgaatttcttaaaaatccaaaaaaatttgaaaaaataggtgcaaaaatccccaaaggagtgcttttagtgggctctccgggtactggcaagactttgcttgccaaagccgttgccggtgaggctggggttagtttctttcacatgtcaggctcagattttgttgaaatgtttgttggggttggagcaagtcgtgttagagatttatttgataatgctagaaaaaattctccatgtattatttttattgatgagcttgatgctgttggtcgaagtcgtggtgcggggcttggcggtggtcatgatgaaagagagcaaactcttaatcagctgttagttgaaatggatggatttggaacgcataccaatgtaattgttatggccgctacaaatcgtcccgatgttcttgactctgctttgcttaggcctggacgatttgacaggcaagtaacagtttctttgcctgatattaaggaaagagaggcaatattaaatattcattctttaaaaacgaagctttcaaaagatattaatttacaagtaatagcaagagctactcctggagctagtggtgctgatcttgcaaatttaattaatgaaggagccttaatagctgcaaggaataatcaagatgaaattttaatgaaggatatggaagaagccagagataaaatattgatgggagttgcaaaaaaatccatgactattactgataggcaaaagcttgagacggcttatcatgaggcaggccatgctttgcttcactattatcttgaacatgctgatccacttcacaaagttaccattattccaaggggcagggcacttggtgttgcattttctcttccaagggaagatagactttcaataaacaaacaccaaattcttgacaaaataaagatatgctatggtggttatgctagcgagcaaataaatttgggtgttacaacagcgggtgttcaaaatgatttaatgcaagctactagtttggctaaaaaaatggttacggagtggggaatgggtgaagaagttggtccaatatttttagtagacgatgaagcacctattttccttccgaaagagttttcaaaggctaaagcttattctgagaacactgccgataaagttgacagagaggtaaaaagaatacttgaagaatgtttaaaagaggcatcggatattcttttaaagcataaggatcaacttgttaagcttgcaaaagaacttgttttaaaagaaactttgacagacaaagaagtgagagagcttttgggttttgaagctaataaggatgaatacgatttattttcatcagactctactacaaaagaagtaaagggggaggatgtaaaaggttag

SEQ ID NO: 60320 - protein, 639 aa, Borrelia burgdorferi B31
MNGNNNMNNNGKSNNKKKNKNWILGLVVVFLISAIFMSYFIRGGESYKNVPYSTFQSYLDNGLVESVVIIDKNLIQFVVKGSNFAKSYFSTSIPYLDINLLSELKNKKVELSSGKSQASLIGVLLQTLPWILFFIFFFFIFRQTQGGGGKVFTFGKSNAQKYEAGKNKITFKDVAGQEEVKQELREVVEFLKNPKKFEKIGAKIPKGVLLVGSPGTGKTLLAKAVAGEAGVSFFHMSGSDFVEMFVGVGASRVRDLFDNARKNSPCIIFIDELDAVGRSRGAGLGGGHDEREQTLNQLLVEMDGFGTHTNVIVMAATNRPDVLDSALLRPGRFDRQVTVSLPDIKEREAILNIHSLKTKLSKDINLQVIARATPGASGADLANLINEGALIAARNNQDEILMKDMEEARDKILMGVAKKSMTITDRQKLETAYHEAGHALLHYYLEHADPLHKVTIIPRGRALGVAFSLPREDRLSINKHQILDKIKICYGGYASEQINLGVTTAGVQNDLMQATSLAKKMVTEWGMGEEVGPIFLVDDEAPIFLPKEFSKAKAYSENTADKVDREVKRILEECLKEASDILLKHKDQLVKLAKELVLKETLTDKEVRELLGFEANKDEYDLFSSDSTTKEVKGEDVKG

SEQ ID NO: 60321 - DNA, 1833 bp, Thermotoga maritima MSB8
  CDS (1)..(1833): transl_table=11
ttgaacaggtctaacatctggaatctactgttcacgatactcataatagtcacacttttctggctcgccagatttttctacgtcgaaaactcacctgtgtctaagcttagctacacgagttttgttcagatggtcgaggacgaaagaagcgtggtctcagaagttgtgatcagggacgacggagtactgagagtttacaccaaagacggtagagtttacgaagtggacgctccgtgggccgtgaacgattcgcagctcatagaaaaactggtttcaaagggaataaaagtctcgggagagagaagcggaagcagctccttctggataaacgtcctcggcactctcataccgacgatactcttcattgtcgtgtggctcttcatcatgaggagcctctctggaaggaacaatcaggcgttcacgttcacaaagagcagggcaacaatgtacaaaccctctgggaacaagagggtcaccttcaaggacgttggaggagcggaagaagccatagaggaactcaaagaggtagttgaatttctgaaagatccctctaaattcaacaggatcggcgcaaggatgcccaaggggatcctccttgtagggcctccaggtaccggtaaaacgctccttgcgagggcagttgcgggcgaagcgaacgtgccgttcttccacatcagcggttctgacttcgtggagctctttgtcggagtcggtgccgcgagggtgagagatctgtttgcacaggcgaaggctcacgctccatgtatcgtcttcatcgatgagatcgatgccgttggaagacacaggggagcgggacttggaggaggacacgatgaaagagagcagaccctgaaccagcttctcgtggagatggatggattcgattcgaaagagggcatcatagtcatggcggccacaaacaggcccgatatcctggaccctgcacttttgaggcccggaaggttcgacaagaaaatcgtggtcgatccacctgacatgctcggaagaaagaagatactcgagattcacacgagaaacaaaccgctcgcggaagacgtgaatctggagatcatagcgaagagaacgccgggattcgtcggggcggatctggaaaacctcgtaaacgaggcggcgcttcttgcggcgagggaaggtagagacaaaatcacgatgaaggacttcgaggaagccatagacagggtgatagccggacccgcaagaaagtcgaagctgatcagcccgaaggaaaagcgcatcatagcgtaccacgaggcgggacacgccgtggtatccaccgtggttccaaacggggaacccgttcacagaatttccataatccccaggggatacaaagccctcggatacacgcttcatcttcctgaggaggataagtaccttgtttcaaggaacgaacttctcgacaaactcacagctctactcggaggtagagcagcagaagaggtggtctttggcgatgtgacgagtggggcagccaacgatatagaaagggccacggaaattgcgaggaatatggtgtgtcagctgggaatgagcgaagagctcggacccctcgcctgggggaaggaagagcaggaagtctttcttggaaaagagatcacacggctcagaaactacagtgaagaggtagcgagcaaaatcgacgaagaagtgaaaaagatagtgacgaactgctacgagagggcgaaggagataataaggaaatacaggaagcaactggacaacatcgtggaaatactgctggagaaagaaacgatagagggagacgagctgaggcggatactgtccgaggagtttgaaaaggtggtggaatga

SEQ ID NO: 60322 - protein, 610 aa, Thermotoga maritima MSB8
MNRSNIWNLLFTILIIVTLFWLARFFYVENSPVSKLSYTSFVQMVEDERSVVSEVVIRDDGVLRVYTKDGRVYEVDAPWAVNDSQLIEKLVSKGIKVSGERSGSSSFWINVLGTLIPTILFIVVWLFIMRSLSGRNNQAFTFTKSRATMYKPSGNKRVTFKDVGGAEEAIEELKEVVEFLKDPSKFNRIGARMPKGILLVGPPGTGKTLLARAVAGEANVPFFHISGSDFVELFVGVGAARVRDLFAQAKAHAPCIVFIDEIDAVGRHRGAGLGGGHDEREQTLNQLLVEMDGFDSKEGIIVMAATNRPDILDPALLRPGRFDKKIVVDPPDMLGRKKILEIHTRNKPLAEDVNLEIIAKRTPGFVGADLENLVNEAALLAAREGRDKITMKDFEEAIDRVIAGPARKSKLISPKEKRIIAYHEAGHAVVSTVVPNGEPVHRISIIPRGYKALGYTLHLPEEDKYLVSRNELLDKLTALLGGRAAEEVVFGDVTSGAANDIERATEIARNMVCQLGMSEELGPLAWGKEEQEVFLGKEITRLRNYSEEVASKIDEEVKKIVTNCYERAKEIIRKYRKQLDNIVEILLEKETIEGDELRRILSEEFEKVVE

SEQ ID NO: 60323 - DNA, 1956 bp, Vibrio cholerae O1 biovar eltor str. N16961
  CDS (1)..(1956): transl_table=11
ttgagtgacatggcaaaaaatttaatcctgtggcttgtgattgctgtcgttttgatgtctgtattccagagcttcggccccggtgagaataacggcagagcagtcgactacaccacatttgtaaaggaagttggtcaaggccagattcaggaagctcaattcaacaacggtgaaattactttcatgcgtcgtggaggcggcagccgttatgtaacttacatgccggtttatgatcaaaagctcctcgatgacttgatcaatcaagacgtgaaagtacaaggtacgcctcctgaagagcaaagcttgctgggtaccattttcatctcttggttcccaatgattctattgattggggtttggatcttcttcatgcgtcaaatgcaaggtggcggtggcaaaggtgccatgtcatttggtaagagcaaagcgcgtatgatgagtgaagaccagataaaaaccactttcagcgacgttgcgggctgtgatgaagcaaaagaagatgtgaaagaactggtcgattacctgcgcgatccgagccgcttccaaaagctgggtggtaagatcccaacgggtgtactcatggttggtcctcctggtacaggtaaaaccttgcttgccaaagcgattgctggtgaagctaaagtgccattctttactatctctggttcggatttcgttgaaatgtttgtcggtgtcggtgcatctcgtgtgcgtgacatgttcgaacaagcgaagaaagcctctccatgtattattttcattgatgaaattgatgcagtgggtcgtcagcgtggcgcgggtgttggtggtggtcacgatgaacgtgagcagacactaaaccaaatgctggttgagatggatggttttgaaggcaatgaaggcattattgtcatcgcggcaaccaaccgtcctgacgtgttggacccagcattgctgcgtccgggacgttttgaccgtcaagtcgtggtaggcctgccagatgtgcgtggtcgtgagcaaattcttaaagtgcatatgcgcaaagtgcctctggcgaatgatgtagagccatcattgattgcgcgtggtactcctggattctctggtgcggatttagcgaacttagttaacgaagcggcgctgtttgctgctcgtggcaacaagcgcaacgtctctatggttgagtttgaacttgcaaaagacaaaatcatgatgggtgcagagcgccgttcaatggtgatgtctgaagagataaaagagtctaccgcttatcatgaggctggtcatgcggtagtaggtcgccttgtacctgagcatgatccggtttacaaagtgtcgatcattcctcgcggtcgtgcattgggtgtcaccatgtacttgcctgagcaagatcgcgtgagtatgtctaaacagcatctggaatcaatgatctctagcttgtacggcggtcgtcttgctgaagagttgatttacggcaaagagaaagtttcaacaggcgcatcaaacgatatcgagcgtgcaacagaaattgctcgtaagatggtgacccaatggggcttctctgaaaagctaggccctatgttgtatgcggaagatgaaggtgaagtgttccttgggcgcagtgtgacacagacgaaacacatgtctgatgacaccgcgaagctgattgatgacgaagtgcgtcaaatcattgatcgtaactacgaacgagctcgccaaatcattatggataatatggatatcatgcatgcgatgaaagatgcattgatgaagtatgaaactatcgatgcaggtcagattgatgacttgatggcgcgtaagcctgtgattcgtgaaccagcaggttggggtgaacaatcgaaaactccgtctgcacctgaagtaaaagctgagcctgaagctaaggcggaagaatctacagcagagactgcttcatcggatgtcgcgacagcaagcgagaaaaaagacgctgaataa

SEQ ID NO: 60324 - protein, 651 aa, Vibrio cholerae O1 biovar eltor str. N16961
MSDMAKNLILWLVIAVVLMSVFQSFGPGENNGRAVDYTTFVKEVGQGQIQEAQFNNGEITFMRRGGGSRYVTYMPVYDQKLLDDLINQDVKVQGTPPEEQSLLGTIFISWFPMILLIGVWIFFMRQMQGGGGKGAMSFGKSKARMMSEDQIKTTFSDVAGCDEAKEDVKELVDYLRDPSRFQKLGGKIPTGVLMVGPPGTGKTLLAKAIAGEAKVPFFTISGSDFVEMFVGVGASRVRDMFEQAKKASPCIIFIDEIDAVGRQRGAGVGGGHDEREQTLNQMLVEMDGFEGNEGIIVIAATNRPDVLDPALLRPGRFDRQVVVGLPDVRGREQILKVHMRKVPLANDVEPSLIARGTPGFSGADLANLVNEAALFAARGNKRNVSMVEFELAKDKIMMGAERRSMVMSEEIKESTAYHEAGHAVVGRLVPEHDPVYKVSIIPRGRALGVTMYLPEQDRVSMSKQHLESMISSLYGGRLAEELIYGKEKVSTGASNDIERATEIARKMVTQWGFSEKLGPMLYAEDEGEVFLGRSVTQTKHMSDDTAKLIDDEVRQIIDRNYERARQIIMDNMDIMHAMKDALMKYETIDAGQIDDLMARKPVIREPAGWGEQSKTPSAPEVKAEPEAKAEESTAETASSDVATASEKKDAE

SEQ ID NO: 60325 - DNA, 1920 bp, Pasteurella multocida subsp. multocida str. Pm70
  CDS (1)..(1920): transl_table=11
atggtaaaaaatttagtcctttggattgtggtagctgtggtaatgatgaccgcataccaaggctttaattcaagctcgtcaggaaataccactgactataccaccttcattacagatttaggtaacgatcaaattcgtcaagcccgttttgattacaatgaaatttttgttaccaaaaccgatggcagcaaatatacgacagtcatgccgttaaatgacgataaattactcaatgatttgctcaataagaaagttaaggtagaaggaaccttaccagaaaaacgggggttattctcacaaatcttaatttcttggttcccaatgcttttactcatcggggtttggttcttctttatgcgtcagatgcaaggcggtggcagtaaagccatgagctttggtaaaagccgtgctcgaatgatgacgcaagagcaaattaaaaccacgtttgctgatgttgcgggttgtgatgaagccaaagaagaagtgggcgaaattgttgatttcttacgtgatccaggtaagttccaaaaacttggcggtaaaatccctaaagggattttaatggtaggaccaccgggtacgggtaaaaccttattagctaaagcgatcgccggtgaagcgaaagtacctttctttactatttcaggttcagatttcgttgaaatgttcgtgggagtcggtgcgtcgcgtgtccgtgatatgtttgaacaagcgaagaaaaatgcaccttgtttaatttttatcgatgaaattgatgccgttggtcgtcaacgtggtgccggtttaggtggtggacacgatgaacgtgaacaaacgttaaaccaaatgttggtggaaatggatggctttgaggggaatgaaggcgttatcgtgattgcggcgacgaaccgtccagatgtgcttgacccagcattaacccgtccgggtcgttttgaccgtcaagtggtcgtgggcttgcctgatgtgcgtggtcgtgaacaaatcttaaaagtacatatgcgtcgtgttccgattgcacctgacgtcgatgcgatgacacttgcgcggggtacaccagggtattcgggggcggatttagccaacttagtcaacgaagccgcgttattcgcagcacgtactaataaacgtttggttactatgcttgaatttgaaaaagcaaaagacaaaatcaatatgggaccggagcgccgtaccatgatcatgacggagaagcagaaagaatcgacggcttatcatgaagcgggacacgccattgtcggttatctcgtgccagaacatgatcctgtacataaagtcacgattattccgcgtggacgtgcattaggggtgactttcttcttacctgaaggtgatcaagtcagtatcagccaaaaacagttagaaagtaaactttctacattgtatgcgggacgtttggcggaagatctgatttacggtgaagagaatatttcaaccggtgcctcaaacgatattaaagtggcaactaatattgcccgtaacatggtaacccaatggggattctcagaaaaattaggtccaattctttattcagaagatgatggtgaagtattcttagggcgttcaatggcgaaagcaaaacacatgtcagatgaaaccgcacatcttattgatgaggaagtccgtaccattgtgacacgtaactatgaacgtgcaagacagattctgattgataatatggatattttacatgccatgaaagatgcgttagtgaaatatgaaaccattgaagaagaacagattgagcagctgatgaagcgtcaacctgttacaccgccatcgggttgggatgaaaatgaaccgactacgcaaaacaatgcagggacaaaagcctctccagaaccgaaaagtgcggtagaaacggaacaagattccgatcatcaatcgccttcggataaataa

SEQ ID NO: 60326 - protein, 639 aa, Pasteurella multocida subsp. multocida str. Pm70
MVKNLVLWIVVAVVMMTAYQGFNSSSSGNTTDYTTFITDLGNDQIRQARFDYNEIFVTKTDGSKYTTVMPLNDDKLLNDLLNKKVKVEGTLPEKRGLFSQILISWFPMLLLIGVWFFFMRQMQGGGSKAMSFGKSRARMMTQEQIKTTFADVAGCDEAKEEVGEIVDFLRDPGKFQKLGGKIPKGILMVGPPGTGKTLLAKAIAGEAKVPFFTISGSDFVEMFVGVGASRVRDMFEQAKKNAPCLIFIDEIDAVGRQRGAGLGGGHDEREQTLNQMLVEMDGFEGNEGVIVIAATNRPDVLDPALTRPGRFDRQVVVGLPDVRGREQILKVHMRRVPIAPDVDAMTLARGTPGYSGADLANLVNEAALFAARTNKRLVTMLEFEKAKDKINMGPERRTMIMTEKQKESTAYHEAGHAIVGYLVPEHDPVHKVTIIPRGRALGVTFFLPEGDQVSISQKQLESKLSTLYAGRLAEDLIYGEENISTGASNDIKVATNIARNMVTQWGFSEKLGPILYSEDDGEVFLGRSMAKAKHMSDETAHLIDEEVRTIVTRNYERARQILIDNMDILHAMKDALVKYETIEEEQIEQLMKRQPVTPPSGWDENEPTTQNNAGTKASPEPKSAVETEQDSDHQSPSDK

SEQ ID NO: 60327 - DNA, 1968 bp, Neisseria meningitidis MC58
  CDS (1)..(1968): transl_table=11
gtggggaacacctttaaatcaatccttgtctgggtcgccttgggtatcggcctgatggctgcgttcaacgctttagacggtaaaaaagaagacaacgggcaaatcgaatactctcagttcatccaacaggtcaacaacggcgaagtatccggcgtcaacatcgaaggatccgtcgtcagcggctacctgattaagggcgagcgcaccgacaaaagcactttcttcaccaacgcgcctttggacgacaacctaattaaaacactgctcgacaaaaacgtccgcgtaaaagtaacgccggaagaaaaaccgagcgcgctggctgccctgttttacagcctgctgcccgtcctgctgctgattggcgcatggttctacttcatgcgtatgcagacgggcggcggcggaaaaggcggcgcattctcattcggtaaaagccgcgcccgcctgctggacaaagatgccaacaaagtgacctttgccgatgtcgccggctgcgacgaagccaaagaagaagtacaggaaatcgtcgattacctcaaagcgccgaaccgctatcaaagcctgggcgggcgcgtgccgcgcggcatcctgctggcgggcagcccgggtacgggtaagacgcttttggcgaaagcgattgcaggcgaagccggcgtgccgttcttcagcatttcaggttccgactttgtcgaaatgttcgtcggtgtcggtgcgagccgcgtccgcgatatgttcgagcaggcgaagaaaaacgccccctgcatcatctttatcgacgagattgacgcagtcggccgccaacgcggcgcaggtttgggcggcggcaatgatgagcgcgagcaaacattaaaccaattgttggttgaaatggacggttttgagagcaatcagactgtaattgtgattgcggcaaccaaccgccccgacgtactcgatcctgcgctgcaacgccccggccgtttcgaccgccaagtggttgtccccctgccggacatccgagggcgcgaacagattttgaacgtccattctaaaaaagtgcctttggacgaatctgtggatttattgtccctcgcgcgcggcacgccgggtttttccggcgcggatttggcgaacttggtcaacgaagccgccctgtttgccggccgccgcaataaagtcaaagtcgatcagagcgattttgaagacgccaaagacaaaatctatatgggtccggaacgccgcagtatggtgatgcacgaagacgaaaaacgtgcgacggcgtatcacgaatccggacacgcgattgttgccgaaagcctgccctttaccgaccccgtccacaaagtaaccattatgccgcgcggacgtgcgctgggtctgacttggcagcttccggagcgcgaccgcatcagtatgtataaagatcagatgttgagccagctctccatcctgttcggcggacggattgccgaagacatcttcgtcggacgcatctccaccggcgcatcaaacgactttgaacgcgcaacccaaatggcgcgcgaaatggtaacgcgctacggcatgagcgacaaaatgggcgtgatggtttatgcggaaaacgaaggcgaagtcttcttgggacgcagcgtaacccgttcgcaaaacatttccgagaaaacccagcaggacatcgacgcggaaatccgccggattttggacgagcaatatcaggttgcctacaaaatcctcgatgaaaaccgcgacaagatggaaacgatgtgcaaagccctgatggaatgggaaaccatcgaccgcgatcaggtactggaaatcatggcgggcaaacaacccagcccgcccaaagattacagccacaacctgcgcgagaatgcggacgcggcggaagataacgcgccgcacgctccgactcgggaagaaaccgaagcacctgccccggcagacaccgcttcgacagagtccgagcagcagcctgaaaacaaggcttaa

SEQ ID NO: 60328 - protein, 655 aa, Neisseria meningitidis MC58
MGNTFKSILVWVALGIGLMAAFNALDGKKEDNGQIEYSQFIQQVNNGEVSGVNIEGSVVSGYLIKGERTDKSTFFTNAPLDDNLIKTLLDKNVRVKVTPEEKPSALAALFYSLLPVLLLIGAWFYFMRMQTGGGGKGGAFSFGKSRARLLDKDANKVTFADVAGCDEAKEEVQEIVDYLKAPNRYQSLGGRVPRGILLAGSPGTGKTLLAKAIAGEAGVPFFSISGSDFVEMFVGVGASRVRDMFEQAKKNAPCIIFIDEIDAVGRQRGAGLGGGNDEREQTLNQLLVEMDGFESNQTVIVIAATNRPDVLDPALQRPGRFDRQVVVPLPDIRGREQILNVHSKKVPLDESVDLLSLARGTPGFSGADLANLVNEAALFAGRRNKVKVDQSDFEDAKDKIYMGPERRSMVMHEDEKRATAYHESGHAIVAESLPFTDPVHKVTIMPRGRALGLTWQLPERDRISMYKDQMLSQLSILFGGRIAEDIFVGRISTGASNDFERATQMAREMVTRYGMSDKMGVMVYAENEGEVFLGRSVTRSQNISEKTQQDIDAEIRRILDEQYQVAYKILDENRDKMETMCKALMEWETIDRDQVLEIMAGKQPSPPKDYSHNLRENADAAEDNAPHAPTREETEAPAPADTASTESEQQPENKA

SEQ ID NO: 60329 - DNA, 1938 bp, Campylobacter jejuni subsp. jejuni NCTC 11168
  CDS (1)..(1938): transl_table=11
atgaataataatacccaaaataataagggtaatccgcagggtaataatttttttaacaaaaatcccatttttatttttgcgatttttgcaattataatgataattatttttaagggattttttgatggcaatggttcttttggcggggcattgaatggcaatgaagtaaataaaaatgtcccttattctgagttaaaaaagcttattgaaagtggacaaatcaatcaagttagtataggacaaacaacaatcaaagcgatttcaagctctcacaatactgtttatacagcaaaaaaagttaatgatcctgagcttgtgagtttactagatagtaaaaatatcgcttatggtgcgtattctgaaacaaattggtttacggatatacttttttcatgggttttgccagtatttattttctttggtatttggatgtttttggcaagtcgtatgcaaaaaaatatgggaagttctatattgggtataggaagttctaagaagcttgtaaattcagaaaaacctaaagtaaaatttagcgatgtagctggtgttgaagaagctaaagaagaagtaaaagaaattgtagattttttaaagtatcctgaaagatatattaaattgggagctaaaattccaaaagggcttttacttgttgggcctccaggtacaggaaaaactttgcttgcaaaagcagttgcaggtgaagctgatgtgccgttttttagtgtttcaggttcgtcttttatagaaatgtttgtgggtgtaggtgcttctcgtgtgagagatttgtttgaaaatgcaaaaaaagaagctcctgctattgtttttatagatgaaatagatgctattggtaaaagtcgtgcagcaagtggcatgatgggtggaaacgatgaaagagagcaaactttaaatcagcttttggctgaaatggatggctttgggacagaaagttccccagtcattgttttagcagcaacaaatcgcccagaagttttagatgcagcgcttttaagaccaggaaggtttgatagacaagttttagttgataaacctgattttaaaggtaggtgtgatattttaaaagtgcacatgaaagatgtcaaaatatctccaaaagttaaagtagaagatatagcacgcttaaccgcagggcttgcaggagctgatcttgcaaatattattaatgaagcggcacttttagcaggtagggattctaaaaaatatgtagaacaaaatgatttagttgaagctgttgaaagagctatagcaggacttgagaagaaatcacgtcgtattaatgaaaaagaaaagaaaattgttacttatcatgaatgcggtcatgccttgattgctgaaactaccaaaggtgcaaaacgtgtaagtaaggtttctgtgattccacgtggtcttgcggctttaggttatactttaaacacccctgaggaaaataaatttttaatgcaaaaacatgaacttattgccgaagtagatgtgcttttgggtggtcgtgcggctgaagaagtgttcataggtgaaatttcaacgggtgcaagtaatgatttggaaagagcaactgatatcataaaagctatgatttctatgtatggtatgagtgaaattgcaggacttatggtgcttgaaaaacaaagaaatactttcttaagtggtgggcaaactataaaagactattctgaaaagatggcagaatctttagatgattatgtaaagaaaaccttagatgaacgctataaagatgttaaagatactttaaatacttataaaggagcgattgagactatggttgcagccctttatgaagaagaaactattgaaggtaataaagtgcgtgagattattaaagagtttgaggatcaaaatagtctaccaactcgtttacaagaactcgaagaagttaaaactgaagttaaagtagaagaatga

SEQ ID NO: 60330 - protein, 645 aa, Campylobacter jejuni subsp. jejuni NCTC 11168
MNNNTQNNKGNPQGNNFFNKNPIFIFAIFAIIMIIIFKGFFDGNGSFGGALNGNEVNKNVPYSELKKLIESGQINQVSIGQTTIKAISSSHNTVYTAKKVNDPELVSLLDSKNIAYGAYSETNWFTDILFSWVLPVFIFFGIWMFLASRMQKNMGSSILGIGSSKKLVNSEKPKVKFSDVAGVEEAKEEVKEIVDFLKYPERYIKLGAKIPKGLLLVGPPGTGKTLLAKAVAGEADVPFFSVSGSSFIEMFVGVGASRVRDLFENAKKEAPAIVFIDEIDAIGKSRAASGMMGGNDEREQTLNQLLAEMDGFGTESSPVIVLAATNRPEVLDAALLRPGRFDRQVLVDKPDFKGRCDILKVHMKDVKISPKVKVEDIARLTAGLAGADLANIINEAALLAGRDSKKYVEQNDLVEAVERAIAGLEKKSRRINEKEKKIVTYHECGHALIAETTKGAKRVSKVSVIPRGLAALGYTLNTPEENKFLMQKHELIAEVDVLLGGRAAEEVFIGEISTGASNDLERATDIIKAMISMYGMSEIAGLMVLEKQRNTFLSGGQTIKDYSEKMAESLDDYVKKTLDERYKDVKDTLNTYKGAIETMVAALYEEETIEGNKVREIIKEFEDQNSLPTRLQELEEVKTEVKVEE

SEQ ID NO: 60331 - DNA, 1968 bp, Deinococcus radiodurans R1
  CDS (1)..(1968): transl_table=11
ttgagtctggtacactcaacttatggcaccgccgtgtgccccaactctgttctctccgctgttttccccttttcgcctctggaggcacccctgttgaagcggctcaatccctggatcatcgtgctcctcgtgctcggcctgttcctgatgttcacgaacctgcccggcagtgggcgctataccgtcaactacaacgaattcaagtcactgctgaaccagggccgcatcgagcgcgtcaccgtgcgcgaggacgtggcgaccgtgctgctcaaggagcgcggccaagtcagcgtcatcaccccgcagggtcaggccaccaaggacggcgtcgagagcctgatcgtgcgcctgcccggcaaccaggccacgcctgactccggcctgattccccagctcgaagccaagggcgtggactaccgctttgaggcgccgagccagtggttcgccatcctcatcaacttcctgccgctcatcttgctgttcgggatgatgtacttcttctttgcccgctcgcagggcggtcagggcggcgtcatgcagttcggccagagcaaggccaagaagtacggcaaggaaaaccgcgtgcccaccaagttcaccgacgtggccgggcacgaggaagccaagcgcgagctgatcgaagtcgtggacttcctgaaaaacccggccaagtaccaccagatcggcgccgagattcccaagggcgtgctgcttgtgggccctcccgggacgggcaaaacgctgctcgcccgcgctgtagccggtgaagccgacgtgcccttcttctcggtgagcgcctcggaattcatggaaatgttcgtgggcgtgggcgccagccgtgtgcgcaccctgttcgaggacgcccgcaagagtgcgccggccatcatcttcatcgacgaaatcgactccatcgggcgcaagcgcggtgcgggtatcggcggcgggcacgacgagcgcgagcagacgctcaaccaaatcctctcggaaatggacggcttcgacaagtcgagcagcgtgatcgtgctcggcgcgaccaaccgccccgacgtgctcgaccccgcgctgctgcgtccgggacgcttcgaccgtcaggtgacgatcgacctgcccaacctcaaggaacgtgaggccatcctcaaggtgcacctgcgcaacaagccgctcggtgagggcgtggacgtgcccgaaatcgccaagagcacgccttacttctcgggcgccgacctcaagaacatcaccaacgaagccgcgctcgaagccgcccgcgtgggcaagaccaagatcgatatgagcgacttttaccgggcgctcgacaagatcaccctgggcctggaaaacagctcgctcaccatcagcgaacccgaaaagcgcgccatcgccttccacgaggccgggcacgccgtgaccgccgccgtgattccgggcagcgacaagctgcaaaaggtcagcatcatcccgcgtggccgggcactcggcgccgccttctatctgcccgaagagcaagtgctgatgagcaaggaacggctggaaaaccagctcgtcgtggcactcgggggccgcgccgccgaagaagtcttcgtgggcaccataacgagcggggccgccgacgacttccgcaaggcgaccaacatcgcccgcaagatggtgctggaatggggcatgggcgagaacttccgcaacatggcgctgcaaaccgacggcggcggtccggtgttcctcggcgaggacatgggcaagcccaagatgttctccgagcacaccgcgcaactcgtagacgaagatgtcaagcgcatcctcgccgccgcttacgagcgctcgcgccagatcgtctccgactacaagcaggcgatgcaggaagtggccgacgccctgctcacccacgaactcatcaccggcgacgtggtgcgcgacgccgtggcgcgggtgggcggccagtcggtggccgtggcgcctgctccgaccgtctaa

SEQ ID NO: 60332 - protein, 655 aa, Deinococcus radiodurans R1
MSLVHSTYGTAVCPNSVLSAVFPFSPLEAPLLKRLNPWIIVLLVLGLFLMFTNLPGSGRYTVNYNEFKSLLNQGRIERVTVREDVATVLLKERGQVSVITPQGQATKDGVESLIVRLPGNQATPDSGLIPQLEAKGVDYRFEAPSQWFAILINFLPLILLFGMMYFFFARSQGGQGGVMQFGQSKAKKYGKENRVPTKFTDVAGHEEAKRELIEVVDFLKNPAKYHQIGAEIPKGVLLVGPPGTGKTLLARAVAGEADVPFFSVSASEFMEMFVGVGASRVRTLFEDARKSAPAIIFIDEIDSIGRKRGAGIGGGHDEREQTLNQILSEMDGFDKSSSVIVLGATNRPDVLDPALLRPGRFDRQVTIDLPNLKEREAILKVHLRNKPLGEGVDVPEIAKSTPYFSGADLKNITNEAALEAARVGKTKIDMSDFYRALDKITLGLENSSLTISEPEKRAIAFHEAGHAVTAAVIPGSDKLQKVSIIPRGRALGAAFYLPEEQVLMSKERLENQLVVALGGRAAEEVFVGTITSGAADDFRKATNIARKMVLEWGMGENFRNMALQTDGGGPVFLGEDMGKPKMFSEHTAQLVDEDVKRILAAAYERSRQIVSDYKQAMQEVADALLTHELITGDVVRDAVARVGGQSVAVAPAPTV

SEQ ID NO: 60333 - DNA, 1938 bp, Xylella fastidiosa 9a5c
  CDS (1)..(1938): transl_table=11
atgaggatgaacgacttaaccaaaaatgtgttactgtgggtggtcgtcgccgtcgtgctgatggtggtatttcaaagtttttcgccacgtattggtggagtgataggcaacgaaccaatcacctatacacaatttctgaatgaagtggatagcggtcggatcaagtcggtgaactacaccgatgagagtggcctgactgtcaacgcgattcgcttcaaacgcaccgacggtagcgagggtttggtctacggaccacgcgacgacaaattggtcgacgtgttatacagcaagaacattgagatgacccggcaaaagccttccacaggcccaggcttttggtctctagtattgaattttctaccagtcatcttaattattggattctgggttttcatcatgcgccagatgcaaggtggtggcgctaaaggtgcgatgtcgtttgggaaatcccgtgcaaaattgcaaggcgatgaccagatcaaaatcacttttgctgacgtcgccggttgcgacgaagccaaagaggaagttggtgagctggtcgattttttgcgtgaccccactaaattcaccaagcttggcggcaagattccacgtggagtcttgatggtgggtcctccaggcaccggcaagacgttattagccaaagcaatcgctggggaagcaaaagtacctttcttttcgatttctggatctgacttcgtcgaaatgtttgttggcgtcggtgctagccgtgtccgtgacatgtttgagcaagccaaaaagcatgccccatgcattattttcatcgacgaaatcgacgcggtaggccgtcatcgaggtgcaggcttaggcggaggccatgacgaacgcgaacaaactttgaaccagctcctggttgaaatggacggctttgaaggcggtgaaggcgtgattgtgatcgccgcgacgaatcgccctgacgtgctcgaccctgcgctgctgcgcccaggtcgcttcgaccgtcaagttgtggttgctctaccagacgttaaaggccgtgagcagatcctaggtgttcatatgcgtaagttactgttagccaatgacgtcgagccgctcgtgattgcacgtggaacccctggtttctctggagctgacttagccaatctgtgcaatgaagcagcgttattcgccgcgcgtagcaacgaaaaggaagtcagaatgaaccatttcgacgctgcccgcgacaaaatactcatgggcactgaacgtcgctcaatggcaatgagtgaggaagaaaaaacccttactgcttaccacgaagctggtcatgccatcgttggccgcttagtacctgagcatgaccctgtatacaaagtcacgattatcccccgtggccgtgcgttgggcgtcaccatgtatcttcctgaaggtgacaaatactcaatcaataaagtggctattcagtcccaactatgctccttatatggtggccgtgttgccgaagaattaatcttcggtgaggacaaagtcacaactggcgcttctaatgatattgaacgtgtgaccaagatggcacgcaatatggtcaccaagtggggactctcggatgaactgggtccggttgcttatggcgaggaagaggatgaagtgtttcttggccgttctgtgactcaacataaaaatgtctcagatgaaacggcccgcaaaattgatgaggtagtgcgctctatcttggacaaagcgtacgctcgtacaaagcggatcttggccgataacttagataagctccacgcgatgtcccagctgctgctgcagtacgaaaccatcgacgcacctcagattgatgccattatggagggtcgtgaaccgcccccgccggttggctggggtaaaccttctgacaatggtagcgacgacgacatgagtaagcctcgcccattaactaccatcgttgttccagctgagcaggtttga

SEQ ID NO: 60334 - protein, 645 aa, Xylella fastidiosa 9a5c
MRMNDLTKNVLLWVVVAVVLMVVFQSFSPRIGGVIGNEPITYTQFLNEVDSGRIKSVNYTDESGLTVNAIRFKRTDGSEGLVYGPRDDKLVDVLYSKNIEMTRQKPSTGPGFWSLVLNFLPVILIIGFWVFIMRQMQGGGAKGAMSFGKSRAKLQGDDQIKITFADVAGCDEAKEEVGELVDFLRDPTKFTKLGGKIPRGVLMVGPPGTGKTLLAKAIAGEAKVPFFSISGSDFVEMFVGVGASRVRDMFEQAKKHAPCIIFIDEIDAVGRHRGAGLGGGHDEREQTLNQLLVEMDGFEGGEGVIVIAATNRPDVLDPALLRPGRFDRQVVVALPDVKGREQILGVHMRKLLLANDVEPLVIARGTPGFSGADLANLCNEAALFAARSNEKEVRMNHFDAARDKILMGTERRSMAMSEEEKTLTAYHEAGHAIVGRLVPEHDPVYKVTIIPRGRALGVTMYLPEGDKYSINKVAIQSQLCSLYGGRVAEELIFGEDKVTTGASNDIERVTKMARNMVTKWGLSDELGPVAYGEEEDEVFLGRSVTQHKNVSDETARKIDEVVRSILDKAYARTKRILADNLDKLHAMSQLLLQYETIDAPQIDAIMEGREPPPPVGWGKPSDNGSDDDMSKPRPLTTIVVPAEQV

SEQ ID NO: 60335 - DNA, 1989 bp, Agrobacterium tumefaciens str. C58
  CDS (1)..(1989): transl_table=11
atggcgggcagcagatatgtccgtgtgagttcggggagttcaatgaacccaaatttcagaaatttcgccttgtgggccgtgatcgccctgttgctgatcgcgctgttcagcatgttccagacgtcgccgacgcaaacgggttcacgggagattccgtattcccagtttattcgtgacgtggattccgggcgagttcgcgacgtgaccgtcaccggtaaccgggttctcggaacctataccgaaaacggcacggcctttcagacctattcccccgtcattgacgacagcctgatggagcgcttgcagagcaagaacgtcaccatcgtggcgcgtccggaaagcgacggctcctcgggtttcctgagctatctcggcacgcttctgcctatgttcctcatcctcggcgtctggctgttcttcatgcggcagatgcagggcggttcgcgtggtgcgatgggctttggcaaatcaaaggccaagcttctgacggaagcccacggccgcgtgacgtttgacgacgtcgcaggcgtggacgaagccaagcaggatctcgaggaaatcgtggaattcctgcgcgatccgcagaagttccagcgtcttggcggtaagattccgcgcggcgtgctgctggtcgggcctccgggcaccggtaagacgcttctcgcccgctccgtcgccggcgaagccaacgtgccgttcttcacgatttccggttcggacttcgttgaaatgttcgtcggcgtcggtgcaagccgcgtgcgtgacatgttcgagcaagccaagaagaacgcaccctgtatcatcttcatcgacgaaatcgacgccgtcggccgccatcgtggcgccggtcttggtggcggtaacgacgaacgcgaacagacgctgaaccagctgttggtcgagatggatggctttgaggcgaatgaaggcatcatcctcatcgccgctaccaaccgtcctgatgttcttgaccccgcgcttctgcgtcccggccgtttcgaccgtcaggtcgtcgtgccgaacccggatattgtcggccgcgagcgcatcctcaaggttcacgttcgcaacgtgccgctggcgccgaatgtcgatctcaagattctggcccgcggtacgcccggcttttcgggtgcggatctgatgaacctcgtcaacgaagccgccctcatggccgcccgccgcaacaagcgcgtggtcaccatgcaggagttcgaagacgccaaggacaagatcatgatgggtgcggaacgccgctcctccgccatgaccgaagccgaaaagaagctgaccgcctatcatgaggccggtcatgcgattactgcgctgaaggttgccgtggccgatccgctgcacaaggcgacgatcattccgcgcggccgtgcactcggcatggtgatgcagctgccggaaggcgaccgctattccatgagctacaagtggatggtatcgcgccttgtgatcatgatgggtggacgcgttgccgaggaattgaccttcggcaaggagaacatcacgtctggcgcgtcttctgacatcgagcaagccaccaagcttgcccgcgccatggttacgcaatggggcttctccgacgctctcggtcaggtggcttatggtgaaaaccagcaggaagtgttccttggtcattccgtctcgcagtcgaagaacgtctccgaggcaacggcccagacgatcgataccgaagtccgccgtctgatcgacgaggcttacaccgaagcacggcgtatcctcacggacaaccacgatggctttgtcgcaattgcagagggtcttctcgaatatgagaccctgacgggtgaagagatcaaggcgttgctgaggggcgaaaagcccgctcgtgatctgggtgacgattcgcccggcagccgtggttcggctgtgccgaaagctggcgccaagaaggacggcccgagtgaagccaagggcgatggcgaggccgaaggcggcatggagccgcagccgcattga

SEQ ID NO: 60336 - protein, 662 aa, Agrobacterium tumefaciens str. C58
MAGSRYVRVSSGSSMNPNFRNFALWAVIALLLIALFSMFQTSPTQTGSREIPYSQFIRDVDSGRVRDVTVTGNRVLGTYTENGTAFQTYSPVIDDSLMERLQSKNVTIVARPESDGSSGFLSYLGTLLPMFLILGVWLFFMRQMQGGSRGAMGFGKSKAKLLTEAHGRVTFDDVAGVDEAKQDLEEIVEFLRDPQKFQRLGGKIPRGVLLVGPPGTGKTLLARSVAGEANVPFFTISGSDFVEMFVGVGASRVRDMFEQAKKNAPCIIFIDEIDAVGRHRGAGLGGGNDEREQTLNQLLVEMDGFEANEGIILIAATNRPDVLDPALLRPGRFDRQVVVPNPDIVGRERILKVHVRNVPLAPNVDLKILARGTPGFSGADLMNLVNEAALMAARRNKRVVTMQEFEDAKDKIMMGAERRSSAMTEAEKKLTAYHEAGHAITALKVAVADPLHKATIIPRGRALGMVMQLPEGDRYSMSYKWMVSRLVIMMGGRVAEELTFGKENITSGASSDIEQATKLARAMVTQWGFSDALGQVAYGENQQEVFLGHSVSQSKNVSEATAQTIDTEVRRLIDEAYTEARRILTDNHDGFVAIAEGLLEYETLTGEEIKALLRGEKPARDLGDDSPGSRGSAVPKAGAKKDGPSEAKGDGEAEGGMEPQPH

SEQ ID NO: 60337 - DNA, 1881 bp, Caulobacter crescentus CB15
  CDS (1)..(1881): transl_table=11
atgaatttcagaaacctggccatctggctggtgatcgtggcggtgctgggcggcgtgtttgtcgtcagccagaactcgcgtacgaaaagcagcagcgagatcagctattcgcagctcctcaaggacgttgacgcgggcaagatcaagtcggccgagatcgccggccaaacggtgctggccaagaccgccgacaacaagaccctgacggtcaacgcgccgatgaactccgaggaactggtcaaccgcatggtggccaagaacgcggacgtgaagttcaagagcggctcgatcagcttcctggccatcctcgtgcagctgctgccgatccttctggtcgtcggcgtctggctgtttctgatgcgtcagatgcagggcggcgcgaagggcgccatgggctttggcaagtccaaggcgcggctgctgaccgagaacaagaaccgcatcaccttcgaggacgtcgcgggcgtcgacgaggccaaggaagaactgcaggaggtcgtcgacttcctgaaggacccggccaagttccagcgcctgggcggcaagatcccgaagggcgccctgctggtgggtcctccgggtacgggtaagaccctgatcgcccgcgcggtcgcgggcgaagccggcgtgccgttcttcaccatctcgggttcggacttcgtcgaaatgttcgtcggcgtcggcgccagccgcgtgcgcgacatgttcgagcaggccaagaaaaacgcgccctgcatcatcttcatcgacgaaatcgacgccgtgggtcgccatcgtggcgcgggcctgggcggcggcaacgacgagcgtgagcagacgctgaaccagctgctggtcgagatggacggctttgaggccaatgaaggcatcatcctgatcgccgccaccaaccgtccggacgttctggaccccgcgctgctgcgtccgggccgcttcgaccgtcaggtcgtggtgcccaaccccgacgtcgccggccgcgagaagatcatccgcgtgcacatgaagaacgtgccgctggccgccgatgtcgacgtcaagacgctggcgcgcggcaccccgggcttctcgggcgcggatctggccaacctcgtcaacgaagccgccctgatggccgcccgcaagaaccgccgcatggtcaccatgcaggacttcgagcaggccaaggacaaggtcatgatgggcgccgagcgccgctcgatggccatgaacgaggaagaaaagaagctgacggcctatcacgagggcggtcacgccatcgtggccctgaacgtgccgctggccgaccctgtccacaaggccaccatcgtgccgcgcggccgggctctgggcatggtcatgcagctgccggaaggcgaccgctactcgatgaagtaccagcagatgaccagccgtctggccatcatgatgggcggccgcgtggccgaggagatcatcttcggcaaggagaacatcacctcgggcgcgtccagcgacatcaaggcggccacggatctggcccgtaacatggtcacccgctggggctattccgacatcctgggcacggtggcctatggcgacaaccaggacgaggtcttcctgggccactcggtcgcccggacccagaacgtctcggaagagacggcgcgtctgatcgacagcgaggtcaagcgtctggtgcagtacggcctggacgaggctcgccgcattctgaccgacaagatcgacgacctgcacaccctgggtaaggccctgcttgagtacgagaccctgtccggcgaggagatcgccgacatcctcaagggcatcccccccaagcgcgaagaggaagaggcggccacggcggtcattgcgccgtccctggtgccgctgtcgccgggcgcgggcgccagcgtcaccgcctga

SEQ ID NO: 60338 - protein, 626 aa, Caulobacter crescentus CB15
MNFRNLAIWLVIVAVLGGVFVVSQNSRTKSSSEISYSQLLKDVDAGKIKSAEIAGQTVLAKTADNKTLTVNAPMNSEELVNRMVAKNADVKFKSGSISFLAILVQLLPILLVVGVWLFLMRQMQGGAKGAMGFGKSKARLLTENKNRITFEDVAGVDEAKEELQEVVDFLKDPAKFQRLGGKIPKGALLVGPPGTGKTLIARAVAGEAGVPFFTISGSDFVEMFVGVGASRVRDMFEQAKKNAPCIIFIDEIDAVGRHRGAGLGGGNDEREQTLNQLLVEMDGFEANEGIILIAATNRPDVLDPALLRPGRFDRQVVVPNPDVAGREKIIRVHMKNVPLAADVDVKTLARGTPGFSGADLANLVNEAALMAARKNRRMVTMQDFEQAKDKVMMGAERRSMAMNEEEKKLTAYHEGGHAIVALNVPLADPVHKATIVPRGRALGMVMQLPEGDRYSMKYQQMTSRLAIMMGGRVAEEIIFGKENITSGASSDIKAATDLARNMVTRWGYSDILGTVAYGDNQDEVFLGHSVARTQNVSEETARLIDSEVKRLVQYGLDEARRILTDKIDDLHTLGKALLEYETLSGEEIADILKGIPPKREEEEAATAVIAPSLVPLSPGAGASVTA

SEQ ID NO: 60339 - DNA, 2076 bp, Listeria monocytogenes EGD-e
  CDS (1)..(2076): transl_table=11
atgaacaggttttttagaaatgcgatattttatgtcataatattccttgttattatcgggattgttgcttcatttaactcaaacaaagaggcagccaaagatattagctattcagaatttgtgagtaagttagaagatggtaaagttaaatccgtagaaatacagccagaccgtagtgtttatacaatcaatggggaatttaaatctagtgataaaagttccgacgacaaaaaaactggtcttggacaaagcaaaacaagtagcactgctttcacaacatacgctttaaatagtgatacttctctaggcgatttacaaaaaacgttagataaagaagacgtgaaaatgaatgtagtgcctgccaaacaaaacagcggttgggttacattcctaacttctattgtaccttttgtaattatcttcatcctcttcttcttcctaatgagccagtctcaaggtggcggcggtggtaaagtaatgagctttggtaaaagtaaagccaaactttacaacgacgacaagaagaaagttcgcttcacagatgtagctggagcagacgaggaaaaacaagaacttgttgaagtagtagaattcctaaaagatccgcgcaaatttgcggaacttggcgcacgtattccaaaaggtgttcttttagtaggtcctccgggtactggtaaaaccttgctagctcgtgcagttgctggtgaagcaggcgtgccattcttctctatctcaggttcagactttgtagaaatgtttgtcggtgtcggtgcaagccgtgtccgtgacttattcgaaaatgcgaagaaaaatgcaccatgtatcattttcattgatgaaattgatgcagttggtcgtcaacgtggagctggaatgggcggcggtcacgatgaacgtgaacaaaccctaaaccaattactagttgaaatggatggtttcggcggcaatgaaggtatcatcattattgcagcaactaaccgtgcagacgtacttgacccagcgcttcttcgtccgggccgttttgaccgccaaatcatggttgatcgtccagacgtgaaaggccgtgaagcagtacttcgtgttcatgctcgtaacaaaccacttgctaaaagtgttgatctaaaagcaatcgctcaacgtacgccaggattctctggtgccgatttagaaaacttactgaatgaagccgcactcgttgcagctcgttccgataagaaagaaatagatatgagtgatctcgatgaagctagcgaccgcgtaattgccggcccagctaagaaaaatcgtgttatctctgaaaaagaacgccgcacagtcgcttatcatgaaggtggtcacgtaattgtcggaatggtacttgatgaagcggaagtcgtgcataaagttaccattgttcctcgtgggcaagctggtggttatgctgtaatgttaccaaaagaagatcgcttcttaatgacgaaagctgagttaatggaccgtattactggtttactcggtggacgcgtagccgaagaagttactttcggtgaagtaacaacaggtgcaagtaatgactttgaacgtgcaaccgaacttgctcgccgcatggtaactgaatggggtatgagtgataagattggaccacttcaatttacttctggtaacggtcaagtatttatgggccgcgatttcggtagcgacaaaggatattccgataaaatcgcctacgaaattgatacagaagttcaaagcttaatccgctactgttatgaccgcgctaaaacaatcattaccgaacatcaagaacaacataaacttatcgcggaaacattactaaaagtagaaactttagatgctcgccaaattcgttccctatttgatgacggtgtaatgcctccagatatcgatacgattgacgtagaagcagaatatccttccgaaaaagacgaagaagtagcaggtaaatcttttgaagaagaaagagaagagttaaaagaagaagaaaaagtcgaagaaactcaagaagaaccaaaagaagtcacttcggaagatgctccaaacattgagcaaacgccaaacgataaaaaagacgaataa

SEQ ID NO: 60340 - protein, 691 aa, Listeria monocytogenes EGD-e
MNRFFRNAIFYVIIFLVIIGIVASFNSNKEAAKDISYSEFVSKLEDGKVKSVEIQPDRSVYTINGEFKSSDKSSDDKKTGLGQSKTSSTAFTTYALNSDTSLGDLQKTLDKEDVKMNVVPAKQNSGWVTFLTSIVPFVIIFILFFFLMSQSQGGGGGKVMSFGKSKAKLYNDDKKKVRFTDVAGADEEKQELVEVVEFLKDPRKFAELGARIPKGVLLVGPPGTGKTLLARAVAGEAGVPFFSISGSDFVEMFVGVGASRVRDLFENAKKNAPCIIFIDEIDAVGRQRGAGMGGGHDEREQTLNQLLVEMDGFGGNEGIIIIAATNRADVLDPALLRPGRFDRQIMVDRPDVKGREAVLRVHARNKPLAKSVDLKAIAQRTPGFSGADLENLLNEAALVAARSDKKEIDMSDLDEASDRVIAGPAKKNRVISEKERRTVAYHEGGHVIVGMVLDEAEVVHKVTIVPRGQAGGYAVMLPKEDRFLMTKAELMDRITGLLGGRVAEEVTFGEVTTGASNDFERATELARRMVTEWGMSDKIGPLQFTSGNGQVFMGRDFGSDKGYSDKIAYEIDTEVQSLIRYCYDRAKTIITEHQEQHKLIAETLLKVETLDARQIRSLFDDGVMPPDIDTIDVEAEYPSEKDEEVAGKSFEEEREELKEEEKVEETQEEPKEVTSEDAPNIEQTPNDKKDE

SEQ ID NO: 60341 - DNA, 1842 bp, Nostoc sp. PCC 7120
  CDS (1)..(1842): transl_table=11
gtgaataaaagatggagaaatgcggggctgtacgcgctgctatttattgttgtaattgcgcttggcacagctttttttgaaaaacaaccccaaagtcgggaatcatggcgctatagccagtttattcaagaagttgaaaaaggcagagtagaaagagttagtttgagtgcagaccgttctacggcactggttacacccaaatatgaccctagtaaaaaacttgttactttagtcaacgatccagaattaattaatactctgactgcaagaggcgttgatattactgttttgccacaaaccgatgaaggattttggttcaaggctttaagcagcttatttttccctgtattgcttttggtgggcttattcttcttactccgtcgcgctcaaagtggccctggtagccaagccatgaactttggcaaatccaaagccagagtgcaaatggagccacaaacccaagttacctttggtgatgttgcggggattgaccaagcaaaattagaactaaacgaagtcgtagactttcttaaaaatgccgatcgctttactgctgtcggtgcgaaaattcctaaaggtgtattgttagtagggcctccaggtacaggtaaaaccctcctagcccgtgcagtagccggggaagctggcgtacctttcttctccatctctggttctgagtttgtggaaatgttcgttggtgtgggtgcgtcccgcgtccgcgatttatttgaacaagctaagtctaatgctccttgtatcgtcttcatcgatgaaatcgacgctgttggtcgtcaacggggtgctggtttaggtggtggtaacgatgaacgagaacaaactctcaaccagttactcaccgaaatggatggttttgaaggtaataccggcatcattattattgctgctactaaccgtcccgatgtacttgatgccgccttgttgcgtcccggtcgttttgaccgtcaagtcgtcgttgaccgtcccgactacgctggacgtagcgaaattctcaaagtccacgcccgtggtaaaaccttggctaaggatgtggacttggataaaatcgctcgtcgtacccccggatttacaggtgcagatttatccaacctgctgaacgaagctgctatcttagccgcacggcgcaacctgaccgaaatttcgatggacgaaatcaacgacgcaattgaccgcgtgttggctgggccagagaagaaagaccgggtaatgagcgaaaaacgcaaagttttggtagcttatcacgaagctggtcacgctttagttggtgcattgatgcccgactatgacccagtacaaaaaatcagcattattcctcgcggacgtgccggtggtttgacttggttcacccccagcgaagaccgcatggatacaggcttgtacagccgtgcttatctggaaaatcagatggccgtagctttgggtggtcgcatcgctgaagaaatcatctttggtgaagaagaagtaaccacaggtgcttccaatgacttacagcaagtagcccgtgtagcgcgtcagatgattacccgatttggcatgagcgataaactcggccctgtcgcccttggtcgtcagcaaggcaatatgttcctcggtcgtgacatcatgtcagagcgcgatttctcggaagaaacagcagctgctattgatgaagaagttcacaaattagtagaaacagcttacacccgtgctaaagaagtgttggtaaataaccgccacatcctcgaccaaatcgcgcaaatgctggttgataaagaaaccgtagatgccgatgagttgcaagaaattttggcaaataacgacgtgaaaaccgccgcgtttgcctaa

SEQ ID NO: 60342 - protein, 613 aa, Nostoc sp. PCC 7120
MNKRWRNAGLYALLFIVVIALGTAFFEKQPQSRESWRYSQFIQEVEKGRVERVSLSADRSTALVTPKYDPSKKLVTLVNDPELINTLTARGVDITVLPQTDEGFWFKALSSLFFPVLLLVGLFFLLRRAQSGPGSQAMNFGKSKARVQMEPQTQVTFGDVAGIDQAKLELNEVVDFLKNADRFTAVGAKIPKGVLLVGPPGTGKTLLARAVAGEAGVPFFSISGSEFVEMFVGVGASRVRDLFEQAKSNAPCIVFIDEIDAVGRQRGAGLGGGNDEREQTLNQLLTEMDGFEGNTGIIIIAATNRPDVLDAALLRPGRFDRQVVVDRPDYAGRSEILKVHARGKTLAKDVDLDKIARRTPGFTGADLSNLLNEAAILAARRNLTEISMDEINDAIDRVLAGPEKKDRVMSEKRKVLVAYHEAGHALVGALMPDYDPVQKISIIPRGRAGGLTWFTPSEDRMDTGLYSRAYLENQMAVALGGRIAEEIIFGEEEVTTGASNDLQQVARVARQMITRFGMSDKLGPVALGRQQGNMFLGRDIMSERDFSEETAAAIDEEVHKLVETAYTRAKEVLVNNRHILDQIAQMLVDKETVDADELQEILANNDVKTAAFA

SEQ ID NO: 60343 - DNA, 1887 bp, Ralstonia solanacearum GMI1000
  CDS (1)..(1887): transl_table=11
ttgaataacaactggtttcagaaggcggccatctggctggtgattgccttggtgctgttcaccgtcttcaagcagttcgacaagccgcgcgcccaggaaggtgtgacgtactcgcaattcatggacgatgcgaaaggcggcaagatcaagcgcgtcgaagtgcagggccgtaacctgctggtgacgcccaacgagggcggcaagtacaccatcatttcgccgggcgacatctggatggtcggcgacctgatgaagtacggcgttcaggtgaccggcaaggcggaggaagagcaaggtgtgcttctttctgcgctttactacctcggcccgaccctgctgatcatcgtgttctggttctacatgatgcgacagatgcaaggcggcgggaaaggcggcgccttctcgttcggcaagtcgcgggcgcggctgatcgacgagaacaacaacagcgtcacgttcgccgatgtggcgggttgcgacgaatccaaggaggaagtggtcgagctggtcgacttcctcaaggatcctcaaaaattccagaagctgggtggccgcattccgcgcggcgtactgctggtcggccccccgggcaccggcaagacgctgctggcccgcgccatcgccggcgaagccaaggtgccgttcttcagcatctccggctcggacttcgttgaaatgttcgtcggcgtgggcgcggcccgcgtgcgcgacatgttcgagaacgccaagaagcaggcgccgtgcatcgtcttcatcgacgaaatcgacgctgtcggccgccatcgcggcgccggcatgggcggcggcaatgacgagcgcgagcagaccctcaaccagatgctggtcgagatggacggcttcgaggccaactcgggcgtgatcgtcatcgccgcgaccaaccgtgccgacgtgctggacaaggcgctgctgcgtccgggccgctttgaccgccaggtgtacgtgggcctgccggatatccgcggccgcgagcagatcctcaaggtccacatgcgcaaggtgccgatcggcaacgacgtggatgcttccgtgctggcgcgcggtacgccgggcttctccggcgcggacctggccaacctggtcaacgaggctgcgttgttcgccgcccgccgcaacaagcgcgtggtcgacatgcaggacttcgaagacgccaaggacaagatctacatgggtccggagcgcaagtcggccgtgatccgcgaagaggaacgccgcgccacggcgtatcacgagtcgggccacgccgtggtggccaagctgctgcccaaggccgatccggtgcacaaggtcacgatcatgccgcggggctgggccggcggcctgacctggcagttgccggagcacgacaagcactacgcctacaaggacacgatgctcgaagagatcgccatcctgttcggcggccgtgctgcggaagaggtgttcctgggcgcgatgagcaccggtgcctccaacgacttcgagcgtgccaccaagatggcacgcgacatggtgacgcgctacggcatgagcgattcgctcggcaccatggtctacgtggacaccgagcaggacggtttcttcggccgcatgtcgtccaagacggtgtccgaggcaacgcagcagaaggtcgattcggagatccgccgcatcgtcgacgagcagtacgcgctggccaagcgcctgctcgaagagaaccgcgagaaggtcgaggcgatgaccgctgcactgctggaatgggaaaccatcgacgccgaccaggtgaacgacatcatggccggcaagccgccgcgtccgccgcgctatggttcgagcggtggcggcagcacgccgccgaatggcggtacgcctgcgggtgtgacgccgggcaacgtgcctgccacggcttga

SEQ ID NO: 60344 - protein, 628 aa, Ralstonia solanacearum GMI1000
MNNNWFQKAAIWLVIALVLFTVFKQFDKPRAQEGVTYSQFMDDAKGGKIKRVEVQGRNLLVTPNEGGKYTIISPGDIWMVGDLMKYGVQVTGKAEEEQGVLLSALYYLGPTLLIIVFWFYMMRQMQGGGKGGAFSFGKSRARLIDENNNSVTFADVAGCDESKEEVVELVDFLKDPQKFQKLGGRIPRGVLLVGPPGTGKTLLARAIAGEAKVPFFSISGSDFVEMFVGVGAARVRDMFENAKKQAPCIVFIDEIDAVGRHRGAGMGGGNDEREQTLNQMLVEMDGFEANSGVIVIAATNRADVLDKALLRPGRFDRQVYVGLPDIRGREQILKVHMRKVPIGNDVDASVLARGTPGFSGADLANLVNEAALFAARRNKRVVDMQDFEDAKDKIYMGPERKSAVIREEERRATAYHESGHAVVAKLLPKADPVHKVTIMPRGWAGGLTWQLPEHDKHYAYKDTMLEEIAILFGGRAAEEVFLGAMSTGASNDFERATKMARDMVTRYGMSDSLGTMVYVDTEQDGFFGRMSSKTVSEATQQKVDSEIRRIVDEQYALAKRLLEENREKVEAMTAALLEWETIDADQVNDIMAGKPPRPPRYGSSGGGSTPPNGGTPAGVTPGNVPATA

SEQ ID NO: 60345 - DNA, 1947 bp, Agrobacterium tumefaciens str. C58
  CDS (1)..(1947): transl_table=11
atgaacccaaatttcagaaatttcgccttgtgggccgtgatcgccctgttgctgatcgcgctgttcagcatgttccagacgtcgccgacgcaaacgggttcacgggagattccgtattcccagtttattcgtgacgtggattccgggcgagttcgcgacgtgaccgtcaccggtaaccgggttctcggaacctataccgaaaacggcacggcctttcagacctattcccccgtcattgacgacagcctgatggagcgcttgcagagcaagaacgtcaccatcgtggcgcgtccggaaagcgacggctcctcgggtttcctgagctatctcggcacgcttctgcctatgttcctcatcctcggcgtctggctgttcttcatgcggcagatgcagggcggttcgcgtggtgcgatgggctttggcaaatcaaaggccaagcttctgacggaagcccacggccgcgtgacgtttgacgacgtcgcaggcgtggacgaagccaagcaggatctcgaggaaatcgtggaattcctgcgcgatccgcagaagttccagcgtcttggcggtaagattccgcgcggcgtgctgctggtcgggcctccgggcaccggtaagacgcttctcgcccgctccgtcgccggcgaagccaacgtgccgttcttcacgatttccggttcggacttcgttgaaatgttcgtcggcgtcggtgcaagccgcgtgcgtgacatgttcgagcaagccaagaagaacgcaccctgtatcatcttcatcgacgaaatcgacgccgtcggccgccatcgtggcgccggtcttggtggcggtaacgacgaacgcgaacagacgctgaaccagctgttggtcgagatggatggctttgaggcgaatgaaggcatcatcctcatcgccgctaccaaccgtcctgatgttcttgaccccgcgcttctgcgtcccggccgtttcgaccgtcaggtcgtcgtgccgaacccggatattgtcggccgcgagcgcatcctcaaggttcacgttcgcaacgtgccgctggcgccgaatgtcgatctcaagattctggcccgcggtacgcccggcttttcgggtgcggatctgatgaacctcgtcaacgaagccgccctcatggccgcccgccgcaacaagcgcgtggtcaccatgcaggagttcgaagacgccaaggacaagatcatgatgggtgcggaacgccgctcctccgccatgaccgaagccgaaaagaagctgaccgcctatcatgaggccggtcatgcgattactgcgctgaaggttgccgtggccgatccgctgcacaaggcgacgatcattccgcgcggccgtgcactcggcatggtgatgcagctgccggaaggcgaccgctattccatgagctacaagtggatggtatcgcgccttgtgatcatgatgggtggacgcgttgccgaggaattgaccttcggcaaggagaacatcacgtctggcgcgtcttctgacatcgagcaagccaccaagcttgcccgcgccatggttacgcaatggggcttctccgacgctctcggtcaggtggcttatggtgaaaaccagcaggaagtgttccttggtcattccgtctcgcagtcgaagaacgtctccgaggcaacggcccagacgatcgataccgaagtccgccgtctgatcgacgaggcttacaccgaagcacggcgtatcctcacggacaaccacgatggctttgtcgcaattgcagagggtcttctcgaatatgagaccctgacgggtgaagagatcaaggcgttgctgaggggcgaaaagcccgctcgtgatctgggtgacgattcgcccggcagccgtggttcggctgtgccgaaagctggcgccaagaaggacggcccgagtgaagccaagggcgatggcgaggccgaaggcggcatggagccgcagccgcattga

SEQ ID NO: 60346 - protein, 648 aa, Agrobacterium tumefaciens str. C58
MNPNFRNFALWAVIALLLIALFSMFQTSPTQTGSREIPYSQFIRDVDSGRVRDVTVTGNRVLGTYTENGTAFQTYSPVIDDSLMERLQSKNVTIVARPESDGSSGFLSYLGTLLPMFLILGVWLFFMRQMQGGSRGAMGFGKSKAKLLTEAHGRVTFDDVAGVDEAKQDLEEIVEFLRDPQKFQRLGGKIPRGVLLVGPPGTGKTLLARSVAGEANVPFFTISGSDFVEMFVGVGASRVRDMFEQAKKNAPCIIFIDEIDAVGRHRGAGLGGGNDEREQTLNQLLVEMDGFEANEGIILIAATNRPDVLDPALLRPGRFDRQVVVPNPDIVGRERILKVHVRNVPLAPNVDLKILARGTPGFSGADLMNLVNEAALMAARRNKRVVTMQEFEDAKDKIMMGAERRSSAMTEAEKKLTAYHEAGHAITALKVAVADPLHKATIIPRGRALGMVMQLPEGDRYSMSYKWMVSRLVIMMGGRVAEELTFGKENITSGASSDIEQATKLARAMVTQWGFSDALGQVAYGENQQEVFLGHSVSQSKNVSEATAQTIDTEVRRLIDEAYTEARRILTDNHDGFVAIAEGLLEYETLTGEEIKALLRGEKPARDLGDDSPGSRGSAVPKAGAKKDGPSEAKGDGEAEGGMEPQPH

SEQ ID NO: 60347 - DNA, 2058 bp, Arabidopsis thaliana
  CDS (1)..(2058)
atggctgcttcatcggcttgtcttctcggaaatggattatctgtctacacaaccaaacagaggttccaaaagcttgggcttgataggacatctaaagttacagttgtgaaggcttctttggatgagaagaaacatgaagggagaagaggtttctttaaactcttactaggaaacgctgctgctggagttggtttgcttgcaagtggaaacgctaatgcagacgaacaaggacaaggggtttcttcgtctagaatgtcttattctaggttcctagagtatttagacaagggaagggttgagaaagtagatttgtatgagaatgggactatagctattgtggaggccgtttctcctgagttgggtaaccggattcagcgtgtacgtgtgcagctacctggattgagtcaggagcttctccagaagttgagggctaagaatattgatttcgcagcacataatgctcaggaggaccaaggttctccaatactcaacttgattgggaatcttgcattccctgttattttgattggcggtttgttccttctctcgagaagatcctctggtggaatgggtggccctggtggtcctggcttcccactccaaattggtcagtcgaaagcaaagtttcagatggaaccaaacactggtgtaacttttgatgatgttgctggagtcgatgaagccaagcaagatttcatggaagtggtggagtttctgaagaagcctgagaggttcactgcggttggtgcccggatcccaaaaggtgttcttcttgttggtcctcctggtaccgggaaaaccctgttggcaaaagccattgctggtgaagctggtgtgcccttcttttccatctcgggttctgagtttgttgagatgtttgtcggtgttggtgcatcaagggtccgcgatcttttcaaaaaagccaaagaaaatgctccatgcattgttttcgtggatgaaatagatgctgttggtaggcaaagaggaactggaattggtggaggtaatgatgaaagagaacagacccttaatcagctcctgactgagatggatggttttgagggtaacactggtgttatcgtagttgctgcaaccaacagagcagacattcttgactccgctttgctaagaccagggcgttttgaccggcaggtatctgttgacgttccagacgttaagggaagaacagatatactcaaggttcactcggggaataagaaatttgaaagcggtgtttcacttgaagtaatagccatgagaacacctggatttagcggagctgatcttgcaaacctcttgaacgaggctgccatattggccggccgccgtggaaagactgcaatatcatcaaaagagattgatgactcaattgacagaattgtagctggcatggaaggaacagtcatgacagatgggaagagcaaaagcttggttgcttaccatgaagttggccatgccatatgtggaacattgactccagggcatgatgctgttcaaaaggtcacgttgataccacgaggccaggctagaggtctgacttggttcattccctcagatgacccaactctaatctccaaacagcaactctttgcaagaattgttggtggactcggtggtagagctgccgaagaagtcatctttggtgagtctgaggtgactactggtgcagttagtgacttgcaacagatcaccggtttggctaagcagatggtgacaacatttgggatgtctgaaatcggaccatggtcgctaatggattcatcggagcaaagcgatgtcattatgaggatgatggcaagaaactcaatgtctgagaagcttgcaaatgatattgatacagcggtgaagacattatcagacaaagcgtacgagatagctttgagccagattagaaacaatcgtgaagccatggacaagattgttgaaatacttcttgagaaagagactatgtcaggcgatgaattccgagcaatcctatctgaattcacagaaatcccacctgaaaaccgtgttgcttcttcaacatccacatcaacaccaacaccagcgtctgtctga

SEQ ID NO: 60348 - protein, 685 aa, Arabidopsis thaliana
MAASSACLLGNGLSVYTTKQRFQKLGLDRTSKVTVVKASLDEKKHEGRRGFFKLLLGNAAAGVGLLASGNANADEQGQGVSSSRMSYSRFLEYLDKGRVEKVDLYENGTIAIVEAVSPELGNRIQRVRVQLPGLSQELLQKLRAKNIDFAAHNAQEDQGSPILNLIGNLAFPVILIGGLFLLSRRSSGGMGGPGGPGFPLQIGQSKAKFQMEPNTGVTFDDVAGVDEAKQDFMEVVEFLKKPERFTAVGARIPKGVLLVGPPGTGKTLLAKAIAGEAGVPFFSISGSEFVEMFVGVGASRVRDLFKKAKENAPCIVFVDEIDAVGRQRGTGIGGGNDEREQTLNQLLTEMDGFEGNTGVIVVAATNRADILDSALLRPGRFDRQVSVDVPDVKGRTDILKVHSGNKKFESGVSLEVIAMRTPGFSGADLANLLNEAAILAGRRGKTAISSKEIDDSIDRIVAGMEGTVMTDGKSKSLVAYHEVGHAICGTLTPGHDAVQKVTLIPRGQARGLTWFIPSDDPTLISKQQLFARIVGGLGGRAAEEVIFGESEVTTGAVSDLQQITGLAKQMVTTFGMSEIGPWSLMDSSEQSDVIMRMMARNSMSEKLANDIDTAVKTLSDKAYEIALSQIRNNREAMDKIVEILLEKETMSGDEFRAILSEFTEIPPENRVASSTSTSTPTPASV

SEQ ID NO: 60349 - DNA, 2154 bp, Arabidopsis thaliana
  CDS (1)..(2154)
atggcttggaggcgcatcatcaccaaggtttcgagtcatgaaagggaattgagcagtttaagaagcttacttgttagagcttactcctcttttcctagagtgggagttactggagctgtgggtggtggtggagcttctttaccgcgaacgaggtttcaatcgagttatgttggtagctttgctcgcagagtccgtgatagagaagaagttaatgaggttgcacatctgagagaacttattcgaagaaatgatcctgaggctgttatcagaatgtttgaaagccaaccttctttgcatgcgaatgcctctgcgttatcggaatacattaaggcattggttaaagttgataggctcgatcaaagtgagctggttcgaacattgcaaagaggtattgctggtgttgcaagggaggaagagacttttggaggtcttggggcatttagaaacgtaggaaaaccaacaaaagatggtgtccttggaactgctagtgcaccgatccatacgatatccacagaaaggactcactttaaagaacagctatggagtacaatccgaactattggagttggttttttactcatttctggtattggagctcttatcgaggacagaggaattggcaaaggacttggtttgcacgaagaagtgcaacctagtatggattcgagcaccaaattttctgatgtaaagggtgttgatgaagcaaaggctgagctagaggaaattgtgcattatcttcgcgaccccaaaaggttcactcgtctgggaggaaagcttcctaagggtgtgttgcttgtcggtcctcctgggacaggaaaaactatgcttgctagagctattgctggagaagctggagtgcctttcttctcctgcagtggtagtgagtttgaagagatgtttgttggagttggagccagaagagtgagagatctttttagtgctgcaaagaagtgctccccgtgtattatatttatcgatgaaatagatgctattggaggaagtcgcaatcccaaggaccagcaatacatgaagatgacattgaaccagatgctcgttgagttggatgggtttaaacagaatgaaggaattattgtggtcgcagcaacaaatttcccagagtctttggataaggccctggttagacctgggaggtttgatcgtcatattgttgtacctaacccagacgtggaaggtcgacgccagattttggagtctcacatgtcaaaggtacttaaggctgaagatgtcgatttaatgatcatcgctagaggaacgcctggattttctggcgctgatttggctaatctggtcaatgttgctgctttaaaagctgcaatggacggttctaaagatgtgacaatgtctgatcttgagtttgccaaagacagaatcatgatgggaagtgagaggaaatctgcagttatatctgacgagtcaagaaagctaactgctttccatgaaggtggtcatgcccttgttgccattcacaccgaaggtgctcttccagtccacaaagcaaccattgtgcctcgtggtatggctcttggcatggtttctcaactaccagataaagatgagacgagcatttctaggaaacagatgcttgctaggcttgatgtttgtatgggaggccgggtagccgaagagttgatttttggggaaagtgaagtaacttcgggtgcatcttctgatcttgagcaggcaaccaaactcgcgagagcaatggtcacgaaattcggtatgagcaaagaggtgggtcttgtggcacataactacgacgacaatgggaaaagcatgagcaccgagacaaggcttctcattgagagtgaagtgaaacaacttctggaaaaggcttataacaatgcaaaaacaatcctcacggtttacaacaaagagcttcatgcccttgcaaatgctttgcttcagcacgaaactctgtccggtaagcagattaaagaattgcttaccgatctcaactctccactgctgcaaaagcgtcaagaagtggttacaaagcaaagcaacccggttcctccatcaacccctagctcagcatcatcagcagccgcagcagctgccgcagctgcagccgccgccgccgcagcagctgcaacagccgcaaccaaaggtaaagacatggcgccagtatcgtaa

SEQ ID NO: 60350 - protein, 717 aa, Arabidopsis thaliana
MAWRRIITKVSSHERELSSLRSLLVRAYSSFPRVGVTGAVGGGGASLPRTRFQSSYVGSFARRVRDREEVNEVAHLRELIRRNDPEAVIRMFESQPSLHANASALSEYIKALVKVDRLDQSELVRTLQRGIAGVAREEETFGGLGAFRNVGKPTKDGVLGTASAPIHTISTERTHFKEQLWSTIRTIGVGFLLISGIGALIEDRGIGKGLGLHEEVQPSMDSSTKFSDVKGVDEAKAELEEIVHYLRDPKRFTRLGGKLPKGVLLVGPPGTGKTMLARAIAGEAGVPFFSCSGSEFEEMFVGVGARRVRDLFSAAKKCSPCIIFIDEIDAIGGSRNPKDQQYMKMTLNQMLVELDGFKQNEGIIVVAATNFPESLDKALVRPGRFDRHIVVPNPDVEGRRQILESHMSKVLKAEDVDLMIIARGTPGFSGADLANLVNVAALKAAMDGSKDVTMSDLEFAKDRIMMGSERKSAVISDESRKLTAFHEGGHALVAIHTEGALPVHKATIVPRGMALGMVSQLPDKDETSISRKQMLARLDVCMGGRVAEELIFGESEVTSGASSDLEQATKLARAMVTKFGMSKEVGLVAHNYDDNGKSMSTETRLLIESEVKQLLEKAYNNAKTILTVYNKELHALANALLQHETLSGKQIKELLTDLNSPLLQKRQEVVTKQSNPVPPSTPSSASSAAAAAAAAAAAAAAAAATAATKGKDMAPVS

SEQ ID NO: 60351 - DNA, 2409 bp, Arabidopsis thaliana
  CDS (1)..(2409)
atgactactacattcgaatttctgcaaccaagaatccacggatttgcaacttgttgtagtagtaatagtctattgtactcgaaagcttcgagatttttcaacgatcgttgtagggtttatcgccaaaatccgaatcggtttgtctccaattcaatcacgcttcctctgcagaagaaacaagttacagtgttgagaaatcacgaaaggtttaatctttgggatgggttttcaagaaagaagagtagattagttgtgaattgtcaagaagatgatcagaacgagagttctagtgaggaggaagaaagcagtcagagtactccggcgaagtcggagaggaaaagagagaagaaagaagataaggtgtggtggtcaaagggcaagaaatggcagtggcagccaataatccaagcgcaagggattggagttttgttgttgcaattgagtgttgttatgtttgtgatgcgattgcttcgacctggtatacctttacctggatcggagcctcgaattcagacgacttttgtgagtgtaccgtatagtgagttcttaagtaaagttaacagtaaccaggtgcagaaagtggaggttgatggggttcaagttttgtttaagttaagagatgatgggaagtggcaagagagtgaaactagtaggttgtctcagtcgtctgaatcgttgttaagaactgtggctcctacgaaaagggttgtgtattccactactaggccgggtgatatcaaaacaccgtatgagaagatgcttgggaataatgtggaatttggatcgcctgagaagcgttctggtggcttcttcaactctgcattgatagctcttttctacatagcggtacttgctgggcttattcgattccctgttagcttctccacgagttcaaccggccagcttaggacccgaaaggctggtggtcctgatgggggaaaagtctctggtggaggtgaaacaatcacttttgcggatgttgcaggtgttgatgaagcaaaggaagagctagaagaaatcgtggaatttcttaggaatcctgaaaagtatgtccgtctaggtgcacgtcctccgcgtggtgtcctattggttggtcttcccggaacagggaaaacccttcttgcaaaggctgttgctggggaagctgaagtccccttcataagttgctctgcaagtgagtttgtagagctgtatgtcggtatgggtgcctcacgtgtaagggatctttttgcacgggccaagaaggaagctccatcgattatatttattgatgagatagatgctgtggcaaaaagccgtgatggtaaattccgaatggggagcaacgatgaaagggagcaaactttaaatcagttgctcactgagatggatggttttgacagcaattctgcggttatcgttcttggagctacaaatcgtgccgatgtcttagatccggccctgcgtcgtcctgggagatttgatcgtgttgttacggtggaaacgccagacaaaattggaagagaatccattttgagagtacatgtgtcaaagaaagagcttcctttgggagatgatgtcaacctcggtagtattgcctcaatgaccactggtttcacgggggcagatcttgcaaacttggtaaatgaggctgccttgctagctggaagaaagaacaagacgaacgttgagaaaattgacttcattcaagctgtggagcgatcaatagcgggcatagagaagaaatctgcaagattaaaaggcaatgagaaggcagtggtcgcaaggcatgaagctgggcatgcagtggttggtaccgctgttgcaaatcttcttactggacagccacgtgttgagaaattaagcatattgccaagaacaggaggggcattgggatttacatacattcctcctactagtgaagacagatatttactcttcattgatgagctgcttgggcgtttagttacccttcttggaggtcgtgcagctgaagaagttgtttactcagggcgtatatcaacaggtgcatttgatgatataaggcgggcaactgatatggcatacaaggcagtagctgaatacggtcttaaccaaaaaatcggacctgtgtctgtggctacactttctggtggtgggattgacgattctggaggctcgccatggggaagagatcaggggaaactagttgatcttgttcaaaaagaagtgacaattttgttacaatctgctctcgatgttgcgctgtctgttgtacgcgctaatccagatgtattggaagggcttggtgctcaacttgaagagaaagagaaagtagaaggtgaagaactgcagaagtggttaagcatggtggttgcaccagaagaactcgcagtctttgtcgaaggaaagcaagagcttttgctcccagcacaagctagctccagttaa

SEQ ID NO: 60352 - protein, 802 aa, Arabidopsis thaliana
MTTTFEFLQPRIHGFATCCSSNSLLYSKASRFFNDRCRVYRQNPNRFVSNSITLPLQKKQVTVLRNHERFNLWDGFSRKKSRLVVNCQEDDQNESSSEEEESSQSTPAKSERKREKKEDKVWWSKGKKWQWQPIIQAQGIGVLLLQLSVVMFVMRLLRPGIPLPGSEPRIQTTFVSVPYSEFLSKVNSNQVQKVEVDGVQVLFKLRDDGKWQESETSRLSQSSESLLRTVAPTKRVVYSTTRPGDIKTPYEKMLGNNVEFGSPEKRSGGFFNSALIALFYIAVLAGLIRFPVSFSTSSTGQLRTRKAGGPDGGKVSGGGETITFADVAGVDEAKEELEEIVEFLRNPEKYVRLGARPPRGVLLVGLPGTGKTLLAKAVAGEAEVPFISCSASEFVELYVGMGASRVRDLFARAKKEAPSIIFIDEIDAVAKSRDGKFRMGSNDEREQTLNQLLTEMDGFDSNSAVIVLGATNRADVLDPALRRPGRFDRVVTVETPDKIGRESILRVHVSKKELPLGDDVNLGSIASMTTGFTGADLANLVNEAALLAGRKNKTNVEKIDFIQAVERSIAGIEKKSARLKGNEKAVVARHEAGHAVVGTAVANLLTGQPRVEKLSILPRTGGALGFTYIPPTSEDRYLLFIDELLGRLVTLLGGRAAEEVVYSGRISTGAFDDIRRATDMAYKAVAEYGLNQKIGPVSVATLSGGGIDDSGGSPWGRDQGKLVDLVQKEVTILLQSALDVALSVVRANPDVLEGLGAQLEEKEKVEGEELQKWLSMVVAPEELAVFVEGKQELLLPAQASSS

SEQ ID NO: 60353 - DNA, 2067 bp, Arabidopsis thaliana
  CDS (1)..(2067)
atgaaaatggcatcatcatcatcagctttgtctttccctctctccaacatcccaacctgtagtaagaagtctcaacaatttcaaaaaccggcttctttatccaaatccagtcacacacataaacctagtctcaaaacccaaattttacaccacaaattcactaagagaaatttactgagtttgacgactgccttgggatttacgtcagcgctaggaactgttcttgctcaccccgcaaaagctgaaccagaagctcccatcgaagccacttccaatagaatgtcgtattcgagattcctgcagcatctgaaagagaatgaagtgaagaaagttgacttgatcgagaacggaacggttgcgatcgtagagatctctaatccagtagtaggaaagatccagagggttagggttaaccttcccggtttaccagtcgatctggtgagggagatgaaggagaagaacgtcgatttcgctgctcatcccatgaatgtgaactggggagctttcttgctcaacttcttggggaatttagggtttcctttgatcttgcttgtctctctgcttttaacatcttcttcaagaagaaaccctgctggacctaacttgccttttggtcttggaagaagcaaagctaagtttcagatggagcctaacacagggataacgttcgaggatgtagcaggagtagacgaagccaagcaagactttgaagagatcgttgaatttttgaaaaccccagagaaattctcagctttgggggctaaaatcccaaaaggcgtcttgttgaccggaccgccaggaaccggaaagacactcttggccaaggctatagccggagaagccggtgttccttttttttcattgtctggttcggagttcatagagatgtttgttggtgtaggagcatctagagctagagacttgtttaacaaggcaaaggctaattcaccttgtatagtgttcattgatgagattgatgctgttgggagaatgagaggaaccggtataggaggaggaaacgacgaacgtgagcagacgctaaaccagatattaaccgaaatggatgggtttgcggggaataccggagtaattgtgatcgctgcaacgaaccggccagagattctagactctgctttgctccgaccaggaagattcgataggcaggtttctgttggtttaccggatataagaggaagagaggagatattaaaagttcacagcagaagcaagaaactcgacaaagatgtatctttgagcgtaattgccatgagaactccaggttttagtggagctgacttggccaatcttatgaacgaagcagcgattctcgccggaagaagaggaaaagacaagattacccttacagagatcgacgactctatcgatcggatagtcgccggaatggaagggacaaagatgatcgacggtaaaagtaaagcgattgtagcgtaccatgaagtaggacatgcaatttgtgcgactttgacggagggtcatgatccggttcagaaagttacgttggttcctagaggtcaagcacgtggtctcacgtggttcttaccgggagaagatccgacattggtgtctaaacagcaattgttcgctagaatcgtcggaggactcggaggcagagccgccgaagatgtaatttttggagaaccggagataaccaccggcgctgccggtgatctccagcaagtcactgagatagcaagacagatggtgacgatgtttggtatgtcggaaatcggtccatgggcactaaccgacccagcggttaagcaaaacgatgtggttctacggatgctagcgaggaactcaatgtccgagaaacttgcggaggatattgattcttgcgtgaagaaaataatcggtgacgcttacgaggttgcgaaaaagcacgtgaggaataatagagaagctatagacaagcttgttgatgttttgttggagaaagaaaccttaacgggagacgagtttcgagcaattctgtctgagtatactgatcaaccgttaaataccgatggcgatgtaagaattcgaatcaatgacttgattagtgtctaa

SEQ ID NO: 60354 - protein, 688 aa, Arabidopsis thaliana
MKMASSSSALSFPLSNIPTCSKKSQQFQKPASLSKSSHTHKPSLKTQILHHKFTKRNLLSLTTALGFTSALGTVLAHPAKAEPEAPIEATSNRMSYSRFLQHLKENEVKKVDLIENGTVAIVEISNPVVGKIQRVRVNLPGLPVDLVREMKEKNVDFAAHPMNVNWGAFLLNFLGNLGFPLILLVSLLLTSSSRRNPAGPNLPFGLGRSKAKFQMEPNTGITFEDVAGVDEAKQDFEEIVEFLKTPEKFSALGAKIPKGVLLTGPPGTGKTLLAKAIAGEAGVPFFSLSGSEFIEMFVGVGASRARDLFNKAKANSPCIVFIDEIDAVGRMRGTGIGGGNDEREQTLNQILTEMDGFAGNTGVIVIAATNRPEILDSALLRPGRFDRQVSVGLPDIRGREEILKVHSRSKKLDKDVSLSVIAMRTPGFSGADLANLMNEAAILAGRRGKDKITLTEIDDSIDRIVAGMEGTKMIDGKSKAIVAYHEVGHAICATLTEGHDPVQKVTLVPRGQARGLTWFLPGEDPTLVSKQQLFARIVGGLGGRAAEDVIFGEPEITTGAAGDLQQVTEIARQMVTMFGMSEIGPWALTDPAVKQNDVVLRMLARNSMSEKLAEDIDSCVKKIIGDAYEVAKKHVRNNREAIDKLVDVLLEKETLTGDEFRAILSEYTDQPLNTDGDVRIRINDLISV

SEQ ID NO: 60355 - DNA, 2421 bp, Arabidopsis thaliana
  CDS (1)..(2421)
atgtcttcttctactcttcaagcttctctttttcttcgtcctcctctccatacttcttcgtttaagctttacccttgtctattctcttcttcttcattgagtttttgtccacaatctctctcaagtttctaccgtctttcttcagttcttcacaactctcgatttcgtccccttccttgctcattgcgtcaagacaatgtcgcttccgattctgatttcattcccaaagactccgcttttgaggttacggattcagctgagagtaatagattggtttccgatacggaggtttcggaattagagacgaatgatagatttgtgggtggtgaggagacgaaaagtggaggagaagaagcggaggttagtaatggagtaacggaaggtaaggaggaagatcagaagaagagcaagtttaggattgtggtgttgatgatggcactatgggcggctataaagagagctatagagaaggtaatggagtgggaatggttaagctggtggcctttctctcgccaggagaagcggctcgagaaacttattgctgaggctgatgctaatccaaaggacgcagctttgcagggtgctttattggctgagctcaataagcatattcctgaggctgtagttcaacggtttgaacaaagggaacacacagtggatagtagaggagttgctgaatatattcgagctcttgtcattacaaatgctatctcggagtatcttcctgatgaacaaacggggaagccatctagtcttcccgcactgctgcaagagctgaagcatcgtgcatcaggcaatatggacgaatcatttgtgaaccctggtatatctgagaagcaaccactgcatgttaccatggttaatcctaaagtttcaaacaaatcaagatttgcgcaagagcttgtctctacgatcttgttcactgttgcggtgggattagtgtggattatgggtgcagctgctctgcaaaagtatattggaagtcttggaggaattggaacttcgggtgttggttcaagctcttcatattccccaaaagagctgaacaaagaaataacgccagaaaagaatgtcaaaacatttaaggacgtaaagggttgtgatgatgcaaaacaagagctcgaagaggtagttgaatatctcaaaaatccatcaaagtttacccgccttggaggaaagttgccaaagggaattcttctaaccggggcacctggtactggaaagacattgctggccaaagcaattgctggagaagctggagtacccttcttctatagagctggatctgaatttgaagagatgtttgttggggtaggagctcgccgtgtgagatccttgtttcaggcagccaagaagaaggcaccttgtattattttcattgacgaaattgatgctgttggatccacaagaaaacaatgggaagggcatacaaagaagacattgcatcaactacttgttgaaatggatggttttgagcagaatgagggaataatagttatggctgcaacaaacttgcctgatatacttgatccagctctgacaagaccgggtagatttgatagacatattgtcgtacccagtccggatgtccgtggacgcgaagagattttggaactctacctccaaggcaaacctatgtcagaagatgttgatgttaaagcaattgctcgtggaactcctggattcaatggtgctgatcttgcaaacctggtaaatattgctgccataaaagcagctgttgaaggtgctgagaagttatcttctgaacagttggaattcgcaaaggaccgaattgtcatgggcacagagaggaagacaatgttcgtatcagaggactcaaaaaagctcactgcataccatgagagtggtcatgctattgtcgctttaaatacgaaaggtgcgcacccgatccacaaagcgactataatgccacgtggatctgcattgggaatggttacacagttaccttcaaacgatgaaacatcagtgagcaagaggcagttattagctcgtctcgatgtatgtatgggaggaagagttgcagaggagctcatctttggcttggaccatattaccactggagcgagtagcgatctgtcacaggccactgaacttgcacaatacatggtatcgagttgtgggatgagtgaggcaataggaccagttcatataaaagaaagaccaagctctgatatgcaatcacgcattgatgccgaggttgtgaagcttcttagagaagcatatgagagagtgaaatctctcttgaaacggcatgagaagcagctacacacgttagcaaacgcacttctagagtatgaaacgctaaccgcagaggacataaagcgtattctccttccaaagcaggaaggcgagaaatttgaagagcaacaacaagaagaaggagacttggtattggcctaa

SEQ ID NO: 60356 - protein, 806 aa, Arabidopsis thaliana
MSSSTLQASLFLRPPLHTSSFKLYPCLFSSSSLSFCPQSLSSFYRLSSVLHNSRFRPLPCSLRQDNVASDSDFIPKDSAFEVTDSAESNRLVSDTEVSELETNDRFVGGEETKSGGEEAEVSNGVTEGKEEDQKKSKFRIVVLMMALWAAIKRAIEKVMEWEWLSWWPFSRQEKRLEKLIAEADANPKDAALQGALLAELNKHIPEAVVQRFEQREHTVDSRGVAEYIRALVITNAISEYLPDEQTGKPSSLPALLQELKHRASGNMDESFVNPGISEKQPLHVTMVNPKVSNKSRFAQELVSTILFTVAVGLVWIMGAAALQKYIGSLGGIGTSGVGSSSSYSPKELNKEITPEKNVKTFKDVKGCDDAKQELEEVVEYLKNPSKFTRLGGKLPKGILLTGAPGTGKTLLAKAIAGEAGVPFFYRAGSEFEEMFVGVGARRVRSLFQAAKKKAPCIIFIDEIDAVGSTRKQWEGHTKKTLHQLLVEMDGFEQNEGIIVMAATNLPDILDPALTRPGRFDRHIVVPSPDVRGREEILELYLQGKPMSEDVDVKAIARGTPGFNGADLANLVNIAAIKAAVEGAEKLSSEQLEFAKDRIVMGTERKTMFVSEDSKKLTAYHESGHAIVALNTKGAHPIHKATIMPRGSALGMVTQLPSNDETSVSKRQLLARLDVCMGGRVAEELIFGLDHITTGASSDLSQATELAQYMVSSCGMSEAIGPVHIKERPSSDMQSRIDAEVVKLLREAYERVKSLLKRHEKQLHTLANALLEYETLTAEDIKRILLPKQEGEKFEEQQQEEGDLVLA

SEQ ID NO: 60357 - DNA, 2421 bp, Arabidopsis thaliana
  CDS (1)..(2421)
atgacttcaatcgaattgctaagtccattgattcacgataagtttcgattctcaacttgttgtagtactagtagtttattgtatttgcatgcttcgagctttttccgagatcgatcttttggttttcgtcagaatccgaatcgattcgtctccaattcatcgattcaacttcctcaatcagttccagggtcgataaaccaggaaaggtttaatctttggcaagggttttcgaggaagaagagtactagtagtagtagaacgattgtgaattgtcaagaaggtgatcagaaagctagctcaagtgaaggagaaggaaagaccaataaggataaaggacggaagcaaggtaagaatgagttatggtggtctaaagggaagaaatggcaatggaaaccgataattcaagcgcaggagattggtgtaatgttactacaattgggtattgttatgtttgttgtgcgattgctccgacccggaatcccgttaccgggttcggagcctcggacacagacgacgtttatgagtgtaccgtatagtgatttcttgagtaaagttaataatgatgaggttcagaaagtggaggtggatggttttcatgttttgtttaagttgaaagatgatgggaatttgcaagagagtgaaactagtagtagtagtattaagctctctgagtcgtctgagactatgcttagaagtgtggctccgactaaaagagttgtgtattccactactaggccgagggatatcaaaacaccgtatgagaaaatgcttgagaataatgtggaattcgggtcgcctgataagcgctctggtggctttttcaactctggattgatagttctgttctacattgcagtgcttgcagggcttctccaccgatttcctgttaacttttcccagagtacaacgggacagctgaggacccgcaagtctggtggtcctggtgggggaaaagtttctggtgatggtgaaacaatcacttttgcagatgttgctggtgttgatgaagcaaaggaagagctggaagagattgtggaatttctcaagaatcctgataggtatgttcgtctaggtgctcgtcctcctcgtggtgtcctactggtcggtcttcctggaacagggaaaacccttcttgcaaaagctgttgctggggaatctgatgttccattcataagttgctctgcaagtgagtttgtagagctgtatgttggcatgggtgcctcacgcgtaagggatctatttgcacgagccaagaaggaggctccgtcaattatatttatagatgagatagatgctgtcgcgaaaagccgtgatggtaaattcagaatggtcagcaatgatgaaagggagcaaaccttgaatcaattgctcactgagatggatggttttgacagtagctctgcagttattgttcttggagctaccaatcgagctgatgtcttagaccctgccctgcgtcggcctgggagatttgatcgtgttgttacggtggaatcacctgacaaagttggaagagaatccattttgaaagtgcatgtttcaaagaaagagcttcctttgggagatgatgtcaacctagctagcattgcctcaatgacaaccggttttactggggcagaccttgcaaacctggttaatgaggctgctttgctagcgggaaggaagagcaagatgactgttgataagattgacttcattcatgctgtcgagcgatctatagcgggcatagagaagaaaacagctaggttaaaaggtagtgagaaagctgtggttgcaaggcatgaagctgggcatgctgttgttggtacagctgttgcaagtcttctttctggacagtcccgtgttgagaaattaagcatattaccaagatcaggaggggcattgggctttacatacattcccccaacgcatgaagacagatatttgctctttattgatgaactacatggccgcttggtaactcttcttggaggtcgtgcagctgaagaggttgtttactcggggcgtatatcaacaggtgcacttgatgatatcaggagagcaaccgacatggcctataaggcagtagctgaatatggtctcaacgagaaaatcggacccgtctctgtggctacgctttctgctggtgggattgatgactctgggggatcaccatggggaagagatcaggggcatctggttgaccttgttcaaagagaggtgacaaatttgttgcaatctgctctggatgttgcgttgactgttgttcgcgctaatccagatgtattagaagggctcggtgctcaactggaagatgaagagaaagtagaaggtgaagagttgcagaaatggttaaatagagtagtaccctcagaggaacttgcagtgttcatcaaaggaaaacaaactgctttacttccagcacaagctagctccagttaa

SEQ ID NO: 60358 - protein, 806 aa, Arabidopsis thaliana
MTSIELLSPLIHDKFRFSTCCSTSSLLYLHASSFFRDRSFGFRQNPNRFVSNSSIQLPQSVPGSINQERFNLWQGFSRKKSTSSSRTIVNCQEGDQKASSSEGEGKTNKDKGRKQGKNELWWSKGKKWQWKPIIQAQEIGVMLLQLGIVMFVVRLLRPGIPLPGSEPRTQTTFMSVPYSDFLSKVNNDEVQKVEVDGFHVLFKLKDDGNLQESETSSSSIKLSESSETMLRSVAPTKRVVYSTTRPRDIKTPYEKMLENNVEFGSPDKRSGGFFNSGLIVLFYIAVLAGLLHRFPVNFSQSTTGQLRTRKSGGPGGGKVSGDGETITFADVAGVDEAKEELEEIVEFLKNPDRYVRLGARPPRGVLLVGLPGTGKTLLAKAVAGESDVPFISCSASEFVELYVGMGASRVRDLFARAKKEAPSIIFIDEIDAVAKSRDGKFRMVSNDEREQTLNQLLTEMDGFDSSSAVIVLGATNRADVLDPALRRPGRFDRVVTVESPDKVGRESILKVHVSKKELPLGDDVNLASIASMTTGFTGADLANLVNEAALLAGRKSKMTVDKIDFIHAVERSIAGIEKKTARLKGSEKAVVARHEAGHAVVGTAVASLLSGQSRVEKLSILPRSGGALGFTYIPPTHEDRYLLFIDELHGRLVTLLGGRAAEEVVYSGRISTGALDDIRRATDMAYKAVAEYGLNEKIGPVSVATLSAGGIDDSGGSPWGRDQGHLVDLVQREVTNLLQSALDVALTVVRANPDVLEGLGAQLEDEEKVEGEELQKWLNRVVPSEELAVFIKGKQTALLPAQASSS

SEQ ID NO: 60359 - DNA, 2130 bp, Schizosaccharomyces pombe 972h-
  CDS (1)..(2130)
atgtcaagggttttgcatcctatatttcttttcggaaagacaagtttcttgtattccggatgctcaaaattcggaggacggttgtttaacaatagcattgttcatggatggctacgaactcggagctatgcattagcttcggggcttcatccccttagaaaacaaaagcttgcgcattttgaagatttggcaaatgctaatatgtcagacccatatatgcaggctaaattgtataaggagctagctgataacttccccgaagcaattataagccgttatgaaacacaaggagttgccaggaactccgcatgtgatcgatattatcaagaggctttgcgaaaaaaatcgtggagcagaagtttatcgaacaacatatccttatctcaatcatcttcttcacctgccacctctagtttcagtgatccaaaagcattttcggcaggcgtaccaaaattcacatccgatacatcttctaccgtttcctcgactccttcacttaatcattctttgcaaaattccatgccaccttcgactcctactccacctccggtatgggcacccacgattgtttcatcagcattgggcacaagtagtaaaactcctgtctatgtggtagttgatgaaccgagatttacaaaatttttcagaatttttaaattcattgctggtcttagtgtggcctcctattttgttcttttaggaatgagtatttttgctgaaacttcaggtcttaacaatataatgaccaacactactgagcaagaacctatggaggagcgagctattaatgttcgcttctctgatgttcaaggtgttgacgaggccaaggaggaactggaggaaatcgttgattttttgcgcgatcctactcattttacacggttgggaggtaaattgcctagaggtgttttgcttacaggaccacccggaactggaaaaacaatgcttgctagggctgttgctggagaggcaaatgttccttttttctttatgagtggcagtcagtttgacgaaatgtatgtaggtgttggtgccaaacgagttcgagaattgttcgctgccgctagaaagcaagctccttccattatatttatcgatgaattggatgctattggacaaaaaagaaatgcacgagacgccgctcatatgagacagactttgaaccaattgctagttgatttagacgggttttcaaaaaatgaagatttagctcatccagtcgtttttattggtgctacgaatttccccgaaagtttggatcctgcgctaactcgtccagggcgtttcgatcgccatatacatgttcctttacccgatgttagagggcgtctggcaatcttactgcagcatacacgacatgtacctctcggcaaggatgtcgatctcagcattattgcaagaggaacctctgggtttgctggggctgatctagctaacctaatcaaccaagctgctgtctatgccagtaaaaacttatcaaccgcagtcagtatgcgtgatttagaatggtcaaaagatcgaatacttatgggtgctgaaagaaaaagtgcattcattactccagaaaataagctaatgactgcctatcacgaaggtggacatgcattagtagctttatttaccaaaaatgctatgagaccctacaaggctactattatgcctagaggtagtagtttgggaatgacgatttccttaccagatatggataaagatagctggacgcgtgaagaatatcttgctatgcttgacgtcaccatgggcggtcgcgccgcagaggagcttttgtacggaaaagataaaataacgtctggtgcacataatgatatagacaaggctactcaagttgcacgccgtatggtaacggagtttggaatgtctgaccgcattggcccggttagtttggaagctgaaatggataatctctcacctgctacgagagcgctagtggaatcagaaatcaagtctttgcttgaggcgtcatatgaacgttcattatctttgcttaaatctcacaagaaagagttagatgcattagctactgctctagtcgattatgagtttttgaccgctgaagagatgaaccgtgtcgttaaaggagaccgtgatttacttcgtaataagctaagttaa

SEQ ID NO: 60360 - protein, 709 aa, Schizosaccharomyces pombe 972h-
MSRVLHPIFLFGKTSFLYSGCSKFGGRLFNNSIVHGWLRTRSYALASGLHPLRKQKLAHFEDLANANMSDPYMQAKLYKELADNFPEAIISRYETQGVARNSACDRYYQEALRKKSWSRSLSNNISLSQSSSSPATSSFSDPKAFSAGVPKFTSDTSSTVSSTPSLNHSLQNSMPPSTPTPPPVWAPTIVSSALGTSSKTPVYVVVDEPRFTKFFRIFKFIAGLSVASYFVLLGMSIFAETSGLNNIMTNTTEQEPMEERAINVRFSDVQGVDEAKEELEEIVDFLRDPTHFTRLGGKLPRGVLLTGPPGTGKTMLARAVAGEANVPFFFMSGSQFDEMYVGVGAKRVRELFAAARKQAPSIIFIDELDAIGQKRNARDAAHMRQTLNQLLVDLDGFSKNEDLAHPVVFIGATNFPESLDPALTRPGRFDRHIHVPLPDVRGRLAILLQHTRHVPLGKDVDLSIIARGTSGFAGADLANLINQAAVYASKNLSTAVSMRDLEWSKDRILMGAERKSAFITPENKLMTAYHEGGHALVALFTKNAMRPYKATIMPRGSSLGMTISLPDMDKDSWTREEYLAMLDVTMGGRAAEELLYGKDKITSGAHNDIDKATQVARRMVTEFGMSDRIGPVSLEAEMDNLSPATRALVESEIKSLLEASYERSLSLLKSHKKELDALATALVDYEFLTAEEMNRVVKGDRDLLRNKLS

SEQ ID NO: 60361 - DNA, 2322 bp, Schizosaccharomyces pombe 972h-
  CDS (1)..(2322)
atgcgaaatccctttttgacgtttagggcacctactaggaaaacaggagattacctggtttctaaattcgtaaagaaggataatttttcttctttgcgtttggcaagggcttatactttttctacacgttccacagctgtttcacaattttctcttctctcactttctcagagatcttttcagtcccttaaaataaataaaggaataccggaaaaacataaaatccctctcatttcatctaaacaatttagcgtaacctcaaaaagatcgcaaaatgggtcttcaggatccaattctgatgctaatggtaggaaaaatggccagaaaaatgatgattcaaaaaagaagggattgaatggcaatgatccgaaaaaagtttttgaaatagccttaaatggcaacactattttaggtggaattttagttgcctatatcctttacaatgttctctcgcctaatgcaaatatgcaagaaattacttggcaagattttcgacaacagtttttagacaagggtttagttgaacggctagttgttgttaaccgcaatatggttagagttattttgagaggcggtgtagcttcaggttcagggcagtactatttttcaattggttccatcgactctttcgatcgaaaactagaggatgcacaacgtcaactgggtattccaccttctgaatttgtccctgtcgcttatcatgacgaagtctctgttcttgctactttattgtcttttgctcccaccttactgatcattggaagtgtcatttatttatcgcgacgggcttcgggtgccgcaggaggtggtcaaggtggcatttttggaattggtaagagccgagcgaagatgtttaatcatgaaactgatatcaaaataaaatttgctgatgtcgctggcgttgacgaggctaaagaagagattatggaattcgtcaaatttttaaaaaatcccaagttttatgaaaggttgggggctaaaattcctcgtggtgccattctttctggtcctcctggtaccggtaaaactcttcttgctaaagccaccgctggtgaagctaacgtcccttttttaagtgtgtcaggttctgagtttcttgaaatgtttgttggtgttggaccttcccgcgtaagagatctttttgctactgctcgcaagaacgctccttgtattattttcatagatgaaattgatgcaattggtaaagcaagaggacgtggaggacaatttggttccaatgatgaacgcgaaagcactcttaatcagctattagttgaaatggacggttttacgtctagcgaacatatcgtcgtattcgctggtactaatcgaccagacgtattggacccggcacttctacgtcctggtcgattcgatcgtcaaattacgattgatcgtcctgatattggcggtcgtgaacaaatatttaaggtccaccttaagcatattaaggcagccgataacatcgacttaattgccaagcgtcttgccgtcctaacttctggttttacaggagctgatataatgaatgtatgtaatgaaggagcgttaattgcagcacgatcaaatagtaatgaagtccaaatggtacattttgagcaagctattgaaagagtcacggcaggtttggaaaagaagagtagggtactaagtcctgaagaaaaaaacaccgttgctcatcatgaagctggacatgcggtagctggttggtttatggagtacgtcgatccactattgaaggtctcaatcattcctagagctcaagcccttggctatgctagttatttacccaaagatcagtatctgatgagtcgagggcagattttagatcaaatgggaatggctttggctgggcgtgtttctgaagaaatattttttggaccagaaaagattacttcgggagcttccgatgattttcaaaaagtaacgcgcatggctcaagcgtatgtgacccaatatggtatgtctccgactgttggtactatagcttatcccatcgacactcgggaaactgttcaaaaaccattttctgaggctacagctcaaatgattgatgaagaaattcgaaagcttgtaaagcatgcatacgaaagaactaagaaacttttgctagaacataagcaaggcttagaaaatattgctcaacgtctattacagaaagaagtcatcacttataacgaagttgagacgattcttggaccaaggccatatgcatacaaacatttaaatatttctgaacttatgcgtcagtctgagtataaaaatgatcacgatcctcgaaatccaccaatccccccatctcctcaacaaccttctgcctaa

SEQ ID NO: 60362 - protein, 773 aa, Schizosaccharomyces pombe 972h-
MRNPFLTFRAPTRKTGDYLVSKFVKKDNFSSLRLARAYTFSTRSTAVSQFSLLSLSQRSFQSLKINKGIPEKHKIPLISSKQFSVTSKRSQNGSSGSNSDANGRKNGQKNDDSKKKGLNGNDPKKVFEIALNGNTILGGILVAYILYNVLSPNANMQEITWQDFRQQFLDKGLVERLVVVNRNMVRVILRGGVASGSGQYYFSIGSIDSFDRKLEDAQRQLGIPPSEFVPVAYHDEVSVLATLLSFAPTLLIIGSVIYLSRRASGAAGGGQGGIFGIGKSRAKMFNHETDIKIKFADVAGVDEAKEEIMEFVKFLKNPKFYERLGAKIPRGAILSGPPGTGKTLLAKATAGEANVPFLSVSGSEFLEMFVGVGPSRVRDLFATARKNAPCIIFIDEIDAIGKARGRGGQFGSNDERESTLNQLLVEMDGFTSSEHIVVFAGTNRPDVLDPALLRPGRFDRQITIDRPDIGGREQIFKVHLKHIKAADNIDLIAKRLAVLTSGFTGADIMNVCNEGALIAARSNSNEVQMVHFEQAIERVTAGLEKKSRVLSPEEKNTVAHHEAGHAVAGWFMEYVDPLLKVSIIPRAQALGYASYLPKDQYLMSRGQILDQMGMALAGRVSEEIFFGPEKITSGASDDFQKVTRMAQAYVTQYGMSPTVGTIAYPIDTRETVQKPFSEATAQMIDEEIRKLVKHAYERTKKLLLEHKQGLENIAQRLLQKEVITYNEVETILGPRPYAYKHLNISELMRQSEYKNDHDPRNPPIPPSPQQPSA

SEQ ID NO: 60363 - DNA, 2562 bp, Corynebacterium glutamicum ATCC 13032
  CDS (1)..(2562): transl_table=11
atgaaaaacaagaaatacctgcagttcggcggtatcgcagccgtaatcctcatcgttctgttcttggtgtccctgtttagcagtgacaccaggaacttccaggaggtcgatacctctgttgcgatggcacagcttgacgccggaaacgtcgccgaagctcaaatcgatgacagggaacagcgcgtccgactgaccttgcgtgaacccatcacggtggatgaacgcgaaggcgttgaagagatcctcgcgcagtacccagctcgtaccgcgccagcgatctttgagaaggtggaagcatccaacactgattcctataccaccaatgtgacgcaggagagcttcctgatgtccatgctgagcttcatcctgccgatggtgatcatcttcggtttgctgatgttcttcctcacccgcatgcagggtggtggcatgtttggcatcggtggatccaaggccaagcagctgaccaaggatatgcccaccaacaccttcgcggatgttgctggcgctgaagaagcagtggatgaactccatgagatcaaggacttcctggaagaccccacccgctacgaagccctcggagcgaaaatccctcgtggtgtgctgctttacggccctcccggtactggtaaaaccctgctggctcgtgccgtagctggtgaggctggcgtgccgttctactcaatttccggttctgactttgtggaaatgttcgtcggtgttggtgcctcgcgtgtgcgtgatctgtttaagcaggccaaggaaaacagtccctgcatcatcttcgtcgatgagatcgatgcggttggtcgcgcccgtggctcaggaatgggtggcggacacgatgagcgtgaacagaccctgaaccagttgctcgttgagatggatggctttggtgatcgtcaaggcgtcattctgatggctgctaccaaccgcccagatgttcttgacccagcgctgctgcgtcctggccgtttcgaccgccagatcccagtcaccaaccctgacctacgcggccgtgaacagatcctggaagttcacgccaagggtaagcctttcgcacccgatgcagatatcaaggcattggcaaagcgcaccgccggcatgtccggcgctgacctggcaaacgtgcttaacgaagccgcgctgctaaccgcccgcgtgggtggcaacgtgatcaccgccgacgctctggaagaagcaaccgaccgcgttgtcggtggaccacgtcgctccggcaaggtgatttccgagaaggaaaagaaggtcaccgcctaccacgaaggtggacacaccctgtccgcatgggcgttggaagacatcgagcgcgtctacaaggtcaccatcttggcccgcggtcgcaccggcggtcacgccatgactgcccaagaagatgacaagggcatgtacaaccgcaacgaattgttcgcccgcctggtctttgccatgggtggacgctccgcggaagaactagtcttcggcgaacccaccaccggcgcctccgccgatattgaaatggccaccaagatcgcccgatccatggtgaccgaatatggcatgtccccagctgtcggcatggtgaaatacggccaagaacagggcgacccattctccggacgcggtggcggtggaaacttggaccactcccaagaagtcgcagcaaccatcgacaccgaagtccagttcctcctggacaaagcccatgaagtgtcctactccatcctggctgaataccgcgaccacctggaccgcctcgcggaaaaactcctggaaaaggaaaccctgcgacgcccagacctcgaagcgcttttcgacgacatcgtcccacgcaaggtcgccgaagtcttccccgacgagtccacacgattccctcgccaagaaaaccgcgaaccagtaaaaaccccagtggagctcgcactggaacgtggcgaagaaccaccaaagaagttctccattcttgaggcctcccgcgcaacccgcgaacgccgtcgcaaggaattggaagctcagggtaagttgccggtgcagcctgcgtcttctgccggcgtggcacctgcggccggagcagctgccggatcctatggcaccccacctccagctgattggagcgtgcccggttccgctggaaagcaccgctcacgtgcagaagaacagccagctgagcagggcttcccggctcagaccccggcacaagctcctgagcagtcccctgattcaagtggcggccgccccaacccttacgcgactccaaccgcatccggtgagcaccctggtatgaaggcctatggcttcggcgattccgaactcatggaccaatcaacaggtgcggaacataccccaggtaacgtttcacaggaatccccaaccgaaatgatcgggttccgtttgccggatcatgaacgttcggactacccagaaaaggcgcaaaaagagtcggtgctggatgcttctgaaaccacagaaatgcctgtcgttccagatcagcccatcgatggtgattccgggaagtccgctgagggcacacaggagaatccggaaaatgaaggagacaaccgtggataa

SEQ ID NO: 60364 - protein, 853 aa, Corynebacterium glutamicum ATCC 13032
MKNKKYLQFGGIAAVILIVLFLVSLFSSDTRNFQEVDTSVAMAQLDAGNVAEAQIDDREQRVRLTLREPITVDEREGVEEILAQYPARTAPAIFEKVEASNTDSYTTNVTQESFLMSMLSFILPMVIIFGLLMFFLTRMQGGGMFGIGGSKAKQLTKDMPTNTFADVAGAEEAVDELHEIKDFLEDPTRYEALGAKIPRGVLLYGPPGTGKTLLARAVAGEAGVPFYSISGSDFVEMFVGVGASRVRDLFKQAKENSPCIIFVDEIDAVGRARGSGMGGGHDEREQTLNQLLVEMDGFGDRQGVILMAATNRPDVLDPALLRPGRFDRQIPVTNPDLRGREQILEVHAKGKPFAPDADIKALAKRTAGMSGADLANVLNEAALLTARVGGNVITADALEEATDRVVGGPRRSGKVISEKEKKVTAYHEGGHTLSAWALEDIERVYKVTILARGRTGGHAMTAQEDDKGMYNRNELFARLVFAMGGRSAEELVFGEPTTGASADIEMATKIARSMVTEYGMSPAVGMVKYGQEQGDPFSGRGGGGNLDHSQEVAATIDTEVQFLLDKAHEVSYSILAEYRDHLDRLAEKLLEKETLRRPDLEALFDDIVPRKVAEVFPDESTRFPRQENREPVKTPVELALERGEEPPKKFSILEASRATRERRRKELEAQGKLPVQPASSAGVAPAAGAAAGSYGTPPPADWSVPGSAGKHRSRAEEQPAEQGFPAQTPAQAPEQSPDSSGGRPNPYATPTASGEHPGMKAYGFGDSELMDQSTGAEHTPGNVSQESPTEMIGFRLPDHERSDYPEKAQKESVLDASETTEMPVVPDQPIDGDSGKSAEGTQENPENEGDNRG

SEQ ID NO: 60365 - DNA, 1836 bp, Thermoanaerobacter tengcongensis MB4
  CDS (1)..(1836): transl_table=11
ttgaaagataacaataaaattttcaggagcatggtactttatctcctcattttcatagctatatatgcgatggtacagctttattcccaagctacgcctcaggtaactaaaatagactacggagagctggtaaggtatataagtgcaaatcagataaaaagtattactctttcgggcaatcaggtgaaaggcgtattcaaaaacggcaccgagtttgaaagcagtgtgcctgatataaccaattttatgtcttttgtggacccgtatatattggaaggcaaactggattttaaatatgagccccaggtgggaccgccttggtgggttcagatgcttccttccctgttcttggtaggtgtgctcattctcttctggtatatatttatgcagcaagcacagggcgggggaggaagcagggtgatgtcttttggcaagagcagagctagaatggttacagataaggacaaaagagttacttttaatgatgtggcgggtgcagatgaagaaaaagaagaactccaagagattgtagagtttttgaaatatccaaaaaaatttattgaattaggggcgagaattcctaaaggagtgcttttagtaggtccaccgggcacggggaagactcttctggcaagagctgttgcaggagaggcaggggttccctttttcagcataagcggttctgactttgtggagatgtttgtgggtgtgggtgcagcgagagtaagagacctttttgagcaggcgaagaaaaacgcaccttgtatagtgtttatagatgagatagatgctgtaggtaggcagagaggggcaggtctgggcggagggcatgacgagagagagcaaacgttgaaccagttattggttgagatggacggatttagtgtaaatgaagggataatcgtaattgcagctacaaacaggcctgatatactggatcccgcccttttaaggcctgggaggtttgacaggcatattgtggtcaatattcctgacataaaagggagagaagaaattttgaaagtccatgctagaaataaacctctggcgcctgacgtgtcccttcaagttattgccaggaggacgccgggctttacaggggctgacctagaaaatgtgatgaatgaggcagctctgctggcggcaagaaagggtttaaagcagataaccatggcagaattggaggaagctatcaccagagtcgtagctgggcctgaaaaaaggagtagaatcatgtctgaaaaagacaaaaaattggtagcctatcacgaagcagggcatgctgttgttgcgaagcttttgcccacgactccgcctgttcacgaggttaccatcattccaagagggagagctggaggttacacgatgcttctccccgaagaagacaagtactacatgtcaaagtcagagatgatggatgaaatagttcaccttttgggagggcgcgctgctgagaagttggtgctaaatgatataagcactggcgctcagaatgatatagaaagagctaccaatattgccaggaaaatggtgacagagtatggaatgagcgacagattaggtcctatgacttttggcacaaaaagcgaagaagtgtttttaggaagggatttaggaaggacgagaaactacagtgaggaagtggctgcagagatagacagagagataaggagaataatagaggaagcttataagagagcggaaagccttctacaagagaatatagataaacttcacagagtggcgaaggcccttatggaaaaagagaagctcaatggagaagagtttgaaaaagtatttaatggagaagaaatagaaggggtttcttttgcctga

SEQ ID NO: 60366 - protein, 611 aa, Thermoanaerobacter tengcongensis MB4
MKDNNKIFRSMVLYLLIFIAIYAMVQLYSQATPQVTKIDYGELVRYISANQIKSITLSGNQVKGVFKNGTEFESSVPDITNFMSFVDPYILEGKLDFKYEPQVGPPWWVQMLPSLFLVGVLILFWYIFMQQAQGGGGSRVMSFGKSRARMVTDKDKRVTFNDVAGADEEKEELQEIVEFLKYPKKFIELGARIPKGVLLVGPPGTGKTLLARAVAGEAGVPFFSISGSDFVEMFVGVGAARVRDLFEQAKKNAPCIVFIDEIDAVGRQRGAGLGGGHDEREQTLNQLLVEMDGFSVNEGIIVIAATNRPDILDPALLRPGRFDRHIVVNIPDIKGREEILKVHARNKPLAPDVSLQVIARRTPGFTGADLENVMNEAALLAARKGLKQITMAELEEAITRVVAGPEKRSRIMSEKDKKLVAYHEAGHAVVAKLLPTTPPVHEVTIIPRGRAGGYTMLLPEEDKYYMSKSEMMDEIVHLLGGRAAEKLVLNDISTGAQNDIERATNIARKMVTEYGMSDRLGPMTFGTKSEEVFLGRDLGRTRNYSEEVAAEIDREIRRIIEEAYKRAESLLQENIDKLHRVAKALMEKEKLNGEEFEKVFNGEEIEGVSFA

SEQ ID NO: 60367 - DNA, 2007 bp, Streptomyces coelicolor A3(2)
  CDS (1)..(2007): transl_table=11
atgtggatcgtgctggccgtccttgccgtggtcgtgttgatgcaggtcgtgggctcgtccggtggctacaagacggtcgacacgggccaggtcgtccaggcgatcaacgacaacagggtcgagtcggccaagctgaccaccggtgacgagcagaccatcaaggtccagctcaaggacggccagaaggtcgagggcagctcgaagatccaggcgagctacatcggcgaccagggcgtgaccctcgccaacacacttcagaacaagtaccaggacaagcagatccccgacggctacacggtgtcgccgtcgaagcagaacccgttcgtcgggatcctgctctccctgctcccgttcgtcctgatcgtggtcgtcttcctgttcctgatgaatcagatgcagggcggcggctcccgggtcatgaacttcgggaagtccaaggcgaagctcatcaccaaggacacccccaagacgacgttctccgacgtcgccgggtccgacgaggccgtagaggaactccacgagatcaaggagttcctccaggagccggccaagttccaggccgtcggcgccaagatccccaagggcgtgctgctgtacggcccgcccggtaccggcaagaccctgctcgcgcgtgccgtcgcgggcgaggcgggcgtgccgttctactcgatctccggttccgacttcgtcgagatgttcgtcggtgtcggtgcctcccgagtgcgtgacctgttcgagcaggccaaggcgaacgccccggccatcgtcttcgtcgacgagatcgacgcggtcggccgccaccgcggcgccggcctcggcggcggtcacgacgagcgcgagcagaccctgaaccagctgctcgtcgagatggacggcttcgacgtcaagggcggcgtgatcctcatcgccgcgacgaaccggcccgacatcctcgacccggcgctgctgcgtcccggccgcttcgaccggcagatcgccgtcgaccgcccggacatgcagggccgtctggagatcctcaaggtccaccagaagggcaagccggtcgcgcccgacgtcgacctgtcggccgtcgcccgccgtacgcccggcatgaccggtgccgatctggccaacgtgctgaacgaggccgccctgctgacggcccgcagcgaccagaagctgatcgacaaccacatgctggacgaggcgatcgaccgcgtggtcgcgggcccgcagaagcggacccggatcatgtcggacaaggagaagaagatcaccgcgtatcacgagggcggtcacgccctggtcgcggcggcctcaccgaactccgacccggtccacaagatcaccattctgtccagaggccgcgccctcggctacacgatggtgctcccggacgaggacaagtactcgaccacgcgcaacgagatgctcgaccagctcgcctacatgctgggcggccgcgcggccgaggagctcgtcttccacgacccgacgacgggcgcggccaacgacatcgagaaggccaccggcctggcccgggcgatggtcacccagtacggcatgaccgagcgcctcggcgccatcaagttcggcggcgacaacagcgagccgttcctcggacgtgagatggcgcaccagcgcgactactcggaagaggtcgccgcgctggtcgacgaggaggtcaagaagctcatcgagacggcgcacaacgaggcctgggagatcctggtcgagaaccgcgacgtcctcgacaacctcgtcctcgcgctgctggagaaggagacgctgggcaaggaggagatcgccgaggtcttctcccagatcgtcaagcgcccggcccggcccgcctggaccggttcctcccgccgtacgccctcgacgcgtccgccggtgctctcccccaaggagctggcactgacgaacggggcgaacggcgcgacggcggcgatctccaccgccaagagcaccacggtggagcccgctccggcaccggagcgagcaccggaggaccgcccggagagctga

SEQ ID NO: 60368 - protein, 668 aa, Streptomyces coelicolor A3(2)
MWIVLAVLAVVVLMQVVGSSGGYKTVDTGQVVQAINDNRVESAKLTTGDEQTIKVQLKDGQKVEGSSKIQASYIGDQGVTLANTLQNKYQDKQIPDGYTVSPSKQNPFVGILLSLLPFVLIVVVFLFLMNQMQGGGSRVMNFGKSKAKLITKDTPKTTFSDVAGSDEAVEELHEIKEFLQEPAKFQAVGAKIPKGVLLYGPPGTGKTLLARAVAGEAGVPFYSISGSDFVEMFVGVGASRVRDLFEQAKANAPAIVFVDEIDAVGRHRGAGLGGGHDEREQTLNQLLVEMDGFDVKGGVILIAATNRPDILDPALLRPGRFDRQIAVDRPDMQGRLEILKVHQKGKPVAPDVDLSAVARRTPGMTGADLANVLNEAALLTARSDQKLIDNHMLDEAIDRVVAGPQKRTRIMSDKEKKITAYHEGGHALVAAASPNSDPVHKITILSRGRALGYTMVLPDEDKYSTTRNEMLDQLAYMLGGRAAEELVFHDPTTGAANDIEKATGLARAMVTQYGMTERLGAIKFGGDNSEPFLGREMAHQRDYSEEVAALVDEEVKKLIETAHNEAWEILVENRDVLDNLVLALLEKETLGKEEIAEVFSQIVKRPARPAWTGSSRRTPSTRPPVLSPKELALTNGANGATAAISTAKSTTVEPAPAPERAPEDRPES

SEQ ID NO: 60369 - DNA, 1947 bp, Streptomyces coelicolor A3(2)
  CDS (1)..(1947): transl_table=11
atgaccaatccgtccccgccgcgcaaggcaccggagccgccctggcggaccgagggcacgcccgacgagccgcccaagccgccgcccggtggccggcggatgcgcggcggctggtggaacctgatcctggccgcgctgatcgtctacctcatcgccaacctcgtgctctccttcttcaacgagggcgacgagccgaccatctcctacacggagttcagcaagcaggtcgacgagggcaacgtcagcaagatctacgccaagggcgacgcgatccaggggcagctgaagaaggcccgggacaatcccgagggcgacgggacgtacaccaagttcacgaccgagcggccgaccttcgcggacgaccagctctgggccgacctgacgaagaacagggtcacggtcaccgccgagcccgtcgtgcagcaccgcagcttcctggccaacctgctgatcgcgctggccccgatgctgatcctggtggtgttgtggatcttcatcgcccggcgcatgcggggcgccctgggcggcggggcgggcgggatgctgggccgcaaggcgccgcccaagccggtcgagctggaggccgggaaaccgcgcaccaccttcgccgacgtcgcggggatcgacgaggtggagggcgagctgagcgatgtcgtcgacttcctgaagaacccggacgcctatcgccgcatgggcgccaagatgccccggggcgtcctgctgaccggcccgcccggcacgggaaagacgctcctcgcgcgcgcggtggccggcgaggcgggtgtgccgttcttctccgcgtcggcgtccgagttcatcgagatgatcgtgggcgtgggtgcctcccgggtgcgggagctgttcgccgaggcccgcaaggtggcgccgtcgatcatcttcatcgacgagatcgacaccatcggccgcgcccgcggcggcggctccggcacgggcggccacgacgagcgcgagcagaccctgaaccagatcctcaccgagatggacggcttctccggctcggagggcgtgatcgtcatcgcggccaccaaccgcgcggacatcctggacgcggccctgacccggcccggccgcttcgaccgggtggtcagcgtctcgccgccggacagaggcggccgggaggcgatcctggagatccacacccgcgagattccgctcgccccggacatcgacctcgcccaggtggcccgtacgacgccgggaatgaccggcgccgagctcgccaacctcgccaacgaggcggcgttgctcgcggtgaagcggaagcaggagcgggtgacgcaggcgaacctctccgaggcgctggagaaggtccagctgggggccgaacgcccgctggtgatgcccgaggaggagcgccggcgcaccgcctaccacgagagtggtcacgcgctgctgggcatgctgcagccgggcgccgatcccgtccgcaagatcacgatcgtgccgcgcggccgggcgctcggggtgacgctgtcgacgccggacgcggacaagtacgcgtacacggaggagtacctgcgcgggcggatcatcggggcgctcggcggcatggcggccgagcacgtcgtgtacgggatgatcacgaccggttcggagagcgacctcgaacaggtcaccaacatcgcccgcgggatggtcgcgcggtggggcatgagcgagcgggtcggcaggctctccgccctgcccggcgacgcccagcaggcgtacggcctcgccgccgcaccccagacgctcgacgcgatcgacggtgagatgcggcgggtcgtggactcctgctacgaggaggccgtgcgcaagctgcgcgaccaccggggacagctggacgcgctcgccgagtcgctgctggcgagcgagacgctggacgaggcggacgcctaccgcatcgccgggatcacccggctgacgaaggacgacccggaggcgtga

SEQ ID NO: 60370 - protein, 648 aa, Streptomyces coelicolor A3(2)
MTNPSPPRKAPEPPWRTEGTPDEPPKPPPGGRRMRGGWWNLILAALIVYLIANLVLSFFNEGDEPTISYTEFSKQVDEGNVSKIYAKGDAIQGQLKKARDNPEGDGTYTKFTTERPTFADDQLWADLTKNRVTVTAEPVVQHRSFLANLLIALAPMLILVVLWIFIARRMRGALGGGAGGMLGRKAPPKPVELEAGKPRTTFADVAGIDEVEGELSDVVDFLKNPDAYRRMGAKMPRGVLLTGPPGTGKTLLARAVAGEAGVPFFSASASEFIEMIVGVGASRVRELFAEARKVAPSIIFIDEIDTIGRARGGGSGTGGHDEREQTLNQILTEMDGFSGSEGVIVIAATNRADILDAALTRPGRFDRVVSVSPPDRGGREAILEIHTREIPLAPDIDLAQVARTTPGMTGAELANLANEAALLAVKRKQERVTQANLSEALEKVQLGAERPLVMPEEERRRTAYHESGHALLGMLQPGADPVRKITIVPRGRALGVTLSTPDADKYAYTEEYLRGRIIGALGGMAAEHVVYGMITTGSESDLEQVTNIARGMVARWGMSERVGRLSALPGDAQQAYGLAAAPQTLDAIDGEMRRVVDSCYEEAVRKLRDHRGQLDALAESLLASETLDEADAYRIAGITRLTKDDPEA

SEQ ID NO: 60371 - DNA, 1947 bp, Xanthomonas campestris pv. campestris str. ATCC 33913
  CDS (1)..(1947): transl_table=11
atgaggatgaacgacttgaccaagaatctgctgctatgggtggtcgtcgcggttgtgttgatggtcgtcttccagagcttttcgccgcgcatggccggcggagtgggccctgactcgatcacctacacccagttcctgaaggaagtggattcgggccgggtgaagtcggtggattacaccgatgagaccaacttggccgtcaacgcgatccgcttcaagcgcaccgacggcagcgaagccaccgtctacggtccgcgcgacgacaagctggtcgacgtgctgtacagcaagaacatcgaaatgacccgccagaagccgtccaccgggccgggcttctggtcgctggtgctcaacttcctgccggtcatcctgatcatcggcttctggctgttcatcatgcgccagatgcagggcggtggcggcggcgccaagggggcgatgagcttcggcaagtcgcgcgccaagctgcagggcgaagaccaggtcaaggtcaccttcgctgacgtcgcaggctgcgatgaagccaaggaagaagtgggcgagctggtcgacttcctgcgcgatcccaccaagttcaccaagctgggtggcaagattccgcgcggcgttttgatggtgggcccgccgggtacgggcaagacgttgcttgccaaggcgatcgccggcgaagccaaggtgccgttcttcagcatctccggttcggacttcgtcgaaatgttcgtgggcgtcggcgccagccgcgtgcgcgacatgttcgagcaggccaagaagcatgccccgtgcatcatcttcatcgacgaaatcgatgcggtgggccgtcatcgcggtgccggtctgggcggcggtcatgacgagcgcgagcagaccctcaaccagttgctggtcgagatggatggctttgagggcggcgaaggcgtgatcgtgattgctgcgaccaaccgtcctgacgtgctggatccggcgttgctgcgtccgggtcgcttcgaccgtcaggtcgtggtcggcctgccggacgtcaagggccgcgagcagatcctgcgcgtgcacatgcgcaagctgccgctggccgacgacgtcgtgccgctggtgattgcacgtggtaccccgggcttctccggtgccgatctggccaatctggccaatgaggctgcgttgtttgccgcacgtggcaacgagaaggaagtccgcatggaccacttcgaccgtgcacgcgacaagatcctgatgggtgccgagcgccgctcgatggccatgagcgaggacgagaagaccctgactgcgtatcacgaggctggtcatgccattgtcggccgcctggtgcccgagcatgacccggtctacaaggtcacgatcattccgcgtggtcgcgccctgggcgtgacgatgtacttgccggaaggcgaccgctactcgatgaatcgcgtggcgatcgaatcgcagctgtgctcgctgtatggcggccgcgttgctgaagagctgatcttcggcggcgacaaggtcaccaccggtgcgtccaacgacatcgaacgcgccaccaagatggcccgcaacatggtcaccaagtggggcctttcggatgaactcggcccggtggcctacggcgaggaagaggacgaggtgttcctgggccgttcggtgacccagcacaagaacgtctcggatgagaccgcacgcaagatcgacgaagtggtgcggtcgatcctggacaaggcgtacagcaagaccaagaccatcctcacggagaatctggacaagctgcatgcgatgtcgcagctgctgttgcagtacgagaccatcgacgtaccgcagatcgacgccatcatggaaggccgcgacccgccgccgccagctggctggggcaagtccgacaaggacggtggcaacaacaacgacaagggtagcccgcgtccgttgccgccgatcgcaggtcctgccgagcagctgtaa

SEQ ID NO: 60372 - protein, 648 aa, Xanthomonas campestris pv. campestris str. ATCC 33913
MRMNDLTKNLLLWVVVAVVLMVVFQSFSPRMAGGVGPDSITYTQFLKEVDSGRVKSVDYTDETNLAVNAIRFKRTDGSEATVYGPRDDKLVDVLYSKNIEMTRQKPSTGPGFWSLVLNFLPVILIIGFWLFIMRQMQGGGGGAKGAMSFGKSRAKLQGEDQVKVTFADVAGCDEAKEEVGELVDFLRDPTKFTKLGGKIPRGVLMVGPPGTGKTLLAKAIAGEAKVPFFSISGSDFVEMFVGVGASRVRDMFEQAKKHAPCIIFIDEIDAVGRHRGAGLGGGHDEREQTLNQLLVEMDGFEGGEGVIVIAATNRPDVLDPALLRPGRFDRQVVVGLPDVKGREQILRVHMRKLPLADDVVPLVIARGTPGFSGADLANLANEAALFAARGNEKEVRMDHFDRARDKILMGAERRSMAMSEDEKTLTAYHEAGHAIVGRLVPEHDPVYKVTIIPRGRALGVTMYLPEGDRYSMNRVAIESQLCSLYGGRVAEELIFGGDKVTTGASNDIERATKMARNMVTKWGLSDELGPVAYGEEEDEVFLGRSVTQHKNVSDETARKIDEVVRSILDKAYSKTKTILTENLDKLHAMSQLLLQYETIDVPQIDAIMEGRDPPPPAGWGKSDKDGGNNNDKGSPRPLPPIAGPAEQL

SEQ ID NO: 60373 - DNA, 1947 bp, Xanthomonas axonopodis pv. citri str. 306
  CDS (1)..(1947): transl_table=11
atgaggatgaacgacttgaccaagaatctgctgctgtgggtggtcgtcgcagttgtgctgatggttgtcttccagagcttctcgccgcggatggcgggcggcgtcggtgccgactcgatcacctacacccagttcctgaaggaagtggactccgggcgcgtcaaatcggtggattacaccgacgagaccaacctggccgtcaacgcgatccgcttcaagcgcaccgacggcagcgaggccaccgtctacggtccccgcgacgacaagctggtcgacgtgctgtacagcaagaacatcgaaatgacccgccagaagccctcgaccggccctggcttctggtcgctggtgctcaatttccttcccgtcatcctgatcatcggcttctggctgttcatcatgcgccagatgcaggggggtggtggcggcgcgaagggcgcgatgagcttcggcaagtcgcgcgccaaattgcagggcgaggaccagatcaagatcaccttcgccgacgtcgccggttgcgacgaggccaaggaagaagtgggcgaattggtggacttcctgcgcgacccgaccaagttcaccaagctgggcggcaagattccgcgaggcgtgttgatggtcggcccgccgggtaccggcaagaccctgctcgccaaggcgatcgccggcgaggccaaggtgccgttcttcagcatctccggttccgacttcgtcgaaatgttcgtcggcgtgggtgccagccgcgtgcgcgacatgttcgagcaggccaagaagcacgcgccatgcatcatcttcatcgacgaaatcgatgcggtgggccgtcatcgcggtgccggtctcggcggcgggcatgacgagcgcgagcagaccttgaaccagctgctggtcgaaatggacggtttcgagggtggcgaaggcgtgatcgtgattgcggcgaccaaccgtcccgacgtgctggatccggcgctgctgcgtccaggccgttttgaccgtcaggtcgtggtcggcctgccggacgtcaagggccgcgagcagatcctgcgcgtgcacatgcgcaagctgccgctggccgacgatgtcgtgccgatggtcatcgcccgcggtaccccgggtttctcgggcgccgacttggccaacctgtgcaacgaggcagcattgttcgcggcgcgtggcagcgagaaggaagtccgcatggaccacttcgaccgtgcccgcgacaagattctgatgggtgccgagcgccgctcgatggccatgagcgaggacgagaagacccttaccgcgtatcacgaggcgggccacgccatcgtcggccgtctggtgccggagcacgacccggtctacaaggtcaccatcattccgcgtggccgcgcgctcggcgtgacgatgtatctgccggaaggcgaccgctactcgatgaaccgtgtcgcgatcgagtcgcagctgtgctcgctgtacggtggtcgcgttgccgaagagctgatcttcggcggcgacaaggtcaccaccggtgcgtccaacgacatcgagcgggccaccaagatggcgcgcaacatggtcaccaagtggggcctgtccgacgagcttggcccggtggcctatggcgaggaagaggacgaggtgttcctgggccgttcggtgacccagcacaagaacgtttccgacgagaccgcgcgcaagatcgacgaagtggtgcgttcgatcctggacaaggcctacagcaagaccaagaccatcctcaccgagaacctggacaagctgcacgcgatgtcgcagttgttgctgcagtacgaaaccatcgacgtgccgcagatcgatgccatcatggaaggccgcgagccgccgccgccggctggttggggcaagtccgacaaggacggtggcaacaacaacgacaagggtagtccgcgtccattgccgcccatcgccggacccgccgagcaactctaa

SEQ ID NO: 60374 - protein, 648 aa, Xanthomonas axonopodis pv. citri str. 306
MRMNDLTKNLLLWVVVAVVLMVVFQSFSPRMAGGVGADSITYTQFLKEVDSGRVKSVDYTDETNLAVNAIRFKRTDGSEATVYGPRDDKLVDVLYSKNIEMTRQKPSTGPGFWSLVLNFLPVILIIGFWLFIMRQMQGGGGGAKGAMSFGKSRAKLQGEDQIKITFADVAGCDEAKEEVGELVDFLRDPTKFTKLGGKIPRGVLMVGPPGTGKTLLAKAIAGEAKVPFFSISGSDFVEMFVGVGASRVRDMFEQAKKHAPCIIFIDEIDAVGRHRGAGLGGGHDEREQTLNQLLVEMDGFEGGEGVIVIAATNRPDVLDPALLRPGRFDRQVVVGLPDVKGREQILRVHMRKLPLADDVVPMVIARGTPGFSGADLANLCNEAALFAARGSEKEVRMDHFDRARDKILMGAERRSMAMSEDEKTLTAYHEAGHAIVGRLVPEHDPVYKVTIIPRGRALGVTMYLPEGDRYSMNRVAIESQLCSLYGGRVAEELIFGGDKVTTGASNDIERATKMARNMVTKWGLSDELGPVAYGEEEDEVFLGRSVTQHKNVSDETARKIDEVVRSILDKAYSKTKTILTENLDKLHAMSQLLLQYETIDVPQIDAIMEGREPPPPAGWGKSDKDGGNNNDKGSPRPLPPIAGPAEQL

SEQ ID NO: 60375 - DNA, 1839 bp, Thermosynechococcus elongatus BP-1
  CDS (1)..(1839): transl_table=11
gtgaataaacaatggcgaaacgcaggtttatacgtacttctggcaatcgtggtgctggccttggccacggccttctttgatcgccaacccacgaccaaacaaacatggccctacagtgagttcatccaacaggtcgaaagtaagcaaatcaccaaagtcagtatcacccctgaccgctctcaagctcaagcaattacccaagatggcacgcgagttctggttaatcttcccaatgaccctgaactcctggacattctcacaaccaacaatgtggacattgctgttttgccccaaagcaatgatggcttctggttccgcgccctcagcagcttgtttgttcccattggcctcttggtactgctctttttcctgttgcggcgtgcccaagcgggtcctggcaaccaagcgatgaatttcggtaagtcacgggcacgggtacagatggaaccccaaacccaagtgacatttaatgatgtggccgggattgatcaggccaagctggaactgggtgaagtggtggaattccttaagtatgccgatcgcttcacggaagtcggtgccaaaattcccaagggtgtcttgctggtgggtccgccaggaacaggtaaaaccctccttgcccgtgccgttgccggtgaggccggtgttcccttcttctcaatttcgggttctgagtttgtggaaatgttcgttggggtgggggcctcacgggtgcgcgacctctttgaacaagccaaagccaatgccccctgtatcgtttttattgatgagattgatgccgttggtcgccagcgcggtgccggtctggggggtggcaatgatgaacgggagcaaaccctcaaccagctgctgacggaaatggatggctttgaggggaatacgggcatcattgttattgctgcaaccaaccgtccggatgttttggatgcagcactgttgcgtcccggtcgttttgaccgtcaagtggtggtggatcgccccgattacaaaggtcgccttgatattctcaaagtccatgcccgcggcaaaaccctcgctaaggatgtggatctcgataaaattgcccgccgtacgcccggctttacgggtgcggatctctcaaacctgctcaatgaggcggccattcttgcagcccgccgtaacctcactgagatctcaatggatgagattaacgatgccattgatcgcgtgcttgcggggccggagaaaaaagaccgcgtcatgagcgatcgccgcaagaagttagtcgcctaccatgaggcgggtcatgcccttgtgggcgccctgatgccagactacgatcccgtacaaaaagtgagcatcattcctcggggacgggcagggggcctgacctggtttacccccaacgaagatcagatggattcgggtctctacagccgtgcctacctacaaaaccaaatggccgttgcccttgggggtcgcattgctgaggaaattgtctttggcgaggatgaggtgacaacgggggcctcaaacgatctgcaacaggtggcgcgggtggcacggcaaatggtgacccgctttggcatgagcgatcgcctagggcctgtggctttgggacggcaaacggggaatgtcttccttggccgcgacattatggcggaacgggacttctctgaggaaaccgctgccaccattgatgacgaagtgcgcaacctagtggagcaggcctatcgccgcgccaaagaggtgttggtgaacaatcgccacgtccttgaccaaattgcccaagtactcattgaaaaagagacaatcgacgctgaggaactccaaagcatcttggatcgcaacgacgtcaagatggcaacgattccctag

SEQ ID NO: 60376 - protein, 612 aa, Thermosynechococcus elongatus BP-1
MNKQWRNAGLYVLLAIVVLALATAFFDRQPTTKQTWPYSEFIQQVESKQITKVSITPDRSQAQAITQDGTRVLVNLPNDPELLDILTTNNVDIAVLPQSNDGFWFRALSSLFVPIGLLVLLFFLLRRAQAGPGNQAMNFGKSRARVQMEPQTQVTFNDVAGIDQAKLELGEVVEFLKYADRFTEVGAKIPKGVLLVGPPGTGKTLLARAVAGEAGVPFFSISGSEFVEMFVGVGASRVRDLFEQAKANAPCIVFIDEIDAVGRQRGAGLGGGNDEREQTLNQLLTEMDGFEGNTGIIVIAATNRPDVLDAALLRPGRFDRQVVVDRPDYKGRLDILKVHARGKTLAKDVDLDKIARRTPGFTGADLSNLLNEAAILAARRNLTEISMDEINDAIDRVLAGPEKKDRVMSDRRKKLVAYHEAGHALVGALMPDYDPVQKVSIIPRGRAGGLTWFTPNEDQMDSGLYSRAYLQNQMAVALGGRIAEEIVFGEDEVTTGASNDLQQVARVARQMVTRFGMSDRLGPVALGRQTGNVFLGRDIMAERDFSEETAATIDDEVRNLVEQAYRRAKEVLVNNRHVLDQIAQVLIEKETIDAEELQSILDRNDVKMATIP

SEQ ID NO: 60377 - DNA, 2028 bp, Oceanobacillus iheyensis HTE831
  CDS (1)..(2028): transl_table=11
atgagtcaggtatttcgtaatgccttattctggttactcatattctttgtaatcattggagttattggagtaatcaacaatcaaggtgaagaaagagaacagtatgatgtagagcaatttataagtgctttaaataatggcgaaatcgaagaactcgtttttcagccatcacatggaattattcgtctaacagggacactaactgatggagaaacagaatttgttgctcaggttcctgataataatgacctcgtgtcacaaattactgatactgctagagaacaaagccaattaaccgttatggaagaagaacagccaagtccatggcttacattcctaactggaattattccgttcttattaatcggtttattcttcttatttatacttagtcaggcacaaggaggcggcggtggcggccgtgtaatgaacttcggtaagagtaaagcaaaaatgtactctgaagataagaaaaaggttcgctttaaagatgtcgctggtgcagatgaagaaaaacaagagcttgttgaagtagttgaattcttaaaagacccacgcaaattctcgcaagtaggagcccgtatacctaaaggggtacttctagttggacctcctggtacaggtaaaacgttacttgctcgtgccgttgctggagaagctggaacaccgttcttctctattagtggttcggactttgtggaaatgtttgtaggtgtcggtgcttctcgtgtacgtgacctatttgaaaacgcgaaaaagaatgctccatgtattatctttattgatgaaattgatgctgtagggcgtcaacgtggtgcagggcttggtggcggtcacgatgaacgtgaacaaacacttaaccaattactagttgaaatggacgggtttggagcaaatgaaggtattattattattgccgctacaaaccgtgcggatatattagaccctgcattattacgtccgggtcgtttcgatagacaaataatggttgatcgtcctgatgtgaaaggtcgtgaagctgtactaggtgtacacgctcaaaacaaaccattagatgcaaatgtagatttaaaaacaatcgcaatgcgtactccaggtttctctggtgcagatttagagaacttacttaacgaagcggcgttaattgctgcgcgtgatgatcgcaagaaacttaaccagttagatattgatgaagcaattgaccgggttattgctggaccggctaagaagagccgtgttatttctcaaaaagagagaaatattgttgcatatcatgagagtggtcatacggttataggtatggttctggatgatgcggatgtcgtgcataaagttacgattgttccacgtggtcaagccggcggttatgctgtaatgctacctcgtgaagatcgatatttcatgacaaaaccagaactctttgacaagattactgggctacttggtggccgagtagcagaagaaattatctttggagaagtaagtacgggagcatctaatgacttccagcgtgctacaaatatcgctcataagatgattacagagtatggtatgagtgacaagatcgggccattgcaatttagcagtggtggtggaggaaacgtcttcttaggacgtgatatccaaaatgaacagacatactctgatgcaatagcacacgaaattgataaagaaatgcagtcatttatcaattactgctatgatcgtgcgaaaaccattcttacagaaaacaaagatcaattagaattgattgcgaagaccttgttagaggtagaaacgttagatgcaaaacaaattaaatctttatttgaagaaggaatattaccagagcctgaagaagaaacagatgagttgaaggtaaatattaattctaaagaagatgaagataaaaaagggatttcttatgaagaagcgaaacaaaagcttgatgatgaagaaaaatcggaacgagaagaaatagattctgaaaatacttccagcgatgaaactcaggacgatacttcagaggatcaaaaccctaaaaattaa

SEQ ID NO: 60378 - protein, 675 aa, Oceanobacillus iheyensis HTE831
MSQVFRNALFWLLIFFVIIGVIGVINNQGEEREQYDVEQFISALNNGEIEELVFQPSHGIIRLTGTLTDGETEFVAQVPDNNDLVSQITDTAREQSQLTVMEEEQPSPWLTFLTGIIPFLLIGLFFLFILSQAQGGGGGGRVMNFGKSKAKMYSEDKKKVRFKDVAGADEEKQELVEVVEFLKDPRKFSQVGARIPKGVLLVGPPGTGKTLLARAVAGEAGTPFFSISGSDFVEMFVGVGASRVRDLFENAKKNAPCIIFIDEIDAVGRQRGAGLGGGHDEREQTLNQLLVEMDGFGANEGIIIIAATNRADILDPALLRPGRFDRQIMVDRPDVKGREAVLGVHAQNKPLDANVDLKTIAMRTPGFSGADLENLLNEAALIAARDDRKKLNQLDIDEAIDRVIAGPAKKSRVISQKERNIVAYHESGHTVIGMVLDDADVVHKVTIVPRGQAGGYAVMLPREDRYFMTKPELFDKITGLLGGRVAEEIIFGEVSTGASNDFQRATNIAHKMITEYGMSDKIGPLQFSSGGGGNVFLGRDIQNEQTYSDAIAHEIDKEMQSFINYCYDRAKTILTENKDQLELIAKTLLEVETLDAKQIKSLFEEGILPEPEEETDELKVNINSKEDEDKKGISYEEAKQKLDDEEKSEREEIDSENTSSDETQDDTSEDQNPKN

SEQ ID NO: 60379 - DNA, 1935 bp, Brucella suis 1330
  CDS (1)..(1935): transl_table=11
atgaatccgaactatcgcaacttcgccctttgggcgatcattgctcttcttttgatcgcactgttcaacctgttccaaagcccaggtcagcgcacgaattctcgtgaaatttcttattcgcaatttattgacgacgtttccaacggtcgtgtgaaatcggtcacgattaccgggcagcggatatccggcacccttgccgataacggctccaccttccagacctattcgccgggggatacgggcctcgtgtcgcgtcttgaagacaagggcgtcgcaatcacggcacggcctgaatcggacggttcgagctcgctgatcggcattcttctgtcatggttgccgatgatcctcattctcggtgtgtggattttcttcatgcgccagatgcagggtggctcccgcggcgcgatgggattcggcaagtcgaaggcgaagcttctcaccgaagcccatggccgcgtgacctttcaggacgtggcgggcgtggatgaggccaagcaggaccttgaggaaattgttgaattcctgcgcgatccgcagaagttccagcgcctcggcggcaagattccgcgcggtgtgctgctcgtaggccctcccggcaccggcaagacgctgcttgcgcgttcggttgcgggcgaagccaatgtgcctttcttcaccatttccggttcggacttcgttgaaatgttcgtcggtgtcggcgcaagccgcgtccgcgatatgtttgaacaggccaagaagaatgcgccctgcattatcttcatcgatgaaatcgatgcggtgggccgtcatcgtggcgccggtcttggcggcggcaatgacgagcgcgaacagacgctcaaccagcttttggtcgagatggacggttttgaagccaatgaatcgatcatcctgattgcggccaccaaccgtcccgacgttcttgatccggcgctcttgcgtccgggccgtttcgaccgtcaggtcgtggtgccgaaccctgatattgtcggccgcgaacagatcctcaaggtgcatgtgcgcaatgttccgcttgcacccaatgttgatctcaaggttgtcgcacgcggtacgccgggcttctccggtgccgatcttgccaacctcgtcaacgaagccgccctcatgaccgcgcgccgcaacaagcgcctcgtgaccatgcaggaattcgaggattccaaggacaagatcatgatgggtgcggaacgccgttccgccatgacgccggaagaaaagacgaataccgcctatcatgaggccggtcatgccatcgtcgcgctgaatgtccccaaggccgacccggtccataaggcgaccatcattccgcgcggtcgtgcgctcggcatggtgatgcagttgccggaaggcgaccgttattcggcgacctatacgtggatggtttctcgccttgcgatcatgatgggtggccgtgtggctgaagagctgaaattcggcaaggaaaacatcacgtccggtgcttcctccgatatccagcaggccacgaaactggcccgttcgatggtgacgcagtggggctattccgacaagcttggccgtgtggcctatggcgacaatcaggaagaagtcttccttggtcattcggtgtctcgcacgcagaatatttcggaagagaccgcgcagatcatcgacgccgaagtgcgccgcctgattgatgaagcctatgctgaagcaacccggatcctgaccaagaagaagaaggactggattgcactggctgaaggcctgctggaatatgaaacgcttaccggcgacgagatcaacgaactgattgcgggcaacaagccatcgcgcgatcagggcaatgatacgccgtcgcgcggttcgggtgtgcctaaggccggtagctcgcgcaagcgcaagggcagcgaacccggtggcgaacccggcatggagccgaaaccgcagccgcaataa

SEQ ID NO: 60380 - protein, 644 aa, Brucella suis 1330
MNPNYRNFALWAIIALLLIALFNLFQSPGQRTNSREISYSQFIDDVSNGRVKSVTITGQRISGTLADNGSTFQTYSPGDTGLVSRLEDKGVAITARPESDGSSSLIGILLSWLPMILILGVWIFFMRQMQGGSRGAMGFGKSKAKLLTEAHGRVTFQDVAGVDEAKQDLEEIVEFLRDPQKFQRLGGKIPRGVLLVGPPGTGKTLLARSVAGEANVPFFTISGSDFVEMFVGVGASRVRDMFEQAKKNAPCIIFIDEIDAVGRHRGAGLGGGNDEREQTLNQLLVEMDGFEANESIILIAATNRPDVLDPALLRPGRFDRQVVVPNPDIVGREQILKVHVRNVPLAPNVDLKVVARGTPGFSGADLANLVNEAALMTARRNKRLVTMQEFEDSKDKIMMGAERRSAMTPEEKTNTAYHEAGHAIVALNVPKADPVHKATIIPRGRALGMVMQLPEGDRYSATYTWMVSRLAIMMGGRVAEELKFGKENITSGASSDIQQATKLARSMVTQWGYSDKLGRVAYGDNQEEVFLGHSVSRTQNISEETAQIIDAEVRRLIDEAYAEATRILTKKKKDWIALAEGLLEYETLTGDEINELIAGNKPSRDQGNDTPSRGSGVPKAGSSRKRKGSEPGGEPGMEPKPQPQ

SEQ ID NO: 60381 - DNA, 2211 bp, Drosophila melanogaster
  CDS (1)..(2211)
atgttttccaccaccacacactccgtgccctacctgtacctaggcaacttcagcagaaagccgcactactactccgttaatcgaaccaagctgcacgggagcgcgggagctgcccggttgtccaagtccacgtccacgtccagccggagtcatgacctagtgctcgacctgcggaacctgctgagccgttcgagcgccagtatacagggcatggtggagagggcggctcgactgaatggcattctcgaccggcggctggtcgatgatgtgctggccaaggtgacgagcatgctgccctccatgcgcgatgtccgagtcacgttggaggagtcggccacacagatcggtcgtgtccagctgcaaaattatcagttcgaagtttcgctaaccggtgcagcaggttccgtgcccacaggcgccaatgtcaaggtgattccaactattacaccaggtcttcttcgtccgctcttctcacaacaacagctaaatcagatacgtggctttaagacggatcgttccattgaggcggaacaaaagcgcaatcccacaatgacctcccgactaaagaatgctctggccaactcgccccagcgtctggatggggacacaccccttcaggctgaaaaactgagacggctgctggccaaatccgaagagcatggatttaataaagccgagagcctgaaaattgcctttgccgagggctacttggccgccgctaactcggaggactctccaaaatcaggaaaaactatgaaatatctgaagactatcgtcgttatcgtcgtgttcttgggcattttcctgagcttctttacaacctccaatggatccgtatttcgcatacaactgggcaaccaggttgaagtggaccctgaggagatcaacgtcacttttgaggatgtcaagggttgcgacgaagccaagcaggagctcaaggaggtcgttgaattcctgaagagtccggaaaagttctcaaatttgggcggaaagcttccaaagggagtgctcctggttggcccgccgggtactggcaaaacactgctggcccgtgccgtcgccggtgaagccaaagttcctttcttccatgctgccggaccggagttcgacgaggtgctcgtaggccaaggagccagacgagtgcgtgatctgttcaaggcagcaaaggcccgtgccccttgtgttatcttcattgacgaaatcgactcggtgggcgccaagcgaaccaactctgtgctgcatccttacgccaatcagaccatcaatcagctgctctccgagatggatggcttccatcagaacgctggcgtcattgttttgggagccaccaatcgtcgcgacgatttggatcaggctctgctgcgtcccggccgatttgatgtagaagtcatggtgtcgacgcccgatttcactggacgtaaggagatattgtctctgtatctgacgaagattttgcacgatgaaatagacttggacatgctggcgcgcggcacctctggttttactggagcggatctggaaaacatgattaaccaagcggcgttaagagctgccatcgatggagccgaaacggtcagcatgaagcatttggaaacggcacgagacaaagtacttatgggacccgagcgcaaggctcgtctaccggacgaggaggccaacaccataaccgcttaccacgagggcggccacgcgattgtggccttctacaccaaggagtcgcatccgctgcacaaggtgaccatcatgccccgcggaccctcccttggacacaccgcctacataccggagaaggagcgttaccatgtcacaaaggcacagctgctggccatgatggacaccatgatgggcggtcgtgctgctgaggaactggtcttcggcacggacaagattacgtcgggagccagcagtgatctcaagcaggcaacctcgatcgcgacgcatatggtcagggactggggcatgtcggacaaggtcggtcttcgcaccatcgaggcgtcaaagggtctgggcaccggtgacacccttggtcccaacaccattgaagccgtggacgcggagatcaagcgcatcctcagcgacagctacgagcgggcgaaggctatcctgcgaaaacacaccagggagcacaaagcgcttgcggaggcgcttctcaagtacgagactcttgacgccgacgacatcaaggcaatactgaatgaaagccagacgtag

SEQ ID NO: 60382 - protein, 736 aa, Drosophila melanogaster
MFSTTTHSVPYLYLGNFSRKPHYYSVNRTKLHGSAGAARLSKSTSTSSRSHDLVLDLRNLLSRSSASIQGMVERAARLNGILDRRLVDDVLAKVTSMLPSMRDVRVTLEESATQIGRVQLQNYQFEVSLTGAAGSVPTGANVKVIPTITPGLLRPLFSQQQLNQIRGFKTDRSIEAEQKRNPTMTSRLKNALANSPQRLDGDTPLQAEKLRRLLAKSEEHGFNKAESLKIAFAEGYLAAANSEDSPKSGKTMKYLKTIVVIVVFLGIFLSFFTTSNGSVFRIQLGNQVEVDPEEINVTFEDVKGCDEAKQELKEVVEFLKSPEKFSNLGGKLPKGVLLVGPPGTGKTLLARAVAGEAKVPFFHAAGPEFDEVLVGQGARRVRDLFKAAKARAPCVIFIDEIDSVGAKRTNSVLHPYANQTINQLLSEMDGFHQNAGVIVLGATNRRDDLDQALLRPGRFDVEVMVSTPDFTGRKEILSLYLTKILHDEIDLDMLARGTSGFTGADLENMINQAALRAAIDGAETVSMKHLETARDKVLMGPERKARLPDEEANTITAYHEGGHAIVAFYTKESHPLHKVTIMPRGPSLGHTAYIPEKERYHVTKAQLLAMMDTMMGGRAAEELVFGTDKITSGASSDLKQATSIATHMVRDWGMSDKVGLRTIEASKGLGTGDTLGPNTIEAVDAEIKRILSDSYERAKAILRKHTREHKALAEALLKYETLDADDIKAILNESQT

SEQ ID NO: 60383 - DNA, 2481 bp, Drosophila melanogaster
  CDS (1)..(2481)
atggcgttccggctgcttggcacggccaaaacgatggccggaatgatgcggcgcaactacacggcgggttccttgccgggaaagggacaacgcacacacatgggtgccacgggcgccggggtttacatcctgcccacggagctgtcgcccctgctgcgctacgtggtcaaacagatccagctgctgtgcaaaaagccgccgaagggatttgaaaagtatttcgaagccggcggcaagtcgtctggccaaccgaagggatccgtcggcgataagaagccacccgcgggttccagcaaatccgcctcggagaagcccagcacatcgacacccgcctcagttaaacccagcagatcccaaacagacgcgaaatcggactggaacttcggcatgttcagcaacagctcgagggggccagcaggaaaaggaggcaactcgctgggcggacgacctctgggcgagaacggtggcggcggggacagggagcggtggatccttctgggtgccatcggagccgtcgtcctggtgggttcgttcgccttcttcgagatgggctacaaggagatctcgtggaaggagttcgtcaacagctacctgtcgaagggcgtcgtggagaagctggaggtggttaacaagaagtgggtgagagtgcgtctgcagcagaacagcaacagcggcagcggcgtcttgtggttcaacatcggcagtgtcgatagcttcgagcgaaacctggaggcagcccagacggagcagggaacggaatccatcaactttgtgcccgtaatctaccgcaacgaggtggaggccgccagtctgacgggtctgctgcccacgttgctcatcataggctttctggtctatatgatgcggaagtcggccgatatgatgggtggaggccgtgggcgcaagggtggtggtctttttggtggcgtcatgcagtccaccgcaaagctaaccaatcccaatgagattggtgtgggtttcaaggatgttgccggttgcgaggaggccaaaatcgaaatcatggagttcgttaacttcctgaagaacccgcagcagtatattgatttaggcgccaagataccgaagggtgccatgctaactggcccacccggaacgggtaaaacgctactggccaaggctaccgccggcgaggcgaatgtaccgtttattaccgtgtcgggatccgagttcctcgagatgtttgtgggcgtgggaccttctcgtgtccgcgacatgttcgccatggcccgaaagcatgctccctgcatcctcttcatcgacgaaatcgatgctgtgggtcgcaaacgtggtggcaagaccttcggtggccactcggagcaagagaatacccttaaccagcttctggtggaaatggatggcttcaataccactacgaatgtggtcgtactggccgccactaatcgtgttgatattctggacaaggctctcatgcgaccaggtcgtttcgatcgacagatttatgtaccagcacctgatattaagggcagggcgagcatctttaaggtgcatctgggtaacctgaaaacgtcgctggacaagaacgagctgagcagaaaaatggctgcactgacaccaggcttcacaggcgctgacatcgcgaatgtttgcaacgaagctgctttgattgccgcccgcgactccaaggattcgatcgtactcaagcacttcgagcaggccattgagcgtgttatcgctggcatggagaagaagaccaatgttctggcgccggaggaaaagcgaacggtggcacaccacgaggctggccatgcggtggccggttggttcctggagcacgcagatcccctgctgaaggtctcgattataccacgcggcaagggtctgggctacgcccagtatctgcccaaggatcactacttgctgtccaaggagcagttgttcgatcgcatgtgcatgacgctcggcggacgtgtggccgaagagctgttctttaatcgcattaccactggtgctcaggatgatctaaagaagatcaccgatattgcctactcccaggtggtgcgtttcggcatgaacgagaaggtcgggcaggtcagcttcgatgtgggccaggccggtgatcccgttttcagcaaaccatactcggaggacacagcgcagctgatcgacaacgaggtgaggtcgattatcaaatgtgcccacgaggccaccactagtctgctgaccaagcacaaggagaatgttcaaaaagtggcggaaagactgctccaaaacgaagtgctcagccgtgatgatatgattgagctgctgggcccacgacccttcaaagagaagtcaacctacgaggagttcgtcgagggtaccggctccttcgaggaggacaccactctgcccgaaggcctcaagagctggaacaaggaaaaggaacgaacggagcctctggacgctggcagcacgccatcatcgccgcccaccaagcccgtaactgcccagagcagttag

SEQ ID NO: 60384 - protein, 826 aa, Drosophila melanogaster
MAFRLLGTAKTMAGMMRRNYTAGSLPGKGQRTHMGATGAGVYILPTELSPLLRYVVKQIQLLCKKPPKGFEKYFEAGGKSSGQPKGSVGDKKPPAGSSKSASEKPSTSTPASVKPSRSQTDAKSDWNFGMFSNSSRGPAGKGGNSLGGRPLGENGGGGDRERWILLGAIGAVVLVGSFAFFEMGYKEISWKEFVNSYLSKGVVEKLEVVNKKWVRVRLQQNSNSGSGVLWFNIGSVDSFERNLEAAQTEQGTESINFVPVIYRNEVEAASLTGLLPTLLIIGFLVYMMRKSADMMGGGRGRKGGGLFGGVMQSTAKLTNPNEIGVGFKDVAGCEEAKIEIMEFVNFLKNPQQYIDLGAKIPKGAMLTGPPGTGKTLLAKATAGEANVPFITVSGSEFLEMFVGVGPSRVRDMFAMARKHAPCILFIDEIDAVGRKRGGKTFGGHSEQENTLNQLLVEMDGFNTTTNVVVLAATNRVDILDKALMRPGRFDRQIYVPAPDIKGRASIFKVHLGNLKTSLDKNELSRKMAALTPGFTGADIANVCNEAALIAARDSKDSIVLKHFEQAIERVIAGMEKKTNVLAPEEKRTVAHHEAGHAVAGWFLEHADPLLKVSIIPRGKGLGYAQYLPKDHYLLSKEQLFDRMCMTLGGRVAEELFFNRITTGAQDDLKKITDIAYSQVVRFGMNEKVGQVSFDVGQAGDPVFSKPYSEDTAQLIDNEVRSIIKCAHEATTSLLTKHKENVQKVAERLLQNEVLSRDDMIELLGPRPFKEKSTYEEFVEGTGSFEEDTTLPEGLKSWNKEKERTEPLDAGSTPSSPPTKPVTAQSS

SEQ ID NO: 60385 - DNA, 2094 bp, Drosophila melanogaster
  CDS (1)..(2094)
atgttcagcaacagctcgagggggccagcaggaaaaggaggcaactcgctgggcggacgacctctgggcgagaacggtggcggcggggacagggagcggtggatccttctgggtgccatcggagccgtcgtcctggtgggttcgttcgccttcttcgagatgggctacaaggagatctcgtggaaggagttcgtcaacagctacctgtcgaagggcgtcgtggagaagctggaggtggttaacaagaagtgggtgagagtgcgtctgcagcagaacagcaacagcggcagcggcgtcttgtggttcaacatcggcagtgtcgatagcttcgagcgaaacctggaggcagcccagacggagcagggaacggaatccatcaactttgtgcccgtaatctaccgcaacgaggtggaggccgccagtctgacgggtctgctgcccacgttgctcatcataggctttctggtctatatgatgcggaagtcggccgatatgatgggtggaggccgtgggcgcaagggtggtggtctttttggtggcgtcatgcagtccaccgcaaagctaaccaatcccaatgagattggtgtgggtttcaaggatgttgccggttgcgaggaggccaaaatcgaaatcatggagttcgttaacttcctgaagaacccgcagcagtatattgatttaggcgccaagataccgaagggtgccatgctaactggcccacccggaacgggtaaaacgctactggccaaggctaccgccggcgaggcgaatgtaccgtttattaccgtgtcgggatccgagttcctcgagatgtttgtgggcgtgggaccttctcgtgtccgcgacatgttcgccatggcccgaaagcatgctccctgcatcctcttcatcgacgaaatcgatgctgtgggtcgcaaacgtggtggcaagaccttcggtggccactcggagcaagagaatacccttaaccagcttctggtggaaatggatggcttcaataccactacgaatgtggtcgtactggccgccactaatcgtgttgatattctggacaaggctctcatgcgaccaggtcgtttcgatcgacagatttatgtaccagcacctgatattaagggcagggcgagcatctttaaggtgcatctgggtaacctgaaaacgtcgctggacaagaacgagctgagcagaaaaatggctgcactgacaccaggcttcacaggcgctgacatcgcgaatgtttgcaacgaagctgctttgattgccgcccgcgactccaaggattcgatcgtactcaagcacttcgagcaggccattgagcgtgttatcgctggcatggagaagaagaccaatgttctggcgccggaggaaaagcgaacggtggcacaccacgaggctggccatgcggtggccggttggttcctggagcacgcagatcccctgctgaaggtctcgattataccacgcggcaagggtctgggctacgcccagtatctgcccaaggatcactacttgctgtccaaggagcagttgttcgatcgcatgtgcatgacgctcggcggacgtgtggccgaagagctgttctttaatcgcattaccactggtgctcaggatgatctaaagaagatcaccgatattgcctactcccaggtggtgcgtttcggcatgaacgagaaggtcgggcaggtcagcttcgatgtgggccaggccggtgatcccgttttcagcaaaccatactcggaggacacagcgcagctgatcgacaacgaggtgaggtcgattatcaaatgtgcccacgaggccaccactagtctgctgaccaagcacaaggagaatgttcaaaaagtggcggaaagactgctccaaaacgaagtgctcagccgtgatgatatgattgagctgctgggcccacgacccttcaaagagaagtcaacctacgaggagttcgtcgagggtaccggctccttcgaggaggacaccactctgcccgaaggcctcaagagctggaacaaggaaaaggaacgaacggagcctctggacgctggcagcacgccatcatcgccgcccaccaagcccgtaactgcccagagcagttag

SEQ ID NO: 60386 - protein, 697 aa, Drosophila melanogaster
MFSNSSRGPAGKGGNSLGGRPLGENGGGGDRERWILLGAIGAVVLVGSFAFFEMGYKEISWKEFVNSYLSKGVVEKLEVVNKKWVRVRLQQNSNSGSGVLWFNIGSVDSFERNLEAAQTEQGTESINFVPVIYRNEVEAASLTGLLPTLLIIGFLVYMMRKSADMMGGGRGRKGGGLFGGVMQSTAKLTNPNEIGVGFKDVAGCEEAKIEIMEFVNFLKNPQQYIDLGAKIPKGAMLTGPPGTGKTLLAKATAGEANVPFITVSGSEFLEMFVGVGPSRVRDMFAMARKHAPCILFIDEIDAVGRKRGGKTFGGHSEQENTLNQLLVEMDGFNTTTNVVVLAATNRVDILDKALMRPGRFDRQIYVPAPDIKGRASIFKVHLGNLKTSLDKNELSRKMAALTPGFTGADIANVCNEAALIAARDSKDSIVLKHFEQAIERVIAGMEKKTNVLAPEEKRTVAHHEAGHAVAGWFLEHADPLLKVSIIPRGKGLGYAQYLPKDHYLLSKEQLFDRMCMTLGGRVAEELFFNRITTGAQDDLKKITDIAYSQVVRFGMNEKVGQVSFDVGQAGDPVFSKPYSEDTAQLIDNEVRSIIKCAHEATTSLLTKHKENVQKVAERLLQNEVLSRDDMIELLGPRPFKEKSTYEEFVEGTGSFEEDTTLPEGLKSWNKEKERTEPLDAGSTPSSPPTKPVTAQSS

SEQ ID NO: 60387 - DNA, 1914 bp, Pseudomonas putida KT2440
  CDS (1)..(1914): transl_table=11
ttgaacgacatggcaaagaatctgatcctgtggttgatcatcgcagctgtcctggtgacagtgatgaacaacttctccagccctaacgagccgcagaccctcaactactccgacttcatccagcaggtcaaggatggcaaggtcgagcgtgtgaccgtcgatggctacatcattactggcaagcgcaccgatggcgacaacttcaagactgtgcgcccggccatcaccgacaatggcctgatcggcgatctggtcgacaaccacgtggtcgtcgaaggcaagcagcctgagcaacagagcatctggacgcagttgctggtggcgagcttcccgatcctggtgatcattgccgtgttcatgttcttcatgcgccagatgcaaggtggcgcgggcggcaagggcgggccgatgagcttcggcaagagcaaggcgcgcctgctgtccgaagaccaggtcaagaccacgctggctgacgttgcgggctgcgacgaggccaaggaagaggttggcgagctggtcgagttcctgcgcgatccgggcaagttccagcgcctgggtggccgtatcccgcgcggtgtgctgatggtcggcccacccggtaccggtaagaccctgctggccaaggccatcgcgggcgaagcgaaagtaccgttcttcaccatttccggttcggacttcgtggaaatgttcgtgggtgtcggtgccagccgtgtgcgcgacatgttcgagcaggccaagaagcacgccccgtgcatcatcttcatcgacgaaatcgacgccgttggtcgccatcgtggcgccggcatgggcggcggtcacgacgagcgtgagcaaaccctcaaccagttgctggtggagatggacggcttcgagatgaatgatggcatcatcgtcatcgccgccaccaaccgtccggatgtgctcgaccctgcgctgctgcgccccggccgcttcgaccgccaggtggtggttggcctgccggacatccgtggtcgcgagcagatcctcaaggtgcacatgcgcaaggtgccgattggcgagaacgtcaacccggcggtcatcgcgcgtggtaccccaggcttctccggcgccgacctggccaacctggtcaacgaggcttcgctgtttgccgcgcgttccaacaagcgcctggtcgaaatgaaagagttcgagctggccaaggacaagatcatgatgggcgccgagcgcaagaccatggtcatgtccgaaaaggaaaagagaaacactgcctatcacgaggctggccacgccattgtcggtcgcctggtgcctgagcacgacccggtctacaaggtttcgatcatcccgcgtggtcgtgccttgggtgtgaccatgttcctgccggaagaagaccgctacagcctctccaagcgtgcgctgatcagccagatctgctcgctgtatggcggccgtatcgccgaggagatgaccttgggcttcgatggcgtgaccactggcgcgtccaacgacatcatgcgcgccagccagctcgctcgtaacatggtgaccaaatggggcctgtccgagaagctcggcccgctgatgtatgcagaggaagagggcgaggtgttcctcggccgcagtgccggtagccagcatgccagcgtgtccggcgagactgccaaattgatcgactccgaggtgcgcagcatcatcgatcagtgctacgccactgccaagcagttgctgatcgacaaccgcgacaagctcgaggcgatgaccgaagcgctgatgaagtacgagaccatcgatgccgatcagattgacgacatcatggctgggcgcacaccacgtgagccacgtgattgggacgatgacaagcactcgggcacgcctgcggcccaggatgagcgtccggaatcgccaatcggcggcccagcggctgaacactaa

SEQ ID NO: 60388 - protein, 637 aa, Pseudomonas putida KT2440
MNDMAKNLILWLIIAAVLVTVMNNFSSPNEPQTLNYSDFIQQVKDGKVERVTVDGYIITGKRTDGDNFKTVRPAITDNGLIGDLVDNHVVVEGKQPEQQSIWTQLLVASFPILVIIAVFMFFMRQMQGGAGGKGGPMSFGKSKARLLSEDQVKTTLADVAGCDEAKEEVGELVEFLRDPGKFQRLGGRIPRGVLMVGPPGTGKTLLAKAIAGEAKVPFFTISGSDFVEMFVGVGASRVRDMFEQAKKHAPCIIFIDEIDAVGRHRGAGMGGGHDEREQTLNQLLVEMDGFEMNDGIIVIAATNRPDVLDPALLRPGRFDRQVVVGLPDIRGREQILKVHMRKVPIGENVNPAVIARGTPGFSGADLANLVNEASLFAARSNKRLVEMKEFELAKDKIMMGAERKTMVMSEKEKRNTAYHEAGHAIVGRLVPEHDPVYKVSIIPRGRALGVTMFLPEEDRYSLSKRALISQICSLYGGRIAEEMTLGFDGVTTGASNDIMRASQLARNMVTKWGLSEKLGPLMYAEEEGEVFLGRSAGSQHASVSGETAKLIDSEVRSIIDQCYATAKQLLIDNRDKLEAMTEALMKYETIDADQIDDIMAGRTPREPRDWDDDKHSGTPAAQDERPESPIGGPAAEH

SEQ ID NO: 60389 - DNA, 1923 bp, Bradyrhizobium japonicum USDA 110
  CDS (1)..(1923): transl_table=11
atgaacgccaatctgcgcaatttcgccctctgggtcatcattgtcttgctgctgttggcgttgttcacgctcttccaaaatccgggtcagcgcgcctcctcgcaggacatcgccttctcccagctcctgagcgaggttgaccgcggcaatgtgcgcgacgtcgtgatccaggggcctgatatccacggcaccttcaccaacggctccagcttccagacctatgcgccgaacgacccgacgctggtcaagcgcctctatgacagcaaggtccagatcaccgcgaagccgccgggcgacaacgtgccctggttcgtctcgctgctggtctcctggctgcccttcatcgcgctgatcggcgtgtggatcttcctgtcgcggcagatgcagggcggcgccggcaaggcgatgggctttggcaagtcgcgtgcgaagatgctcactgaagcgcatggccgcgtcaccttcgaggacgtcgccggcgtggacgaagccaagcaggacctgcaggagatcgtcgaattcctgcgcgaccccggcaaattccagcgcctcggcggccgcattccgcgcggcgtgctgctggttggccctcccggcaccggtaagaccctgatcgcgcgtgcggtcgcgggcgaagccaacgtgccgttcttcaccatttcgggttctgacttcgtcgagatgttcgtcggcgtcggcgcgagccgcgtccgcgacatgttcgagcaggccaagaagaacgccccctgcatcatcttcatcgacgaaatcgacgctgtcggtcgtcatcgtggcgccggtctcggcggcggcaatgacgagcgcgagcagacgctgaaccagctgctggtcgagatggacggcttcgaggcgaacgagggcgtgatcctgatcgccgccaccaaccgtcctgatgtgctcgatcccgcgctgctgcgtcccggccgcttcgaccgtcaggtcgtggtgccgaatccggacgttgtcggccgcgagcagatcctcaaggttcacgttcgcaaggtgccgctggcgccggatatcaacctcaagaccatcgcgcgcggcaccccgggcttctccggcgccgacctgatgaacctcgtcaacgaagctgcgctcaccgccgcccgccgcaacaagcggatggtgactcaggccgagttcgaggaggccaaggacaaggtgatgatgggcgccgagcgcaagtcgctcgtcatgaccgaggaagagaagctcttgacggcctatcacgagggcggccacgccatcgtcggcctcaacgtgcccgcgaccgatccgatccacaaggcgacgatcatcccgcgcggccgtgcgctgggtatggtcatgcagctgcccgagcgcgacaagctgtcgatgtcgctggagcagatgacctcgcgcctcgccatcatgatgggcggccgcgtcgccgaagagctgatcttcggccgcgagaaggtgacctcgggtgctgcctccgacatcgagcaggccacgcgccttgcccgcatgatggtgacgcgctggggcctgtcggaagagctcggcaccgtctcttacggcgagaaccaggacgaggtgttcctgggcatgtcggtgtcgcggacgcagaacgcgtccgaagcgaccgtccagaagatcgactccgagatccggcgtctggtcgaggaaggctacaaggaagccacccgcatcctcaccgagaagcacggtgatcttgaggcgctggccaagggcctgctcgagttcgagacgctctccggcgacgagatcgtcgatctgctcaagggcaagaagccgaaccgcgagtccgtgctcgagccgaccacgccgcgcgcctccgccgtgcccccggccggcaagtcgcgcccgcggcccgatccggatccgggcctggagccgcagccgcaggcgtaa

SEQ ID NO: 60390 - protein, 640 aa, Bradyrhizobium japonicum USDA 110
MNANLRNFALWVIIVLLLLALFTLFQNPGQRASSQDIAFSQLLSEVDRGNVRDVVIQGPDIHGTFTNGSSFQTYAPNDPTLVKRLYDSKVQITAKPPGDNVPWFVSLLVSWLPFIALIGVWIFLSRQMQGGAGKAMGFGKSRAKMLTEAHGRVTFEDVAGVDEAKQDLQEIVEFLRDPGKFQRLGGRIPRGVLLVGPPGTGKTLIARAVAGEANVPFFTISGSDFVEMFVGVGASRVRDMFEQAKKNAPCIIFIDEIDAVGRHRGAGLGGGNDEREQTLNQLLVEMDGFEANEGVILIAATNRPDVLDPALLRPGRFDRQVVVPNPDVVGREQILKVHVRKVPLAPDINLKTIARGTPGFSGADLMNLVNEAALTAARRNKRMVTQAEFEEAKDKVMMGAERKSLVMTEEEKLLTAYHEGGHAIVGLNVPATDPIHKATIIPRGRALGMVMQLPERDKLSMSLEQMTSRLAIMMGGRVAEELIFGREKVTSGAASDIEQATRLARMMVTRWGLSEELGTVSYGENQDEVFLGMSVSRTQNASEATVQKIDSEIRRLVEEGYKEATRILTEKHGDLEALAKGLLEFETLSGDEIVDLLKGKKPNRESVLEPTTPRASAVPPAGKSRPRPDPDPGLEPQPQA

SEQ ID NO: 60391 - DNA, 1944 bp, Coxiella burnetii RSA 493
  CDS (1)..(1944): transl_table=11
ttgaatagtatgattaaaaatttactgctgtggttagtcattgccgtagtccttatcactgtttttagcaattttggttcgcgtcagtccgatgtgcagccatacagttattcgcaatttgttcaggcggtgaataatgacaaagttagcagcgtggtaattcaaggtcatgaaatcaagggggtgactaaggataataaacatttcaccacctatttgcccatggaagatcaagcgttattaaatcaattaatggcgaagggcgtcagcgttaagggtgaacctcctaaacaacaaagcatgtttttgcatattcttattagttggttgccattcttaatattaatatttgtatggattttgtttatgcgccaaatgcagggcggcgggcgtggcggcggcccaatgtcttttgggcgtagtaaagcgcggttgctgagtcaagatcaggttaaagtgacgtttgatgacgtagccggtgtcgatgaagccaaagaagaagttaaagaactggtggaattcctgcgtgatcccggaaaattccagcgcttaggcggtaaaatgccctgtggtgtgctgcttgtgggtccgccgggaaccggtaaaacattgttggctaaagccgttgctggtgaagcgaaggttcctttcttcaccatttccggttcggattttgtggagatgtttgttggcgtgggtgcttcgcgggttcgggatatgttcgatcaggctaaaaagcaagcgccttgcattatttttatcgatgaaattgacgccgtgggacggcatcgcggtgctggtttgggtggcggacatgatgaacgcgaacaaaccttgaaccagctcttagtagaaatggatgggtttgaaggtaaagagggcattattgtaatggccgcgaccaaccgtccggatgttcttgatcctgcgcttttacgccctggtcgatttgatcgccaggtggtagtgcctttgcctgacatcaaaggacgcgaatatattctaaaagtgcacatgaataaattgcctctggcaaaagacgttaaagcctccgtgattgcgcgtgggacgcccggtttttcaggcgctgacttagccaatattgtaaacgaagcggctttgtttgcagctcgggaaaataagaaagacgtcagtatgtccgaatttgaacgagctaaagataagatcatgatgggtgcagaacgtcgatcgatggtgatgagtgatgatgaaaagaaattaacggcttatcatgaagccggtcacgccatcgtgggcttgcacatgctagaacatgatcccgtttacaaagtcacgatcatcccgcgagggcgggcgctcggcgtgacgatgtttcttcctgagcatgatcgttacagcatgaccaagcggcgtttggaatgtcagcttgctggattgtttggtgggcgtattgcggaagaaatcatctttggtcccgacctcgtgacaacgggcgcttccaacgatattgaaaaagcaaccgaaattgcacgcaacatggtcactaagtggggtttgtctcaaaaattaggacccttgacttatcgagaagaagaaggcgaggtctttttaggtcgttcagttactcagcgtaaagatatttctgatgcgactaacaaagagatcgattcggaagtccgtcgcattgttgacacggcttatacaacagcaaaacaaaccttggaagaacacatcgaacagctccatttgatggctaaagcgcttattaaatatgaaaccattggtgaggctcaaattaaggaaattctagcgggtaaagagccttcgccgccgccggattggaaagaggaaaatgggagcgcgtcagctcacaaagaaaattccgaaaaagaactatcggaagagaaaggcgaagaaaaaacagtaaatcctagcaggcctcgacctgcagaagatggctga

SEQ ID NO: 60392 - protein, 647 aa, Coxiella burnetii RSA 493
MNSMIKNLLLWLVIAVVLITVFSNFGSRQSDVQPYSYSQFVQAVNNDKVSSVVIQGHEIKGVTKDNKHFTTYLPMEDQALLNQLMAKGVSVKGEPPKQQSMFLHILISWLPFLILIFVWILFMRQMQGGGRGGGPMSFGRSKARLLSQDQVKVTFDDVAGVDEAKEEVKELVEFLRDPGKFQRLGGKMPCGVLLVGPPGTGKTLLAKAVAGEAKVPFFTISGSDFVEMFVGVGASRVRDMFDQAKKQAPCIIFIDEIDAVGRHRGAGLGGGHDEREQTLNQLLVEMDGFEGKEGIIVMAATNRPDVLDPALLRPGRFDRQVVVPLPDIKGREYILKVHMNKLPLAKDVKASVIARGTPGFSGADLANIVNEAALFAARENKKDVSMSEFERAKDKIMMGAERRSMVMSDDEKKLTAYHEAGHAIVGLHMLEHDPVYKVTIIPRGRALGVTMFLPEHDRYSMTKRRLECQLAGLFGGRIAEEIIFGPDLVTTGASNDIEKATEIARNMVTKWGLSQKLGPLTYREEEGEVFLGRSVTQRKDISDATNKEIDSEVRRIVDTAYTTAKQTLEEHIEQLHLMAKALIKYETIGEAQIKEILAGKEPSPPPDWKEENGSASAHKENSEKELSEEKGEEKTVNPSRPRPAEDG

SEQ ID NO: 60393 - DNA, 1995 bp, Streptomyces avermitilis MA-4680
  CDS (1)..(1995): transl_table=11
atgtggatcgtgctggccgtccttgccgtggtcgtgttgatgcaggtcgtcggctcgtccggcggctacaagacagtggacaccggccaggtcgtccaggcgatcaatgagaacaaggtccagcaggccaaaatcaccaccggtgacgagcaggtcatcaaggtcgagctgaaggacggccagaaggtcgacggcagctcgaagatccaggcgagttacatcggcgaccagggcgtgaccctcgcgggcacgctccaggacaagtaccagaacaagcagatcccggacggctatacggtctcgccgtccaagcagaacccgttcgtgggcatcctgctctctctgctccccttcgtcctgatcgtcgtcgtcttcctgttcctgatgaaccagatgcagggcggcggctcccgggtcatgaacttcgggaagtccaaggcgaagctcatcaccaaggacacccccaagacgacgttctcggacgtcgcgggttcggacgaggcggtcgaggagctccacgagatcaaggagttcctccaggagccggcgaagttccaggccgtcggggcgaagatccccaagggcgtgctcctgtacgggcctcccggtaccggcaagacgctgctggcgcgtgccgtcgcgggcgaggccggggtccccttctactcgatctccggttccgacttcgtcgagatgttcgtcggtgtcggtgcctcccgagtccgtgacctcttcgagcaggccaaggcgaacgccccggcgatcgtcttcgtcgacgagatcgacgcggtcggccgccaccgcggcgccggcctcggcggcggtcacgacgagcgcgagcagacgctgaaccagctgctcgtcgagatggacggcttcgacgtgaagggcggcgtcatcctgatcgccgccacgaaccggcccgacatcctcgacccggctctcctgcgccccggccgcttcgaccgccagatcgcggtcgaccgcccggacatgcagggccgtctggagatcctcaaggttcaccagaagggcaagccggtcgccccggacgtcgacctgtcggccgtcgcccgccgcacccccggcttcacgggtgccgacctcgccaacgtgctgaacgaggccgcgctcctcacggcccgcagcgacaagaagctggtcgacaactccatgctggacgaggcgatcgaccgcgtggtcgcgggcccgcagaagcggacccggatcatgtcggacaaggagaagaagatcaccgcgtaccacgagggcggccacgccctggtcgcggcggcgtctccgaactccgacccggtccacaagatcacgatcctgtcgcgcggccgtgccctcggctacacgatggtcctgccggacgaggacaagtactccacgacccgcaacgagatgctcgaccagctggcgtacatgctgggcgggcgcgcggccgaggagctcgtcttccacgacccgacgacgggcgctgcgaacgacatcgagaaggccaccgccacggcccgcgcgatggtcacgcagtacggcatgaccgagcgtctcggcgcgatcaagttcggcggcgacaacaccgagcccttcctgggccgggagatgtcgcatccgcgcgactactcggaagaggtcgccgcgctcgtcgacgaagaggtcaagaagctcatcgagaacgcgcacaacgaggcctgggaaatcctggtcgagaaccgcgacgtcctcgacgccctggtgctccagctgctggagaaggagacgctgagcaaggagcagatcgccgaggtcttcgctcccatcgtcaagcgcccggcccgccccgcgtggaccggctcctcccggcgcaccccgtccacccgcccgccggtgctctcccccaaggagctgtcactgacgaacggggcgaacggcgcgtcgccggcgatcgccaacgcgacggagtcggtgccggccgcggagtcggctccggaggaccgcaccgagggctga

SEQ ID NO: 60394 - protein, 664 aa, Streptomyces avermitilis MA-4680
MWIVLAVLAVVVLMQVVGSSGGYKTVDTGQVVQAINENKVQQAKITTGDEQVIKVELKDGQKVDGSSKIQASYIGDQGVTLAGTLQDKYQNKQIPDGYTVSPSKQNPFVGILLSLLPFVLIVVVFLFLMNQMQGGGSRVMNFGKSKAKLITKDTPKTTFSDVAGSDEAVEELHEIKEFLQEPAKFQAVGAKIPKGVLLYGPPGTGKTLLARAVAGEAGVPFYSISGSDFVEMFVGVGASRVRDLFEQAKANAPAIVFVDEIDAVGRHRGAGLGGGHDEREQTLNQLLVEMDGFDVKGGVILIAATNRPDILDPALLRPGRFDRQIAVDRPDMQGRLEILKVHQKGKPVAPDVDLSAVARRTPGFTGADLANVLNEAALLTARSDKKLVDNSMLDEAIDRVVAGPQKRTRIMSDKEKKITAYHEGGHALVAAASPNSDPVHKITILSRGRALGYTMVLPDEDKYSTTRNEMLDQLAYMLGGRAAEELVFHDPTTGAANDIEKATATARAMVTQYGMTERLGAIKFGGDNTEPFLGREMSHPRDYSEEVAALVDEEVKKLIENAHNEAWEILVENRDVLDALVLQLLEKETLSKEQIAEVFAPIVKRPARPAWTGSSRRTPSTRPPVLSPKELSLTNGANGASPAIANATESVPAAESAPEDRTEG

SEQ ID NO: 60395 - DNA, 1860 bp, Nitrosomonas europaea ATCC 19718
  CDS (1)..(1860): transl_table=11
atgaataaccagtcacccatggacaagaaggcgcagatcaacttctggtacgtgctgattgcagtactcagcattctcttcatccagaacctttacaatcagtatacgcgaatagagccgattccctacagccgcttccagtctctgttggagcaggacaaggtgtccgaagtggccatcactgatcaacagatcttcggcaagctcaaggaatcgaccagtgaaaaattcaccgaattcgtcaccacccgggttgaatcggatctggcagaaatgctggataagcacaatgttacttatactggtgtcgtccagagtacctggttgcgcgatctgctttcctggatcgtaccgatggccgttttcgttggtatctggctgtttatcatccgacgaatgaataaaggcatgatgggaagcggcctgatgtcgatcggcaaaagccgcgccaaggtctacgtggaaaaagaaaccaaggtaacctttgccaatgttgccggggtggatgaggccaaggaagagttggtcgaaatcgtcaattttctcaagaatcccaaggaatacagccggctgggcggacgggcacccaaaggtatcttgctggttggtccgcctggtaccggtaaaaccctgttggcgcgcgcagtggcaggtgaggcaggtgtaccgtttttctcgatttccggctctgaatttgtcgagatgttcgtaggcgttggtgctgccagagtgcgtgatctgtttgaacaggctcgccagatggcgccggcaatcattttcatcgatgagctggattcactcgggcgcgcgcgcggtgcaggcggatttggcggccatgatgaaaaagaacagacactgaatcaattactggccgaactcgatggattcgatccttccagtggaattgtcctgcttgccgcgactaaccgtccggaaatcctggatgcagccttgctgcgcgccgggcgtttcgatcgtcaggtactggtggaccggcctgataaaaaaggtcgtcagcaaatcctgggtgttcatattggcaaaatcacactggcgcccgatgttgataccgaacagatcgcagcactgacacctggcttcacaggtgctgatctggctaatttgatcaatgaggctgcgctgctggcgacccggcgtggtggtcaggcagtcagcatggacgacttcaataatgcaatcgagcggatcgtagctggcctggaaaagaaaaatcgtctgctcaatccggaagaaaggcgtaccgttgcttaccatgaactgggccataccatggtggcacttgctctgccgggatcggatgaagtacataaagtttcgatcatcccacgtggtattggtgcacttggctataccattcagcgtcccaccgaggatcgctttcttatgacacgcaaggagctggaaaacaaaatggcggtattgctgggtgggcgtgcagcggaaaggttggtattcgacgagatttccaccggtgcttccgatgatctggcgcgtgctaccgatatcgcccgtgccatggttttacgctatggcatgagcgaggcaatcgggaatgtggtttatgatcgcgaacaaatggcgtttttgcaacctggttttcccatgccccaaagccgtgattacagtgaagaaactgccaataaaattgaccagactgtacgttcactgcttgatttggcgcttgaacgtgccattaaaattctggataaaaatcgggaactgcttgatcgaactgcgcagcaattgctggaaactgaaacactgaatcagccggagttactggagctgaaacgcaacttgcgtgcggaggaaaccaatccgtcaacacagcagaactaa

SEQ ID NO: 60396 - protein, 619 aa, Nitrosomonas europaea ATCC 19718
MNNQSPMDKKAQINFWYVLIAVLSILFIQNLYNQYTRIEPIPYSRFQSLLEQDKVSEVAITDQQIFGKLKESTSEKFTEFVTTRVESDLAEMLDKHNVTYTGVVQSTWLRDLLSWIVPMAVFVGIWLFIIRRMNKGMMGSGLMSIGKSRAKVYVEKETKVTFANVAGVDEAKEELVEIVNFLKNPKEYSRLGGRAPKGILLVGPPGTGKTLLARAVAGEAGVPFFSISGSEFVEMFVGVGAARVRDLFEQARQMAPAIIFIDELDSLGRARGAGGFGGHDEKEQTLNQLLAELDGFDPSSGIVLLAATNRPEILDAALLRAGRFDRQVLVDRPDKKGRQQILGVHIGKITLAPDVDTEQIAALTPGFTGADLANLINEAALLATRRGGQAVSMDDFNNAIERIVAGLEKKNRLLNPEERRTVAYHELGHTMVALALPGSDEVHKVSIIPRGIGALGYTIQRPTEDRFLMTRKELENKMAVLLGGRAAERLVFDEISTGASDDLARATDIARAMVLRYGMSEAIGNVVYDREQMAFLQPGFPMPQSRDYSEETANKIDQTVRSLLDLALERAIKILDKNRELLDRTAQQLLETETLNQPELLELKRNLRAEETNPSTQQN

SEQ ID NO: 60397 - DNA, 2430 bp, Arabidopsis thaliana
  CDS (1)..(2430)
atgacaatgatcttcttctctaagcttaatcgctccatttctcgttcaaagggatttttgtacggtggtggtgttagatcggcggcaaggctacttacttcgccgggacttgaggcggcgtctgtgaatgaagtggaaggtggattagggtttataagaagacactttgcttctttagcttcacggaagggtttagtcaataatgatttgattggtgtttttgctaatccaagacttcgtagattcttctctgatgaagctcctaagaagaagaattatgagaactattttcctaaagataagcaagaacccaagagtgatcagaaatcagagcataaagagggttcagaaaagaatgaaaatgagaatgtgggagatatgttcatgaaccgattccaaaatttgctaattcctctactagctcttgctgtattcttttctactttctcgtttggctctggggaacaacaacagataagtttccaggagttcaaaaacaagctactcgagcctggtttagttgaccacatagatgtttcaaacaaatcagtagcaaaagtctacgtgaggagcacaccgaaagaccaacaaacaactgacgttgtccatggtaatggtaacggtattcctgctaaaagaactggtggtcagtataagtactacttcaatatcggtagtgttgattcttttgaggagaaactcgaagaagctcaagaagcgttaggtgttgatcgtcatgaatatgttcctgtcacatacgtctctgaaatggtctggtatcaagagttcatgaggtttgcaccgactttgttgctcttgggtactctgatctatggtgcgagacggatgcaaggtggattgggtgtaggaggaactggcggtaagaatggtcgtggaattttcaatataggcaaagctacaataacgagagctgataaacattccaagaataagatttatttcaaggatgttgctggatgtgacgaggctaaacaagaaattatggagtttgtacatttccttaagaacccaaagaagtatgaagatttgggtgctaaaattccgaaaggtgcacttttagtcggtccgcctggaaccggaaagacccttttagcaaaagccacagcaggagaatctggtgtgccatttctgtctatttctggctcagatttcatggagatgtttgttggtgttgggccttcgagggtgagacatttgttccaagaggcgagacaagctgcaccgagcattatatttatcgatgagattgatgctattggtcgggcaagaggtcgtggaggtttaggcggaaatgatgagcgtgaaagcactctgaatcagttgctagttgaaatggatggttttggtacaaccgctggtgttgtggttcttgctggaaccaacagaccggatattttggataaagctttgttaaggcctggacgttttgatcgccagataactattgataaacctgatatcaaagggcgtgatcagattttcaagatttacttgaagaagatcaaacttgatcatgagccatcatattactctcaaaggcttgctgctctcactcccgggtttgcaggagctgacattgcgaatgtctgtaacgaagcagctcttattgctgctagacacgaaggagcaacggttactatggcacactttgaatctgcgattgatcgtgttattggtggtcttgagaagaaaaaccgggtgataagcaagttggagcgacgtacagttgcatatcatgaatctggtcacgcagttgtagggtggttccttgaacatgcagagccgttactgaaagtgactattgtaccacgtggcacagcggctctcggatttgcacaatacgttccaaacgaaaaccttctcatgaccaaagagcaactctttgacatgacttgcatgactctcggaggccgtgcagctgagcaggtattgataggtaaaatctcaacgggtgcgcagaacgatctagagaaggtgacgaagatgacttacgcgcaagtagctgtgtatggtttcagtgacaaggttgggctactctcgtttccaccaagggatgatggctacgacttctctaaaccatacagcaacaaaaccggtgctatcatagacgaagaagttagggactgggtggccaaagcttatgagcggaccgtagagctggttgaggaacacaaagtgaaagtggctgagatcgccgagcttttactagagaaagaggtgttgcatcaggatgatctcttaaaaattttaggtgaacgtccgtttaagtcagctgaggtcactaattatgaccggttcaagtctgggtttgaagagactgagaaggactcagccgccacccctacagtggagcctgtggtggatgatggagctcccccgccgtttgaaccccaggttgttccgacgtaa

SEQ ID NO: 60398 - protein, 809 aa, Arabidopsis thaliana
MTMIFFSKLNRSISRSKGFLYGGGVRSAARLLTSPGLEAASVNEVEGGLGFIRRHFASLASRKGLVNNDLIGVFANPRLRRFFSDEAPKKKNYENYFPKDKQEPKSDQKSEHKEGSEKNENENVGDMFMNRFQNLLIPLLALAVFFSTFSFGSGEQQQISFQEFKNKLLEPGLVDHIDVSNKSVAKVYVRSTPKDQQTTDVVHGNGNGIPAKRTGGQYKYYFNIGSVDSFEEKLEEAQEALGVDRHEYVPVTYVSEMVWYQEFMRFAPTLLLLGTLIYGARRMQGGLGVGGTGGKNGRGIFNIGKATITRADKHSKNKIYFKDVAGCDEAKQEIMEFVHFLKNPKKYEDLGAKIPKGALLVGPPGTGKTLLAKATAGESGVPFLSISGSDFMEMFVGVGPSRVRHLFQEARQAAPSIIFIDEIDAIGRARGRGGLGGNDERESTLNQLLVEMDGFGTTAGVVVLAGTNRPDILDKALLRPGRFDRQITIDKPDIKGRDQIFKIYLKKIKLDHEPSYYSQRLAALTPGFAGADIANVCNEAALIAARHEGATVTMAHFESAIDRVIGGLEKKNRVISKLERRTVAYHESGHAVVGWFLEHAEPLLKVTIVPRGTAALGFAQYVPNENLLMTKEQLFDMTCMTLGGRAAEQVLIGKISTGAQNDLEKVTKMTYAQVAVYGFSDKVGLLSFPPRDDGYDFSKPYSNKTGAIIDEEVRDWVAKAYERTVELVEEHKVKVAEIAELLLEKEVLHQDDLLKILGERPFKSAEVTNYDRFKSGFEETEKDSAATPTVEPVVDDGAPPPFEPQVVPT

SEQ ID NO: 60399 - DNA, 2088 bp, Arabidopsis thaliana
  CDS (1)..(2088)
atggcagcttcatcagcttgtcttgtgggaaatggtttgtcagtgaacacaacaaccaaacagaggttaagtaaacatttttccggcagacagacaagcttttcttcagtgattaggacatctaaggttaatgtagtgaaggcttctttggatgggaagaagaagcaagaaggaagaagagattttctcaaaatcttgttaggaaatgctggggtcggtttggttgcaagtgggaaagcaaatgctgatgaacaaggtgtttcttcgtcgaggatgtcgtattctaggtttctagagtacttggataaggatagggtgaataaagttgatttgtatgagaatgggactatagctattgtggaagctgtttctcctgaattgggtaaccgggttgagagagtacgtgttcagctaccgggtttaagtcaagagcttctacagaagcttagggctaagaatattgattttgcagcacataatgctcaggaagatcaaggttctgtgttattcaacttgattggtaatcttgctttcccggcgcttttgattggtggtttgttccttctttcgagacggtctggtggtggaatgggtggacctggtggtcctggtaacccacttcagtttggtcagtccaaagcaaagttccaaatggaacctaacactggtgtaacatttgatgatgttgctggagttgatgaagcaaagcaagatttcatggaagtggtggagtttttgaagaaacctgagagattcactgcggttggtgccaagatcccgaaaggtgttcttcttattggtcctcctggtaccgggaaaacccttttggcaaaagccattgctggtgaagctggtgtgcctttcttctccatctctggttctgagtttgttgagatgtttgtcggtgttggtgcctcgagagtccgtgatcttttcaagaaagccaaggagaacgctccttgcattgtctttgtagatgaaatagatgctgttggtaggcaaagaggaaccggaattggtggaggtaatgatgaaagagaacagaccctcaatcagctcctaactgagatggatggttttgaaggtaacactggtgttatcgtagttgctgcaaccaatagagcagacattcttgactctgctttgttgaggccaggacggtttgaccggcaggtaagtgttgacgttcctgacgttaaggggagaacagatattctcaaggttcatgccggcaataagaagttcgacaatgatgtttcacttgaaataatagcaatgagaacacctggatttagcggagcagatctcgctaacctcttgaatgaggctgctatattggccggaaggcgagcacggacatcgatatcatctaaagagattgatgactccattgatagaatcgttgctggcatggaaggaacagtgatgaccgatggcaagagcaaaagcttggtagcttaccatgaagttggtcatgcagtgtgtggaacattgactccaggacatgatgctgtgcaaaaggtaacgttgataccaagaggccaagcaagaggtctgacttggttcattccatcagatgacccgacactcatctccaagcagcaactctttgcaagaattgttggtggactcggtggtagggccgctgaagaaatcatctttggtgattccgaggtgactactggcgcagttggtgacttacaacagatcaccggtttggctagacagatggtaacaacatttggaatgtctgatattggaccatggtctttgatggattcttcggcacaaagcgatgtcatcatgagaatgatggcaagaaactccatgtctgagaagcttgcagaagacattgattctgcggtgaagaaactatcagacagtgcatatgagatagctctaagccacataaagaacaatcgtgaagccatggataagctcgttgaagtgcttctcgagaaagaaactattggcggtgacgaattcagggcaattctttccgagtttactgagatccccccggaaaaccgagttccttcttcaacaacgacaactccagcatcagcaccaacaccagctgctgtctaa

SEQ ID NO: 60400 - protein, 695 aa, Arabidopsis thaliana
MAASSACLVGNGLSVNTTTKQRLSKHFSGRQTSFSSVIRTSKVNVVKASLDGKKKQEGRRDFLKILLGNAGVGLVASGKANADEQGVSSSRMSYSRFLEYLDKDRVNKVDLYENGTIAIVEAVSPELGNRVERVRVQLPGLSQELLQKLRAKNIDFAAHNAQEDQGSVLFNLIGNLAFPALLIGGLFLLSRRSGGGMGGPGGPGNPLQFGQSKAKFQMEPNTGVTFDDVAGVDEAKQDFMEVVEFLKKPERFTAVGAKIPKGVLLIGPPGTGKTLLAKAIAGEAGVPFFSISGSEFVEMFVGVGASRVRDLFKKAKENAPCIVFVDEIDAVGRQRGTGIGGGNDEREQTLNQLLTEMDGFEGNTGVIVVAATNRADILDSALLRPGRFDRQVSVDVPDVKGRTDILKVHAGNKKFDNDVSLEIIAMRTPGFSGADLANLLNEAAILAGRRARTSISSKEIDDSIDRIVAGMEGTVMTDGKSKSLVAYHEVGHAVCGTLTPGHDAVQKVTLIPRGQARGLTWFIPSDDPTLISKQQLFARIVGGLGGRAAEEIIFGDSEVTTGAVGDLQQITGLARQMVTTFGMSDIGPWSLMDSSAQSDVIMRMMARNSMSEKLAEDIDSAVKKLSDSAYEIALSHIKNNREAMDKLVEVLLEKETIGGDEFRAILSEFTEIPPENRVPSSTTTTPASAPTPAAV

SEQ ID NO: 60401 - DNA, 2307 bp, Mycoplasma gallisepticum R
  CDS (1)..(2307): transl_table=4
ttatttaatatgtcgaatacatctaattttaacgagcgggtaacagaaaatgccaaaccgcccaaaaatgttaaatcgattatttgaaaaacaataggaattatcatcgtgatggcaatcatcattggtttaattcttttttatgttttaccaagaaatacgattgccaacatttcaaatattcaatacgttgatgggaatttggtggcaactgctacgattaatggtagaagcggacgatttatccttgatcttgagaactcaacttaccaaacgagttacacatctggattatcattatccattagtgtttttttaagaaacttaaataatgctaacggtcagtctttctttgtttcattaattagaccagctacttcttcagctaatgatgcagtatttaatattgccaatttatcaatcaaccaaactagaggggtcgccactttagttactgaaggtggttcatacagtgctgtattaactaccactttaacagcgttaccactaactggacaaaagttcttaccagaagggtttaaccttgacacagcgaatactgatgcttatcgtgctgctggagcaattcctggaattcaaagattattagcagtaggtaatgttcagttaccaaatcaaagtactgcaatcttaactcagttcttaacaagcattattccgttcgtgattctgattgtgatctatattgtgatcgcaagaagattcagcagaacaatgggtgctggtggtgctataggtgaagatggtgaaaacgtcttcacaatcggaaaatctcaagctaagttagctaaatcaacctttaagtttacagatgttgcagggattgaagaagaaaagagtgaactaattgaattagttgactacttaaaacgccctggaaaatacgtacagatgggtgctagaacgcctagaggggtagttttatatggacctccaggaacaggtaaaacgttattagctaaagcagtagctggtgaagctggtgtgccattcttccaagttactggttcagcgtttgaagatatgttagtaggggtaggggctaagagagttagaaacctatttgctaaagctaaaaaagctgctccttgtattatctttattgacgaaattgactcagttggttctaaacgtgggaaatatgagatctctgctggttcagctaccgaccaaacacttaatcagttattagctgaaatggatgggtttagtactagaactggaatcatcgtgatggctgctactaaccgtttagatgtattagatgatgctttattacgtcctggtcgatttgaccgacatattcaagttaatcttccagatattaaagaacgtgaagcgatcttaaaaattcactcaagaaataagaatatctcttctaaagtaaatttattagatatcgctagaagaaccccagggtttagtggtgctcaacttgaaaacgtcttaaatgaagcaacactattagctgtaagagctgatcgtacaagtatctcattaactgatattgatgaagcaattgaccgtgttattgctggtcctgctaaaaaatcaagagtgattagtgattttgaaaaaaatcaggtagcacaccacgaagcaggtcacgctttagtaggattacacctaaaaggagcagatgaagttcaaaagattacgattattcctcgtggtcaagccggtggttatactttatcgacacctaaagatgctgaactaaacttaaagaagaaatcagacctattaaatatgattgctggagctttaggtggtagagcttcagaagaactgttctttggaaaagacgcaatctcaacaggggcatctaacgacttttataaagcaactaatattgctaaaacaatggtaacccaactagggatgtcagatttagggattacccaattcttaccttctgaaggcggtattaaccctaatgcgcgttactattcagaaaatacagcgcaaagaattgatgaagcaatcgctaagatcttagaagaacaataccaagttgcttacaatattattaaagacaaccaaaacgaactaaaactaattgttgaagcattactaattcaagaaacgatcgttaagaacgatattgactacattcacgaacacttgaaattgcctgaagcaattatcaaattaaaagaagaacaacttaaagaaaaagctgcagctgaaaaagaggaacaagccgaaaaagctaaattagaccaccaatctgattctgctcaacctcaagaagaaccaacagcaagtacagctagctctaattaa

SEQ ID NO: 60402 - protein, 768 aa, Mycoplasma gallisepticum R
MFNMSNTSNFNERVTENAKPPKNVKSIIWKTIGIIIVMAIIIGLILFYVLPRNTIANISNIQYVDGNLVATATINGRSGRFILDLENSTYQTSYTSGLSLSISVFLRNLNNANGQSFFVSLIRPATSSANDAVFNIANLSINQTRGVATLVTEGGSYSAVLTTTLTALPLTGQKFLPEGFNLDTANTDAYRAAGAIPGIQRLLAVGNVQLPNQSTAILTQFLTSIIPFVILIVIYIVIARRFSRTMGAGGAIGEDGENVFTIGKSQAKLAKSTFKFTDVAGIEEEKSELIELVDYLKRPGKYVQMGARTPRGVVLYGPPGTGKTLLAKAVAGEAGVPFFQVTGSAFEDMLVGVGAKRVRNLFAKAKKAAPCIIFIDEIDSVGSKRGKYEISAGSATDQTLNQLLAEMDGFSTRTGIIVMAATNRLDVLDDALLRPGRFDRHIQVNLPDIKEREAILKIHSRNKNISSKVNLLDIARRTPGFSGAQLENVLNEATLLAVRADRTSISLTDIDEAIDRVIAGPAKKSRVISDFEKNQVAHHEAGHALVGLHLKGADEVQKITIIPRGQAGGYTLSTPKDAELNLKKKSDLLNMIAGALGGRASEELFFGKDAISTGASNDFYKATNIAKTMVTQLGMSDLGITQFLPSEGGINPNARYYSENTAQRIDEAIAKILEEQYQVAYNIIKDNQNELKLIVEALLIQETIVKNDIDYIHEHLKLPEAIIKLKEEQLKEKAAAEKEEQAEKAKLDHQSDSAQPQEEPTASTASSN

SEQ ID NO: 60403 - DNA, 1836 bp, Helicobacter hepaticus ATCC 51449
  CDS (1)..(1836): transl_table=11
gtgattctcacattgcttttgtttaaactattttcgcctaatggtgattcatttacagagcgtttgatgggaggaaatattacaaaagaaattagctataatgagttaaaagagcttattactcggggtgagattagtgcagtaaatattgggcagacttacattaaagcatattctgctaatacttcgccacggattctttatactacaaaaaaagtagcagatttgggactcgtgcctttgcttgatgagaagaaaattgaatatagtggctttagcgaaggtagctttttgggagatttagtaaatatgctcttgcctatttttattattctagcgctttggatgtttcttactgcgcgtatgcaaaaaagtatgggtggaggcatttttggtatgggcaatgctaaaaagcttgtgaatgcggaaaagcctaatgtgcgttttgatgatatggctggaaatgcggaagcaaaggaagaagtcgtagaaattgtagattttcttaaatatcccgaacgttatgctgcagtgggagccaagattccacgtggtgtgcttttagttggacctccgggcacaggtaagacacttcttgcaaaagctgtggcgggtgaagcgaatgtgccatttttctctatgagtggaagtagttttattgaaatgtttgtagggcttggggctagtcgtgtaagagatttgtttgaaatggcaaagaaagatgcaccaagtattatttttattgatgaaattgatgccattggaaaaagtcgtgcagctggaagtatggttggtggcaatgatgagcgtgagcaaacgctcaatcaattacttgcagaaatggacggatttggttcagaatccgcgcctgtaattgtgcttgctgcaacaaatcgtcctgaaatccttgaccctgcattattgcgcccagggcgatttgatagacaggtgcttgtagataagcctgattttgaagggcgacttgaaattctcaaagtgcatattaaaaatgtttctttagcgcgtgatgtggatttacacgagattgcaaaatttacggctggacttgcgggggcagatttggcaaatatcattaatgaagccgctttgcttgctgggagagaaaatcaaaaagaagtaagtcaaaaacatcttaaagaagcagtagagcgaggaattgcaggattagaaaaaaaatcaagacgcatttctcctaaagagaaaaaaattgttgcttaccacgagagtgggcacgctgtggtatccgagatgacaaaaggtgctgatagagtgaataaagtatcaattattccaagaggtatggcagctcttggttatacgcttcatacacctgaagagaatcgctatttgatgcaaaaacacgagcttatggcagaggttgatgtacttttaggtgggcgtgcagccgaagaagtatttttaggcgagatttctacaggcgcaagcaatgatttagaacgtgctacagggattctcaaatcaatgattagttattatggtatgacagatgtaagcggacttatggtgcttgaaaaacaacgcaatactttccttggtggcggcaatgcgcaaagggaatttagcgaacagcttgctcaagaaattgatacccatattaaaaatacacttgatgaacgatatagttatgtaaagcagcttttgagtgattatcaagatgcgattgaaaatatggtcaaagagctttttgaaaaggaagtcattgatggtgcgcgtgtgagggagattattcaagaatacgaaatgcaaaataatatagaatctcgtcttattccgcttgaagaagaggaagtctaa

SEQ ID NO: 60404 - protein, 611 aa, Helicobacter hepaticus ATCC 51449
MILTLLLFKLFSPNGDSFTERLMGGNITKEISYNELKELITRGEISAVNIGQTYIKAYSANTSPRILYTTKKVADLGLVPLLDEKKIEYSGFSEGSFLGDLVNMLLPIFIILALWMFLTARMQKSMGGGIFGMGNAKKLVNAEKPNVRFDDMAGNAEAKEEVVEIVDFLKYPERYAAVGAKIPRGVLLVGPPGTGKTLLAKAVAGEANVPFFSMSGSSFIEMFVGLGASRVRDLFEMAKKDAPSIIFIDEIDAIGKSRAAGSMVGGNDEREQTLNQLLAEMDGFGSESAPVIVLAATNRPEILDPALLRPGRFDRQVLVDKPDFEGRLEILKVHIKNVSLARDVDLHEIAKFTAGLAGADLANIINEAALLAGRENQKEVSQKHLKEAVERGIAGLEKKSRRISPKEKKIVAYHESGHAVVSEMTKGADRVNKVSIIPRGMAALGYTLHTPEENRYLMQKHELMAEVDVLLGGRAAEEVFLGEISTGASNDLERATGILKSMISYYGMTDVSGLMVLEKQRNTFLGGGNAQREFSEQLAQEIDTHIKNTLDERYSYVKQLLSDYQDAIENMVKELFEKEVIDGARVREIIQEYEMQNNIESRLIPLEEEEV

SEQ ID NO: 60405 - DNA, 2019 bp, Rhodopirellula baltica SH 1
  CDS (1)..(2019): transl_table=11
atgaaaaaggattccgaatcgaactcttcggacaaatccaacaaggaagagctctcgacgggacgccgtggtggcaatccgatgatcatcgctttggtgatcacggtgctagccgcgatgctgtttttcaatcaacccgagccatcctctttgatttcggcgagctttttccgaagtcagcttgaaaaaaacaacatcgagtcggtcgagatcggcgacatcgaagtttcgggaacgttcaagactcgtccacaaatgccggccagcgagtctgcagatggtgatgcgaagccgaaggagttgctgaagcgttttcgattcacgcgtcccgcgggagcggattatgccgtgcagctatccgaagaccttgagaagcggaacatcaaggattggaaattctcgccgccggacaacaccgccgcgatcttgaatttgttgatcctggttggattgccgctggcgatcttcttcttcatcttcatgatgatccgtcgcacccgaaacgacatgatgggcggcgggtttctgtccgggttcagcaagagtccggcgaaacgattcgaagctactgacaaagtcatcacgttcaacgatgttgctggtttggaaggcgttaaggctgaccttcaagagatcgttgatttcctgaagactccagagaagtttcaaaagctcggtggccaagttcccaagggcgttttgctgaatggacctccgggtacaggcaaaacgttgttggctcgtgccgtggcgggtgaggcggacgtgccgttcttcagcgttaacggtagtgaattcattcagatgttcgttggcgttggtgccagccgcgtgcgtgatttgttcaagacggcaaaagaacagtctccgtcgatcatcttcattgacgagattgacgcagtcggtcgtcaacgtggtgctggtttgggtggcggacacgatgaacgcgaacagacgttgaatcagattctcggagagatggacggtttcggtggtgctcaagcggtcatcgtgattgcggcaaccaaccggcccgacgtgctggatccggcgttgcttcgaccaggacgttttgaccgtcacgtgaccgtgggtcgtccgacgatgaagggccgcgaagagattttcaaggttcacgttcgagacgtgccactgggcgacgatgttgatttgcatcgtttggcggcgggaacggttggcctgaccggtgccgacattcgcaacatggtcaacgaggctgctctttgggcggcacgtggcgacaagaaaatcgtcgagatgagcgacttcgactacgctcgcgacaagattttgatgggtgcgaagcgtgaagaggtcttgctggaaagcgagaaagaaaaaaccgcttatcacgaagccggccacacgttgacggcttggcacttggaaggttcgcacattgttcacaaggtgacgatcatccctcgaggtcgcgcgttgggggtgactcagtatgtgccgaatgaggaccgattgagcatgagcaagcgagagcttgagcatcaattgatcgtgttgctcgggggccgcgcggcagagaagatcatctacacggagacttgtgtgggtgcggagaacgatttggaacgagcgaccagtatcgcgcggcgaatggtcacgcattggggcatgagtccgaagattggtccggtcagttacaagacgagcgacgaagatccgtttttgggtcgcgagattcatcagcaacgtcaattcagcgaacacacgcaggaattgatcgatgaagaggtcgcgagaattctgatggaagcggatcagaaggcagagcaactgttgcgagaacatcgcggtcagttggagacgatcacgcgtgagttgctggatcgtgaggagctgaacgaggctgaattgacggaactgattggtccttcgattcacaaacgtttgggtgacgaagagggcaaggtcgagcagatcatggcccccgaaggagccgccgagcggacttcgaacgcttccgcacgacgcgaagactga

SEQ ID NO: 60406 - protein, 672 aa, Rhodopirellula baltica SH 1
MKKDSESNSSDKSNKEELSTGRRGGNPMIIALVITVLAAMLFFNQPEPSSLISASFFRSQLEKNNIESVEIGDIEVSGTFKTRPQMPASESADGDAKPKELLKRFRFTRPAGADYAVQLSEDLEKRNIKDWKFSPPDNTAAILNLLILVGLPLAIFFFIFMMIRRTRNDMMGGGFLSGFSKSPAKRFEATDKVITFNDVAGLEGVKADLQEIVDFLKTPEKFQKLGGQVPKGVLLNGPPGTGKTLLARAVAGEADVPFFSVNGSEFIQMFVGVGASRVRDLFKTAKEQSPSIIFIDEIDAVGRQRGAGLGGGHDEREQTLNQILGEMDGFGGAQAVIVIAATNRPDVLDPALLRPGRFDRHVTVGRPTMKGREEIFKVHVRDVPLGDDVDLHRLAAGTVGLTGADIRNMVNEAALWAARGDKKIVEMSDFDYARDKILMGAKREEVLLESEKEKTAYHEAGHTLTAWHLEGSHIVHKVTIIPRGRALGVTQYVPNEDRLSMSKRELEHQLIVLLGGRAAEKIIYTETCVGAENDLERATSIARRMVTHWGMSPKIGPVSYKTSDEDPFLGREIHQQRQFSEHTQELIDEEVARILMEADQKAEQLLREHRGQLETITRELLDREELNEAELTELIGPSIHKRLGDEEGKVEQIMAPEGAAERTSNASARRED

SEQ ID NO: 60407 - DNA, 1887 bp, Bordetella bronchiseptica RB50
  CDS (1)..(1887): transl_table=11
ttgaacaattcgttttctaaagtcgcggtctggatggtgatcgcgctggtgctgttcacggtgtttaagcagttcgacggacgtgcacaaacccaggacggcgtcagctacacccaattcatggacgacgccaaggcgggccgcatccgcaaggtcgacgtgcagggcgacgtgctgtatgtcacgccggacgccggccgtccctattcgctgacgtcgccgggcgacctgtggatggtgtcggacctgctcaagtacggcgtgcaggtttcgggcaaggcccgcgaagagccgtcgctgctgatgagcatcttcgtgtcgtggttcccgatgctgctgctgatcggcgtatggatcttcttcatgcgccagatgcagggcggcgggcgcggcggcgcgttcagcttcggcaagtcgcgcgcgcgcatgctcgacgagaacaccaatcaggtgaccttcgccgacgtcgccggctgcgacgaagccaaggaagacgtccaggagctggtcgatttcctgcgcgaccccagcaagttccagaagctgggcggccgcatcccgcgcggcgtgctgatggtcggctcgcccggcaccggcaagacgctgctggccaaggccatcgccggcgaggccaaggtgccgttcttcagcatctcgggctccgatttcgtggaaatgttcgtcggcgtgggcgcggcccgcgtgcgcgacatgttcgagaacgccaagaagcacgccccgtgcatcatcttcatcgatgaaatcgacgcggtcggccgccagcgtggcgccggcctgggcggcggcaacgacgagcgcgaacagaccctgaaccagatgctggtcgagatggacggcttcgagtcgggccagggcgtgatcgtcatcgccgcgaccaaccgtcccgacgtgctcgatccggcgctgctgcgtccgggccgcttcgaccgccaggtggtggtgccgctgcccgacatccgcggccgcgagcagatcctcaaggtgcacatgcgcaaggtgccgctgtcgcccaacgtcgacgccaccatcctggcgcgcggcacgccgggcttttcgggcgccgacctggccaacctggtcaacgaggcggccctgttcgccgcgcgccgcaacggccgcacggtggacatgtccgacttcgagaaggccaaggacaagatcatcatgggcgccgagcgccgctccatcgtcatgcccgaggaagagcgcaagaatacggcctaccacgagtccggccacgccatcgtggcgcgcatgctgcccaagaccgacccggtccacaaggtcaccatcatcccgcgcggccgtgcgctgggcgtgacgatgcagttgcccgaaaccgaccgctacagcatggacaaggagcgcctgctcaacaccatcgcggtgctgttcggcgggcgcatcgccgaagaaatcttcatgaaccagatgaccaccggcgcttcgaacgacttcgagcgcgccacggccatcgcccgcgacatcgtcacccgctacggcatgaccgacgagctgggccccatggtgtatgccgagaacgaaggcgaggtcttcctgggccgcagcgtcaccaagaccacgcatgtctcggaagcgaccatgcagaaggtcgacagcgagatccgccgcatcatcgacgagcagtacggcgtggcgcgcaagatcctggaagacaaccgtgcccgggtcgaagtgatgacctcggcgctgctcgaatgggaaaccatcgacgccgaccagatcgacgacatcgtcaacgaccgtccgccgcgtccgcccaagacgccgcaaggtccgtccgatacgtccgacaccccgcccaccgggctggctgccggcggcaatacggcggccgcggtctga

SEQ ID NO: 60408 - protein, 628 aa, Bordetella bronchiseptica RB50
MNNSFSKVAVWMVIALVLFTVFKQFDGRAQTQDGVSYTQFMDDAKAGRIRKVDVQGDVLYVTPDAGRPYSLTSPGDLWMVSDLLKYGVQVSGKAREEPSLLMSIFVSWFPMLLLIGVWIFFMRQMQGGGRGGAFSFGKSRARMLDENTNQVTFADVAGCDEAKEDVQELVDFLRDPSKFQKLGGRIPRGVLMVGSPGTGKTLLAKAIAGEAKVPFFSISGSDFVEMFVGVGAARVRDMFENAKKHAPCIIFIDEIDAVGRQRGAGLGGGNDEREQTLNQMLVEMDGFESGQGVIVIAATNRPDVLDPALLRPGRFDRQVVVPLPDIRGREQILKVHMRKVPLSPNVDATILARGTPGFSGADLANLVNEAALFAARRNGRTVDMSDFEKAKDKIIMGAERRSIVMPEEERKNTAYHESGHAIVARMLPKTDPVHKVTIIPRGRALGVTMQLPETDRYSMDKERLLNTIAVLFGGRIAEEIFMNQMTTGASNDFERATAIARDIVTRYGMTDELGPMVYAENEGEVFLGRSVTKTTHVSEATMQKVDSEIRRIIDEQYGVARKILEDNRARVEVMTSALLEWETIDADQIDDIVNDRPPRPPKTPQGPSDTSDTPPTGLAAGGNTAAAV

SEQ ID NO: 60409 - DNA, 1848 bp, Prochlorococcus marinus str. MIT 9313
  CDS (1)..(1848): transl_table=11
ttggataaacgctggcgcaacgtaggtctttacgttcttctggtggtcgtggtggtcgtggtcggcacggctttcctcggcaaacctggcacgactgagcgggagactctccgctacagcgaatttgttgaagcagttcaggacaaccaagtgagtcgtgtgctgatctccccagaccaggccaccgctcaggttgttgaaagcgatggtcgacgcgcggatgtcaaccttgcccctgacaaggatcttttgaagttgttaacggatcacaacgttgatattgctgttcaaccaacccgtcaggcaggtgcttggcaacaggccgccggaagtttgatattccccttgttgttattgggtggacttttctttctcttccgacgttctcagagtggtggtggcggtggtaaccctgcaatgaattttggtaagagcaaggccagagttcagatggagccgtccactcaggtcacctttagtgatgttgctgggatcgaaggggcaaagcttgaacttaccgaagtcgttgactttctcaaaaaccctgatcgatttactgctgttggcgcaaaaatccccaaaggtgttctgcttgtaggccctcccggaactggcaaaacactgcttgccaaagcagtggcaggtgaagcggcggtgccgttcttctcgatctcaggctcggagtttgtcgagatgtttgttggggttggtgccagtcgagtccgggacctatttgagcaggccaagaagaacgctccttgcattgttttcattgatgaaattgatgcggtgggtcggcagcggggggctggtcttggcggtggcaacgatgaacgtgagcagactcttaaccagctgcttactgaaatggatggtttcgagggcaataccggcatcatcatcgtggcggccaccaatcgacctgatgtgctcgattcggcgttgatgcgccctggtcgatttgatcgacaggttgttgtggagcgccctgattacaccggtcgcctgcagatcctcaatgtgcatgcccgcgataagaccctgtccaaggatgttgatctcgacaaagtggcgcggcgcacaccaggcttcacaggggctgatcttgccaacttgctcaatgaagcggcaatcctcgcagcgcgtcgtgagctcacagaagtaagcaatgacgagattagcgacgccattgagcgagtcatggttggtcctgagaagaaggatcgtgtcatgagtgaacggcgtaagcgactggttgcttatcacgagtctggtcatgccctggtaggagcccttatgcctgattacgactcggtgcagaagatttccatcattcctcgtggtcaggcgggtggtctcacattcttcaccccgagtgaggagaggatggagtcgggtctctattccagggcttatttgcagaaccagatggctgtcgctcttggtggtcgagttgcagaagaaatcgtctatggcgaagacgaggtgaccactggtgcatcaaatgaccttcaacaggtcgctcaggtcgccaggcagatggtgacgaggtttgggatgagcgacaagcttggtccggtcgccttggggcggtctcagggagggatgtttcttggccgtgacatcgcctctgaacgcgatttctctgaagacactgcagcaattatcgatgcagaggtctctgatcttgttgatgtggcttacaagcgtgccaccaaagtattgatcgagaatcgttctgttcttgatgagttggctgatttgcttgtagagaaggaaacacttgatgctcaggatttgcaggaattgttgatccgacgcgatgtaagggttgccgaatacgtctga

SEQ ID NO: 60410 - protein, 615 aa, Prochlorococcus marinus str. MIT 9313
MDKRWRNVGLYVLLVVVVVVVGTAFLGKPGTTERETLRYSEFVEAVQDNQVSRVLISPDQATAQVVESDGRRADVNLAPDKDLLKLLTDHNVDIAVQPTRQAGAWQQAAGSLIFPLLLLGGLFFLFRRSQSGGGGGNPAMNFGKSKARVQMEPSTQVTFSDVAGIEGAKLELTEVVDFLKNPDRFTAVGAKIPKGVLLVGPPGTGKTLLAKAVAGEAAVPFFSISGSEFVEMFVGVGASRVRDLFEQAKKNAPCIVFIDEIDAVGRQRGAGLGGGNDEREQTLNQLLTEMDGFEGNTGIIIVAATNRPDVLDSALMRPGRFDRQVVVERPDYTGRLQILNVHARDKTLSKDVDLDKVARRTPGFTGADLANLLNEAAILAARRELTEVSNDEISDAIERVMVGPEKKDRVMSERRKRLVAYHESGHALVGALMPDYDSVQKISIIPRGQAGGLTFFTPSEERMESGLYSRAYLQNQMAVALGGRVAEEIVYGEDEVTTGASNDLQQVAQVARQMVTRFGMSDKLGPVALGRSQGGMFLGRDIASERDFSEDTAAIIDAEVSDLVDVAYKRATKVLIENRSVLDELADLLVEKETLDAQDLQELLIRRDVRVAEYV

SEQ ID NO: 60411 - DNA, 1848 bp, Synechococcus sp. WH 8102
  CDS (1)..(1848): transl_table=11
ttgaacaagcgttggcgcaacatcggcctaacagccctactagtcctggcgatcgtggtgatcgccccggccttcctcggcggtggtaacacccagcaggaagcgcggaccatgcgctacagcgatttcgttgaagcggttgaggacaaccagatcagtcgtgtgctgatctccccggatcggggcacagctcaggtggtggaaaacgacggccgccgcgcccaggtgaacctggctcccgataaggagctgctgggtctgctgacgcagcacgacgtggacatcgctgtgcagcccacccgccaggctccggcctggcagcaggccgctggaagcctgatcttcccgctgctgttgctgggtgggttgttcttcctcttccgccgtgcccagggcggtggcggtggcaatcccgccatgcagttcggcaagagcaaggccagggtgcagatggagccctccacccaggtcaccttcaccgatgtcgccggcatcgaaggcgccaagctcgaactcaccgaggtcgtcgactttctcaagaatcctgatcgattcacagccgttggcgccaagatccccaagggtgtgttgctggtgggccccccaggcaccggtaagactctgcttgctaaggccgttgcaggtgaggcgggtgttcccttcttctcaatctccggctctgagttcgtcgagatgttcgtgggcgtcggtgccagccgtgtccgtgacctattcgaacaggccaagaagaatgccccttgcatcgtctttatcgacgaaatcgatgctgtcggccgtcaacgtggagcaggccttggtggcggtaacgatgagcgggaacaaaccctcaaccagctcctgacggagatggatggtttcgagggcaacaccggcatcatcattgtcgcggcgaccaatcgccctgacgtcctggatgctgcgctgatgcgccccggccgtttcgatcgacaggtcaccgttgatcggcccgattacgccggtcgcctccagatcctcaatgtccacgcccgcggtaagacgttgtccaaggacgtcgacctggacaaagtggcgcgccggacccccggctataccggtgctgatctggccaacctgctgaatgaggctgccatcctggctgcccgtcgcgaactgaccgaggtcagcaacgacgagatcagtgatgcgattgagcgcgtcatggccggtcctgagaaaaaggatcgcgtcatgagcgaacgccgcaagcgtttggtggcgtatcacgaggctggtcacgctctggtcggtgctctgatgcccgactacgaccccgtccagaagatctcaatcattccccgcggaaatgccggtggtctcaccttcttcacgcccagcgaggaacgaatggagtccggtttgtactccagggcttatctgcagaaccagatggcggtcgccctgggtggccgtgtcgctgaggagattgtctacggcgaggacgaagtcaccacaggtgcctccaacgacctgcagcaggtggcctcaacggcccgtcagatgatcacccgcttcggcatgagcgataccctcggccccgtggcccttggccgcgcccagggcggaatgttcctcggccgcgatattgcagcagagcgtgacttctctgaagacactgccgccaccatcgaccaggaggtgtctgagctggtggacgtggcttacaagagggccaccaaagtgttggtcgataaccgggctgtgctggatgaactagccgacatgctggtggaacaggagactgttgacgccgaggagttgcaggaactcctgattacccgcgacgtccgcgttgccgaatacatctga

SEQ ID NO: 60412 - protein, 615 aa, Synechococcus sp. WH 8102
MNKRWRNIGLTALLVLAIVVIAPAFLGGGNTQQEARTMRYSDFVEAVEDNQISRVLISPDRGTAQVVENDGRRAQVNLAPDKELLGLLTQHDVDIAVQPTRQAPAWQQAAGSLIFPLLLLGGLFFLFRRAQGGGGGNPAMQFGKSKARVQMEPSTQVTFTDVAGIEGAKLELTEVVDFLKNPDRFTAVGAKIPKGVLLVGPPGTGKTLLAKAVAGEAGVPFFSISGSEFVEMFVGVGASRVRDLFEQAKKNAPCIVFIDEIDAVGRQRGAGLGGGNDEREQTLNQLLTEMDGFEGNTGIIIVAATNRPDVLDAALMRPGRFDRQVTVDRPDYAGRLQILNVHARGKTLSKDVDLDKVARRTPGYTGADLANLLNEAAILAARRELTEVSNDEISDAIERVMAGPEKKDRVMSERRKRLVAYHEAGHALVGALMPDYDPVQKISIIPRGNAGGLTFFTPSEERMESGLYSRAYLQNQMAVALGGRVAEEIVYGEDEVTTGASNDLQQVASTARQMITRFGMSDTLGPVALGRAQGGMFLGRDIAAERDFSEDTAATIDQEVSELVDVAYKRATKVLVDNRAVLDELADMLVEQETVDAEELQELLITRDVRVAEYI

SEQ ID NO: 60413 - DNA, 1920 bp, Chromobacterium violaceum ATCC 12472
  CDS (1)..(1920): transl_table=11
gtgaacaatatcggcaaaaacatcgccatctgggtgatcatcggcctggtgctgatgaccgtcttcaatcagttcaacaagcgccaggacactcagaaccagctcgagtactcgcagttcgtcagcgatgtcgagtcgggcaaggtgcaatccctgaccatcgaggggcatccgctgcgcggccagtggctgaaaggcaagctgaccgacggcaccgcgttttccaccttcgcgccgtacgatccgcagctggtcgacgacctgatcaagaacaacgtccgcttctccgccaagccggaggaggagccgtcgatgctgatgagcatcttcatcagctggttcccgatgctgctgttgatcggcgtgtgggtgttcttcatgcgccagatgcagggcggcggcaagggcggcgcgttctcgttcggcaagagcaaggcgcgcatgctggaccaggacgccaacaccgtggtgttcgccgacgtggcgggctgcgacgaggccaaggaagaagtgaaggagatcgtcgactacctgcgcgatccttcccgctaccagagcctgggcggccgcatcccgcgcggcatcctgctggcaggcagcccgggcaccggtaaaaccttgctggccaaggccatcgccggcgaggccaaggtgccgttcttcagcatttccggttccgacttcgtcgaaatgttcgtcggcgtgggcgcggcccgcgtgcgcgacatgttcgagcaggcgaagaagaactccccgtgcatcatcttcatcgacgaaatcgacgcggtcggccgccagcgcggcgccggcctcggcggcggcaacgacgagcgcgagcagacgctgaaccagctcttggtggagatggacggcttcgacaccaattccaccgtgatcgtgatcgccgcgaccaaccgtccggacgtgctggacccggcgctgcagcgtccgggccgcttcgaccgccaggtgatcgtgccgctgccggacatccgcggccgcgagcagatcctgaacgtgcacatgcgcaaggtgccgatcgcagccgacgtcaacgccgaggtgatcgcgcgcggcacgccgggcttctccggcgccgacctcgccaacctgatcaacgaggccgccctgttcgctgcccgccgcaacaagcgcctggtggacatggaggacctggagtccgccaaggacaagatcatgatgggcgccgagcgccgcagcatggtgatgaccgaggaggagaagcgcaacaccgcctaccacgagtccggccacgccgtcgtcgccaagctgctgccgaagtccgacccggtgcacaaggtcaccatcatcccgcgcggccgcgcgctgggcgtgaccatgcagctgccggaacaggaccgcttcgcctacgaccgcggctacctgatggaccgtctggccatcctgttcggcggccgcatcgccgaagagctgttcatgaaccagatgaccaccggcgccagcaacgacttcgagcgcgcgacgcagatggcgcgcgacatggtcacccgctacggcatgtccgacaagctgggcccgatggtgtacggcgaaaacgagggcgaggtcttcctcggccgctcgatcaccacccacaagaacctgtcggaagcgacgctgcaacaggtggacgccgaaatccgccgcatcatcgacgagcagtacgcgctggcgcgccgcctgctggaagagaaccgcgacaaggtggaggcgatgaccgccgcgctgctggaatgggaaaccatcgacgccgagcagatcaacgacatcatggatggcaagccgccgcgtccgcccaagccgggctccggtttcgccgccaaggcggaggagaagccggccgaatcggaggagccggcggcgccgtcggccacctcggacccggcccaggaagtctga

SEQ ID NO: 60414 - protein, 639 aa, Chromobacterium violaceum ATCC 12472
MNNIGKNIAIWVIIGLVLMTVFNQFNKRQDTQNQLEYSQFVSDVESGKVQSLTIEGHPLRGQWLKGKLTDGTAFSTFAPYDPQLVDDLIKNNVRFSAKPEEEPSMLMSIFISWFPMLLLIGVWVFFMRQMQGGGKGGAFSFGKSKARMLDQDANTVVFADVAGCDEAKEEVKEIVDYLRDPSRYQSLGGRIPRGILLAGSPGTGKTLLAKAIAGEAKVPFFSISGSDFVEMFVGVGAARVRDMFEQAKKNSPCIIFIDEIDAVGRQRGAGLGGGNDEREQTLNQLLVEMDGFDTNSTVIVIAATNRPDVLDPALQRPGRFDRQVIVPLPDIRGREQILNVHMRKVPIAADVNAEVIARGTPGFSGADLANLINEAALFAARRNKRLVDMEDLESAKDKIMMGAERRSMVMTEEEKRNTAYHESGHAVVAKLLPKSDPVHKVTIIPRGRALGVTMQLPEQDRFAYDRGYLMDRLAILFGGRIAEELFMNQMTTGASNDFERATQMARDMVTRYGMSDKLGPMVYGENEGEVFLGRSITTHKNLSEATLQQVDAEIRRIIDEQYALARRLLEENRDKVEAMTAALLEWETIDAEQINDIMDGKPPRPPKPGSGFAAKAEEKPAESEEPAAPSATSDPAQEV

SEQ ID NO: 60415 - DNA, 1881 bp, Gloeobacter violaceus PCC 7421
  CDS (1)..(1881): transl_table=11
atgggcgaacaatccggcggcgagcggacgaacacccccaaatccggacggggctgggactacattgccgtgctggtgctggtgctggtggcggtgaacctgctggtgttgcccgcggtgttgatgtccgcatccggcccgagcgaaccctacagccggtttatcgaacaactcgagcagggcaaggttgcccgcgcgctggtggcgggcgaccgcatcgaatacgaactggcgggcgagaaaaaacgccaccggacggtgcccctgcccaccgatccgcaactggccgggcttctgcgccgacacaaagtcgaatatacggcggcgccttcccgcggtgctgactggctgccgggggtgcttgggtggttgatgctgcctctggcggtgttgggtttctggtggctattgggccgaggtggagcgcaggggccgcagacactcacgatgagccgttcgcgggcacgcatctacgcccagggttcgaccggagtcgccttcggcgatgtggccggcgtcgacgaggccaagggcgaactgcaggagattgtccagtttctcaagcagcccgagcgctacacccgcatcggtgccaagattcccaagggggtgctgttggtcggtccccccggcaccggcaagacgctgctggccaaggccgtcgccggtgaggcgggggtgccgttcttttcgatttcgggatccgaatttgtcgaactgttcgtcggtgtcggggcggcgcgggtgcgcgacctgttcgagcaggccaagcagcaggctccgtgtatcatcttcatcgacgaactggatgccatcggcaagtcgcgggtcggctcgcccatggccgggggcaacgacgagcgcgagcagaccctcaaccagctattggccgagatggacggctttgcccccaacaccggcgttatcttgctggcggccaccaaccggccggagagcctcgatccggcgttgctcaggccggggcgcttcgatcggcgggtgctggtggatcggcccgataaaaccggccgcctcgccattttgcaggtgcacgcccgaccggtgaaactggcccccgatgtcgatctggtggcgatggcgggtcggaccgccggatttgccggggcggacctggccaatttgatcaacgaggcggcgttgctcgcggcccgccagggcaaagcggccgtgaccatggctgatctggccgaggcgctcgagcgggtggtggcgggcctggagaagcgctcgcgcgtgctgggggacgaggagcgcgccacggtcgcccaccacgagtccggacacgcgatcgtcgcccgcctggtgccctgcaccggccgggtcgagaaaatctcgatcgtcccccgggggatggctgccctcggctacacgctgcaactgccggaggaggatcgcttcttgatgagcgagcccgagatgcgcgggcggctggcggtgctgatgggcggccgggcggcggagcatattatctttggcgaactttcgaccggagccgcggacgacttgcagcaggccaccgatctggcgcagcggatgatcaccctctacggcatgggtgcggacctcggtccggtcgcctttgaaaaaccgcagtcggaatttttgggcgggacggcgctgcggcgccctgtgagcgaagcggtcgccgagcaaatcgatcgcgaagtgcgcgctgtgctcgaaagcgcctacgcccacgccctcggcctgttgcgggccaacgggccgctcttggaggagatggcccggctgttgctggtgcaggaggtgctcgagggcccgcagttgcgcgcgctgttggagcgggcggtgtcgcttgcgcagccgcggacggcactgtgcgcggaaagtgccccttaa

SEQ ID NO: 60416 - protein, 626 aa, Gloeobacter violaceus PCC 7421
MGEQSGGERTNTPKSGRGWDYIAVLVLVLVAVNLLVLPAVLMSASGPSEPYSRFIEQLEQGKVARALVAGDRIEYELAGEKKRHRTVPLPTDPQLAGLLRRHKVEYTAAPSRGADWLPGVLGWLMLPLAVLGFWWLLGRGGAQGPQTLTMSRSRARIYAQGSTGVAFGDVAGVDEAKGELQEIVQFLKQPERYTRIGAKIPKGVLLVGPPGTGKTLLAKAVAGEAGVPFFSISGSEFVELFVGVGAARVRDLFEQAKQQAPCIIFIDELDAIGKSRVGSPMAGGNDEREQTLNQLLAEMDGFAPNTGVILLAATNRPESLDPALLRPGRFDRRVLVDRPDKTGRLAILQVHARPVKLAPDVDLVAMAGRTAGFAGADLANLINEAALLAARQGKAAVTMADLAEALERVVAGLEKRSRVLGDEERATVAHHESGHAIVARLVPCTGRVEKISIVPRGMAALGYTLQLPEEDRFLMSEPEMRGRLAVLMGGRAAEHIIFGELSTGAADDLQQATDLAQRMITLYGMGADLGPVAFEKPQSEFLGGTALRRPVSEAVAEQIDREVRAVLESAYAHALGLLRANGPLLEEMARLLLVQEVLEGPQLRALLERAVSLAQPRTALCAESAP

SEQ ID NO: 60417 - DNA, 1962 bp, Photorhabdus luminescens subsp. laumondii TTO1
  CDS (1)..(1962): transl_table=11
ttgagtgacatggcgaaaaacctgattctctggttagttatcgcagttgtgctgatgtcgttattccagagttttggtcccagcgattccaatagtcgtagggtggattattctaccttcatcaatgaattagcccaggatcaggtgcgcgaagttcgtatcacaggtcgtgaaattaacgttagtaggaaagataacagcagatacaccacttacctaccagtacaggatgaaaaactgctagatacgttactgaataaaaacgtaaaagtggttggtgaacccccagaggaaccaagtctgctaacttctattttcatttcctggttcccgatgttgctgcttattggggtctggattttctttatgcgtcagatgcagggtggtggcggtaaaggggcaatgtcttttggtaaaagcaaggcccgtatgctgacagaagatcagattaaaaccacttttgctgatgttgctggttgcgacgaagcgaaagaagaagttggtgaactggtggaatatctgcgcgagccaggccgcttccagaagttgggtggaaaaattccgaaaggtattctgatggttgggcctccgggtacgggtaagactttactggcaaaagcaattgctggtgaagcgaaagtgccgttctttactatctctggttctgattttgttgaaatgtttgttggtgttggtgcatcccgtgttcgtgatatgttcgagcaggcgaagaaagcagcaccttgtatcatctttattgatgaaattgatgcggtgggccgtcagcgtggcgctggtttgggtggcggtcacgatgaacgtgagcagactctaaaccagatgttggttgagatggatggttttgaaggcaacgaaggtattatcgttattgccgcgactaaccgtcccgacgtacttgatcctgcgttgttgcgtccaggtcgttttgaccgtcaggttgttgttggtttgccagacgtacgtggccgcgagcagattctgaaagttcatatgcgccgggttcctctggatacagatgttgatgcttctgtcattgctcgcggtactccgggattctctggtgctgatttggctaacttggtgaatgaagctgctttgtttgctgcccgtggtaacagacgcgtagtttctatggttgaattcgaaaaagcgaaagacaaaatcatgatgggcgctgaacgccgctctatggtgatgacggaagagcagaaagaatcaactgcttatcatgaagcaggccatgctattattggccgtctggttcctgagcatgatcctgttcataaagttaccattattccgcgtggtcgcgctttgggggtgacttttttcctaccggaaggcgatcagatcagcgctagtcgccagaagttggaaagccagatttcaaccttatatggaggtcgtctggcggaagagattatttatggcccagacagtgtttctactggtgcatctaatgatatcaaagtggcgacatcaattgcccgtaacatggtaacgcagtggggtttctcggaaaaacttggcccattactctatgcagaggaagaaggggaagtgttccttggccgttcagttgctaaagctaagcacatgtctgatgaaactgctcgtcttattgatcaggaagttaaggcaattatcgatcataactatcaacgtgctcgtcagattctgatggacaaccttgatgttctgcattcgatgaaagatgcattgatgaagtacgaaactattgatgctccccagattgatgacttaatgaatcgtacaaatgttcgtccaccagcaggatgggaaagtgataacggcagcagtaataacagtcgcccaacaggtaatacacctcctccacaagctgcaaaaccaactgatgatatcaatacattggcgcaaggtggtgagcaagtagggcagtcaggaaataaagatcagtaa

SEQ ID NO: 60418 - protein, 653 aa, Photorhabdus luminescens subsp. laumondii TTO1
MSDMAKNLILWLVIAVVLMSLFQSFGPSDSNSRRVDYSTFINELAQDQVREVRITGREINVSRKDNSRYTTYLPVQDEKLLDTLLNKNVKVVGEPPEEPSLLTSIFISWFPMLLLIGVWIFFMRQMQGGGGKGAMSFGKSKARMLTEDQIKTTFADVAGCDEAKEEVGELVEYLREPGRFQKLGGKIPKGILMVGPPGTGKTLLAKAIAGEAKVPFFTISGSDFVEMFVGVGASRVRDMFEQAKKAAPCIIFIDEIDAVGRQRGAGLGGGHDEREQTLNQMLVEMDGFEGNEGIIVIAATNRPDVLDPALLRPGRFDRQVVVGLPDVRGREQILKVHMRRVPLDTDVDASVIARGTPGFSGADLANLVNEAALFAARGNRRVVSMVEFEKAKDKIMMGAERRSMVMTEEQKESTAYHEAGHAIIGRLVPEHDPVHKVTIIPRGRALGVTFFLPEGDQISASRQKLESQISTLYGGRLAEEIIYGPDSVSTGASNDIKVATSIARNMVTQWGFSEKLGPLLYAEEEGEVFLGRSVAKAKHMSDETARLIDQEVKAIIDHNYQRARQILMDNLDVLHSMKDALMKYETIDAPQIDDLMNRTNVRPPAGWESDNGSSNNSRPTGNTPPPQAAKPTDDINTLAQGGEQVGQSGNKDQ

SEQ ID NO: 60419 - DNA, 1917 bp, Rhodopseudomonas palustris CGA009
  CDS (1)..(1917): transl_table=11
atgaacgccaatctgcgcaatttcgccctctgggtcatcatcgtgctgctgctgttggcgctgttcacgctcttccagaatccgggccagcgcaccgcgtcgcaggaaattccgttctcgcagctcctcagcgagatcgaccagaaccatgttcgggacgtggtgatccagggccaggaaatccgcggcaccttcaccaacggctcgaccttccagacctacgcaccgaacgatccgtcgctcgtgacccgcctgtacaacggcaaggtgtcgatcaccgccaagccgccgggcgacaacgtgccgtggttcgtgtcgctgctcgtgtcctggctgccgttcatcgcgctgatcggcgtgtggatcttcctgtcgcggcagatgcagggcggcgccggcaaggcgatgggcttcggcaagtcgcgcgccaagatgctgactgaagcgcatggccgcgtgacgtttgaagacgtcgccggcgtcgacgaggccaagcaggacctgcaggagatcgtcgaatttctgcgcgacccgggcaaattccagcgtctcggcggccgcattccgcgcggcgtgctgctggtcggccctcccggtactggtaagaccctgatcgcgcgcgcggtcgcgggtgaagccaacgtgccgttcttcaccatctccggttcggacttcgtcgaaatgttcgtcggcgtcggcgcctctcgtgtgcgtgacatgttcgagcaggccaagaagaatgcgccgtgcatcatcttcatcgacgaaatcgatgcggtcggtcgtcatcgcggcgcaggtctcggcggcggcaatgacgaacgcgagcagaccctcaaccagttgctggtcgagatggacggcttcgaggccaatgagggcgtgatcctgatcgccgccaccaaccggcccgacgtgctcgatcccgcgctgctgcgtcccggccgcttcgaccgtcaggtcgtggtgccgaatccggacgtcgtcggccgcgagcagatcctcaaggtccacgttcgcaaggtgccgctggcgcccgatatcaacctgaagaacatcgcgcgcggcactccgggcttctcgggcgccgacctgatgaacctcgtcaacgaagcggcgctgatggcggcccggcgcaacaagcgcatggtcactcagtccgagttcgaagacgccaaggacaaggtgatgatgggcgccgagcgcaagtcgctggtgatgacggaagaggagaagcttctcaccgcgtatcacgaaggcggtcacgccatcgtcggcctcaacgttccggcgaccgacccgatccacaaggcgaccatcattccgcgcggccgtgcgctcggcatggtgatgcagctccccgagcgcgacaagctgtcgatgtcgctcgagcagatgacctcgcgtctcgccatcatgatgggcggccgcgtcgccgaggagatggtgttcggccgcgagaaggtgacttccggtgccgcatccgacatcgaacaggcgaccaagcttgcgcggatgatggtgacccgctggggcctgtcggaagagctcggcaccgtcgcttacggcgagaaccaggacgaagtgttcctcggcatgtcggtgtcgcgcacccagaacgcgtccgaggcgacgatccagaagatcgacgccgagatcaagcggctggtcgaagagggctacaacgaggccaagcgcatcctcaccgagcgtcgcgccgacctcgaagcgctcgccaagggcctgctcgaatacgagaccctgaccggtgacgagatcaccgacctgatcaacggcaagaagccgaaccgcgaatcggtgctggagccgtcgggcccccgcacctcggcggtgccgccggccggcaagccgcggccgcggcccgatccgggcctggagccgcagccccaggcgtaa

SEQ ID NO: 60420 - protein, 638 aa, Rhodopseudomonas palustris CGA009
MNANLRNFALWVIIVLLLLALFTLFQNPGQRTASQEIPFSQLLSEIDQNHVRDVVIQGQEIRGTFTNGSTFQTYAPNDPSLVTRLYNGKVSITAKPPGDNVPWFVSLLVSWLPFIALIGVWIFLSRQMQGGAGKAMGFGKSRAKMLTEAHGRVTFEDVAGVDEAKQDLQEIVEFLRDPGKFQRLGGRIPRGVLLVGPPGTGKTLIARAVAGEANVPFFTISGSDFVEMFVGVGASRVRDMFEQAKKNAPCIIFIDEIDAVGRHRGAGLGGGNDEREQTLNQLLVEMDGFEANEGVILIAATNRPDVLDPALLRPGRFDRQVVVPNPDVVGREQILKVHVRKVPLAPDINLKNIARGTPGFSGADLMNLVNEAALMAARRNKRMVTQSEFEDAKDKVMMGAERKSLVMTEEEKLLTAYHEGGHAIVGLNVPATDPIHKATIIPRGRALGMVMQLPERDKLSMSLEQMTSRLAIMMGGRVAEEMVFGREKVTSGAASDIEQATKLARMMVTRWGLSEELGTVAYGENQDEVFLGMSVSRTQNASEATIQKIDAEIKRLVEEGYNEAKRILTERRADLEALAKGLLEYETLTGDEITDLINGKKPNRESVLEPSGPRTSAVPPAGKPRPRPDPGLEPQPQA

SEQ ID NO: 60421 - DNA, 1845 bp, Geobacter sulfurreducens PCA
  CDS (1)..(1845): transl_table=11
atgggggtacccttgaaccagttctacaagaaccttgcgctctggctcgtcataagccttatgatgatcctcctcttcaacctcttcaacaagccgcgcaccacccaggaacggctcggctacagcgacttcattgctgcggttgatgcggggaaggtcagcacggttacggtccaggggaacgagatcatcggcaagtattccgacggcaaggaattccgcagctacaagccgacagatgccatgctctccgaaaagcttctggagaagaagatcaatgtctctgccaagcccgaggaagagaaggtctcgtggttctccatcttcatctcctggttcccgctcctttttctggtgggggtctggattttcttcatgcgccagatgcagggagggggtggcaaggccatggcattcggcaagagccgcgcgaagcttctgacagaagcccaggggcgcgtgaccttcgaagacgtggccggtgtagacgaagcaaaggaagaactggaagaaatcatccagtttctgaaggatcccaagaaattcaccaagctaggaggccgtatccccaaaggtgttctgctcgtgggccctcccggcacgggcaagacgctcctggcacgggccgtagccggagaggcgggagttcctttcttctccatttcgggatccgactttgtcgaaatgtttgttggggtcggcgcgagccgggtccgcgatcttttcgtgcagggaaagaagaatgcgccctgcattatcttcatcgatgagatcgatgcggttggacgccatcggggtgcgggactcggcggcggccatgacgagcgggaacagacactgaaccagctgctggttgagatggacggcttcgaatccaacgaaggggtcattcttatcgcggccacaaaccggcccgatgtcctcgatccggcactcctacggccgggacggttcgaccgccaggtggtcgttccccagcccgacgtgaaggggcgggagatgattctgaaggtccacaccaaaaagaccccgcttgcttccgatgtggacctgggagtaatcgcccgcggcacgcccggcttctcgggagcggacctgtccaacgtggtgaacgaggctgctctgctggcggcgcgtaaggacaagagctttgtcgaaatgaaggactttgacgacgccaaggacaaagtcctcatgggtgtcgagcgtcgcagtatggtgatttcggaggaagagaagaaaaataccgcctatcacgaagccggccatacccttgttgccaaactgatcccgggcaccgatccggtgcacaaggtttccattattccgcggggacgggcgcttggcgttaccatgcaactgcctatcgaggacaagcacagctataacaaggagtcgctcctgaaccggatcgcggtgctcatgggaggccgggctgccgaagagatcatcttcaatgagcttaccacgggcgccggtaacgacattgaacgtgcaacggagatcgcacgcaagatggtgtgcgaatggggtatgagcgaaaagatggggccggtcaccttcggtaagaaggaggagtcgatcttccttggccgtgacatgtccatgcacaagaactacagtgaagcgacggcggtggaaatcgacgaggagattcgtaaaatcatcgacggcagctactcgcgggtcaagcagctcctgaatgagaatctgagcgtgctccactgtctggcaacacagcttatcgagaaagagaacctgaccggcgacgaagttgaccggatcatcaaggatgactgcgcggccagccgcgctgcagtcgaagaggcccccgtggctccatga

SEQ ID NO: 60422 - protein, 614 aa, Geobacter sulfurreducens PCA
MGVPLNQFYKNLALWLVISLMMILLFNLFNKPRTTQERLGYSDFIAAVDAGKVSTVTVQGNEIIGKYSDGKEFRSYKPTDAMLSEKLLEKKINVSAKPEEEKVSWFSIFISWFPLLFLVGVWIFFMRQMQGGGGKAMAFGKSRAKLLTEAQGRVTFEDVAGVDEAKEELEEIIQFLKDPKKFTKLGGRIPKGVLLVGPPGTGKTLLARAVAGEAGVPFFSISGSDFVEMFVGVGASRVRDLFVQGKKNAPCIIFIDEIDAVGRHRGAGLGGGHDEREQTLNQLLVEMDGFESNEGVILIAATNRPDVLDPALLRPGRFDRQVVVPQPDVKGREMILKVHTKKTPLASDVDLGVIARGTPGFSGADLSNVVNEAALLAARKDKSFVEMKDFDDAKDKVLMGVERRSMVISEEEKKNTAYHEAGHTLVAKLIPGTDPVHKVSIIPRGRALGVTMQLPIEDKHSYNKESLLNRIAVLMGGRAAEEIIFNELTTGAGNDIERATEIARKMVCEWGMSEKMGPVTFGKKEESIFLGRDMSMHKNYSEATAVEIDEEIRKIIDGSYSRVKQLLNENLSVLHCLATQLIEKENLTGDEVDRIIKDDCAASRAAVEEAPVAP

SEQ ID NO: 60423 - DNA, 1938 bp, Bdellovibrio bacteriovorus HD100
  CDS (1)..(1938): transl_table=11
atgcgatcaacccagaaaacgctggctctatggttcttcctgatcatcatggctgtgtttctatttcaagcctatgagagcaagcaacaaaaagcgattgctgactttaatttttccaaattcactgaagccgtaaaggccggtgaggtggcgacggtcaccttccgtcaggacaccagcgaagttgttggtgaaatgaagccggagtttgaaaagaaatacaacggcactcacttttccatcgtcgggaacacccaggatgagggttataaattcctgcaacaacatggcattacgcccaactatgagcgcgctgacaatggtggcttcttccagtcattgcttgtgaactggcttccattgattctgatcgtagcgatgttcctgttcatcatgcgccagattcaggccggtggcggcaaagccatgtcctttggtaaatcccgcgcccgtcttctgacggagcataaaaaccgtgtgaccttcaaagaggttgccggagtggatgaagccaaagaagacttgcaagagatcgtgagcttcctgaaagaccctaaaaaatacaccaagctgggtggccgcatccctaaaggggttttgctggtgggttctccagggactggtaagaccttgctggctcgcgccgttgcgggtgaggcgggcgttccattcttcacaatttccggttctgacttcgtcgaaatgttcgtcggtgtcggtgccagccgtgttcgtgatttgttcgaacagggtaaaaagaatgctccatgtttgatctttattgatgagatcgatgctgtcggtcgccatcgtggtgctggtatgggtggtggtcacgatgagcgtgagcagactctgaatcagttgctggtcgagatggatggttttgaatcttctgaaggtgtcatcatgatcgcggcaaccaaccgtcctgacgttctggaccctgcgttgcttcgtccaggtcgtttcgaccgtcgtgtgatcgtgaacaaaccggaccttaaaggccgtgagcagatccttgcggttcacatgcgcaagactccactggggcctgatgtggatgcttccaaaatcgcacgtggtacgccgggcttctcgggtgcggatcttgagaaccttgtgaatgaagctgctctggtggccgctcgttctgacaagaagtatctggaaatggaagatttcgaaaaagcgaaagacaaagtcacaatgggtgcggaaagacgctctatggtgatttctgatgaagataaaaaagtcactgcgtaccatgaagccggccacacgctggtgggtaaaaagcttgttggcttggatccaatccacaaagtgaccatcatccctcgtggtatggctctgggtgtgactcagacgttgcctgaaaaagaaagcgtgtctttgtccaaatccaaagctgaaaacatgatcgccttcctgtttggtggtcgtgcggctgaagaactgatctttaaggacatcaccactggcgccggcaacgacatcgaacgtgcgactgaaatcgcccgtcgtatggtgtgtgaatggggtatgagcaagctgggtcctttggcttatgaaacccgcgacaatccggtgttcatgggtatgggctatggcaacaagtccaaagagtactctgatgcaaaagcgcaagagatcgacactgaagtcgaaaagatcatcaagcacggttacgatatttctatccagattctgcgtgaccaccaggatgctctggagcgcctgactcaggctttgctggagtacgaaaccatcgatggtcatgaagtcgatatgcttgtgaatggcgcggcagttgcggaaattgaaaaataccgcaatgccaaaaaagattccaacgcggccattatgaacgcggcggaaaagaaaggatctggagatccggtgggtaacaccggcccggtgacgatctaa

SEQ ID NO: 60424 - protein, 645 aa, Bdellovibrio bacteriovorus HD100
MRSTQKTLALWFFLIIMAVFLFQAYESKQQKAIADFNFSKFTEAVKAGEVATVTFRQDTSEVVGEMKPEFEKKYNGTHFSIVGNTQDEGYKFLQQHGITPNYERADNGGFFQSLLVNWLPLILIVAMFLFIMRQIQAGGGKAMSFGKSRARLLTEHKNRVTFKEVAGVDEAKEDLQEIVSFLKDPKKYTKLGGRIPKGVLLVGSPGTGKTLLARAVAGEAGVPFFTISGSDFVEMFVGVGASRVRDLFEQGKKNAPCLIFIDEIDAVGRHRGAGMGGGHDEREQTLNQLLVEMDGFESSEGVIMIAATNRPDVLDPALLRPGRFDRRVIVNKPDLKGREQILAVHMRKTPLGPDVDASKIARGTPGFSGADLENLVNEAALVAARSDKKYLEMEDFEKAKDKVTMGAERRSMVISDEDKKVTAYHEAGHTLVGKKLVGLDPIHKVTIIPRGMALGVTQTLPEKESVSLSKSKAENMIAFLFGGRAAEELIFKDITTGAGNDIERATEIARRMVCEWGMSKLGPLAYETRDNPVFMGMGYGNKSKEYSDAKAQEIDTEVEKIIKHGYDISIQILRDHQDALERLTQALLEYETIDGHEVDMLVNGAAVAEIEKYRNAKKDSNAAIMNAAEKKGSGDPVGNTGPVTI

SEQ ID NO: 60425 - DNA, 1977 bp, Treponema denticola ATCC 35405
  CDS (1)..(1977): transl_table=11
atgagtaaagataatgacgataaaaaccaaaacgatccctttaacttttttaatttcgggccggattccgatggagacgataaaaaatcacccaagaagccgtttttttctttatggcttttagcgccgcttgtagttatcatttttatcttaattaatcagttaatggtgctcaatagttccgccctgattcctttttcggaatttaaggatagaattacaacgggacagataaaaaaggttgttctcggtcctgtttattttaccggttataccagcatacaggatgatgattcttcaaatacctctttattttcatttttgtcggtacaaaaaaatactaatgaatatgtaacagtcgggatatacacctcggagtttttacagcttttagatgaccatcatgtggtttatcatgtaaagcctaaggaaagaagctatattgttgagcttcttttacagtgggtacttcccttccttttgatattccttgtttggcgtgccatcatgagacggatgaccaaggggatgggcggtttgggcggaagtattttttctcccgggcaggccagaagtgctgcaatagacgagggaaaggttgaaacccgctttaaggacgtcgcaggcgtcgatgaagctaaagaagaattaatggaagttgtagacttcttaaaatatcctcaaaaatataccgaaataggcggaaagattccgcgaggtgttcttttggtaggccctcccggaacgggaaaaacccttcttgcgcgagccgttgcaggtgaagcaggggttcccttctttagaataagcggctcggactttgtcgaaatgtttgtcggcgtaggagcttcccgtgtgcgtgacctattcaggcaggcccgtgaaaaagctccctgtattatctttatagacgaattggatgctatcggaaaatcgcgtcataattcttacagctcaaatgatgagcgggaacaaactttgaaccagcttttggttgaaatggacggctttgacaataagacgggcttgattcttttggctgccaccaaccgccctgatgttttggatccggccttgttaagacccggccgctttgacaggcaggttgtggttgaccgccccgatgtaaagggaagagagcagattctcaagcttcatgcagaaaatgtaaaactcgatgcttcggccgatttggcttcgatagcccgcattacagccggctgttcaggtgccgaccttgcaaatattataaatgaggccgctcttttggctgtcagaagtaaaagaaagaccgtcattatgactgacttggatgaagctgttgaaaaggcaatgataggcttacagaaaaaatcccgcgtaattcgtgaagaagaaagaaaagtaatagcctatcatgaaacaggtcatgccatcgtaggcagctttaccgatggagccgataaggtccataaggtaaccatagttccccgcggaacctcgactttgggctataccttccatattcccgaagacgataaacatatcgttaccgaaaaacagcttttggccgagatagatgttcttttaggaggccgagccgcagaacaggtaaaattcaatatggtttctaccggagctgcaaacgatttaacccgtgccaccgatattgcccgaagccttataaccgattacggtatgagctctaaatttaaaaacgtagccttgagcaagcgtggtgccggatatcttggcgataatgaacctaggttggtgcgtgaatatgccgaaacaacccagcaatacatcgatgaagaaatcgcaaagataatcaatacccgctatgagggtgttataaaaatgctgaacgaaaaaaagcatcttttggaaaagatagcaacaacccttttagaaaaggaaaccatagaaaacgaagaattcgatgcgataatcgctgaggagaaggctcctaaactttttgaaaaagagagtgaatag

SEQ ID NO: 60426 - protein, 658 aa, Treponema denticola ATCC 35405
MSKDNDDKNQNDPFNFFNFGPDSDGDDKKSPKKPFFSLWLLAPLVVIIFILINQLMVLNSSALIPFSEFKDRITTGQIKKVVLGPVYFTGYTSIQDDDSSNTSLFSFLSVQKNTNEYVTVGIYTSEFLQLLDDHHVVYHVKPKERSYIVELLLQWVLPFLLIFLVWRAIMRRMTKGMGGLGGSIFSPGQARSAAIDEGKVETRFKDVAGVDEAKEELMEVVDFLKYPQKYTEIGGKIPRGVLLVGPPGTGKTLLARAVAGEAGVPFFRISGSDFVEMFVGVGASRVRDLFRQAREKAPCIIFIDELDAIGKSRHNSYSSNDEREQTLNQLLVEMDGFDNKTGLILLAATNRPDVLDPALLRPGRFDRQVVVDRPDVKGREQILKLHAENVKLDASADLASIARITAGCSGADLANIINEAALLAVRSKRKTVIMTDLDEAVEKAMIGLQKKSRVIREEERKVIAYHETGHAIVGSFTDGADKVHKVTIVPRGTSTLGYTFHIPEDDKHIVTEKQLLAEIDVLLGGRAAEQVKFNMVSTGAANDLTRATDIARSLITDYGMSSKFKNVALSKRGAGYLGDNEPRLVREYAETTQQYIDEEIAKIINTRYEGVIKMLNEKKHLLEKIATTLLEKETIENEEFDAIIAEEKAPKLFEKESE

SEQ ID NO: 60427 - DNA, 2118 bp, Unknown
  Unidentified
  CDS (1)..(2118)
atgatttctttgcaatctcacaatcaggtactatatcatctgacccaattcacttctgctattacaccaagatcggccacaccattgtcagctcaagtaaagcaaaaaaatgattctataaacaagaagactgaggatatactttgtcaaagcagtttttcggaggcggttaaaagctgcaatgaattagccttggataaattaaatatacaaaatttaataactcctttgaggatcagcagaaatgatgtatgggatatcttggaacagctctctaaaacagaaagttctgaaattggaagaaaaaacaacaaatggaaggtatcctatgtttctggttctagcttcgcagaaaataagagaggcttgtctacatcgcaactatctgatagtaatcagctgaaaacggtttatttttttatcaaaccacaacgacgatttttacgaaaattttgttctttaacaatacaccccaatagtgcagcacaagttagatatttcaaaacagaccgtagcattaaagctgaacttgatcgaaatcctacattaagtactcgaatacgaaaatggattgcaaatagagaatatcgggatatagaaaaattgagtaaactgctaggcgataagtatgccaaacttgacgaaccacagcgaattaaagtagcttttggtgaaggttacctagctggccgaaatcaaaaaccttttggacgagtatacaaagtattaaaattttcacagcagattataacaactgttatagttcttataatttttattttttttatagcaacaacagaaggaagtatgttcaaaatgaaacttgggaataagtcacaagtcgatccagaagaaattaatgtaaaatttaatgatgtaaagggggtagaagacgccaagtccgagttaatggatgttgtggaatttttgagaaatcctgataaattttcagctcttggtggaaaattgccgaaaggagtattacttgttggtccaccgggaacaggtaaaactctcttagctcgagccgtagcaggggaagctggtgtgcctttcttttatgcagctggaccagaatttgatgaaatatttgttggtcaaggagcccgtagagtaagagatttattcaaggctgccaaggaacatgctccttgtgtaatttttatagatgaaatagattcagttggagcaaaacgtacaaattctgttatacatccacatgctaaccaaactattaaccagcttctttcagaaatggatggatttcaccgaaatgagggagtaattgtaataggagcaactaataggcgtcaagatctcgataaagcgttattaaggcctggccgttttgactcagaagttacagtaaaagcaccagacttgatggagcgcaaagaaatcatagatttatatttaggaaaagttctcactcgcgacgttaatgccgagctgttagcaaaacgaactattggatttaccggtgccgatatagaaaatatgatcaaccaagctgccttacgagctgctattgaaggtgctgaatatgtgacgatggatcatttagaacgtgctaaagataaagttataatgggacctgaaggtaaaaagaaaattctagacgaacaagaaaatcgtctaactgcgtatcatgaaggaggtcacgcactagtatcgtattttacgaaagatgctgtgcctttgcataaagtcacaattttaccgcgaggacaagcattaggatatacccagtctcttcccaacaaagacacacatttgatgaccaaagcacaaatgcttgcaagtatggatgtgtctatgggtggtcgtgccgcagaagagcttatatttggacaagatcaagttacatccggagcttcaagtgattttgtgttaattgataatgaagttagacgacttttacaggaatcatacgaccgagctaaagcaattttaaaaaatcatagtaaagaacacaagctattagctgaggcattgttaaaatatgaaactttggatgcagaagatgtcaagacactcgtaagtggaaaaaaattgcgacacgaaactgccaacgatgtgaaccgaacggtcgtcgacgtaccgaataacatcatgtaa

SEQ ID NO: 60428 - protein, 705 aa, Unknown
  Unidentified
MISLQSHNQVLYHLTQFTSAITPRSATPLSAQVKQKNDSINKKTEDILCQSSFSEAVKSCNELALDKLNIQNLITPLRISRNDVWDILEQLSKTESSEIGRKNNKWKVSYVSGSSFAENKRGLSTSQLSDSNQLKTVYFFIKPQRRFLRKFCSLTIHPNSAAQVRYFKTDRSIKAELDRNPTLSTRIRKWIANREYRDIEKLSKLLGDKYAKLDEPQRIKVAFGEGYLAGRNQKPFGRVYKVLKFSQQIITTVIVLIIFIFFIATTEGSMFKMKLGNKSQVDPEEINVKFNDVKGVEDAKSELMDVVEFLRNPDKFSALGGKLPKGVLLVGPPGTGKTLLARAVAGEAGVPFFYAAGPEFDEIFVGQGARRVRDLFKAAKEHAPCVIFIDEIDSVGAKRTNSVIHPHANQTINQLLSEMDGFHRNEGVIVIGATNRRQDLDKALLRPGRFDSEVTVKAPDLMERKEIIDLYLGKVLTRDVNAELLAKRTIGFTGADIENMINQAALRAAIEGAEYVTMDHLERAKDKVIMGPEGKKKILDEQENRLTAYHEGGHALVSYFTKDAVPLHKVTILPRGQALGYTQSLPNKDTHLMTKAQMLASMDVSMGGRAAEELIFGQDQVTSGASSDFVLIDNEVRRLLQESYDRAKAILKNHSKEHKLLAEALLKYETLDAEDVKTLVSGKKLRHETANDVNRTVVDVPNNIM

SEQ ID NO: 60429 - DNA, 1857 bp, Magnaporthe grisea 70-15
  CDS (1)..(1857)
atgcctgccattatcgtggagcgccaccaatccggtcactttgcgagcaacgatgccacgcgcgaggtatacaaccgcgcccgtgccatgcttgaaggaagccaaggggcctcaaactcggtggccgccaatggcgagtttgtcgaggacacaagcaggctcagagcggtcgggcaagcggtagccgcaagatccatgggaggcaacatttcgtccgcaagagagactgcgaatgggccaattcgagtcgtagtcgacgaatcgcgggggtcgcagatcttccgttgggtcaaatttgtggcctacttcgcgttcgttgcctacgtttccatggttgttttgggcatcgtcttcgacatgtttacgtcagtaaacaagaagatgtcgacgcagaagcacatggaggtgaaggcagacaagcaaaagacacgattcaaggatgtccacggctgcgaagaggccaaggaggaactccaggatctcgtcgagttcctgaagaacccggataaattctcatccctgggtggcaaactccccaaaggtgtgctactcgtcggccctcctggaactggtaaaacgttgctggccagggctgtcgcaggcgaggctggtgtaccgttcttctacatgtccggcagcgagttcgaggaggtcttcgtcggtgttggtgcccgcagagtgcgcgacctcttcaccgctgccaagactgcgtctccagccattgtgttcatcgacgagcttgatgccattggtggaaagcgtaacgcaaaggatcccagctacgccaagcagaccctgaaccagcttctgacggagcttgacggctttgagcaggacagtggtgttattgtcatcgccgccaccaacttcccccgttctttggacaaggctctcacgcgtcctggtcgcttcgatcgtcacgtgcaggttgacctacccgacatcagaggtcgaatcgcaatcctcaaacatcacgccaccaagatcaaggctgacgacaacatcgattacgaggctatcgctaggagcactcctggcttgtctggcgcggagcttgagagcattgtcaatcaggcagccatccacgccagcaagacccggaaaactatagtctcgaccaaggattttgactgggccaaggacaaggtcatcatgggcgccgagagaaggagcatggtcatcagtccgaaagagaaggaaatgactgcctaccacgaggcgggccatgccctcatcactctttatacgcaagactcacccaacaagctgtacaaagtgacgattctcccccgtggcccttctctgggccatactgcttacctcccggagatggacaagtactcttacactgtcaaagattacaaggctcagattgatagtctccttggcggcaagattgctgagcaactggcttttggtgatgacatggtcaccagcggtgtctccaacgatctcgaacgcgccacggaccttgcatacaggatggtgtcccgctggggcatgtcagagaggctggggccgatggagtacgggcgcacgtttgagaacctcagcagctcgaccaaggcagttatagaggcagaggtaaagacgatactggaggttgcgcaggaacgcggcgctaagctgctgaaggacaagcgtgttgagcttgacaggcttgccaaagcgcttgttcagtacgagacattggatgtcgaagaggttaagaaggtgattcgtggcgaggacttggaaggccgcaccaaggtgccggagaacagcatcctggtagtcccaaaaccggactctgacaagccattctcgggcggatcggggccgccagcacctctgccaccggtcccggcgccggtttag

SEQ ID NO: 60430 - protein, 618 aa, Magnaporthe grisea 70-15
MPAIIVERHQSGHFASNDATREVYNRARAMLEGSQGASNSVAANGEFVEDTSRLRAVGQAVAARSMGGNISSARETANGPIRVVVDESRGSQIFRWVKFVAYFAFVAYVSMVVLGIVFDMFTSVNKKMSTQKHMEVKADKQKTRFKDVHGCEEAKEELQDLVEFLKNPDKFSSLGGKLPKGVLLVGPPGTGKTLLARAVAGEAGVPFFYMSGSEFEEVFVGVGARRVRDLFTAAKTASPAIVFIDELDAIGGKRNAKDPSYAKQTLNQLLTELDGFEQDSGVIVIAATNFPRSLDKALTRPGRFDRHVQVDLPDIRGRIAILKHHATKIKADDNIDYEAIARSTPGLSGAELESIVNQAAIHASKTRKTIVSTKDFDWAKDKVIMGAERRSMVISPKEKEMTAYHEAGHALITLYTQDSPNKLYKVTILPRGPSLGHTAYLPEMDKYSYTVKDYKAQIDSLLGGKIAEQLAFGDDMVTSGVSNDLERATDLAYRMVSRWGMSERLGPMEYGRTFENLSSSTKAVIEAEVKTILEVAQERGAKLLKDKRVELDRLAKALVQYETLDVEEVKKVIRGEDLEGRTKVPENSILVVPKPDSDKPFSGGSGPPAPLPPVPAPV

SEQ ID NO: 60431 - DNA, 3030 bp, Magnaporthe grisea 70-15
  CDS (1)..(3030)
atgtcacggctactaagacttgtcccgaggcagctggccgccggacagtctgttcctatactgctacgagcatcaccacgactgccgagcttacacgccgtccggctgccccggacataccgtgtcggtgccgtcggctcgctgaggtcgttcagtcacaactcgcggctcctgtcatctcagaacccatccgagccaccagagaagaaggatggcagcgaaaagagcagtcaaactccccagtctcctccatccgatgcagcaaggtcggccgaagcaacagagctacctttgctagaaggacatgtgcggatcacgaaggaggaggccgactcactgcgcgacctggcctctgatatggacgaagcgggaagacaaaatttccacaaatgggtcggcatatgggagcagcgcggcgcacccgaggttgccaaggatttcgcacagaagcacctgggtcccgggctaggctttatggatggtatatatctggttgatgtgctccgtgagcacagcaagccaccgccggaggatctttttgttccccaagccaacgaaacgaacgacaagagcgccccgactactgagaaatctcaccagagccagacccaggagaggcccgaaagccaggactcacaggcgtcgagctctcccgaggacctggtgaagggttgggtacagatcagcgatgaagaaaaacaggcattcttggccattgtcgaaatgctccccaagaaccaacaagcaaacatgaaggcctttgcagaatgcgctcagaagcatggtgtccccccggcaatgaaggagctgatccagaagcacatgaaagatggcatcaactttatggatcttacaatgttgggaagggcctacctggaagtttctcgcctgccggaaagcgagaaggcgaagcttgacaagactgtgcaaaacgcatacaacttattttcttcaaacccgccgccaggaagccaacaagctcccagttctggcgatggcaaagagaagaaggggagaggaagtccgccgccgcagcctgactggaagtcttcggcagtgattctttccttcatcgcgctatggatgctcactagtgactctcaaggtggcaaggagatcacatggcaggaattccgcagccagtacctcgataagggcttggtgcagaagctcactgtttcgggagacacggtcagggttgacctcaaccctgacgcgacccgggctgcaagcggcgagatgctgacgccccgcgtctacttctccatcggctccagggactcgttcgagcgcaagatcgaagaagcacaggcagagcttggtatcccatcctctgagcagattccaatcagctacgagaggccatccatgatcggaagccttattatgagctttgcgccaacactgttattggtcggccttttggcgtggatctctaggcgtggtgtcggcggcggtggcggcaacccgttcaagtttggaaagagcttggctaaaccctacacccacgagtctgctgtcaaggtcaagtttgccgacgtagccggtgctgacgaggccaagcttgaaattgtcgaatttgtgagcttcctgaagacaccggagaagttcgttcggttgggcgccaagattccacgtggtgccattctgtccggtcctccaggaacgggtaagacgcttttggccaaggctacggccggtgagtcgggcgtgcccttcttcagcgtcagtggttcagagttcgtcgaaatgtttgtcggtgtcggtgcgtctcgtgtgcgagacctgttcaaggaggcgcgcaaacacgctccttgcatcatcttcatcgacgaaatcgatgctatcggcaaggcccgtgactcgggtgcccgctttggcggcaacgacgagcgcgaggccacactgaaccagattttgaccgagatggacggtttcaacagcaatgaacaggttgtcgtgctcgctggtaccaacaggccggaaattctggacaaggccctgatgcgacccggtcgattcgataggcacatccacatagaccggcccaccatgaagggtcgtgccgacatcttcaaggtgcaccttgctaggattcttacaaaggaggactttgaatacctttgcggccgtctttccgctctgactccgggcttcgctggtgccgacattgccaacgtcgtcaacgaagctgcactagtcgctgccagagacaacgcagacagtgttacaatggtccacttcgagcgcgccatcgagcgtgttatcggcggcctggagcgtaaatccctggtccttggccctgaggagaagcgcacggtggcataccacgaggccggccacgccgtctgtgggtggtacttccaatgggcggaccctctcctcaaggtttccattatccccagaggctcaggtgctctgggttacgcgcagtacctgccgtcgggtgacgcatatctgatgactgtcaaccagctcatggaccgtatggccatgactctcggtggacgcgtctcggaggagctgcacttcccgactgtgacaactggtgcttcagacgacttcaagaaggtcacacagatggcgaccaccatggtgacgcagtggggtatgtcggagaagctcggaccgctgcacttcaaccaggacccgaaccaggttcagaagccgtttgccgagtcgacagctcagacgatcgacgccgaggtgcgacgtatcgtggacgaggcctacaagaagtgccgcgacctgctgacggagaagaaggccgaggtcggtatcattgctgaggagctgctccgacgtgagcagctgacccgtgacgacattgtaaggttgcttggccccagggagtggcctgacaaggaggagttctcaaagtactttgacggcacaaacggcggcaagtcgccattacccacgggcgagaaccttagggacccgccggcacccccgtcgcctccggcgcccgagggtggtgaaggaccggtgcagcctgctgcgttcagggcgatcgaggataggaggtaa

SEQ ID NO: 60432 - protein, 1009 aa, Magnaporthe grisea 70-15
MSRLLRLVPRQLAAGQSVPILLRASPRLPSLHAVRLPRTYRVGAVGSLRSFSHNSRLLSSQNPSEPPEKKDGSEKSSQTPQSPPSDAARSAEATELPLLEGHVRITKEEADSLRDLASDMDEAGRQNFHKWVGIWEQRGAPEVAKDFAQKHLGPGLGFMDGIYLVDVLREHSKPPPEDLFVPQANETNDKSAPTTEKSHQSQTQERPESQDSQASSSPEDLVKGWVQISDEEKQAFLAIVEMLPKNQQANMKAFAECAQKHGVPPAMKELIQKHMKDGINFMDLTMLGRAYLEVSRLPESEKAKLDKTVQNAYNLFSSNPPPGSQQAPSSGDGKEKKGRGSPPPQPDWKSSAVILSFIALWMLTSDSQGGKEITWQEFRSQYLDKGLVQKLTVSGDTVRVDLNPDATRAASGEMLTPRVYFSIGSRDSFERKIEEAQAELGIPSSEQIPISYERPSMIGSLIMSFAPTLLLVGLLAWISRRGVGGGGGNPFKFGKSLAKPYTHESAVKVKFADVAGADEAKLEIVEFVSFLKTPEKFVRLGAKIPRGAILSGPPGTGKTLLAKATAGESGVPFFSVSGSEFVEMFVGVGASRVRDLFKEARKHAPCIIFIDEIDAIGKARDSGARFGGNDEREATLNQILTEMDGFNSNEQVVVLAGTNRPEILDKALMRPGRFDRHIHIDRPTMKGRADIFKVHLARILTKEDFEYLCGRLSALTPGFAGADIANVVNEAALVAARDNADSVTMVHFERAIERVIGGLERKSLVLGPEEKRTVAYHEAGHAVCGWYFQWADPLLKVSIIPRGSGALGYAQYLPSGDAYLMTVNQLMDRMAMTLGGRVSEELHFPTVTTGASDDFKKVTQMATTMVTQWGMSEKLGPLHFNQDPNQVQKPFAESTAQTIDAEVRRIVDEAYKKCRDLLTEKKAEVGIIAEELLRREQLTRDDIVRLLGPREWPDKEEFSKYFDGTNGGKSPLPTGENLRDPPAPPSPPAPEGGEGPVQPAAFRAIEDRR

SEQ ID NO: 60433 - DNA, 2373 bp, Gibberella zeae PH-1
  CDS (1)..(2373)
atggtgctgccagcccgtcgatcaggttcttcgaaagaggccatcagagaaaacaaagcggctgaaccccaccaagcagccgaacttaggctccccgagttccttcaaaaggttgacttgacctccttctctcgttcacgattttctgcgatggcaccgatgaccgctcaggctactatctcgaacatgggccgtgttggccttcatgcggccaaccctattttgcgacacccctactttcaaccccgcgcatcgactccgtcgtctttcatgcgttcgttctcaacttcttctggtattctgtcttctcgtggtatctcacctctcggtccattttctgtccagcgcagagccttcggcagctccaatggcatctcccgcaaccagctcgcaacgttggaggaatccgccaaccgaaaccctggtaatgcgaacgcgcagaatgctttttaccagcttctcctccgagccaacatgcctgctattcttgtggaacgatatcaatctggacgcttcgccaccagccctgctaccaatgacgcctaccagcgagccctcgctatgcttggtgctagtgctactcaagctgcgaatgcgcctggagctacgaacggaaattttggacgcactcaatggcccacttatgagcaaggcatcgctaacgctgctgtgactggagctgcaaatgctggcaatcccatgggtcacaagggagaacccatccatgtcatcgttcaggagtcaacccggtctactatcttccgttgggtcaagtttttggcaatcttcatcgtcaccacctatctgtgttttgcacttgttactattgctattgaggcgttcagcactttccgtcgtggaggtccgagcagcaaacaggattctgaggtcaaggctgagaagcaaaacacccggttccaagatgtccacggttgcgatgaagccaaggaagaactccaggaagtcgtcgaatttttgaagaaccctgagaagtttagcgacctcggtgccaagcttcccaagggtgtcctcctggttggtcctcccggtaccggtaagacgcttcttgctcgagccgttgccggtgaagccggtgttcctttcttctacatgtctggtagtgagtttgacgagatctttgttggcgttggtgccaagcgagtccgtgagctcttcactgccgccaagaacaagtcccctgccattgtctttatcgacgagcttgatgctattggaggcaagcgcaaccctagagaccaagcacacgccaaacagacactgaaccagctgcttaccgaattggacggatttgatcaagatagcaagatcattatcatcggagccaccaacttgcccaagatgttggacaaggccctcactcgtccaggacgcttcgatcgacatgtcaatgttgacttgcccgatgttagaggccgaatcgccattctcaagcaccacgccaagaagatcaaagtttcccccgatgtcgacctcgaggctattgctgctcgatgccccggtcaatcaggtgccgagctggagaacatgctcaacgttgctgctcttcgagccagtcgagccaaggccagctttgtttcaaagcaggatatggagtgggcatacgaccgagtcacaatgggttctgaacgcaagtcaatggtaatcaccgagaaagagaaggaaatgacggcttatcatgaggccggccacgcgcttgtccagcttttcgacaaggagagctcaaacactctttacaaggtcacaattcttcccaagggaccctcattgggccacactgcccagcttccccaaatggacaagtattcctacacagctgcagaatatatgtcaaacattcgtgtggcacttggaggcaagatggctgaggaacttcgatacggcggcgacaaagtaacctcgggtgtttcatcggatctcgagagggccactgacctgggcttcatgatggtgacccttttcggcatgtccgccacactaggacccgttgaatacggccgaagatacgataatctcagctctgaaacaaaggccgcaatcgaaggcgaagtccgaaaaaccataggaaagtcgtatgaggatgtgcgaaaactattgactgaaaagcgaagtgagttggacttactagccaaggctcttgtgcagtacgagaccctggacaagtccgaggtggagaaggtgattcgaggcgagagtcttcctggacgtatcactgcacccaaggggcctatgagactgcctattcctcaacaagctccaacaccaccaggtctcggtggtgttcatcagcctcaacccccagagacacctgcgccgccagcagcggcggcagacacatctagaactgacggttga

SEQ ID NO: 60434 - protein, 790 aa, Gibberella zeae PH-1
MVLPARRSGSSKEAIRENKAAEPHQAAELRLPEFLQKVDLTSFSRSRFSAMAPMTAQATISNMGRVGLHAANPILRHPYFQPRASTPSSFMRSFSTSSGILSSRGISPLGPFSVQRRAFGSSNGISRNQLATLEESANRNPGNANAQNAFYQLLLRANMPAILVERYQSGRFATSPATNDAYQRALAMLGASATQAANAPGATNGNFGRTQWPTYEQGIANAAVTGAANAGNPMGHKGEPIHVIVQESTRSTIFRWVKFLAIFIVTTYLCFALVTIAIEAFSTFRRGGPSSKQDSEVKAEKQNTRFQDVHGCDEAKEELQEVVEFLKNPEKFSDLGAKLPKGVLLVGPPGTGKTLLARAVAGEAGVPFFYMSGSEFDEIFVGVGAKRVRELFTAAKNKSPAIVFIDELDAIGGKRNPRDQAHAKQTLNQLLTELDGFDQDSKIIIIGATNLPKMLDKALTRPGRFDRHVNVDLPDVRGRIAILKHHAKKIKVSPDVDLEAIAARCPGQSGAELENMLNVAALRASRAKASFVSKQDMEWAYDRVTMGSERKSMVITEKEKEMTAYHEAGHALVQLFDKESSNTLYKVTILPKGPSLGHTAQLPQMDKYSYTAAEYMSNIRVALGGKMAEELRYGGDKVTSGVSSDLERATDLGFMMVTLFGMSATLGPVEYGRRYDNLSSETKAAIEGEVRKTIGKSYEDVRKLLTEKRSELDLLAKALVQYETLDKSEVEKVIRGESLPGRITAPKGPMRLPIPQQAPTPPGLGGVHQPQPPETPAPPAAAADTSRTDG

SEQ ID NO: 60435 - DNA, 2658 bp, Gibberella zeae PH-1
  CDS (1)..(2658)
atgtcgagacttttacggcaatcaagccagttcgcgcgagtgacgagactgtcatcacagcctgcactacggttatgtgcacgaccatcaatcatcgcccgatcgaatcctgcaaagacatccgccgcattcgccatccgagccaggacatattcctcgcaacccccaccttccggccaagatccccggtcaaacccagacagagacaacgaacatggcagcaagcctttaaatcaaaagaaggcagatgatggagtcgagggaggcaaatctgaggcaccgaagacgccacctctgccggacggttggattcacttgagcaaggaagaaattgcccatcttgaagaattcacatctagactcccagaggctcaaaggccagtggcgaaagatatccttcagaagctccaggttgttggcgcaccctccgagacccgcgacctcctccaaaagctacgacagaacggcaacctctcaattctggacaagggacgattgatgcgctgtgtgtaccaggttactgaacgaatcatcgatctagaggagaaccagggccaggatggtcaattctcgtcgttccgtatggaccaggaatccacgtcccaggatggcaagaacggagccgataagtcgaagcagcagcaacagaagggtggcaagcagcccaagaacgagcgcagcggctggcttgaggccgttcagaccggtatcgccatcggtgtcactgtctggattgctgagcttttcgccaacccattctctgagaaggagattacttggcaagaattccgaaaggctttcctagacaagggtctggtccagaagcttgtggttgtcaatggctcccaagtccgcgttgaacttcacccctctgctggggctactggtgagaatggacagaccgggaagaggagctacgtgttcaccatcggatccgtcgagtcgttcgagcgaaagttggagaatgctcaagatgagctcggcatcccatcagctgaaagaatacctgtcagctacgaggccggtggtagtactgtcggtaacctccttctcgcgtttggccccacccttctctttattggtttgatcctgtggactcaacggtcaatgggaggacgaggtggtgctggcggaggcatgttcaactttggcaagagcaaggcaaagaagtttaacgctgaaagtgctgtgaaggtcaaatttgcagatgttgctggcctcgaggaggcaaagactgagattatggagtttgtgagcttcttgaagcagcctgagaagtttgaaaagctaggtgccaagatcccacgaggtgctattttggctgggccccccggtactggtaagacgttgcttgccaaggccacggcaggtgagtctggagtacccttcttcagtgtgagcggttccgaattcgttgagatgtttgtcggtgttggaccttcgcgtgtacgagatctgttcgccgagggccgtaagaacgccccttgcatcatctttatcgacgagattgatgccattggtcgcgcgcgacaagagagcggcaagggttttggcggtaacgacgaacgtgaagcgacgctgaaccagattcttacggaaatggatggcttcaacactcgagaacaggtggtcgtccttgctggtactaaccgagcggatatgctggacaaggctctgatgcgacctggacgattcgatcgacacatcttcatcgatcgacctacaatgaagggtcgtcaggagatcttcaaggtctacttgaacaagattgtaaccaacgaagaccaagaataccttgttggtcgtctggcgactctcactcctggcttctctggtgccgacattgccaatgtcgttaacgaggctgctctgattgctgctcgtggcaatgccgacgatgtcaagatggaccactttgagcgagccattgagcgagtgattgggggtctagagcgcaagtcccttgttctcaagcctgaggagaagaagactgtcgcctaccatgaagccgggcacgctatttgcggatggttcttggagcatgctgacccgctgctcaaggtctctattatcccccgtggccagggtgctttgggttatgctcaatacctgcctcaagacgcctacctgatgaacactaaccagctcatggaccgaatggccatgaccatgggtggtcgtgtgtctgaggagcttcacttccccactgtgacgacaggcgccagtgatgacttcaagaaggtttcccagatggcacgaaacatggtgactcaatggggtatgtctgagatagtgggccctgtgcattttgagaacgaccccaaccgcatgcaaaagccatttgccgagtccacagcccagcagatcgatttggaggtttctcgaattgtggaggaggcctacaagcgctgcaaggatctcttgacagagaagaagaatgaggttggcctcattgctcaggagctgctcaagaaggaggttctcgtccgagacgacatggttcgcatcttgggcaagcgacctttcggcgacaacgaggatttcgagaagtacttcggcggctccaagccggagagcacccctcctcccttccctgaggagaccgactcgcctaatgagccccctaccccatccccagcttttaagaaggtcgaataa

SEQ ID NO: 60436 - protein, 885 aa, Gibberella zeae PH-1
MSRLLRQSSQFARVTRLSSQPALRLCARPSIIARSNPAKTSAAFAIRARTYSSQPPPSGQDPRSNPDRDNEHGSKPLNQKKADDGVEGGKSEAPKTPPLPDGWIHLSKEEIAHLEEFTSRLPEAQRPVAKDILQKLQVVGAPSETRDLLQKLRQNGNLSILDKGRLMRCVYQVTERIIDLEENQGQDGQFSSFRMDQESTSQDGKNGADKSKQQQQKGGKQPKNERSGWLEAVQTGIAIGVTVWIAELFANPFSEKEITWQEFRKAFLDKGLVQKLVVVNGSQVRVELHPSAGATGENGQTGKRSYVFTIGSVESFERKLENAQDELGIPSAERIPVSYEAGGSTVGNLLLAFGPTLLFIGLILWTQRSMGGRGGAGGGMFNFGKSKAKKFNAESAVKVKFADVAGLEEAKTEIMEFVSFLKQPEKFEKLGAKIPRGAILAGPPGTGKTLLAKATAGESGVPFFSVSGSEFVEMFVGVGPSRVRDLFAEGRKNAPCIIFIDEIDAIGRARQESGKGFGGNDEREATLNQILTEMDGFNTREQVVVLAGTNRADMLDKALMRPGRFDRHIFIDRPTMKGRQEIFKVYLNKIVTNEDQEYLVGRLATLTPGFSGADIANVVNEAALIAARGNADDVKMDHFERAIERVIGGLERKSLVLKPEEKKTVAYHEAGHAICGWFLEHADPLLKVSIIPRGQGALGYAQYLPQDAYLMNTNQLMDRMAMTMGGRVSEELHFPTVTTGASDDFKKVSQMARNMVTQWGMSEIVGPVHFENDPNRMQKPFAESTAQQIDLEVSRIVEEAYKRCKDLLTEKKNEVGLIAQELLKKEVLVRDDMVRILGKRPFGDNEDFEKYFGGSKPESTPPPFPEETDSPNEPPTPSPAFKKVE

SEQ ID NO: 60437 - DNA, 2130 bp, Apis mellifera
  CDS (1)..(2130)
atgttttctttccaacctcataatcaggtgttatatcacctggcacaattaacttcagtagttagtccaaaatctacatcattttcagttaaagttaaaaaacaaaatgaatttaaaaaatctatggatgatatttcctttagtaatttttcagaagctactaagaattatattgataagttaataggcaaattaaaaacatgtgatgtaattgcaatgtttgatataaaaacaaataatattttggtagtattagataaattttccacaaaaatttgtaggaaaaatttagaaaaaaataataagtggaaaatatcagatatatcagaattgaatttcaaagaaaacacaaagaaatatcataattcttactatcaatgtacgaaagaaattattttacctaccttacctagaaaatcatctaattattatatacaaattcgtaattttagaacaaaacgtaataatataggatatagagcaaatattctgaaagaaaaggacttgactgcaattaaaaatttattcaataatcaaacatcagtagaagaatatagaaaaattatattagctttcattgaaggatatgaagcaggactagcacgtcaaacatatccttattttggatggtttaaagtaatgtgtactttaataacaggaactatatttgtaatgttttggtatggagtttatttagtaggaagtggactacgattttcaatggatggtattaaatttagaccagaaacaacagatataacttttaatgatgttaaaggagttgcagaagctaaacaagaattaagtgatattgtcgaatttttaaaaaatccagaaaaattttctgcacttggtgcaaaactacctaaaggtgtattattagtaggaccaccaggaacaggaaagacattgttagctagagcagtagctggtgaagctggtgtaccattttttcatgcagctggaccagaatttgaagaaattttagtaggacaaggtgcacgcagaatgagggatttatttaaagcagcaaaagaaaaagcacctgctgtaatttttatagatgaaattgattctgttggtgcaaaacgaacaaattcagctctccatccatatgcaaatcaaacagtaaatcaattacttacagaaatggacggatttcttcaaaatgaaggagttatagtattaggagcaacaaatagacgtgatgatttagataaagcattaatgcgtcctggtcgttttgatgttgaggttgtagttgatataccagattattctagccgaaaagaaatttttgatttatatttatcaaaaatattaacacgagatgttgatacaagttatttagcaaaatgcactgttggatttactggagctgatatagaaaatatggtaaatcaagcagctttaagagctgccataaatgatgctgaatatgtttcaatgaaacatttagaatatgctagagataaattaatcatgggtccagaaagaaaattaaaaattaatgacactgaaactaatagtattacagcatatcatgaagcaggacatgcattagttgcatattatactaaagatgcacctgcattgcataaaattactattatgcctcatggacattctttaggacacactgcatttttatctaacaaagatcaaattcatataacaaaatcaaaattattggctcaaatggatagtgcaatgggtggtcgtgctgcagaagaattaatttttggccctgataaaataacagcaggagcacaaagtgattttaaggctgcaacttctatcgcagaagaaatggtaaatttatatggcatgtctgaaaaagttggttttggagttcgcatgggaaatcgaacagatggatatccatcaggtccgaatgcaaatgatcttagtgataatgaagtgaaacgtcttttacaagaatcatatgaacgagcaaaaatgatattacaaaaacatgcaaaagaactaaaaaaagtagcagatgctttgcttaaatatgaaacattaagctctaaggatgtagaagctgtaattaatggagaaaaaatttcaactgaaactttaaaaaatcaatcacgaattatagatccatctgaacatgtattataa

SEQ ID NO: 60438 - protein, 709 aa, Apis mellifera
MFSFQPHNQVLYHLAQLTSVVSPKSTSFSVKVKKQNEFKKSMDDISFSNFSEATKNYIDKLIGKLKTCDVIAMFDIKTNNILVVLDKFSTKICRKNLEKNNKWKISDISELNFKENTKKYHNSYYQCTKEIILPTLPRKSSNYYIQIRNFRTKRNNIGYRANILKEKDLTAIKNLFNNQTSVEEYRKIILAFIEGYEAGLARQTYPYFGWFKVMCTLITGTIFVMFWYGVYLVGSGLRFSMDGIKFRPETTDITFNDVKGVAEAKQELSDIVEFLKNPEKFSALGAKLPKGVLLVGPPGTGKTLLARAVAGEAGVPFFHAAGPEFEEILVGQGARRMRDLFKAAKEKAPAVIFIDEIDSVGAKRTNSALHPYANQTVNQLLTEMDGFLQNEGVIVLGATNRRDDLDKALMRPGRFDVEVVVDIPDYSSRKEIFDLYLSKILTRDVDTSYLAKCTVGFTGADIENMVNQAALRAAINDAEYVSMKHLEYARDKLIMGPERKLKINDTETNSITAYHEAGHALVAYYTKDAPALHKITIMPHGHSLGHTAFLSNKDQIHITKSKLLAQMDSAMGGRAAEELIFGPDKITAGAQSDFKAATSIAEEMVNLYGMSEKVGFGVRMGNRTDGYPSGPNANDLSDNEVKRLLQESYERAKMILQKHAKELKKVADALLKYETLSSKDVEAVINGEKISTETLKNQSRIIDPSEHVL

SEQ ID NO: 60439 - DNA, 2124 bp, Apis mellifera
  CDS (1)..(2124)
atgaataggttatgttttccattatcacattcgttatgtggaataaaactaaataaagaattatctgaaatacaatcattactttcaaaaaataagttttttacaatttatttttcgaaattgtataataaaagaaattttagtacaacttctacttctaaaaatcaacaaacatcgaatgatgattccggtgacaatcctaataaggatcccaaaaaatccaatgaacttaatatattttttttcaaaacgtctgccattattttgttttttttaatatactattctttattttctggattagtggaccgttttgttataatactgcagtggaatgattttgtaaatgaaatgcttttaaaaggtcaagttcaagaaattataatttatccagattgtgtacaaggtataataaaaaaaggtgctacatataaaggaaaacatgtttattatagacgtcttcaattccttgatgtccctgacataaaaaatcttgaagtaaaaattagacaattagaaaaacgcattggaattagaatggaggatggcatttcaattagatacgttcatatgaatgaacaattggctttaatagaattaattcaaacggcattaatatttagtctattttttgtaacttttcttccactaataaaaaagaaatttaaaagtttttcttctataaataaggcaaaatatactttagtggaacctttttctggtaaaggtgttcgttttaaagatgtagctggtttaaaggaagccaaaatagaagttatggaatttgttgattaccttaaaaatcctgaaagatatacaaaacttggtgctaaagtacctaaaggagctttactcttaggaccaccaggttgtggtaaaacacttttagctaaagctgttgcaactgaatcaaatgttccatttctatcaatgaacggatctgaattcactgaattaataggtggattaggtgcagcacgtgttagggatttatttacagaagcaaaaaaaagagctcctagtattatttacatagatgaaattgatgcaataggcaaaaaacgatcagattcattcactgaattcactaattctgaatcagagagaacactaaatcaacttttagtagaaatggatggaatgatagcagtaaaggatattattattttggcttcaacaaatagagcagaagttttggataaagctttattaagatgtggtagatttgatagacatattttgattgatcttcctactttagaagagagaggacaaatttttgaatatcatcttcagtcattattattgaaagacaaaccaataaaatattctaaatatttagctcatcttactcctggttttagcggagctgagatagcaaatgtttgtaatgaagctgcattacatgcagcaagtgaaaaaaagattaaagttgatgataatgacctcatgtatgcagttgataaaatattaggtggctcaataaaaaaatctagtacattgacaccttctgagaaaaaagttattgtttatcatgaagccggtcatgcattaacagcatggttattggaacgtacaaatcctttaattaaaataactgtagtaccaagaacaaataaacgtttgggtttttctcaattttctgattcaaatctgaaacttcaaagttcagaacatatttttgaacgtatgtgtgtattattaggtggtagagttgctgaaaatataatgtttaataaaatttcaactagtgcacaaaatgatttagaaaaagtaacggaaatggcatattgtcaagttcaacaattcggaatgagtccttctgtgggtttagtttcttttgataaagaattaacaactatgagaactaaaaaaccatatagtaaaaagttaggaagtttaatggatgcggaggtacgaagaataataatcgaagcatataaaacgactgaaaaattattacaagataataaagataaattgacactattagctgaaactcttttgaaaaaagaaactttgacatataaagatatagaagcattaattggacctccaccttttggaaagaaagatcttacagaattgcaggaatatgaagaatataatccaggcacacaatag

SEQ ID NO: 60440 - protein, 707 aa, Apis mellifera
MNRLCFPLSHSLCGIKLNKELSEIQSLLSKNKFFTIYFSKLYNKRNFSTTSTSKNQQTSNDDSGDNPNKDPKKSNELNIFFFKTSAIILFFLIYYSLFSGLVDRFVIILQWNDFVNEMLLKGQVQEIIIYPDCVQGIIKKGATYKGKHVYYRRLQFLDVPDIKNLEVKIRQLEKRIGIRMEDGISIRYVHMNEQLALIELIQTALIFSLFFVTFLPLIKKKFKSFSSINKAKYTLVEPFSGKGVRFKDVAGLKEAKIEVMEFVDYLKNPERYTKLGAKVPKGALLLGPPGCGKTLLAKAVATESNVPFLSMNGSEFTELIGGLGAARVRDLFTEAKKRAPSIIYIDEIDAIGKKRSDSFTEFTNSESERTLNQLLVEMDGMIAVKDIIILASTNRAEVLDKALLRCGRFDRHILIDLPTLEERGQIFEYHLQSLLLKDKPIKYSKYLAHLTPGFSGAEIANVCNEAALHAASEKKIKVDDNDLMYAVDKILGGSIKKSSTLTPSEKKVIVYHEAGHALTAWLLERTNPLIKITVVPRTNKRLGFSQFSDSNLKLQSSEHIFERMCVLLGGRVAENIMFNKISTSAQNDLEKVTEMAYCQVQQFGMSPSVGLVSFDKELTTMRTKKPYSKKLGSLMDAEVRRIIIEAYKTTEKLLQDNKDKLTLLAETLLKKETLTYKDIEALIGPPPFGKKDLTELQEYEEYNPGTQ

SEQ ID NO: 60441 - DNA, 2253 bp, Candida glabrata CBS 138
  CDS (1)..(2253)
atgctcaggttacttacgagacttaatgtacctgtgcgggctatgaggcccatgccgctggcgccattagcgagggcgctgcctgtgacgagacccctagcgttgccactcaggttctactcagatatgaatagccggaagcaggaaactggcagtgggggttctagtgatggtggacccgctggcgatgagggttctggtggtaagggtcagggccagggcaaaggacccggtaaggacccgcgcgaagagatgatgaaggccttctggcagtatgtgaagtctaaggaattccagaataccatgtacttgaccatcggtttgtcgtttatatacacgttgatgagtgccaacgaggacaccagtggtcgtgatccgctgactttccaggatttcaaggccaagtacttggagaaagggcttgtgaagaagatctacgtcattaataagtacctagttgaggctgagctggtgcctctggcaaacgatagtaatgggcaatatggtgccaatggtatggtgcccagagtaatttcatttaccatcgggtccgcagatgtctttgaagagcaactggatgagttgcaagacaggctacaaatacctccaagtgaacgtatcccagtgcagtatgttgaaagggcatcggcattccagtatctatatccatttatccccactgtattgctgattggtggtctctactttattgctaagaagttgaaccctaatgctaacatgaacggagggggaggttcatcgggtatgtttggtgtcggcaaatcaaaggctaaactattcaataaagaaacagacattaaaatatctttcaaggatgttgccggttgtgatgaggctaaacaggaaattatggaattcgttcatttcttgaagaatccggcaaagtatacacaattgggcgctaagatccctagaggtgctatattgtctggtcctccaggtacaggtaagacattattggcaaaggctactgctggtgaagcaggtgtacctttcctttctgtgtcaggttcagagtttgtggaaatgtttgtcggtgtaggtgcatctcgtgtcagggacttatttgaacaggctaggcagatggctccttctatcatatttgttgatgaaatagatgctatcggaaaagaaagaggtaaagggggtgctcttggtggtgccaatgacgaaagagaagcaaccctaaatcaactgcttgtggagatggacggttttagcactagcgatcaagtcgtggtcattgcaggtaccaacagaatggatgttttagacccagcacttatgagaccaggtagatttgatagacacatcgaaattgatgcacctgatatgagcggaaggaaggccatatataatgttcatttacaacgactaaaccttgaccccaaactaacagagactgctgagaagcgtgacaacctatcgggtaaacttgccacgttgacacctggttttactggtgcagatatcgctaacgcctgtaatgaagctgcgttgatcgctgcaagacatcaggataagtatgttgaactattacactttgaacaggccattgaaagagtcattgctggcttagaaaagaaatcgaaggttttgtcgccagaagagaagaaaacagttgcatatcatgaagctggccatgctatttgtggatggtttttgcaatatgcagacccgctattgaaggtaagcatcattcctcgtggtcatggtgcgcttggatatgcccaatatcttccttcagatcagtatttaattacagaggaacagtttagacatagaatgattatggctttaggaggtagagtgagcgaagagctgcactttccttcagtaacaagtggtgctcatgatgatttcaagaaggttacaaatatggcgcatgctatggtcacatctctgggaatgtcgaaggagattggatatctgtcttatgaccaaaaaggatccggatttcaaataaacaagccttttagtgagaaaacagggagaaaaattgatttagaagtaaagcgtattgttgatgaagcccacgaggcatgccgcaagctgttaacggagaatctggaagatgtagataaagtcgcaaagttactacttcaaaaagaagctattagcagagaagatatgatcaagcttgttggaccaagaccattcccagagaaaaacgaagcttttgaaaagtatctggataatggtctaaatggaccagcacctgcaactgactag

SEQ ID NO: 60442 - protein, 750 aa, Candida glabrata CBS 138
MLRLLTRLNVPVRAMRPMPLAPLARALPVTRPLALPLRFYSDMNSRKQETGSGGSSDGGPAGDEGSGGKGQGQGKGPGKDPREEMMKAFWQYVKSKEFQNTMYLTIGLSFIYTLMSANEDTSGRDPLTFQDFKAKYLEKGLVKKIYVINKYLVEAELVPLANDSNGQYGANGMVPRVISFTIGSADVFEEQLDELQDRLQIPPSERIPVQYVERASAFQYLYPFIPTVLLIGGLYFIAKKLNPNANMNGGGGSSGMFGVGKSKAKLFNKETDIKISFKDVAGCDEAKQEIMEFVHFLKNPAKYTQLGAKIPRGAILSGPPGTGKTLLAKATAGEAGVPFLSVSGSEFVEMFVGVGASRVRDLFEQARQMAPSIIFVDEIDAIGKERGKGGALGGANDEREATLNQLLVEMDGFSTSDQVVVIAGTNRMDVLDPALMRPGRFDRHIEIDAPDMSGRKAIYNVHLQRLNLDPKLTETAEKRDNLSGKLATLTPGFTGADIANACNEAALIAARHQDKYVELLHFEQAIERVIAGLEKKSKVLSPEEKKTVAYHEAGHAICGWFLQYADPLLKVSIIPRGHGALGYAQYLPSDQYLITEEQFRHRMIMALGGRVSEELHFPSVTSGAHDDFKKVTNMAHAMVTSLGMSKEIGYLSYDQKGSGFQINKPFSEKTGRKIDLEVKRIVDEAHEACRKLLTENLEDVDKVAKLLLQKEAISREDMIKLVGPRPFPEKNEAFEKYLDNGLNGPAPATD

SEQ ID NO: 60443 - DNA, 2484 bp, Candida glabrata CBS 138
  CDS (1)..(2484)
atgttggagtgggggggatgcttcctcctgggctatttgaacgtgaatagagtagtcacagcgatgatcaggactaggattggtgcggtagcgcgtgtgcgggtgcctgtatttcgggcgcggtttcattgcggcccggtgtggcggaacagtgctgacgatgacttgaagcgagtgcaggagcggatcaacgagtatatgcgcaagaaccagcgtgctggtgctggtgctgatgctggtactaatgctggcactgatgctggtgcaggtgctggtgctggcatggatatggagcggttcaggaaggagatcgacagggagttaaagcggatggagcagacgatacagaaacagactcctgaggcgccaagagaagaatataaagacacaaaggacgctaaggaatcaagtcaagagagtaaagaaccacaggaagctaaagaaaaagctaaggggacgaaacaagaagctagagaagggtcctcgaacggtgggaatcctcctccgccgccgttgaatgatccgagcggcaacgcgaacaatatcggattgttccagctgggtttgcttttcttcttgctatctttcttgctagatctggttaatgacacggagggccagaaagagatcacctggcaggacttcagggagcggtacttggctaagggatacgtacaaagattggaagtagtaaacaagtcctacgtgaaagtgatcctgaatgacatgggcaagaaccaacctgagaactacggccaggaagtggtttactttaacctgggctccgttgagaatttcgaacataagcttgagaaagcacaaaacgagatggacatcgaccaagatttcagagtaccagtacagtacgtccaacaaggcaactgggcaagggctgtcttccagatgttacccacagtactaatgctagtaggtatcatttggctgaccaggaaatcaatgcagtccgcagggaacactcgtggcgggatctttggtattagcagatctaaggctaagaagttcaacaccgaaactgatgtgaaagtcaaattcaaggatgtggccggttgtgacgaagccaaggaagaaatcatggagtttgtcagtttcttgagaaacccacaaagatacgaaaagatgggtgctaagattccaaggggtgctatattatctgggcctccaggtaccggtaaaactttgctagcgaaggccactgcaggtgaagctggtgtccccttctattttgtatcaggttctgagttcgtcgaaatgttcgtcggtgttggtgcagccagagtcagagatttattcaagacggcaagagaaaatgcaccatcaatcgtatttatagatgagattgatgccattggtaaggctagacagaaaggtaatttttcaggtgccaatgacgaaagagaaaacacattaaaccagatgcttgttgagatggacggtttcacatctgctgaccacgttgtggtcttggcaggtactaacagacccgatattctagataatgcccttttaagaccaggtcgttttgacagaaggattcatatagatagaccagagcttgaaggccgtaaggctatctttgaagtacatttgcagaaactgaaactggcaggttcaatttttgatttgaaaaatagattggctgctttaactccgggattttcaggtgctgacatcgccaacgtatgtaacgaagccgcgttgattgctgccagacatgatgagaatgctgttaagttatcacatttcgagcaggcaattgaaagggttattggcggtgtcgagagaaaaacacgccttctatctccagaagaaaaacaagttgttgcataccacgaggctggccatgctgtatgtggctggtatttgaagtatgcagatccattattgaaagtaagtattatcccccgtggtcagggtgcccttggatatgcacaatacttaccaggtgatgtattcctattaagcaaacaacagcttctggataggatgaccatggctcttggtggtagagtatctgaagaattacatttccagtgggtgacaagtggtgcttcagatgacttcaagaaggtcactaacatggcaacagcaatggtaactgaattaggtatgtctgagaagattggttggatcaactataagaagaacgatgacaacgatcttacaaaggcgttttcagaagagaccggtgtgattatcgattccgaagtctataggatagtacaagagtgtcacaaaaggtgcacagacctcctaaaagaaaaagcagaagatgttgaaaagatagcacagctgctattgaaaaaagaagttctcactagagaagatatgatcaacctgcttggcaagcgcccattccctgagagaaacgatgcatttgacaaatatttaaacgaagcagagaccgaaaagatcagaaagagtgaagaacagaatccggacgatccatctccatctgctgcataa

SEQ ID NO: 60444 - protein, 827 aa, Candida glabrata CBS 138
MLEWGGCFLLGYLNVNRVVTAMIRTRIGAVARVRVPVFRARFHCGPVWRNSADDDLKRVQERINEYMRKNQRAGAGADAGTNAGTDAGAGAGAGMDMERFRKEIDRELKRMEQTIQKQTPEAPREEYKDTKDAKESSQESKEPQEAKEKAKGTKQEAREGSSNGGNPPPPPLNDPSGNANNIGLFQLGLLFFLLSFLLDLVNDTEGQKEITWQDFRERYLAKGYVQRLEVVNKSYVKVILNDMGKNQPENYGQEVVYFNLGSVENFEHKLEKAQNEMDIDQDFRVPVQYVQQGNWARAVFQMLPTVLMLVGIIWLTRKSMQSAGNTRGGIFGISRSKAKKFNTETDVKVKFKDVAGCDEAKEEIMEFVSFLRNPQRYEKMGAKIPRGAILSGPPGTGKTLLAKATAGEAGVPFYFVSGSEFVEMFVGVGAARVRDLFKTARENAPSIVFIDEIDAIGKARQKGNFSGANDERENTLNQMLVEMDGFTSADHVVVLAGTNRPDILDNALLRPGRFDRRIHIDRPELEGRKAIFEVHLQKLKLAGSIFDLKNRLAALTPGFSGADIANVCNEAALIAARHDENAVKLSHFEQAIERVIGGVERKTRLLSPEEKQVVAYHEAGHAVCGWYLKYADPLLKVSIIPRGQGALGYAQYLPGDVFLLSKQQLLDRMTMALGGRVSEELHFQWVTSGASDDFKKVTNMATAMVTELGMSEKIGWINYKKNDDNDLTKAFSEETGVIIDSEVYRIVQECHKRCTDLLKEKAEDVEKIAQLLLKKEVLTREDMINLLGKRPFPERNDAFDKYLNEAETEKIRKSEEQNPDDPSPSAA

SEQ ID NO: 60445 - DNA, 2238 bp, Candida glabrata CBS 138
  CDS (1)..(2238)
atgatgttggcaggtctgccctcagtggcgaggactgctatgttgaggagtgtttctgttgtaggagtcaggtctgtgtacagtgggcgtgccagtctgctgcgtatgtgcgcgaaccggaggtattctgatatgaagaaaagtggcgatgagggcgccaccgagacatcgggtgcagccttgggtggtggtaagagcgcaagcgctaacacaaatacaacagcaactactgcgaactcaagtgcaaatgccaatgccaatgccaatgctaatgctgatgcctcggtttcgcatgcgttattggccactagagaacaggaggctaacaaggatctaacaaacccagaggcacaagcgactttctacaaactgctactgcaatcaaactacccacagtatgtggtctcgagatttgaaacgccggggatcgcctcgtctccggagtgtatggagctctacatggaggctctgcaaagaataggaaggcacgccgaggctgattcggtcagacagaacttgcttacagcatcctctgctggcgctgtcaatccgtcattggcttcctcttcgccaggttcctcgggctaccacacgacatttccatccctttattctccactgtatggttcccgcaaagagcccttgcatgtggtagtctctgaatcaacttttacagtggtttctcgttggatcaaatgggtattgttttttggtattttcgcttacggtgtctctgaagcattcaagtacattgcagaaaacactactttgctaaagaactctgaagtggccgataaatctgttgatgtagcaaagaccaacgtcaagtttgatgatgttcgtggttgtgacgaggctcgtgctgaactggaagagatcgttgacttcttgaaagacccagccaagtatgaatccctaggtggtaagttgccaaagggtgtcttgctgactggtccaccaggtaccggtaaaacattgctagctcgtgccaccgcaggtgaagcaggtgttgatttcttctttatgtcgggttctgaatttgatgaggtctacgttggtgttggtgccaaacgtatccgtgaactgttctcacaagctcgtgcgcgtgctccagctatcatattcatcgatgaattggacgccatcggaggaaaacgtaacccaaaagatcaagcctacgcaaagcaaactttgaatcagcttctggtcgaattggatggtttctcacaaaccagcggtattatcatcattggtgcaaccaatttcccagaatcgttggataaggctctgaccagaccgggtagatttgataaagttgtgaacgtcgatctacctgatgtacgtggtcgtgctgatattttgaagcatcacatgaaaaagattactctagcaccaaacgtggatccaactatcatagcacgtggaacgccaggcctatctggtgcggaattggctaatcttgttaaccaagctgccgtgtatgcctgtcaaaagaatgcaattgctgttgacatgacacatttcgaatgggctaaagataagattctaatgggtgctgagagaaagacgatggttttgactgaagcttcgagacgtgcaaccgcttatcatgaagctggtcatgctattatggccctatacactaatggtgctactccattgtataaggctaccattttgccaagaggcagggcattgggtgtcacattccaattgccagaaatggataaagtggatatcacgaagagggaatgtctagcaagacttgatgtatgcatgggcggaaaaattgccgaggagataatatatggaaaggaaaacaccacaagtgggtgtggctccgatttacagagtgccactggtaccgctcgtgctatggtaacacaatatggtatgtgtgaagatgtaggaccagtgaacctaggagacaactgggacagttggtctaataacatcaaaaatacagctgataatgccgtcataagtatactaaaggagtctgaagagaggaccagaaaactactggaagaaaagaacgaagagctccacagattggcccaaggtcttgttgagtatgaaacgttagatgcctcagaaattgaaaagatatgcaaaggggagccaattaataaaagcaaatcatctactaatactgtggttgaagggcctgacagtgatgagagaaaggatatcggtggtggagacaagtcgaagataccgacaatgttaaaagtttaa

SEQ ID NO: 60446 - protein, 745 aa, Candida glabrata CBS 138
MMLAGLPSVARTAMLRSVSVVGVRSVYSGRASLLRMCANRRYSDMKKSGDEGATETSGAALGGGKSASANTNTTATTANSSANANANANANADASVSHALLATREQEANKDLTNPEAQATFYKLLLQSNYPQYVVSRFETPGIASSPECMELYMEALQRIGRHAEADSVRQNLLTASSAGAVNPSLASSSPGSSGYHTTFPSLYSPLYGSRKEPLHVVVSESTFTVVSRWIKWVLFFGIFAYGVSEAFKYIAENTTLLKNSEVADKSVDVAKTNVKFDDVRGCDEARAELEEIVDFLKDPAKYESLGGKLPKGVLLTGPPGTGKTLLARATAGEAGVDFFFMSGSEFDEVYVGVGAKRIRELFSQARARAPAIIFIDELDAIGGKRNPKDQAYAKQTLNQLLVELDGFSQTSGIIIIGATNFPESLDKALTRPGRFDKVVNVDLPDVRGRADILKHHMKKITLAPNVDPTIIARGTPGLSGAELANLVNQAAVYACQKNAIAVDMTHFEWAKDKILMGAERKTMVLTEASRRATAYHEAGHAIMALYTNGATPLYKATILPRGRALGVTFQLPEMDKVDITKRECLARLDVCMGGKIAEEIIYGKENTTSGCGSDLQSATGTARAMVTQYGMCEDVGPVNLGDNWDSWSNNIKNTADNAVISILKESEERTRKLLEEKNEELHRLAQGLVEYETLDASEIEKICKGEPINKSKSSTNTVVEGPDSDERKDIGGGDKSKIPTMLKV

SEQ ID NO: 60447 - DNA, 2310 bp, Kluyveromyces lactis NRRL Y-1140
  CDS (1)..(2310)
atgacgcttccggtgttgattggtgtttctggtttgtgcgccaagaacgcttctcgagtgttgattcgtcaagcccctgtcttgacagggccaattttaaggactttgcatagaaagcattttcttacaggcagcgtgctacaaaacagattatattcggacaagaaccaaacaggcaaggatcataatggtgttacaggttctcagcattcggaggactcgaagaacactgtaaatggggcaacaagtggtgcagaaaatgttcagcagcccaagcaactaaacgggattaattcgagtgatattgatccggcaaatggacctgtatcacacgctgttttggctactaaggaacagcaagctaataaagatttgtctaacccaagtgcgcaagcggagttctataaacttctcttgaaatcgaactatccgcaatacgttgtttcgagatttgaaactcctggtattacttcatcgcctgaatgtatggctttgtatatggaagctttacaaaggatcggtaggcacgctgatgctgagtctgtgaggcagactttgttgacgactgctccagctggaagtattcctcctgccgtggcttcatctggtgcttcttccgctgcatcggctaacggtgctgctgcccaagttactggaggtgtttcatctggttattctggcatctataatccgtacatgggatccaaaaaggaacctctacatgttgttgtcactgaatccacattctctattgtttccagatggttaaaatggttgatcgtatttggtgcagttacatacggtttgactgaaggtttcaaatacattacagaacattcaaccctcttcaagacaaatgaagtcgccgataaatctgtggatgttgcaaagactaatgtaagatttgatgacgtgcggggttgtgacgaagctagagctgaattggaggaaattgtcgatttcttaaaagatcctaccaaatacgaatccttgggtggtaagttacctaaaggtgttctattgaccggacctccaggtactggtaagactttattggcaagagccaccgccggtgaagctggtgttgactttttcttcatgtcagggtcagagtttgacgaagtttatgtaggtgttggtgccaagcgtatcagagagttgtttgcacaggcccgcgctcgtgcccctgctattatctttatcgatgaattggatgctattggaggtaagcgtaatcccaaagatcaagcttacgcaaaacaaactttgaatcaattgttggttgaattggatgggttttcccaaacaagcggtataattatcatcggtgccactaacttcccagaatcattggataaggctttgacaagaccaggtagattcgataaggtcgtcaatgttgacttacctgatgttcgcgggcgtgctgacattttgagacatcatatgaagaaggttactgttgctcctgatgtggacccaactatcattgcaagaggaaccccaggtctttctggtgctgagttgatgaatttagttaaccaagccgccgtatacgcttgtcagaaaaatgctattgctgtcgatatgcagcactttgaatgggcaaaggataaaatcttgatgggtgctgaaaggaaaactatggttctcactgaagctactaaaagagccaccgcttatcatgaagccgggcatgcattgatggcactgtacactgccggggcaacgccattatacaaagcaactatcttgccaagaggcagggcattaggtatcactttccaacttcctgaaatggataaggtggacatcactaagaaagaatgtctagctaggttagatgtgtgcatgggtggtaagattgcagaagaactgatttatggtaaggaaaatactaccagtggttgtggttcggatttacaaaatgctaccaacactgctagagcaatggttactcagtacggtatgagtgaacaagtcggaccagtaaatttggctgataagtgggactcatggtctggaaaaattcgtgacgttgctgataacgaagtacttgaacttttgaaagcttcagaagataggacgagagccttattagcagaaagggaaaaggaattgcatagattagctcaaggattaatggaatacgaaacattagatagtaccgaaattcagaaggtatgcaaaggagaacctatcaataaaatgaaaatggccactactacggtggttgaaggaccagacagcgatgatcgtaaggaaatcggcggtgataaatcaaaaattccggtactgattaaagcatga

SEQ ID NO: 60448 - protein, 769 aa, Kluyveromyces lactis NRRL Y-1140
MTLPVLIGVSGLCAKNASRVLIRQAPVLTGPILRTLHRKHFLTGSVLQNRLYSDKNQTGKDHNGVTGSQHSEDSKNTVNGATSGAENVQQPKQLNGINSSDIDPANGPVSHAVLATKEQQANKDLSNPSAQAEFYKLLLKSNYPQYVVSRFETPGITSSPECMALYMEALQRIGRHADAESVRQTLLTTAPAGSIPPAVASSGASSAASANGAAAQVTGGVSSGYSGIYNPYMGSKKEPLHVVVTESTFSIVSRWLKWLIVFGAVTYGLTEGFKYITEHSTLFKTNEVADKSVDVAKTNVRFDDVRGCDEARAELEEIVDFLKDPTKYESLGGKLPKGVLLTGPPGTGKTLLARATAGEAGVDFFFMSGSEFDEVYVGVGAKRIRELFAQARARAPAIIFIDELDAIGGKRNPKDQAYAKQTLNQLLVELDGFSQTSGIIIIGATNFPESLDKALTRPGRFDKVVNVDLPDVRGRADILRHHMKKVTVAPDVDPTIIARGTPGLSGAELMNLVNQAAVYACQKNAIAVDMQHFEWAKDKILMGAERKTMVLTEATKRATAYHEAGHALMALYTAGATPLYKATILPRGRALGITFQLPEMDKVDITKKECLARLDVCMGGKIAEELIYGKENTTSGCGSDLQNATNTARAMVTQYGMSEQVGPVNLADKWDSWSGKIRDVADNEVLELLKASEDRTRALLAEREKELHRLAQGLMEYETLDSTEIQKVCKGEPINKMKMATTTVVEGPDSDDRKEIGGDKSKIPVLIKA

SEQ ID NO: 60449 - DNA, 2529 bp, Kluyveromyces lactis NRRL Y-1140
  CDS (1)..(2529)
atgttccatttaataaggccggtatctaggcttggcgtaaagtctgtggccagtagggcgttgtacaaagttccaaaggggcgttcgctgatattgttacgaaacgacgtatgccgtacgttccattccggtaagctcaacttgatgcagaatcggtttgaaaaggagcctacggatgaagacgttgataaagtcaggaaagaagttagaaagtttatcgatgatttgaacaaagatcagaaactcgatatggaagagcgtaagaagaagattgaagagcaattacagaggttggagcttgctgtgaagaggcagcaggaaaaagaagatgcccaagataaagcgaatgatcctttccatctagagcgcgagaagagagaatttgaagaatcggcgaagaagcatgatcccaagaatgatcccaagaatgagtctaagaagagttccaacggaaatacggatttcacaccaaatgattcgaatatgatgactgttaacatcaatttattcaaagttggtttgacattgacgatattagcatttatcctacacagattgaacagcatggaggaacaaagagaacttacatggcaagaattccgtaaccagttgttggtgaaagggtacgtgtccaaattaattgttatcaataataatctagtcaaggttatcttgaacgataacgggaaaaatcaacctgaacatatgggccacgatttttatttctttacgatcggatccgtggaatcatttgaacataaattgaagaaagcacaagatgaattgaatatcgcggaagactttagaattcctgttctttacactagagaggggaattgggtcaaattagctttccaaatattaccaactgcactattgattgcaggtttgatttggattactacaaagggtgcatccgctgccggtggtggcccaggtggtttattcaacgtgcgtaaatcaaaggccagaaagtttaataaagataccgacgtaaaggtcaatttcaaggatgttgctggttgcgatgaagccaaggaagaaatcatggaattcgttagtttcttgaaagaaccatccagatacgaaagaatgggtgccaagattccaagaggtgcaatcctatctggtcctcccggtactggtaagactttgctagcaaaggctactgctggtgaagctggtgttccattctattctgtgtctggttccgaattcgtagaaatgtttgtcggtgttggtgcgtccagagtccgtgatttgttcaagaccgctagagaaaatgctccagctattatctttgttgatgaaatcgacgctatcggtaaggcaagacaaaagggtaacttctctggtgccaatgacgaaagagaaaacactttgaaccaacttttggttgagatggacggatttactactgcagatcatgttgttgtccttgcaggtaccaataggccagatgttctagatcaggctttgatgagacctggtagatttgatagacatatcaacattgatagaccagagttacaaggccgtcaagaaattttcaaagttcacttgaagaaaattacattggctggtgatatgacagatctacaaaacagattggctgttatgacaccaggtttctccggtgctgacattgctaatgtttgtaacgaagctgcattgattgctgccagaaacgattgtgatgctgttagattggaacatttcgaacaggccattgaaagggtcatcggtggtgtcgaaagaaaatcaaaactattgtctccacaagaaaagaaggttgtcgcatatcatgaagctggtcatgccgtctgtggttggtatctagagtttgctgacccattactcaaagtcagtatcattcctaggggtcaaggtgctctaggttacgcacaatacttaccaggtgatgtatacctactttcagaacaacaactaaaggacagaatgaccatggcactaggtggccgtgtatcagaggaactgcacttcccaagcgtgacctctggcgctagcgatgatttcaagaaagttactcgtatggctactgcaatggtaactgagttaggtatgagcgataagatcgggtggatcaactttgccaagaaaagtgaaaacgatctaaccaaaccgttctccgaagaaacaggatccattgtggactctgaagtgtaccgtatcgttcaagaatgccacgatcgttgcgccaagttactcaaagaaaaggctgaagacgttgaaaagattgctcaacttctactgaaaaaggaagttctaacaagagaagatatgattgcactcttaggtaaacgtcaattcccagaacgtaacgacgcattcgacaaatacttgaatgaacgtgaaaccaaaaagatcaaagatcaagaagcagctaacgaactgaagaacagagcatctgaaaagaaagatgaacaggaggataatgataagaaggattcggacaagaaggattcagacaaaaagagcaatgaacaagatgatcccaacgtcttttaa

SEQ ID NO: 60450 - protein, 842 aa, Kluyveromyces lactis NRRL Y-1140
MFHLIRPVSRLGVKSVASRALYKVPKGRSLILLRNDVCRTFHSGKLNLMQNRFEKEPTDEDVDKVRKEVRKFIDDLNKDQKLDMEERKKKIEEQLQRLELAVKRQQEKEDAQDKANDPFHLEREKREFEESAKKHDPKNDPKNESKKSSNGNTDFTPNDSNMMTVNINLFKVGLTLTILAFILHRLNSMEEQRELTWQEFRNQLLVKGYVSKLIVINNNLVKVILNDNGKNQPEHMGHDFYFFTIGSVESFEHKLKKAQDELNIAEDFRIPVLYTREGNWVKLAFQILPTALLIAGLIWITTKGASAAGGGPGGLFNVRKSKARKFNKDTDVKVNFKDVAGCDEAKEEIMEFVSFLKEPSRYERMGAKIPRGAILSGPPGTGKTLLAKATAGEAGVPFYSVSGSEFVEMFVGVGASRVRDLFKTARENAPAIIFVDEIDAIGKARQKGNFSGANDERENTLNQLLVEMDGFTTADHVVVLAGTNRPDVLDQALMRPGRFDRHINIDRPELQGRQEIFKVHLKKITLAGDMTDLQNRLAVMTPGFSGADIANVCNEAALIAARNDCDAVRLEHFEQAIERVIGGVERKSKLLSPQEKKVVAYHEAGHAVCGWYLEFADPLLKVSIIPRGQGALGYAQYLPGDVYLLSEQQLKDRMTMALGGRVSEELHFPSVTSGASDDFKKVTRMATAMVTELGMSDKIGWINFAKKSENDLTKPFSEETGSIVDSEVYRIVQECHDRCAKLLKEKAEDVEKIAQLLLKKEVLTREDMIALLGKRQFPERNDAFDKYLNERETKKIKDQEAANELKNRASEKKDEQEDNDKKDSDKKDSDKKSNEQDDPNVF

SEQ ID NO: 60451 - DNA, 2421 bp, Debaryomyces hansenii CBS767
  CDS (1)..(2421)
atgatagtatccaactcaatacgtgtcttgagaggcccggcgataagttctatcatgagaacggggataagaattaggccgttgaatcatttgagatgcctgacgataccaatgagaacatttacaagtttcaatcagccattattatttcatggctcaagggcggtattgaacaaagaaaacaaggatccagagaaaaagcaggatcaagaaggaaataaagagaaagatgaggagaaatcaaaaccagaagagaaggaacagggcaagaacaagaagaaggatatggatcaagacgagaaagatattcgagaccaaattagagaaaatctcaagaaaaagaaccctaatctagatcctaataatatcaaaatataccagctcgataacaagtcgctagctcgtgcatttgcagggatttttttcttttcacttttccttacatttctccttgcgtcaaaccaacgaaacgaaaacgagttatcgttccaggacttcaagacgaactaccttgagcgtggtttagttaccaagttgacggttgtgaataagtttgctgttgaggcccagttaattcaaggggctgtatcggatcaaacgttccagactttcagcggtcacccagctgtagttttcaccatcggatcggtcgaatttttcgaagaggaaatgagtaatattcaagaaagtttggggatcccaatagatgaaagattacctatctcatatgaagaaagaggatcgtggatgaattacattttgccaattttgcctaccgttttattaattggtggtttatggtatatgactgtaaaaagagcgtcttcccaaggtggtgcaggtgctggtgggccaggtggtattttcaaagttggaaagtcgaaagccaaattattcaaccaggaagctgaagtcaaaattaaatttaaggatgttgctggatgtgaggaatccaaagaagaaattatggaatttgtgaagtttttacaagatcctacgaagtacgaaaaattgggtgccaaaatcccaagaggtgccatcttgtcaggttccccaggtaccggtaaaaccttgttagcaaaagcgactgctggtgaagcaggtgttcctttcttatctgtttccggttccgagttcgtggaaatgtttgttggtgtcggtgcttctagagttcgtgatttattcaaaactgctcgtgagatggccccggctatcattttcgtcgatgaaattgatgctattggtaaagaaagaggtaatggtaaaatgggcggaaatgatgaaagagaaaatactttgaaccagttattggttgaaatggatgggtttgacaccggtgaccatgttgtggtcttggcaggtactaatcgtccagatgttttggataaggctttattgagacctggtagattcgatagacatatttctattgatattcctgacgtcgaaggtcgtaaagaaattttcaaggttcatttatctaaattaactttgaaatgtgatgaagatatcaaggctactcaaaaagatgttgatttcaacaaataccaagaattaaaggctgatgctattaacaacttggcaggcagattaagtgctttgactcctggttttgctggtgctgatattgctaattgttgtaatgagggtgctttaattgctgctagagaagatgcactttctgttgatacgcatcactttgagcaagcgattgaaagagttgttgcagggttagagaaaaaatctcgtatcttgagtcttgaagaaaagaagactgtcgcatatcatgaagctggacatgccatctgtggttggttcttacaatttgccgatccattagttaaagtctctattattccaagaggtcaaggtgccttaggttacgctcaatatttacctaaagatcagtatttggtttcaaaggaacagtacaaacataggatgattatgacattgggtggtagagttagtgaagagttgcatttcgatacagtgactagtggtgcatcggatgatttcaagaaaatcacgcaaatggctcaactgatggtattgaagttaggaatgtcagatagcattggtagtatttattacgatacgggtgataatgagggcggatttaaagttcataataactattcggaaactaccgcaagattgatcgatactgaagttagaaatttcgtagacgaggcatatgaagcttgtcataaattgttgactgaaaaaatcgaattagttgataaagtagctgaagaattatttaaaaaagaagtattaacaagagaagacatgatcagacttgttggtccaagaccattcccagaacgcaatgatgcctttgataagtatattaaaggtaaggatgctttcaagggtaaaccaaagaatcctaatgccgaagaaaagaccgataattag

SEQ ID NO: 60452 - protein, 806 aa, Debaryomyces hansenii CBS767
MIVSNSIRVLRGPAISSIMRTGIRIRPLNHLRCLTIPMRTFTSFNQPLLFHGSRAVLNKENKDPEKKQDQEGNKEKDEEKSKPEEKEQGKNKKKDMDQDEKDIRDQIRENLKKKNPNLDPNNIKIYQLDNKSLARAFAGIFFFSLFLTFLLASNQRNENELSFQDFKTNYLERGLVTKLTVVNKFAVEAQLIQGAVSDQTFQTFSGHPAVVFTIGSVEFFEEEMSNIQESLGIPIDERLPISYEERGSWMNYILPILPTVLLIGGLWYMTVKRASSQGGAGAGGPGGIFKVGKSKAKLFNQEAEVKIKFKDVAGCEESKEEIMEFVKFLQDPTKYEKLGAKIPRGAILSGSPGTGKTLLAKATAGEAGVPFLSVSGSEFVEMFVGVGASRVRDLFKTAREMAPAIIFVDEIDAIGKERGNGKMGGNDERENTLNQLLVEMDGFDTGDHVVVLAGTNRPDVLDKALLRPGRFDRHISIDIPDVEGRKEIFKVHLSKLTLKCDEDIKATQKDVDFNKYQELKADAINNLAGRLSALTPGFAGADIANCCNEGALIAAREDALSVDTHHFEQAIERVVAGLEKKSRILSLEEKKTVAYHEAGHAICGWFLQFADPLVKVSIIPRGQGALGYAQYLPKDQYLVSKEQYKHRMIMTLGGRVSEELHFDTVTSGASDDFKKITQMAQLMVLKLGMSDSIGSIYYDTGDNEGGFKVHNNYSETTARLIDTEVRNFVDEAYEACHKLLTEKIELVDKVAEELFKKEVLTREDMIRLVGPRPFPERNDAFDKYIKGKDAFKGKPKNPNAEEKTDN

SEQ ID NO: 60453 - DNA, 2595 bp, Debaryomyces hansenii CBS767
  CDS (1)..(2595)
atgttaacgacatttgtacgtgaatgtgaggcttataccagaccacaatctgtaaattttaatcctgatgcgttaattgacgatataattgatagcttcaaagaattccatccagaatatgcaccagttacaaagaatgatgtgttgttttacttccatgtgtatcactttttactgaacaatatcatcttcatggatgaattaaacttcgaggatcctgtcgttgcaaagttattgaattcttatgttagcatgaatccagaggacaatgcaaccgaacaggcgaaaaaagtagccgatgaaatgaatgtaaatgaagatgtagttattggctggtttaatatattttcaatcttatcatcgacaccatttgcgaaacctggccagaaatatacttgctcattatgtcctacagagtatgctcgttttcaggtgttcaattctcaagttgatgctattcaagataagttttcaaagatttataatgatgcttttaaaaaatcgaacagtgccaatactaaacaaaattccaatgctaatccaggattgaacaacttcatatttcagaataatgattccaagaagaattctcaagatgataaaaagaatggtaaaaataaaaataataaagacaaaaaatccatggagtttgaaatcaatctcaatggatccccaatgaagtattttcagcttggacttttgggtggtcttttaatgtacgttttgtataatttgtcccaagacagtgataatgaaatctcattccaaaagtttgcagctgactttttgagtaagaatcttgtgtcgagattagttgttgtcaataataaaactgtaatcgtggaattgaatgataatggtaaagcacaatatggaaaccatcaaggtcgcttatatttcaatgttggatctattgaatcattcgaacgtagtttacgtcatgttcaagaggagtataaaattgccgaacaggttagagttccggtagtatatgtaaatgaaggtaacaccacaaagatgttgattaactttttaccaacaatattattcttgggtgctatttactacatgactaaaaaggctagtatgggtggaatgggtggtccattgggatttggtaaatctactgcaaagaaattcaatcaagaaacagacataaaaattagatttaaggatgttgcaggtatgtctgaagcgaaagaagaagtcatggaatttgttaagttcttaaaaaatcctgagaaatatgaaaagctaggagctaaaattccaagaggtgccattttatcgggtccacctggtactggtaagacccttatagctaaagccactgcgggtgaagccgatgttccattttactctgtctcaggatctgaattcgtagaaatgtttgtcggtgttggtgcatctcgtgttcgtgacttgtttaagactgcccgtgaaaatgcaccatcaatagtattcgttgatgaaattgatgctattggtaaacaacgttcaaagggaaatgctagtggtaccaacgatgaacgtgaaactactttaaatcaattattggttgaaatggatgggtttgaaagctcagatcatgttgttgttttggcaggtacgaacagagcagacattttagataaagctttgatgagaccaggtagatttgacagacatattactattgataatcctgaattgttaggacgtaaagaaatcttccaagttcatttgaaaaaaattacgttagctaagaatatcgatcatgatttgccgggtcgtttggctgctttaacaccaggattttctggtgcagatattgcaaacgtttgtaatgaagccgctttaattggtgcgagatttaatgctgaagccgttacctcaagacatttcgaattggcaattgagagggttataggtggaattgaaaagaaatccaaaattttgaacgctgaagaacaaagggttgttgcctaccatgaagcaggtcatgctgtttgtggttggtttttgaaacatgctcatccattattgaaagtttctatcattcctaggggccaaggtgctttaggttacgcacagtacttaccaccggaccaatacttgatgtctgctttacaattagaggatagaatgattatgactttaggtggtagagtttcagaagaattacattttgattcagtaacaagtggtgcccacgatgacttcaaaaaagtcaccaacattgcccaatcaatggttttaagatttggtatgtctaagagagttggtatggtcaactacgccgacacccaatctcaggataacttaaccaagccattcagtgacgaaaccaactctatcatagatgaggagattcaaagaatcgttagagaatgctaccaaaaatgtgcagatttattgaaggagaaatctcatgaagttgaactagtagctcaagagttattgagaaaggagtatatcaccagggaagacatgattagattattaggtaagaggcctttcccagaaaccaatgatgcctttgataaatatcttgatggtaaggatgttttcaaaaacgagaagcctgcagatgaaaaaaaagatgatgctgaataa

SEQ ID NO: 60454 - protein, 864 aa, Debaryomyces hansenii CBS767
MLTTFVRECEAYTRPQSVNFNPDALIDDIIDSFKEFHPEYAPVTKNDVLFYFHVYHFLLNNIIFMDELNFEDPVVAKLLNSYVSMNPEDNATEQAKKVADEMNVNEDVVIGWFNIFSILSSTPFAKPGQKYTCSLCPTEYARFQVFNSQVDAIQDKFSKIYNDAFKKSNSANTKQNSNANPGLNNFIFQNNDSKKNSQDDKKNGKNKNNKDKKSMEFEINLNGSPMKYFQLGLLGGLLMYVLYNLSQDSDNEISFQKFAADFLSKNLVSRLVVVNNKTVIVELNDNGKAQYGNHQGRLYFNVGSIESFERSLRHVQEEYKIAEQVRVPVVYVNEGNTTKMLINFLPTILFLGAIYYMTKKASMGGMGGPLGFGKSTAKKFNQETDIKIRFKDVAGMSEAKEEVMEFVKFLKNPEKYEKLGAKIPRGAILSGPPGTGKTLIAKATAGEADVPFYSVSGSEFVEMFVGVGASRVRDLFKTARENAPSIVFVDEIDAIGKQRSKGNASGTNDERETTLNQLLVEMDGFESSDHVVVLAGTNRADILDKALMRPGRFDRHITIDNPELLGRKEIFQVHLKKITLAKNIDHDLPGRLAALTPGFSGADIANVCNEAALIGARFNAEAVTSRHFELAIERVIGGIEKKSKILNAEEQRVVAYHEAGHAVCGWFLKHAHPLLKVSIIPRGQGALGYAQYLPPDQYLMSALQLEDRMIMTLGGRVSEELHFDSVTSGAHDDFKKVTNIAQSMVLRFGMSKRVGMVNYADTQSQDNLTKPFSDETNSIIDEEIQRIVRECYQKCADLLKEKSHEVELVAQELLRKEYITREDMIRLLGKRPFPETNDAFDKYLDGKDVFKNEKPADEKKDDAE

SEQ ID NO: 60455 - DNA, 2403 bp, Yarrowia lipolytica CLIB122
  CDS (1)..(2403)
atgctacttcgaagccgtttacccgcggtacgaagtgtgtttgtggcgcgcggaggcgttgcagcccagctggcctccttcacgacgtcgtcccggcttctgttaccccggcgagagtcggacaagaagcccaagggtggcaaggaccgcggtcgtcacaacaaggatcacagcaaggaccgcaacaaggacgtcaacaaggcggccgaggacttcctcaaggacgttcagagcggcgacccctggcgcaactcgcccaaggccaagtggagctacacctggggcaatctcaaggacgatcttggaggcaagtccaataaggctagccaggagaatcccaacaagaacgacaacgacaacgaaaacgacaagaacgataaagagaacaagaacaaggacaaaaaggataacgacaaaaaggacgagaaatggaaggacgaaatgcccgcgggaggacgagagatcgaaatcaaggtcacccctctgggcattgccggaaccctgggagccgtcggaatgctcatctatctgctgaccagcggtggtgagggatccatgcacgaggtctcgtggcccgagttccgatcccagttcctggacaagggcctggtcgagcgactcactgtggtcaaccgagcctatgtcaagattgatctgcgacctgagggaaacaccctgggaaacaagactctgtacctaaccattggatcccccgagagctttgaacacaagctggatgaggcccagaccgagctcggagtgcctcccaacagaagactgcctgtcaactacatcgagaccaccaactactttggcctggtgatgggtctgctgcctgtggccctgacccttggattcttctactggatgtcaaagaagattggttctgccatgagtggcggcggtctgtttggcggcgctggcaagtccaaggccaagctcttcaacaaggacaccgacgtcaaggtcaagtttgatgacgtggctggcatgggcgaagccaaggaagagatcatggagtttgtacggttcctcaagaacccccagaagtttgaacgtcttggagccaagatcccccgaggagctattctgtctggacctcccggtaccggtaagactctgattgccaaggctactgctggtgaggccggagtccccttcctgtctgtatccggatccgagtttgtggaaatgtttgttggtgttggagcttctcgagttcgagatctcttctctcaggcccgaaagatggcccccgctatcattttcgtcgatgagattgacgctattggaaagaagcgaggttccggcaagtttggcggtggcaacgacgagcgagaatcgactctgaaccagctgctggtcgaaatggacggtttctcgtcttctgatcatgtgattgttcttgccggtaccaaccgacaggatgttctggaccctgctctgcttcgacccggccgattcgaccgtcatattcagattgatcccccggacatggaaggccgaaagcagattttcgctgttcatcttgccaagctgactctgtctcctgaaattaaaaaggacatggattacgtcaagggcaagctagctacgctgactcctggctttgccggtgccgatatcgccaactgctgcaacgaggcagctctgattgccgctcgagacaactccgtcgatgtcaagtttgaccactttgagcgggctattgagcgagtcattgccggcattgagaagaagagcaaggttctcaaccccgaggagaagaagactgtggcctaccatgaggctggccatgccgtctgtggctggttctttgagcacgcagaccctcttctcaaggtgtctattgtcccccgaggcaagggtgctcttggttacgcccagtacctgcctgcggacaacaagctgacttcccgaaaccagctcaaggaccgaatggccatggctctgggtggccgagtctccgaggagctccatttcccctctgtcacttctggtgctcaggacgatttcaagaaggtgacccagatggccaaggctatggtcactcagtacggaatgagcgatattgtcggaaacgtcttcttccagccccgatctgatgagcagatcaacaagccattctctgagaagaccgccaagatgattgacgacgaggtgtcgcgaatcattgacgaggcctacacccagtgcaaggacatgctggagagcaagaagcacgagattgagttggtggcccaggagctgctgaccaaggaggtgctggcccgagaagacatgattcgtctgctgggccccagacccttcccagagaagaacgaggcgtttgacaagtacctgagtggtaccaagaagcaggagggcgaggatcatgagggcggtgagaccaagaccgcctag

SEQ ID NO: 60456 - protein, 800 aa, Yarrowia lipolytica CLIB122
MLLRSRLPAVRSVFVARGGVAAQLASFTTSSRLLLPRRESDKKPKGGKDRGRHNKDHSKDRNKDVNKAAEDFLKDVQSGDPWRNSPKAKWSYTWGNLKDDLGGKSNKASQENPNKNDNDNENDKNDKENKNKDKKDNDKKDEKWKDEMPAGGREIEIKVTPLGIAGTLGAVGMLIYLLTSGGEGSMHEVSWPEFRSQFLDKGLVERLTVVNRAYVKIDLRPEGNTLGNKTLYLTIGSPESFEHKLDEAQTELGVPPNRRLPVNYIETTNYFGLVMGLLPVALTLGFFYWMSKKIGSAMSGGGLFGGAGKSKAKLFNKDTDVKVKFDDVAGMGEAKEEIMEFVRFLKNPQKFERLGAKIPRGAILSGPPGTGKTLIAKATAGEAGVPFLSVSGSEFVEMFVGVGASRVRDLFSQARKMAPAIIFVDEIDAIGKKRGSGKFGGGNDERESTLNQLLVEMDGFSSSDHVIVLAGTNRQDVLDPALLRPGRFDRHIQIDPPDMEGRKQIFAVHLAKLTLSPEIKKDMDYVKGKLATLTPGFAGADIANCCNEAALIAARDNSVDVKFDHFERAIERVIAGIEKKSKVLNPEEKKTVAYHEAGHAVCGWFFEHADPLLKVSIVPRGKGALGYAQYLPADNKLTSRNQLKDRMAMALGGRVSEELHFPSVTSGAQDDFKKVTQMAKAMVTQYGMSDIVGNVFFQPRSDEQINKPFSEKTAKMIDDEVSRIIDEAYTQCKDMLESKKHEIELVAQELLTKEVLAREDMIRLLGPRPFPEKNEAFDKYLSGTKKQEGEDHEGGETKTA

SEQ ID NO: 60457 - DNA, 2127 bp, Yarrowia lipolytica CLIB122
  CDS (1)..(2127)
atgaaaagcctctttgcaggactgaggagtgtgacacggtcgcccgggctcatgtccagcccgctgctgcgaccgcacgctctgaaacggtccgtttggaccccctacaactcgctctcgcctgtgccggtctcgtgccgctccttcaactggtcgtctcttaaacccgggtttctctccgacacggtgccgacccacgtgctggccgaaaaggaacaggctgccaaccgctcgctcaacaacccccaggcccagctggacttctacaaggcgctgatcaacacaaactacccccatgtggtggtgcagcggtacgaatcgcccggcgtggcccgtaacgccgactgcgacaagctctacgtggcggcgctgaaatcgcagggccagcacgacaaggccgagaacatggaacaccgactgctgggcggcaacttggccggaaacggacaaaagggcacgcgatcagaccccgtccacgtcatcctcaaggaaaccaccgcctccgcagtcaccaaatggatccgattcatcctgccccttgcccttatcggctacatggtctggcagagcatgcagctgctggccgagtcgtcgctgctcaagggatccggcacctccggattcaactccaagctcatggaccccaccgacggctccaagtccaccgtcaagttttcggacgtgcacggcgtggacgaggcccgaggcgagctggaagagattgtcgatttcctcaaggacccctccaagttcaccggtctgggtggcaagctgcccaagggcgtgctgctgactggaccccccggaacaggtaagactctgctggcacgagccgtggccggtgaggccgatgtccccttctactttgtttctggatctgagtttgacgaaatgtacgtcggcgtgggagccaaacgtgttcgagaattgtttgagaaggcccgagccaaggctcctgccatcatcttcattgatgagctggacgccatcggaggcaagcgaaaccccaaggaccacgcctactccaagcagactctcaaccagctgcttatcgagctcgacggcttctctccctccaccggaattgtgattattgccgccaccaacttcccccagatgctggacaaggctctgacccgacctggacgtttcgacaagatggtcaacgtggagcttcccgatgtgcgaggccgaatcgccattctgaagcaccatatgaagaaggtcgaggcttcccctctggttgactgttcagtgcttgctcgaggtacctctggtttctccggagccgagctcatgaacctggtcaaccaggccgccatccaggcatccaaggagaaggcgctgtccgtggacatgtctcactttgagtgggccaaagacaagattctgatgggagccgcccgatccaagatggtgctcaccgaggagtcgatccgaaacaccgcctaccacgaggccggacacgccctgatggcgctgtacagccccgctgccacccccatctacaaggcgaccattctgccccgaggccaggccctgggtcttgttcagcagcttcccgagctggacaagtacgacatgaccaagcaggagatgtttgctcgtgtcgacgtgtgcatgggaggcaagattgccgaggagcttatcaacggtgccgagaatgtgaccggtggttgctcttccgacctccgacaggccacgtccatggcaaagcatatggtcaccacctacggcatgtccgacgcagtgggacccatgtcgtttggtgacgagcagtggtcgcagcatctgcagcagctggccgagggcgagattcagaagattctcttcaactcggaaaaacggtcgcgtgagctgctcacggaaaagctgccggaattgcatcgccttgcgcagtcgctgctcgactacgagaccctcactgctgaggaaatcaagcaggtggtcaagggagagaaactgccccgagaaaagggtctatctgtgacggtcgtcaagtccaaggatatccgggacaaccgaggctccaagaagagcaaggatgacgacgaggaccaggaggaccggtcgtacgacgacggcgtccgaataggtgccggcgccgccagcgcaaagtcggcgtag

SEQ ID NO: 60458 - protein, 708 aa, Yarrowia lipolytica CLIB122
MKSLFAGLRSVTRSPGLMSSPLLRPHALKRSVWTPYNSLSPVPVSCRSFNWSSLKPGFLSDTVPTHVLAEKEQAANRSLNNPQAQLDFYKALINTNYPHVVVQRYESPGVARNADCDKLYVAALKSQGQHDKAENMEHRLLGGNLAGNGQKGTRSDPVHVILKETTASAVTKWIRFILPLALIGYMVWQSMQLLAESSLLKGSGTSGFNSKLMDPTDGSKSTVKFSDVHGVDEARGELEEIVDFLKDPSKFTGLGGKLPKGVLLTGPPGTGKTLLARAVAGEADVPFYFVSGSEFDEMYVGVGAKRVRELFEKARAKAPAIIFIDELDAIGGKRNPKDHAYSKQTLNQLLIELDGFSPSTGIVIIAATNFPQMLDKALTRPGRFDKMVNVELPDVRGRIAILKHHMKKVEASPLVDCSVLARGTSGFSGAELMNLVNQAAIQASKEKALSVDMSHFEWAKDKILMGAARSKMVLTEESIRNTAYHEAGHALMALYSPAATPIYKATILPRGQALGLVQQLPELDKYDMTKQEMFARVDVCMGGKIAEELINGAENVTGGCSSDLRQATSMAKHMVTTYGMSDAVGPMSFGDEQWSQHLQQLAEGEIQKILFNSEKRSRELLTEKLPELHRLAQSLLDYETLTAEEIKQVVKGEKLPREKGLSVTVVKSKDIRDNRGSKKSKDDDEDQEDRSYDDGVRIGAGAASAKSA

SEQ ID NO: 60459 - DNA, 2292 bp, Yarrowia lipolytica CLIB122
  CDS (1)..(2292)
atgaaccccagcatcgtgtcgttacggacgctacgagtgggtttgcgagttgccacgcgggctcatacactgcccgtggcccaacggcggctcttcagctttcagacatcttcttccttgcttcgaaactgggtcttcaacaaaccacaaaacgacaagaaagagaaggacgacaaaaacgccccaggaggaatgtggtggcagaaccaccgccaggagggcggtaacaacaaccagggaggccagggtggcgacggcaaggatcctaagaagcccaacctgcccatgggcgaatcgatcctgactaacctgcttgtgtttgctcttctgtcgtggtatctgtcttctccttctaacagcggccccaagctgtcgtggcaggagttccagagtggctatttggaaaagggcatggtcaagaagatgactgtcgagaacggccagcgggttgtggctgagctcacctcccccgtgcagcagcccaacggaaccaccacctccattgtggagtttgccattggatctgtcgagtccttcgagcgacgaatggaggaggcccaggacgccctccacatcgctgctgctgaccgaatccctatccactacgttcgacgatcttctctgctcggaactcttcttcccctgatccccactatcctcatgcttgccggtttcttcttcatctcgcgtctgggaagacagggcggtaagggaggccccggaggaggaggaggactattcggtatgggtaagtccaaggccaagctgttcaacaaggagaccgatgtcaagactaacttctccgatgtcgctggtatggacgaggccaaggtcgagatcatggagtttgttaacttcctcaaggaccccaagaagtacgagaagcttggtgccaagatccctcgtggagctatcttgtccggacctccgggtaccggtaagacccttgttgccaaggccactgctggtgaggccggagtgcccttcctgtctgtgtccggatccgagtttatggaaatgtttgttggtgttggagcctcccgagtgcgtgatctgttcaagcaggcccgtcagatggccccctctattgtcttcatcgatgagattgacgccattggaaaggctcgaggagatgctacgcgaggtggaggtaacgatgagcgagaagctactctgaaccagcttcttgttgagatggacggtttcgagtcctctgaccacgtcgttgttcttgccggtactaaccgacctgatgttcttgatcctgctcttctgcgacctggccgattcgaccgacacatttccatcgacaaccccactgtcgagggccgaaaggctgtctttatggtgcatctccagaagattgttaccgatctggaccgagaggatctagcctctcgactggctgccctgactcccggtttctctggcgccaacgttgccaacgtatgtaacgaggctgctctgattgcagcccgtgccgacgccgactctgttgatatcaagcattttgagcaggccattgagcgagtcattgctggtctggaaaagaagaccatggttttcacgcccgatgagaagaagaccattgcctaccacgaggctggacacgccatctgcggttggttcctcgagcatgcccatcctcttcttaaggtctccatcatcccccgaggaaaggctcttggatacgcccagtaccttcctccggatctcaacctgctttctgaggcccagatcaccgaccagcttgtcatgactctcggtggtcgagtttctgaggagatttactttggtgacatcaccaacggagccgccgacgatctgcgaaaggtgacacagtatgccacctccatggtcaccagcttgggcatgtctcccaagattggtcccgtcaactttgaggttgccgaggacggattcaacaagccctactccgaggaaactgccaacgtgattgatcacgagattcgacgaatcatctccgaggctcacacaaagtgccacgagctgatcagatccaagtccaaggagatggacctggtggctgaggagctgctgaagaaggaagtcatcactcgagaagacatgatccgacttctgggcaagcggccgtggtccgagaagaacgacgcttttgacaagtacctcgacaacaaggaggtcaagatggccgacaaggctcagtcagaggccaaggagattgagaaggacgagaacgaagtcaagaaggacgatgaggaggagaagaaggacgactccaaggatggtaaggataaggaggagaaataa

SEQ ID NO: 60460 - protein, 763 aa, Yarrowia lipolytica CLIB122
MNPSIVSLRTLRVGLRVATRAHTLPVAQRRLFSFQTSSSLLRNWVFNKPQNDKKEKDDKNAPGGMWWQNHRQEGGNNNQGGQGGDGKDPKKPNLPMGESILTNLLVFALLSWYLSSPSNSGPKLSWQEFQSGYLEKGMVKKMTVENGQRVVAELTSPVQQPNGTTTSIVEFAIGSVESFERRMEEAQDALHIAAADRIPIHYVRRSSLLGTLLPLIPTILMLAGFFFISRLGRQGGKGGPGGGGGLFGMGKSKAKLFNKETDVKTNFSDVAGMDEAKVEIMEFVNFLKDPKKYEKLGAKIPRGAILSGPPGTGKTLVAKATAGEAGVPFLSVSGSEFMEMFVGVGASRVRDLFKQARQMAPSIVFIDEIDAIGKARGDATRGGGNDEREATLNQLLVEMDGFESSDHVVVLAGTNRPDVLDPALLRPGRFDRHISIDNPTVEGRKAVFMVHLQKIVTDLDREDLASRLAALTPGFSGANVANVCNEAALIAARADADSVDIKHFEQAIERVIAGLEKKTMVFTPDEKKTIAYHEAGHAICGWFLEHAHPLLKVSIIPRGKALGYAQYLPPDLNLLSEAQITDQLVMTLGGRVSEEIYFGDITNGAADDLRKVTQYATSMVTSLGMSPKIGPVNFEVAEDGFNKPYSEETANVIDHEIRRIISEAHTKCHELIRSKSKEMDLVAEELLKKEVITREDMIRLLGKRPWSEKNDAFDKYLDNKEVKMADKAQSEAKEIEKDENEVKKDDEEEKKDDSKDGKDKEEK

SEQ ID NO: 60461 - DNA, 2412 bp, Apis mellifera
  CDS (1)..(2412)
atggcccaccaactgttttattcgacaagtaaattagaaagatttgttttgagctccgtttacaaaaatgctaatatatttcagttaagaagatatttatcattaataagaaatggcaatgaaacaagtacaatggagcacatacgaaatcaatggagattactgtgtaatgagccaccaaaaggatttgaaaaattttataaacaaaaaaaagtttctagtaaaacaactgaaaaagttgctgaaaaagtcaaaaaagcatcatccaaagaaacttcagaatcacaatcatctagaatgcattctcaaaaatcctctatgcattcttcgattcctgataaacgtggacttttttgggattttaaatggaatggagggaataagtcatttggagaaaaaaagaacgagaaactattttttattggaataacattaatgggattactttatttatacttgcaacaattagcaaatcaagcaactgaaattacatggaaagaatttataacaaaatatttagataaaggaatagtagacaaagtagaagttgtcaataaacaatgggttcgtgtaaagttattgcctggaaatttcgtgaatggaaaagatattttgtggtttaatattggaagtgttgaaacttttgaaagaaatttagaaaatgcacaaattgaattaaatgtagaaccacaaaattatattttagtgcattataaggatgaagtagaattacaccatattttaaagcttttaccacaattgttcatgtatggacttttattttatgtattccgtaaatcagcagaatcatttggtaaaggaagaaaaggtggactttttggtgcattaatggaatcaactgcaaaattgattaattccaaagatattggtgttcgatttaaggatgttgctggatgtgaagaagctaagattgaaattatggaatttgtaaattttttaaaaaatccacaacaatatatggaacttggtgctaaaattcctaaaggtgcaatgttgacaggtccacctggaactggtaaaacattattagctaaggctacagctggtgaagcaaatgtaccttttattagtgtatcaggctcagaatttttggaaatgtttgttggtgttggtccatcaagagttcgagatatgtttgcattggcacggaaacatgctccatgtatattatttattgatgaaatcgatgccgttggaagaaaaagaggaggcaaaaatttcggtggccattcagaacaagaaaatacacttaatcaacttttagttgaaatggatggtttcaatacaactactaatgtagttgtgttagcagcaactaatagaattgatattttagataaagctttattacgacctggaagatttgatagacaaatttatgttcctgctccagacattaaaggtcgagcttctatttttaaagtacatttaaaacctttaaaaatcacattagataaagatcatttagctagaaaaatggcttccttaacacctggatttacaggagctgatattgctaatgtttgtaatgaagcggctttaatagcagcaagagatttaaatgataatatacatttaaaacattttgaacaggctattgaaagagttatagctggcatggaaaaaaagacaaatgttttacaaccggaagaaaagaaaacggttgcatatcatgaagctggtcatgcagtagcaggttggtttttggaatacgcagatccacttctaaaggtttctataattcctcgtggaaaaggtttaggttacgcacagtatttacctcatgaacagtatctttatacaaaggaacaattgtttgatagaatgtgtatggcactcggtggacgagtgtcagaagaaatctttttcggtcgtattactacaggagcgcaagatgatttacaaaaagtaacttcaaatgcatatgctcaagttattcaatatggtatgaacgaaaaagttggcaatgttagttttcaaatgccacaacaaggtgaaatgactttcgataaaccatattcggaacatacggcccaacttatcgataatgaagtacgtgagttaatcgaacaagcgcatactcacacacgcaatttacttatgcaacataaggaagatgtatctaaggtggctgaacgattattaaaacaagaaattttgagtagagaagatatgatagaattactaggtcctagacccttccctgaaaagtcaacttatgaacaattcgtggaaggtacaggatcattcgaagaagacacgactttaccaaaaggtttacaagaatggaacaaatcgagggagagtgagaaaaaaggtgaaagaacagattctccaccagaaacagtttcgggattgagttctcaaaatcaaccacaacagcgattataa

SEQ ID NO: 60462 - protein, 803 aa, Apis mellifera
MAHQLFYSTSKLERFVLSSVYKNANIFQLRRYLSLIRNGNETSTMEHIRNQWRLLCNEPPKGFEKFYKQKKVSSKTTEKVAEKVKKASSKETSESQSSRMHSQKSSMHSSIPDKRGLFWDFKWNGGNKSFGEKKNEKLFFIGITLMGLLYLYLQQLANQATEITWKEFITKYLDKGIVDKVEVVNKQWVRVKLLPGNFVNGKDILWFNIGSVETFERNLENAQIELNVEPQNYILVHYKDEVELHHILKLLPQLFMYGLLFYVFRKSAESFGKGRKGGLFGALMESTAKLINSKDIGVRFKDVAGCEEAKIEIMEFVNFLKNPQQYMELGAKIPKGAMLTGPPGTGKTLLAKATAGEANVPFISVSGSEFLEMFVGVGPSRVRDMFALARKHAPCILFIDEIDAVGRKRGGKNFGGHSEQENTLNQLLVEMDGFNTTTNVVVLAATNRIDILDKALLRPGRFDRQIYVPAPDIKGRASIFKVHLKPLKITLDKDHLARKMASLTPGFTGADIANVCNEAALIAARDLNDNIHLKHFEQAIERVIAGMEKKTNVLQPEEKKTVAYHEAGHAVAGWFLEYADPLLKVSIIPRGKGLGYAQYLPHEQYLYTKEQLFDRMCMALGGRVSEEIFFGRITTGAQDDLQKVTSNAYAQVIQYGMNEKVGNVSFQMPQQGEMTFDKPYSEHTAQLIDNEVRELIEQAHTHTRNLLMQHKEDVSKVAERLLKQEILSREDMIELLGPRPFPEKSTYEQFVEGTGSFEEDTTLPKGLQEWNKSRESEKKGERTDSPPETVSGLSSQNQPQQRL

SEQ ID NO: 60463 - DNA, 2652 bp, Aspergillus nidulans FGSC A4
  CDS (1)..(2652)
atggccagcttactccgacggccaggcaatcttgctcaatactcgaggagagccgcagagcacatctttcgcgccagaccacttcaaacgcgcatttcacaatcaagactatcgtctttatacacagcacatcgtgtaaggacattcacttcgcaacgtgacgttgacccgaaacctgagaggagagtaccacctactgaaaacgatggcaaacaagacgacggcggcaactcgcagcctcctcaaaagcctgaggggcccaaggattcagaggaacccaataagccagaggaggacaagaagcctgagcagcctccctcgaagttaaccgcggaggaggaggagcaggtcaagcagttcttcgaacacatgacacaattttttccggcctcgcaaatcaacgacctgcgaatattcgtgagaatattacaaaagaatggcatgactccggagacacggcagtttatcgaaaagtatatcgtcacggggaaggagccgtcgatgatggagtacatgcggatttctacgcatgtacaatatacggtaaggaagaatgccagccaagaaaatgagcagaaggatggccagaaggaagaacagaagcagagtgggcagaatgggcagaagcaacagggcaagagccagtcggattctccagatttcaaaaccctggatttcaaattcgatcctgcatcgagcctgatcagtactgtcatcgcctattacatctaccgcagcatcttccctggcgacaatagcaaggacatcacatgggaggagtttaggagcaaatttttggataagggacttgtggagagattgaccgttaccaacagaactagggttcgtgtcgaactgaaccgtgatgcggtggctcgaacgtaccctgattcacctgcagcttcaccaaacttctactactatttcactgtcggatccgttgagagtttcgagcgaaaactcgaccaagcccaatttgagctcggcattccaacttccgagcgtatccccgtttcctatgttgatgaagtcccatggatggctaccgtgctgtcctttggccctacactcctcttcatgggtggtttattctatctttcgagacgtgccggcagcgcttcagcaggtagaaacggcatatttggaattggcaagagccgtgctaggcgcttcaaccatgaaacggatgtcaagatcaagttctctgatgttgctggaatggacgaagccaaggtagagatcatggaatttgtcagcttcctaaagagcccagaaagattccagaagctcggtgccaagatccctcgcggtgcaattctatcgggacctcctggaacgggtaagacgctgcttgccaaggctactgctggtgaatctggcgtacctttcttcagtgtcagtggttcagagttcgtggaaatgttcgttggtgtcggtccttcccgtgtccgagatcttttcgccaatgcgcgcaagaacacaccctgtattattttcattgacgaaatcgatgccattggtaaatccaggtccgccaaaaacttcagtggcggaaacgatgagcgggaaagtaccctaaaccaaatcctcactgagatggatggttttaacacttccgaccaagtggttgttttggctggtaccaacagacccgatgttcttgacaaagctcttatgcgacctggacgtttcgatcgacacattagcattgatcgacctactatggacggtcgcaagcagatcttccgtgttcatctgaagaagatcgttaccaaggaggatatggattacctgacgggcaggctgtctgctctgactcctggctttgctggtgctgacatcgccaactgcgtcaacgaagctgctttggttgccgcccgtgaaaacgcagagagtgtaaccatgaagcatttcgagcgagcaattgagcgagttgtcggcggcctggaaaagaagtctcttgtgctctcaccggaggagaagcgcactgtggcttaccacgaagccgggcacgccatctgcggttggtatttccgctgggcggatccgttgctcaaggtttccatcataccgcgtggccaaggggccctgggatatgcacaatacctgcccgccaatggagatacatacctgatgaccgctaaccaaatgatggaccggatggccatgaccttgggaggacgcgtcagcgaggaactacacttcgacactgtcactagcggagccagtgacgacttcaacaaggtcacccgcctggccacagctatggttacaaagttcggcatgtcgccgaagctcaagtacatctactatgaagaggacccatcatcacagcttcacaagcccttctcggaagagaccgccaaggatattgatatcgaagtccgccgtatcgtcaacgaagcatacaagcaatgccgcgatcttctcacagcgaagaagaaggaagtcggcctcgtcgcagaagaacttctagccaaagaggttctcagccgcgacgacatggtccgcctcctcggtcctcgcgaatggcccgagtcaggagaatttgctaagtattttgatggcaagcatggccagaccatcgcgcctcctgagcccgaagttggacccgaagctggacctgagacgagagaatcaccatcatcatag

SEQ ID NO: 60464 - protein, 883 aa, Aspergillus nidulans FGSC A4
MASLLRRPGNLAQYSRRAAEHIFRARPLQTRISQSRLSSLYTAHRVRTFTSQRDVDPKPERRVPPTENDGKQDDGGNSQPPQKPEGPKDSEEPNKPEEDKKPEQPPSKLTAEEEEQVKQFFEHMTQFFPASQINDLRIFVRILQKNGMTPETRQFIEKYIVTGKEPSMMEYMRISTHVQYTVRKNASQENEQKDGQKEEQKQSGQNGQKQQGKSQSDSPDFKTLDFKFDPASSLISTVIAYYIYRSIFPGDNSKDITWEEFRSKFLDKGLVERLTVTNRTRVRVELNRDAVARTYPDSPAASPNFYYYFTVGSVESFERKLDQAQFELGIPTSERIPVSYVDEVPWMATVLSFGPTLLFMGGLFYLSRRAGSASAGRNGIFGIGKSRARRFNHETDVKIKFSDVAGMDEAKVEIMEFVSFLKSPERFQKLGAKIPRGAILSGPPGTGKTLLAKATAGESGVPFFSVSGSEFVEMFVGVGPSRVRDLFANARKNTPCIIFIDEIDAIGKSRSAKNFSGGNDERESTLNQILTEMDGFNTSDQVVVLAGTNRPDVLDKALMRPGRFDRHISIDRPTMDGRKQIFRVHLKKIVTKEDMDYLTGRLSALTPGFAGADIANCVNEAALVAARENAESVTMKHFERAIERVVGGLEKKSLVLSPEEKRTVAYHEAGHAICGWYFRWADPLLKVSIIPRGQGALGYAQYLPANGDTYLMTANQMMDRMAMTLGGRVSEELHFDTVTSGASDDFNKVTRLATAMVTKFGMSPKLKYIYYEEDPSSQLHKPFSEETAKDIDIEVRRIVNEAYKQCRDLLTAKKKEVGLVAEELLAKEVLSRDDMVRLLGPREWPESGEFAKYFDGKHGQTIAPPEPEVGPEAGPETRESPSS

SEQ ID NO: 60465 - DNA, 2409 bp, Aspergillus nidulans FGSC A4
  CDS (1)..(2409)
atggcctctcaacttccgatcctcaagccgaatgtgtcggcatccggatcatggccgtcgatgtcaaaattcttgaagtctcccctgcatcgcaccggacagtctttcgcaacaataggctccgcaatccaggattcacgacgacgcctgcacacggagacttttgcgcgcaagtcgacgccttctgaggttgtcgcctttggagtttacagcgcaccagtacatcgattgccacgatctctgctcagcagtaagcgcaatccactctcgtcctcatggactgcatctgacagtggtgatttagaaagctctatatttactccatcgtccttcgccggccgtcattgccacccactggcttccaaaacctattcgacattggcaccgccgctgaatcgcacccgcaatgttctcattccaagtaccctacaacagcaacgctttatctttggaggaccgtcccatagtttgctggcgcagaaggaaaagacggcgaacaacaaccccagtagcgccaacgcccaaaatgcgttctaccaagcccttcttcgagccaacatgccggcgattgtaatcgaacggtacagaagcgggcacttctcgagtaatgcagtttcggaacaaatctacctgaaagctctggagcgtgttggcgggggtgtctcagccccggctgcaaatctcaatcaaggtctgcgctctgatcagatccaagccgttggacaagctgttgcagctcagaaccagggcggacaaatcgggatttcttctaaacagtctggaaccggtgcgaaagaggcccctctgtatgttgttgtggaggagtccctagggagtgccgtgtttcgctgggttaagttcatcgttctcttctgtgctttcgcctacgcgtcgatgatcgtactctcaattgtcctcgaaacaactggcgttttgaagaatatcaaaggccctcacagcaacgaagcgcagccggagcaccaaactgtccgctttagtgatgttcatggttgtgatgaagcaaaggatgagctccaggaactagttgagtttttgctgaacccggaacgattttcttcactcggtggcaaactccccaagggagttttgcttgttgggcctcctggaactggaaagactctgctagcccgtgccgttgcaggcgaagccggtgtccctttcttctacatgtcaggctctgagttcgatgaagtgtatgtaggagttggcgccaagcgggtccgtgaacttttcaaccaagcccgaagcaaatctcccgcgatcattttcattgacgaacttgatgccattggtgcaaagagaaatgaacgagatgctgcctacgtgaaacagaccctgaatcagctcctaaccgaactcgacggattctctcagtctaccggtgttatcatccttgccgcaaccaattatcctgaactgcttgacaaggccttgacccgtcctggtcgatttgatagaaaggtcgttgttgacctaccagacgttcggggacgcatggacatcctgaagcatcatatgaagaatgtgcaaatcagcactgatgttgatgtagcagtgatcgctcgtggtacgagcggcttctctggtgctgacttggaaaatctagtcaaccaggccgccattttcgccagcaggaataagcaatctaaggtcactccgaaagattttgactatgccaaggacaaaatcatcatgggtgcagaggctcgcagcaggattatccaggataaagacaagcttttgaccgcctaccacgaggcggggcatgctctggttgcctacttctcgccgtcctctatgcctttgtacaaaatcaccatcatgcctcgaggaatgtctctaggttcaacgcatttcttgccggaaatggacatggtatctaaaaactatgtccagtatctaagcgacatcgacgtctccatgggcggtaaggtggctgaggagctgatctatggggaagacaaggttactagtggtatctcagcggacctcgcgagtgcgacgcggacggccttcacgctcgtcacgcgttttggctactccaagaaacttggaaacgtcgacctgtacgccaactacgatagcctatcttccgaaacaaagcaggaaatcgaagctgaagttcggcggttggtcgaggaagctcgccagcgtgccaccaacattttgaccgaaaggagacatgaactagagttgctgacaaaggcgctgattaagtatgaaacattgaccaaggaggaaatggagaaggttctgaggggcgaaagtctcgacagacttgtcgtgccggccgatgcgcctatgaaactacctgagcctataagtgcgacgaatctgagcccgaaccaaggcgtggaagaatctgggaaccgcgcgtctgcagaatag

SEQ ID NO: 60466 - protein, 802 aa, Aspergillus nidulans FGSC A4
MASQLPILKPNVSASGSWPSMSKFLKSPLHRTGQSFATIGSAIQDSRRRLHTETFARKSTPSEVVAFGVYSAPVHRLPRSLLSSKRNPLSSSWTASDSGDLESSIFTPSSFAGRHCHPLASKTYSTLAPPLNRTRNVLIPSTLQQQRFIFGGPSHSLLAQKEKTANNNPSSANAQNAFYQALLRANMPAIVIERYRSGHFSSNAVSEQIYLKALERVGGGVSAPAANLNQGLRSDQIQAVGQAVAAQNQGGQIGISSKQSGTGAKEAPLYVVVEESLGSAVFRWVKFIVLFCAFAYASMIVLSIVLETTGVLKNIKGPHSNEAQPEHQTVRFSDVHGCDEAKDELQELVEFLLNPERFSSLGGKLPKGVLLVGPPGTGKTLLARAVAGEAGVPFFYMSGSEFDEVYVGVGAKRVRELFNQARSKSPAIIFIDELDAIGAKRNERDAAYVKQTLNQLLTELDGFSQSTGVIILAATNYPELLDKALTRPGRFDRKVVVDLPDVRGRMDILKHHMKNVQISTDVDVAVIARGTSGFSGADLENLVNQAAIFASRNKQSKVTPKDFDYAKDKIIMGAEARSRIIQDKDKLLTAYHEAGHALVAYFSPSSMPLYKITIMPRGMSLGSTHFLPEMDMVSKNYVQYLSDIDVSMGGKVAEELIYGEDKVTSGISADLASATRTAFTLVTRFGYSKKLGNVDLYANYDSLSSETKQEIEAEVRRLVEEARQRATNILTERRHELELLTKALIKYETLTKEEMEKVLRGESLDRLVVPADAPMKLPEPISATNLSPNQGVEESGNRASAE

SEQ ID NO: 60467 - DNA, 2541 bp, Candida albicans SC5314
  CDS (1)..(2541): transl_table=12
atgttgaaagaatttgacgaaaaatgtaaggagttcgaagaaattaaaggagtcaacaccctttatcctgacttggttgatattattatcaaagatataaaagaaacgtttgctaaagatcacaaggaattggcagaattgacaaccgacgagatcttacaaacggttcgtatctactatgaattactgaatcaacatctatatttagatgaattggaatttaataagcctgaagttcaaaaattgtttgaaacctataataagttagataacacagaagaaccagattacaataaaattgccaatgacttgggtttaaacccacaagctgttaagctttggatcgaaatttttcaaacccttgaatcagttgattttgctgttgatggaaggaaatcattccccctttgtcctccagaatacaatcttctcattaatttgaaacaagtgagagaaaacattgaaaaaattacccccaaggcacgtcaagatccctttggaatgttcttcaacaaagccaatcccaagcaagatgataaagacagttctaaaaataaatccaatgaagataccaaggacaaaaagaaaattgttgatattctgattgaattgactccgaaaaacattttcatctatacacttgtgttttcattggccacttccttaatattagggatggggtcgtctaatgacgatactgaaattaacttccaaagttttgtgactgattatttgactaaaaatcttgttaagaaagtaactgttattaacaattcggttgttgaagttgaacttaacgagaacggagctctgcaacataatcaacaaaagagattatatttcactattggatcggttgaatcttttgaacgtaacttgcgtgaagctcaagacaaatacgacattccaccacaattgcgtgtgcctatacactacaccactaagggaaacatggctagatttttgatcaactttttgccaacattgttatttttaggcgccatttattggatgacaaagaaggctgcctcgtcaatgggtggaatgggacctatgggcttcggaaaatcaactgcaaaaaaatttaatcaagaaactgatgttaaaattaaattcaaagatgttgcaggtatggcagaagctaaacaagaagttatggaatttgttaaattcttgcaaaatccagaaaaatatgaaaaattgggtgctaaaattccccgtggagctattttatctggtcccccaggtactggtaaaacgttacttgccaaggcaactgctggtgaagcaggggttccgttttattctgtttccggttcagaatttgttgaaatgtttgttggtgttggtgcgtctagagttcgtgatttgtttaaaactgcacgagaaaatgccccttcaattgtgtttgttgatgaaattgatgctattggtaaacaacgttccaaggggaatgctaccggtgccaatgatgaacgtgaaacaacattgaatcaattgttggtagaaatggacgggtttgatactagtgaccacgtcgttgtcttagctggtacgaatagacctgatattttggatagggcattgatgagaccaggtagatttgatagacatgttcatattgacaatcccgaattattgggaagaaaagagatttttgatgtgcatttgcaaaaaatcaccttacaaaaagatattgatcccgatttatcaggcagattagctgctttaactcctggattttctggagcagatattgccaatgtttgtaatgaggcggcattaattgcagccagatataatgctgaatttgtcactttgaggcattttgaattagctatcgagagggttattggaggtgttgaaaagaaatcgaaattattgaatcccgaagaacagaagattgttgcttatcatgaagctggacatgccatttgtgggtggtacttgaaatacgctcatccattattgaaagtctcgattatccctagaggtcaaggtgcgttagggtatgcacaatatttgccacctgatcagtacttgatgtcaactttacaattatacgatagaatgatcatgactcttggtggaagagtctcagaagaattacattttgcttcagttacaagtggtgcccatgacgatttcaaaaaagtgactgggattgcacaatctatggttttgagatttggtatgtctaaaacagttggtatggtgaattattatgatacacgctctcaagatgatttgaccaaaccgttcagtgacgagaccagtagaataattgacagtgaagtacagagaattgttagtgattgttatcaaaaatgtaaacaattgttgactgaaaaatcaaaagaagttgaactagtggcccaagaattgttgaagaaggaatttatcactcgtgaagatatgattagattattgggtaaacgtcccttcccagaaacaaatgatgcctttgataagtatcttgatggtaaacctgccttcaaaaatgaacaaccagaaaatgaaaaaaaggattctgcaaattaa

SEQ ID NO: 60468 - protein, 846 aa, Candida albicans SC5314
MLKEFDEKCKEFEEIKGVNTLYPDLVDIIIKDIKETFAKDHKELAELTTDEILQTVRIYYELSNQHLYLDELEFNKPEVQKLFETYNKLDNTEEPDYNKIANDLGLNPQAVKLWIEIFQTLESVDFAVDGRKSFPLCPPEYNLLINLKQVRENIEKITPKARQDPFGMFFNKANPKQDDKDSSKNKSNEDTKDKKKIVDISIELTPKNIFIYTLVFSLATSLILGMGSSNDDTEINFQSFVTDYLTKNLVKKVTVINNSVVEVELNENGASQHNQQKRLYFTIGSVESFERNLREAQDKYDIPPQLRVPIHYTTKGNMARFLINFLPTLLFLGAIYWMTKKAASSMGGMGPMGFGKSTAKKFNQETDVKIKFKDVAGMAEAKQEVMEFVKFLQNPEKYEKLGAKIPRGAILSGPPGTGKTLLAKATAGEAGVPFYSVSGSEFVEMFVGVGASRVRDLFKTARENAPSIVFVDEIDAIGKQRSKGNATGANDERETTLNQLLVEMDGFDTSDHVVVLAGTNRPDILDRALMRPGRFDRHVHIDNPELLGRKEIFDVHLQKITLQKDIDPDLSGRLAALTPGFSGADIANVCNEAALIAARYNAEFVTLRHFELAIERVIGGVEKKSKLLNPEEQKIVAYHEAGHAICGWYLKYAHPLLKVSIIPRGQGALGYAQYLPPDQYLMSTLQLYDRMIMTLGGRVSEELHFASVTSGAHDDFKKVTGIAQSMVLRFGMSKTVGMVNYYDTRSQDDLTKPFSDETSRIIDSEVQRIVSDCYQKCKQLLTEKSKEVELVAQELLKKEFITREDMIRLLGKRPFPETNDAFDKYLDGKPAFKNEQPENEKKDSAN

SEQ ID NO: 60469 - DNA, 2388 bp, Candida albicans SC5314
  CDS (1)..(2388): transl_table=12
atgttggctgtaaactctgcaaggcttctaaatagagctattatatcacgaccagtgctttatcgttcagctataccacgtcatttttctacttataccccacttgcattcagaacttcaagacaattattcaataaatccaataacgacaataagaaatctaataacaatgatcatgaaaaggattcagaaagaaaaccaaagaaggatcaaaacaaagatgaagaagaacagcttcgtgaagaattaaagaagaaatttgccgcaaaacatcctggaactaacccagataatcttaaaatttataaatttgatttgaggactttgggcaattacgtattattatttggttcaacaattttgacattctatcttataaacaggacatcagaatcggaaattcaacaattgacgttccaagattttatcaccaattatatcgagaaaggattagtaaccaagttaactgttgttaataaggctgttgtcgaagcggaattaatccctggtgctgtttccaatataagtcataatagaaatggtaaaccttatgtcgtattcactattgggtcattagaattttttgaagatgaaatgaataaagtccaagatagattgaaaatccctataaatgaaagattaccagttgtatatgaagatcatacatcctggttaagttacataatgccaattttgccaacagtgttgttaataggaggattgtactatttgactatgagaagaatgcctggtggtgccggcggtgctggtggtgctggtggtccaggaggtatttttaaaattgggaaatcaaaagctaaattgttcaaccaagaaaatgaagtcaagatcaaattcaaggatgttgctggatgtgacgaatctaaagaagaaattatggaatttgtcaagtttttacaagaccctcacaaatatgaaaaattaggtgcaaaaatccctcgtggggcaattttatctggtccaccaggtactggtaaaacattgttagccaaggctactgctggtgaagcaggagttccatttttgtctgtttcgggttctgagtttgtcgaaatgtttgttggtgtaggtgcttctcgtgtccgtgatttatttaaaactgcccgtgaaatggctcctgctattatattcgttgatgaaattgatgcaattggtaaagaaagaggaaatgggagaatgggtggcaatgatgaacgtgaaaacacattaaatcaattgttggtggaaatggatgggtttgatacaactgaccatgttgttgttttggctggtactaatagaccagatattttggataaggctttgttaagaccagggagatttgatagacatatttcaattgatgtacctgatgttgaaggtcgtaaacagatttttaaagtccatttaaataaactcaaattgaaaagtgtccaagatattgatgccaaacaaaaagatgttgatttttccaaataccaacaattgaaaaatgaagagattgaaaaattggcaggaagattggctgcgttgactccaggttttgctggtgctgatattgccaattgttgtaatgaaggggctttgattgctgccagagaggacgcacctgccgttgatacttatcattttgaacaggccatagaaagagttattgctggattagaaaagaaatctcgtattttgtctcctgaagaaaagaaaactgttgcttatcatgaagcaggacatgcaatttgtggatggtttttgcaatacgctgatccattggttaaagtgtctattatccctcgtggtcaaggtgccttaggatatgctcaatatttgccaaaagaccaatatttgacttcacaggagcagttcaagcacagaatgattatgactttgggcggcagagtgtctgaagaattgcattttgataccgttaccagtggtgcttctgatgatttcaaaaagatcacccaaatggctcaacaaatgatcttgaaattaggtatgtcagataaattgggtcaaatttgttatgacactagcagtgataatggtaatggattcaaagttcaccataattattccgaaaccacagctcgtattattgatgaagaagttaaacgattgattgatgaatcatatgaagcttgccataaattgttgactgaaaaactagatttagtagataaagttgctgaagagctatttaagaaagaagtattaactagagaggatatgattaagatttgtggtccaagacctttcccagaaagaaatgatgcctttgacaaataccttcaaggtgaagatgcattcaaggggaaaccaaaatcaaaagaccaaaatagcaacgatgatggtgcgtcttccccatcgtctgctccagaaaccgcataa

SEQ ID NO: 60470 - protein, 795 aa, Candida albicans SC5314
MLAVNSARLLNRAIISRPVLYRSAIPRHFSTYTPLAFRTSRQLFNKSNNDNKKSNNNDHEKDSERKPKKDQNKDEEEQLREELKKKFAAKHPGTNPDNLKIYKFDLRTLGNYVLLFGSTILTFYLINRTSESEIQQLTFQDFITNYIEKGLVTKLTVVNKAVVEAELIPGAVSNISHNRNGKPYVVFTIGSLEFFEDEMNKVQDRLKIPINERLPVVYEDHTSWLSYIMPILPTVLLIGGLYYLTMRRMPGGAGGAGGAGGPGGIFKIGKSKAKLFNQENEVKIKFKDVAGCDESKEEIMEFVKFLQDPHKYEKLGAKIPRGAILSGPPGTGKTLLAKATAGEAGVPFLSVSGSEFVEMFVGVGASRVRDLFKTAREMAPAIIFVDEIDAIGKERGNGRMGGNDERENTLNQLLVEMDGFDTTDHVVVLAGTNRPDILDKALLRPGRFDRHISIDVPDVEGRKQIFKVHLNKLKLKSVQDIDAKQKDVDFSKYQQLKNEEIEKLAGRLAALTPGFAGADIANCCNEGALIAAREDAPAVDTYHFEQAIERVIAGLEKKSRILSPEEKKTVAYHEAGHAICGWFLQYADPLVKVSIIPRGQGALGYAQYLPKDQYLTSQEQFKHRMIMTLGGRVSEELHFDTVTSGASDDFKKITQMAQQMILKLGMSDKLGQICYDTSSDNGNGFKVHHNYSETTARIIDEEVKRLIDESYEACHKLLTEKLDLVDKVAEELFKKEVLTREDMIKICGPRPFPERNDAFDKYLQGEDAFKGKPKSKDQNSNDDGASSPSSAPETA

SEQ ID NO: 60471 - DNA, 2583 bp, Ustilago maydis 521
  CDS (1)..(2583)
atgctgcgctcgtttagatcgcggtcagcgacagggcgtttcggcttcgcagcctctcgccttacgcaaccgcttgcagcttcgataccttcgccatcagctgcctaccgttccttgacgagcttctcagcatcaaggcctcaaccagcttctgcttctgtgctttcatctccgaaactctcgtttctaacgccaaagctccagctccgccactatgccactccggctgaagatggtaacaagaagaaccgttctgcaaaggagcacgacgaagatgatcagaaacagaaagagtttgaagaatctgtagagcgtggccttaaggaggctcgtcagggcaaagccagcgccggtcttccccagaacctcaagcaattctttgagagtggcgacaagaagcctacttcgagcaagagcaacaaagagtcggagacagaagaagacgacgttgccgagaggaacaagagcaagtccgaaaaatcgtctggtgccaacagctctagtggtggcggaggcggacccaacggccaattcaccgagatccgcatcaacgccaacaccatcctcgcaaccattgtttccacctacctcttctaccgacttacatcgcctgaccaacccagtcgtgagatcacgtggcaggagttccgtaccgccttcctcgacaagggcctcgtagatcgccttgtggttgtcaaccgatccaaggtcaaggtctacctccactcgaatgctaccgggtccctctatccatctcccaacggaggctctagcactcctgctagcggaagtggtcacgccgcctactggtttagcgtcggcagcgtcgaagcctttgaacgacgtctcgacgaggctcagcgcgagctcgagattcccgccaacgagagaatccccgtggcctaccacgaagagatttcgaccgcatcgacactgctccactttgcccctacgttgctgattgccggtcttctgttctggatgtcgcgacgagctgccggtggcgccatgggcggcggcggcggtggtggaccgggcggaatctttggtatcggcaagtcgagggccaagatgttcaaccaagagacagacgtcaagaccaagttcaagaatgtcgccggcatggatgaggccaaagaagagatcatggagtttgtcaacttcctcaagaagcccgaaaagtacgagaagctaggcgccaagatcccgcgtggtgctattctctcgggtcctcccggtaccggtaagacgctgctggccaaggcgactgctggtgaggctggtgtgcctttcctgtccgtctcgggttccgagtttgtcgagatgtttgttggtgtcggtcccagccgagtgcgagacatgtttgctaacgccaagaagcacgcgccctgtatcatcttcatcgacgagatcgatgccatcggcaagagccgcggcaaaggtggcaactttggtggcaacgacgaacgagagtcgacgctcaacgagttgctcgttcaaatggacggtttcggtaccgaggagcatgtcgttgtgcttgccggtactaaccgaccggacgtgctcgatgctgcgcttatgcgtcccggtcgattcgatcgtcacattgctattgaccgacctgatatttctggtcgaaaggatatcttcctggtccaccttaagccccttaccctccactcttccacggaccgcgatcttctggctgaaaagctcagcacgctcactcccggatttagcggtgctgatgttgccaacgtctgcaacgaagctgcgctgatcgcagcacgcggcggcgccgactcgatcgaggagcatcattttgagatggccatcgagcgagtgattgctggtctcgaaaagaagtcgcgtgtgctttcgcccgaggagaagaagactgtcgcttaccacgaggcaggtcacgccgtctgcggctggttcctcgagcacgccgatcccttgctcaaggtctcaatcatcccacgtggcgtcggtgcgctcggctatgctcagtacttgcccaaggagcgctacctcttttcgaccgaacagctgctcgaccgcatgtgcatgacgttgggtgggcgggtttctgaagaaatcttcttcaccaccatcaccaccggtgctcaggacgatctttccaaaattacgcgcatggcgttcgagatttgcgcatcgtacggaatgaacaaggagctcggcccggtctcgtaccgcaccgagcaggagtcgatgcacaagccgtattcggaacgcacgggtgaaatgctggatttcgaggtacgcaagatggtcgctgaggcgcacaagcgtacgacacagctgctgcaggaccacaaggcagatgttgagaaggtcgcgcagctgctgctcgagaaggaggtcatcacaagggaggatatgaggaacttgttgggcgcaaggccgttcagtcatgcagacgaggcggatcagtacttggacaagaagggtaggttgaagagaaagggcgaggtcagtgctcctcccccgccgcccgaggaaatccccagtccaggacttgctaccaaggcgctcaacgacgaccaaacaaagctttga

SEQ ID NO: 60472 - protein, 860 aa, Ustilago maydis 521
MLRSFRSRSATGRFGFAASRLTQPLAASIPSPSAAYRSLTSFSASRPQPASASVLSSPKLSFLTPKLQLRHYATPAEDGNKKNRSAKEHDEDDQKQKEFEESVERGLKEARQGKASAGLPQNLKQFFESGDKKPTSSKSNKESETEEDDVAERNKSKSEKSSGANSSSGGGGGPNGQFTEIRINANTILATIVSTYLFYRLTSPDQPSREITWQEFRTAFLDKGLVDRLVVVNRSKVKVYLHSNATGSLYPSPNGGSSTPASGSGHAAYWFSVGSVEAFERRLDEAQRELEIPANERIPVAYHEEISTASTLLHFAPTLLIAGLLFWMSRRAAGGAMGGGGGGGPGGIFGIGKSRAKMFNQETDVKTKFKNVAGMDEAKEEIMEFVNFLKKPEKYEKLGAKIPRGAILSGPPGTGKTLLAKATAGEAGVPFLSVSGSEFVEMFVGVGPSRVRDMFANAKKHAPCIIFIDEIDAIGKSRGKGGNFGGNDERESTLNELLVQMDGFGTEEHVVVLAGTNRPDVLDAALMRPGRFDRHIAIDRPDISGRKDIFLVHLKPLTLHSSTDRDLLAEKLSTLTPGFSGADVANVCNEAALIAARGGADSIEEHHFEMAIERVIAGLEKKSRVLSPEEKKTVAYHEAGHAVCGWFLEHADPLLKVSIIPRGVGALGYAQYLPKERYLFSTEQLLDRMCMTLGGRVSEEIFFTTITTGAQDDLSKITRMAFEICASYGMNKELGPVSYRTEQESMHKPYSERTGEMLDFEVRKMVAEAHKRTTQLLQDHKADVEKVAQLLLEKEVITREDMRNLLGARPFSHADEADQYLDKKGRLKRKGEVSAPPPPPEEIPSPGLATKALNDDQTKL

SEQ ID NO: 60473 - DNA, 2349 bp, Cryptococcus neoformans var. neoformans B-3501A
  CDS (1)..(2349)
atgctttctaggtctgtgcaggtggcagggttggacctgtttgtgtcttccagggcagccagtttaagatgtcaaaaatactgtgcgcgaagtccgtcaaatcttaaggaaatgcggatcccgaggaaaacgtcgcaaatggtctcgcgaccttgcatttcttttcgaggcctccacagttctacctcctggaatggcattttcagttctcggtctaccaccgcgaaaccatcagaaacccaaacagatgtcgatcaacctttaactcctttccaagctcgagttgcggaactggagatcaaggctcatgcaaataaagaggatccggatgcccagcttgaatttttacgccagctttccgaaggaggagaattcgccggtttggtggcgtactacgaaggaatggctcttgccgaggatacatctggaagtcaggctcttctgaggaatgatgaagcatgggccatattcatggatgcattggcgagatcaggcaggttgggtgatatagtgactaaggtcaggagaagagatcagctgctggcatccataggtgctaatggcgggtcttcctcgtctgcgcctctggtatctaatcctacaccatcctctgtatcagcaaacaattcgtcaacctcaacgccttctgtcagttctccaggtccttcattgacgtcgtctttgctaagccgggcggtgtcaccgacttccctagcaaatgcttcgaatgcttctacctctcagtctcatcctggcgcaggttctccgctaaatccgatatacgtacaaatggccccccctactccgcagatgaatgcctggcgcgctttgcgttgggtggctggattcctgctttgggggtttattattctcacggtcatgtcgatggtgatagagaacactgggctactgaaggcaggccctggtcctgtcgagtttgaaccagaagagggcaaaatagtcaaattcagtgatgtccatggggtggaagaagctaaagcagaattggaggaaattgtcgaatttctcaagaatccggagaagttctcggctcttgggggcaagcttccaaaaggagtccttctgactggccctcctggtactggtaagactatgcttgctcgtgctgtagcaggtgaggcggaagttccgtttttgttcgcctctggttcaagttttgacgaaatgtttgttggtgtcggagccaaacgtgtcagggagctgttcgctgccgctagaaagaaagctcccgccatcatttttattgatgagctcgacgctattggctccaaacgaagcgccaaagatcaacactacatgaaacaaactttgaatcagctacttgtggaactcgacggctttgaacaggcggaaggtgttatcatcatcgcggctaccaacttccctgaatctctcgacaaagctcttacccgtcctggtcgttttgatagacatgttgtggtcggtcttcctgacgtccgcgggcgtatagaaattctcaagcatcatatgtccgaggtgcaatacgatgtggacgttgaccctagtgtcattgcacgaggctgccctggtatgagcggtgcagatttacagaacctagtcaaccaggcggctgtcaaggcttccagggatggatcgaacagcgttcaattgaagcatttcgaatgggctaaagaccgtattttgatgggagctgaaaggaaatctcattatgtgacagaggagtccaagcgagcaactgcttatcacgaaggtggtcacgctcttgttgctctacatactccgggggccatgcctctacataaggttactattatgcccagaggtcaagctcttggcattacttttcagctacccgaacaagacaaggactcatatacccgtcgcgaattcaacgctatgattgacgttgcccttggtggccgtgctgctgaggaaatgatattcggacatgacaacgtgacaagtggatgctcaagcgaccttcaacgtgcaacagatgttgctactaggatgattcggaattacggtttcagtgacaaagttggattagttgctcatggggatgaagaatctgtctatctttcaagtaagaagaaagacgagatcgaaagtgaaattcggagtttcctggatcaaagtatgaccagaacggagaatcttctcaagacgcacgagaatgagttacatcgactggctgatgcactcattgagtacgagactctatcgttggatgaagtgaagcaggtgctagaggggaagcgattaagcagaccaacaactgaaggggaaagtttaaaaggtcaaggtgaaaagagtgggaagggtcccattgttgacggcatttag

SEQ ID NO: 60474 - protein, 782 aa, Cryptococcus neoformans var. neoformans B-3501A
MLSRSVQVAGLDLFVSSRAASLRCQKYCARSPSNLKEMRIPRKTSQMVSRPCISFRGLHSSTSWNGIFSSRSTTAKPSETQTDVDQPLTPFQARVAELEIKAHANKEDPDAQLEFLRQLSEGGEFAGLVAYYEGMALAEDTSGSQALLRNDEAWAIFMDALARSGRLGDIVTKVRRRDQLLASIGANGGSSSSAPLVSNPTPSSVSANNSSTSTPSVSSPGPSLTSSLLSRAVSPTSLANASNASTSQSHPGAGSPLNPIYVQMAPPTPQMNAWRALRWVAGFLLWGFIILTVMSMVIENTGLLKAGPGPVEFEPEEGKIVKFSDVHGVEEAKAELEEIVEFLKNPEKFSALGGKLPKGVLLTGPPGTGKTMLARAVAGEAEVPFLFASGSSFDEMFVGVGAKRVRELFAAARKKAPAIIFIDELDAIGSKRSAKDQHYMKQTLNQLLVELDGFEQAEGVIIIAATNFPESLDKALTRPGRFDRHVVVGLPDVRGRIEILKHHMSEVQYDVDVDPSVIARGCPGMSGADLQNLVNQAAVKASRDGSNSVQLKHFEWAKDRILMGAERKSHYVTEESKRATAYHEGGHALVALHTPGAMPLHKVTIMPRGQALGITFQLPEQDKDSYTRREFNAMIDVALGGRAAEEMIFGHDNVTSGCSSDLQRATDVATRMIRNYGFSDKVGLVAHGDEESVYLSSKKKDEIESEIRSFLDQSMTRTENLLKTHENELHRLADALIEYETLSLDEVKQVLEGKRLSRPTTEGESLKGQGEKSGKGPIVDGI

SEQ ID NO: 60475 - DNA, 2454 bp, Cryptococcus neoformans var. neoformans B-3501A
  CDS (1)..(2454)
atggcattaagagcaataagcttacgccgcttaccacggtacagcgccgtcgcgcgccctttctttttgagaacatacgccactcccggctcgcccaagccatctcggaatccgccaccaccaccaggactcgagtcggtcttcggaggttcagcaggaaagcaaggcactacagttgctcctaagcctccgggagttggtccaccctctggaccctcactacccaagaaacctgacgtcggtcttccaggtttggaaggtgaagaaaaccgcccagaagaccagaaagaacaggatgagcctcggaggcccaagcttagcgaacagttgggcgggaaggctggtaaaagagtaacaactggtggaggcggcggaggtggaggaaatggtggcggcgctggtggacctggagggcaacccggtggttttggtggtatgacacctaaccagttgttgctcttggctgtcagcacatatgcgttgtggagtatgactgctccggatgatgtaaggaccaaggagattacatggcaggaattccgcaactctttgctcgcccgtggtctcgtttcttcgctcgaagtcgttaaccgaaacaaagttcgagttcatctgcacaaccctctttccggtcagcctcaacagaccaaccccactgggtccggaagtcttccctcaccgtctcatggcccggccccttaccaattcaccatcggttcacttgaagcctttgaaaaccttcttatcgcttctcaagacgaactcggtatccctcctgccgagcgtgtccctgtctcttatcgagaagaaatctccacattccagaccatcatgcactttgcaccaactttgttgattgccggtttgttgctttggatggctagaagaggagggtcagccatgggtggtggtggacccggtggcggtatttttggtgttgggaaaagtcgagcaaagatgttcaacaaagacgagcaggttgctgtgagattcaaggatgtggcgggtatggatgaggccaaggaggaaatcatggaattcgtcaaattcctcaaggagcctctaaaatacgagaagcttggtgctaaaattcctcgaggtgccatcctctctggtccccccggtaccggtaagactcttctcgccaaggctaccgctggtgaagctggtgtgcctttcctttccgtctctggttccgagttcgttgaaatgtttgtcggtgtcggtccctcccgagtccgtgacttgttcgcaaacgccaagaagaatgccccatgtatcatcttcgttgatgaaatcgacgccatcggcaagtcccgtggcaagggtggcaacttcggtggtaacgatgagcgtgaatccactttgaaccagcttttggtcgaaatggacggtttcggtaccaacgagcatgtcgtcgttttggccggtactaacagacctgatgttcttgattctgccttaatgcgtcctggccgattcgaccgacatattgccattgaccgacctgacattggaggccgtcgacagatctttgctgtccacctcaaacccattactctcgctcccgagcttaccatcgaccgcatcgccgagaagcttgccctccttactcctgggttctctggtgcggacattgccaatgtctgtaatgaagctgctctacgtgccgctcgacacggcggtgaggtcgttactgaagccgattttgacggagccatcgagcgtgtcattgctggtctcgagcgaaagtcccgtgtgttgggcaaggatgagaagaagactgtcgcgtaccacgaagctggtcatgccgtctgcggttggttccttgaacatgccgatcctttgctcaaggtttctatcatcccccgtggtgtcggtgccttgggttacgctcagtaccttcccaaggagcgatttcttttctctacagagcaacttctggataggatgtccatgacccttggtggacgtgtcgctgaagagatcttcttcggtcgtatcactactggtgcacaggacgatctccaaaagattaccaagatggctttcgaagtctgtgctaattatggtatggaccctgcgattggaccgatttcttatggaggccgtgaccagcaaggggaaggattccagaagccgttctcagaggctaccgctgaggctttggacaaggctgtgaagaagatggtgattcaggcgcatgacaggacgactaggcttttgacagagcataaggaggatgtggagaaagttgcaaagttgctattggtgaaggaggttatcactagggaggatatgaggttgaccttgggccctaggcctttcgcgaacaaggacgagatggatgatttgatagagcgggaattggatcaaaagaagcaggaaaaggaagtgcaagaacccgatggccctgtcccccaattagctttcaaacccattaaggtggattag

SEQ ID NO: 60476 - protein, 817 aa, Cryptococcus neoformans var. neoformans B-3501A
MALRAISLRRLPRYSAVARPFFLRTYATPGSPKPSRNPPPPPGLESVFGGSAGKQGTTVAPKPPGVGPPSGPSLPKKPDVGLPGLEGEENRPEDQKEQDEPRRPKLSEQLGGKAGKRVTTGGGGGGGGNGGGAGGPGGQPGGFGGMTPNQLLLLAVSTYALWSMTAPDDVRTKEITWQEFRNSLLARGLVSSLEVVNRNKVRVHLHNPLSGQPQQTNPTGSGSLPSPSHGPAPYQFTIGSLEAFENLLIASQDELGIPPAERVPVSYREEISTFQTIMHFAPTLLIAGLLLWMARRGGSAMGGGGPGGGIFGVGKSRAKMFNKDEQVAVRFKDVAGMDEAKEEIMEFVKFLKEPLKYEKLGAKIPRGAILSGPPGTGKTLLAKATAGEAGVPFLSVSGSEFVEMFVGVGPSRVRDLFANAKKNAPCIIFVDEIDAIGKSRGKGGNFGGNDERESTLNQLLVEMDGFGTNEHVVVLAGTNRPDVLDSALMRPGRFDRHIAIDRPDIGGRRQIFAVHLKPITLAPELTIDRIAEKLALLTPGFSGADIANVCNEAALRAARHGGEVVTEADFDGAIERVIAGLERKSRVLGKDEKKTVAYHEAGHAVCGWFLEHADPLLKVSIIPRGVGALGYAQYLPKERFLFSTEQLLDRMSMTLGGRVAEEIFFGRITTGAQDDLQKITKMAFEVCANYGMDPAIGPISYGGRDQQGEGFQKPFSEATAEALDKAVKKMVIQAHDRTTRLLTEHKEDVEKVAKLLLVKEVITREDMRLTLGPRPFANKDEMDDLIERELDQKKQEKEVQEPDGPVPQLAFKPIKVD

SEQ ID NO: 60477 - DNA, 2379 bp, Strongylocentrotus purpuratus
  CDS (1)..(2379)
atggcgtacaattgtattcgcatgaaaggggctgtggagcgaattcttagcaggaggttaggacagagcgttcgggtaaatcagatacatctacacagcaccaatgcagacgtgactacctcgtggaagttatccagtctcatcaccagactgaggttagctgccaagcctccaaaagggtttgaaaagttcttcccagaaggcaagcaagctgccaagaaaccaaaagtggccaaagaagcatcggagtcttccaaatcagcaccaaaaaggagtagcggtaatggcaaaaaagaatcagagagcagcaagaactttggagaggacctatggaagagtctgatggcccagggaaagacgggcgggggaggagggggtgctggaagcagaccccccatcgacgagaagaacaggcagcagctgatgttcagtatagccgtcaccatagggggcgccattgcggctggctacgtcttgatgggcggttcagcggtggaaatcacatacaaggagttcctgaatgaattcttagcagcaggacaggttgaaagagtagaagttgtcaacaagaagtttgtcagagtgtggctgaaagctagtcactctaaagggaggtacgtctggttcaatattggcagtgtggatacctttgagaggaatctagagcaggcacagggcaacctgggtatggaacctcagaactatctctccgttgtctacagttcagagagtgatgggtcattcttgatgagtctgattcccacagccctcatgatcggcttcttcctgtacctcttccgtaacaaccctgccacaggaggccgggctggtaagggcaagggcggcatctttgggtttggcgagtcaacggccaagatcctcaaggaagatgtaggagtcaggtttaaggatgttgctggatgtgaggaggccaaactggaaatcatggagtttgtcaacttcctcaagaatcctcagaaatatgcagatcttggggccaagatcccaaagggtgctatcttatctggaccaccaggaactggtaagactctgctggccaaggctacagcaggtgaagctaatgtgcctttcatcacagtcaacggctcagagttcctggagatgttcgttggtgttggtccctcaagggtgagggacatgtttgcaatggcaaggaaaaatgctccctgtattctttttatggatgagatcgatgcagtgggaaggaaaagaggaaagagtaactttggagggcaaagtgagcaggaaaacacactcaatcagctgctagtagaaatggatggtttcaacaccaccaccaatgttgtagtcttagcaggtacaaaccgtccagacatcctagaccctgccctcatgagacctggtagatttgatcgacagatctacatcggtgcaccggacatcaagggcagggcatccatcttcaaggttcacttgaagcccttgaagacagaggtaaacatggatgagatatctaggaaactagctgctctcactccaggttttacaggtgctgacatagcaaatgtgtgcaatgaagctgctttgatagctgctagacatggtttcaatcagattgaaaactctcactttgaagctgccattgaaagagtcgtagcaggtcttgaaaagaagacacaagtgttacaaccagaagaaaagaagactgtagcgtaccatgaggcaggccatgctgtagcaggctggttcttggagcatgctgaccctctgctcaaggtttcaatcattccacgaggaaaaggtcttggctacgcccagtacttgcctaaggaacactttctattcacccaggagcagatgctacacaggatgtgcatgacgctagggggacgtgcatcggagcagatcttcttcgacaaggtcacgtcgggtgctcaggatgacctcaagaaggtcacgcagatggcatatgcacaggtggttcagtttggcatgagtgataaggtaggcaacgtctccttcgacatgccacagcagggtgagatggtcctagagaagccctacagtgaacagaccgctcagatgatcgatgaagaagtcaggtccatgatcaaatctgcttatgattcaaccttggatctcctaaagaagaacaaggataatgtagagatggttgcacagaggctattggagcgggaggtcctcaacaaggacgacatggtggaactcttgggcaaacggcccttcgcagagaggaccacgtatgaagactttgtagagggaacagggagctttgaggaggacaccagccttcccaaggggcttgagggatggaatgaggagagcgagaagaaaaaaggactcaaggacgataagaacttggacgtgaatgcatag

SEQ ID NO: 60478 - protein, 792 aa, Strongylocentrotus purpuratus
MAYNCIRMKGAVERILSRRLGQSVRVNQIHLHSTNADVTTSWKLSSLITRLRLAAKPPKGFEKFFPEGKQAAKKPKVAKEASESSKSAPKRSSGNGKKESESSKNFGEDLWKSLMAQGKTGGGGGGAGSRPPIDEKNRQQLMFSIAVTIGGAIAAGYVLMGGSAVEITYKEFLNEFLAAGQVERVEVVNKKFVRVWLKASHSKGRYVWFNIGSVDTFERNLEQAQGNLGMEPQNYLSVVYSSESDGSFLMSLIPTALMIGFFLYLFRNNPATGGRAGKGKGGIFGFGESTAKILKEDVGVRFKDVAGCEEAKLEIMEFVNFLKNPQKYADLGAKIPKGAILSGPPGTGKTLLAKATAGEANVPFITVNGSEFLEMFVGVGPSRVRDMFAMARKNAPCILFMDEIDAVGRKRGKSNFGGQSEQENTLNQLLVEMDGFNTTTNVVVLAGTNRPDILDPALMRPGRFDRQIYIGAPDIKGRASIFKVHLKPLKTEVNMDEISRKLAALTPGFTGADIANVCNEAALIAARHGFNQIENSHFEAAIERVVAGLEKKTQVLQPEEKKTVAYHEAGHAVAGWFLEHADPLLKVSIIPRGKGLGYAQYLPKEHFLFTQEQMLHRMCMTLGGRASEQIFFDKVTSGAQDDLKKVTQMAYAQVVQFGMSDKVGNVSFDMPQQGEMVLEKPYSEQTAQMIDEEVRSMIKSAYDSTLDLLKKNKDNVEMVAQRLLEREVLNKDDMVELLGKRPFAERTTYEDFVEGTGSFEEDTSLPKGLEGWNEESEKKKGLKDDKNLDVNA

SEQ ID NO: 60479 - DNA, 2202 bp, Strongylocentrotus purpuratus
  CDS (1)..(2202)
atgttttcagtaagcggtgtgaacgctcagcagctggtcttgcccctccctcacctggtggcagctttccattctctgaaggggggagcagaaacaactgctttaagaagaaaacaacagagaactccaccagcagctccttccacgaaaaggcaaaaggcagaggataccaaatttgcagagagcctatcaaatgtaacattaaatcttgcagatgttggagtaagttccttgcccaaggactggctcaactctatattaccctctatcaccgaaggaagtaatcttagggacagacttcaacctcagtcctacacttctgcagaatcattcttcgagaacaaacatggtttccctgctgcacatctagcaattccaacctttaacgaaatcacatcatcagctggtggtttgcaatcgtttcgtcatttccttgatgcaaattgttcttcatcacatccattgttgtttgatcaaaggagaggattcaaaacaaagagagcagcctcggctacagagctaacaacaagaaagtccaaagaagaggatgttggattgacaggtttatttaggagatttacctcatcgaaggaccccaagaagaagaagttccgagagacgcttggtgatgccttgtccagtcataatgaccatgtggccgacaaggactccttcaagacaggctacttggaaggctacatgctgggcaaggatgaaaccaagaaatcagaccggttcaagggctggacaaccgtcctcatcttcggtgtgctggcctatctctatgtcaaaatggtttcagtgtttgctcgggtgtcaatcattggtaattccaacgtagacagcatgactgttgcagatgttacttttgacgatgtcagaggagctgatgaagccaagaatgaattgcaggatattgtcaactatctcaaagatccatcaaagtacactgttctgggtggcaagctacctaaaggtgtgttactccaaggctcacctggagttggtaagactctgctagccagggctgtggcaggagaggccaatgtaccattctactatgcatcaggctcagactttgataacatgtttgtcggttcaggggcaaagagggtcagagatatcttcactgaagcaaagaacagcagtccttgcctgatatttattgatgagttggattcggttggtggcaagcgagtggactctccattgcacccttacgctagacagacaatcaaccagttactctctgaaatggatggcttcaaacaaaatgaaggaatagttgttttggctgccacaaacttcccagagtctctggatccagctcttacaagaccaggaaggtttgacatgaaagtagttgtgcctagacctgatgtcaaaggtcgccaagacatcctcgacctttacttaggacaggtcaaagtatcatcgaaggtggatgtagaaactcttgccagaggaacagttggtttcacaggggctgatcttcagaatctagtgaaccaggctgcattggaggctgctaggaagggcaaagaatcggttgaaatgaaagaccttgagttctccaaagacaaaatcctaatgggtccagaaaggaagagtgcacaggttgaccctcggaaccgtaagatcactgcctaccacgaaggaggccacgccctggtagctgtcttcaccaaagatgccaaacctatcaacaaagcaaccatcatgcccaggggaccaacacttggccatgtctcgcttctgcctgataatgaccagtggagtgagaccaaatcccagttactagcccagatggatgtgtgcatgggaggacgggtggccgaggagctcatcttcggtcccgataacatcacgacgggagcatccagtgactttgagcaagccaccaggatcgcccacctcatggtcaccaagtttggcatgagtgagaaggttggtgtaatgacgtatcaagatagagatccactggtatatggagacagcaacaagctcagccctgaaactcaacttctcattgagaatgaaatcagaacgttactcaaggactcctacgaaagagcgaggacgatcttgaagacccgtagcaaggaacataacctcttggctgaggccctcctgcagtacgagactcttaatgctgttgacatttccaaggtgatcaaaggtcaaatgttagacaaaagatga

SEQ ID NO: 60480 - protein, 733 aa, Strongylocentrotus purpuratus
MFSVSGVNAQQLVLPLPHLVAAFHSLKGGAETTALRRKQQRTPPAAPSTKRQKAEDTKFAESLSNVTLNLADVGVSSLPKDWLNSILPSITEGSNLRDRLQPQSYTSAESFFENKHGFPAAHLAIPTFNEITSSAGGLQSFRHFLDANCSSSHPLLFDQRRGFKTKRAASATELTTRKSKEEDVGLTGLFRRFTSSKDPKKKKFRETLGDALSSHNDHVADKDSFKTGYLEGYMLGKDETKKSDRFKGWTTVLIFGVLAYLYVKMVSVFARVSIIGNSNVDSMTVADVTFDDVRGADEAKNELQDIVNYLKDPSKYTVLGGKLPKGVLLQGSPGVGKTLLARAVAGEANVPFYYASGSDFDNMFVGSGAKRVRDIFTEAKNSSPCLIFIDELDSVGGKRVDSPLHPYARQTINQLLSEMDGFKQNEGIVVLAATNFPESLDPALTRPGRFDMKVVVPRPDVKGRQDILDLYLGQVKVSSKVDVETLARGTVGFTGADLQNLVNQAALEAARKGKESVEMKDLEFSKDKILMGPERKSAQVDPRNRKITAYHEGGHALVAVFTKDAKPINKATIMPRGPTLGHVSLLPDNDQWSETKSQLLAQMDVCMGGRVAEELIFGPDNITTGASSDFEQATRIAHLMVTKFGMSEKVGVMTYQDRDPLVYGDSNKLSPETQLLIENEIRTLLKDSYERARTILKTRSKEHNLLAEALLQYETLNAVDISKVIKGQMLDKR

SEQ ID NO: 60481 - DNA, 2748 bp, Strongylocentrotus purpuratus
  CDS (1)..(2748)
atgctacatgttgctccagaagccagtgcaacatatcagaatagcttcgggcatttccatcaaccggatgctaccaaaaatactcgtaaatgccccaacaccagcaagcgaatggacaaattctttgtcaagtctaaagttaggtgtgcttcggcgtgtcttcaagactttcgctgttgctccttcagcgtagcggccaagatagatgaggcaggtaacatcatgtgcgaactgtattcggtttcgcttggagagggtggagggatatctttaggggaatttgctagtagaggaaagtgtcagtatctggagctgactggggtaggatgcgggagcaatggatgcagaagaggagatgagagatgtacgatgacatactgcccatcgacttcacagagtatctccaccccgactggatcggcagaaagcgctgctagtgatggctaccaacgacgtactccgcggccgcagctgcagacaacactcggacgtggatcatttctacattttcactcacgatgtcttcagaatgcctggtcgaaaaagaaataccagagtattgtgaaggaagtatgtgcctttgatagtcttcttaagaggtctggatatcatgacaggagtgcattatccagtctccttgtatccatggataacatgaggagttttagtacttcaagtgcaatgcagcaacagagagaggatcaagatcagaaggatgatgaagatccaagtaagaaggccggtgatggggagaatatcaggatgttgattgttgtgatgctgatcctaactcttcttaaccttctctccagaggtgatgaggctcagaacatttcatggcagtcattcgtcaatgatatgcttgctaaaggagaggtgaaggatgtgtcagtaacgtattatgatactgatggcagtggagagagcaagaatcctgagtctgatgtagtccatgtcttcctgcatgatggtgctatcgtctttggtagagaggtcggaagaggacagcctaaccatttcaggatgcgtgttggcaacattcagaagtttgagcagaaactaagggaggttgaggaacagcttgggatcgcacacaaagacagaattcagatccgttaccagcattctagctctgatggaatgatgagtatcctgggaacagtccttgttctgggttttctcttctacatcatacgctcagcaatgagaggaggagggatgaatgcttttactcagctcactaaggcaaagttcacggttatagaggaaggggcttctaagggagtgtccttcaaggatgtagctggcctcaaggaagccaaggtagaagtcatggagtttgtggactatctaaagagaccagaaaagttcatggagcttggtgcaaaggtccccaaaggtgccctcctcttgggcccccctggatgtggaaagactctcctcgccaaggcagtggctactgaagccaatgtgcccttcctagccatggctggatcagagtttgtggagatgattgggggcttgggagctgctagagtacgcagcctcttcaaggaggcgcgtaacagggccccctgcatcgtctatattgatgagttggatgctatcggcaggaaacgatcagattcagctaatatgaactcgtctggtgaggaggaacagaccttgaatcagttgctggttgagatggatggaatgggaactcagaaagatgtcatcatgcttgcgtctactaacagggctgatatattagataaggctctactgcgtgccggtcgatttgatcgacacatcctcatcgatatacctaccatgattgagagaaaggagatctttgaagtctatctcaagaagctcgtcctcaaagggaaaccagcagattattccaccaggctggcgcagcttacaccaggaatgagtggagctgacatagccaacatgtgcaacgaagctgccctgcatgcagccagggaggaccacaaggctgttcacactgagagctttgaatacgctgtggagcgcatcctagcaggtgcagcaaaggctgaaaacgtgatgtccaaggaggaacgtaacgtggtggcgttccatgaatcaggacacgccctcgttggctggctgttggagcatactgatgctttgttgaaggtctccattgtaccaagggccagtgctgcactggggttcgcacagtatcttccctcggatcagaagctctactcaaaagaacagttgtttgacaggatgtgtatggcattaggaggtagagtagctgaggcaatcatcttcaacaaagttactacaggagcccaggatgacctgaacagggtcaccaagttggcttactctcagatcagatctcttggaatgaatgatgaaataggacacctatcattccctgagggtagctccagtgagctaggcaagaggccttatagtcataggctacagcatacgatggatgaggaagctaggaagttggttgctactgcatacagggctacagaatctttgctaaatcaacatgtagatacattgaaattgttgtccaaaaatctccttgaaaaggaagttctgaactacacggatgttgaagccctgattggaccgccaccatttggagaaaagaagatgatttccattgatgactttgacattatgaactataaacttcagaaagctagttcatatgagtttgcagagtcaagtgtcatcatgaagtccattgcatctgtctctgtggaatga

SEQ ID NO: 60482 - protein, 915 aa, Strongylocentrotus purpuratus
MLHVAPEASATYQNSFGHFHQPDATKNTRKCPNTSKRMDKFFVKSKVRCASACLQDFRCCSFSVAAKIDEAGNIMCELYSVSLGEGGGISLGEFASRGKCQYLELTGVGCGSNGCRRGDERCTMTYCPSTSQSISTPTGSAESAASDGYQRRTPRPQLQTTLGRGSFLHFHSRCLQNAWSKKKYQSIVKEVCAFDSLLKRSGYHDRSALSSLLVSMDNMRSFSTSSAMQQQREDQDQKDDEDPSKKAGDGENIRMLIVVMLILTLLNLLSRGDEAQNISWQSFVNDMLAKGEVKDVSVTYYDTDGSGESKNPESDVVHVFLHDGAIVFGREVGRGQPNHFRMRVGNIQKFEQKLREVEEQLGIAHKDRIQIRYQHSSSDGMMSILGTVLVLGFLFYIIRSAMRGGGMNAFTQLTKAKFTVIEEGASKGVSFKDVAGLKEAKVEVMEFVDYLKRPEKFMELGAKVPKGALLLGPPGCGKTLLAKAVATEANVPFLAMAGSEFVEMIGGLGAARVRSLFKEARNRAPCIVYIDELDAIGRKRSDSANMNSSGEEEQTLNQLLVEMDGMGTQKDVIMLASTNRADILDKALLRAGRFDRHILIDIPTMIERKEIFEVYLKKLVLKGKPADYSTRLAQLTPGMSGADIANMCNEAALHAAREDHKAVHTESFEYAVERILAGAAKAENVMSKEERNVVAFHESGHALVGWLLEHTDALLKVSIVPRASAALGFAQYLPSDQKLYSKEQLFDRMCMALGGRVAEAIIFNKVTTGAQDDLNRVTKLAYSQIRSLGMNDEIGHLSFPEGSSSELGKRPYSHRLQHTMDEEARKLVATAYRATESLLNQHVDTLKLLSKNLLEKEVLNYTDVEALIGPPPFGEKKMISIDDFDIMNYKLQKASSYEFAESSVIMKSIASVSVE

SEQ ID NO: 60483 - DNA, 2346 bp, Tribolium castaneum
  CDS (1)..(2346)
atggcatatcgtctcattagtagcagcaaaaaactggaaaaattgctatttagaaacttgaaacaatgcaactttaacataagcaaagagaattcgacgtttcaagccgttctaaaccagtggagactcttttgcgaaaagcctcctaaaggtttcgaaaaatatttcgaacccggctcgaaacagaagggcaaaagttcgaaaactgagcctccgaaggaggccaaagaagcgaagaaagatggcaagcaggagcagccaaagccgcccccgaagaccccaagcggtcagcaggggcagaagccgtacgaccagtggtctttcgggcttttcgggggcacagggagccgggggagtggcggcaagcccttcggggacggcgaccgggacaagtggtacattctgggggcgggggcggccattgcgttcctagccactgtgaccatgtgggagatggggtacaaggagatcagctggaaggagtttgtacaaagttacttaacacgagggattgtagaaaagttagaggttgttaataagaagtgggtcagagtgaggcttctccctgggaataccattgacggtgctaattttgtatggtttaatattggtagtgtagattcgtttgaacgcaacttagaaaatgcccagattgagatgaacgtagagccacctaattttgtaccagttatttacaagactgaagtggaagctgcaagtttgtccggggttttacccacaattctagttattggatttttgatctacatgatgagacgatctgccgaaatgatgggcggcggcaaggggaagaggaaaggcctttttggcagtgtaatggaaagcacagccaaattaatcaattccaatgaaattggagtcagattcaaagacgtcgctggttgtgaggaggctaaaatcgaaatcatggaattcgtcaacttcctcaaaaaccctcaacaatacatcgacctcggggccaaaatccccaaaggcgccatgttgacaggcccacctggcaccggtaaaaccctcctagccaaggccaccgcaggtgaagccaacgtcccgttcatcacagtttccgggtccgaattcctggaaatgttcgtaggtgtgggtccatcccgtgtacgcgacctcttctccatggcccgcaaacacgctccttgtatcctgtttattgacgaaatcgacgccgtgggccgaaaacgcgggggtcgcagttttgggggccactcagagcaggaaaacaccctgaaccagcttctggtggaaatggacggttttaacacaacgacaaatgttgtggttttggcggcaacaaatcgtatagatatcttggacaaagccttgctaaggcctggccgtttcgaccggcaaatcttcgtcccggcccccgatatcaaagggcgcgctagcattttcaaagtccatctagggcccttgaaaacaaacttggacaaaagcgagttggcgcgcaaaatggccgccctcacgccgggattcaccggcgccgacattgccaatgtttgcaacgaggcggcgctgatcgcggcgcgagatttgaacgagtcgatcaatatgaagaatttcgagcaagcgattgagcgagtggtcgccgggatggagaaaaagaccaatgttttgtcgcccgaggagaagaagacagtggcgtatcacgaagctgggcatgctgttgctgggtggtttctacgctacgccgatccgctcctcaaagtttcgataatcccgcgtggaaaaggcctgggttatgcgcagtatttgcccaaagaccagtatttgtacacgaaggagcagctcttcgaccgcatgtgcatgacgctcggggggcgcgtctccgaggagcttttcttccagaggattaccactggggctcaggacgatttgaagaaggtgacgcagagtgcgtatgcacaagtcgtgcattatggcatgaatgagaaggtggggaatgttagtttcgatatgccgagggagggggaaatgatgttggaaaaaccctactcggagagtacagcacagatgattgatgtcgaagttaggaatttgattgaccaggcgtataaacgaaccactgcgcttctgacggagcacaaggagaacgtggccagagtggcggagcgactcctgaagcaggagattatcagtcgggaggatatgatcgagttgttggggaagaggccgttcccggaaaagtcgacctatgaggagtttgtggaagggacggggtcgttggaggaggatacgagtttgccggaaggcttgaaggattggaataaggagaaggcggccgagcaacagccgcagaaatcgcaggcttga

SEQ ID NO: 60484 - protein, 781 aa, Tribolium castaneum
MAYRLISSSKKLEKLLFRNLKQCNFNISKENSTFQAVLNQWRLFCEKPPKGFEKYFEPGSKQKGKSSKTEPPKEAKEAKKDGKQEQPKPPPKTPSGQQGQKPYDQWSFGLFGGTGSRGSGGKPFGDGDRDKWYILGAGAAIAFLATVTMWEMGYKEISWKEFVQSYLTRGIVEKLEVVNKKWVRVRLLPGNTIDGANFVWFNIGSVDSFERNLENAQIEMNVEPPNFVPVIYKTEVEAASLSGVLPTILVIGFLIYMMRRSAEMMGGGKGKRKGLFGSVMESTAKLINSNEIGVRFKDVAGCEEAKIEIMEFVNFLKNPQQYIDLGAKIPKGAMLTGPPGTGKTLLAKATAGEANVPFITVSGSEFLEMFVGVGPSRVRDLFSMARKHAPCILFIDEIDAVGRKRGGRSFGGHSEQENTLNQLLVEMDGFNTTTNVVVLAATNRIDILDKALLRPGRFDRQIFVPAPDIKGRASIFKVHLGPLKTNLDKSELARKMAALTPGFTGADIANVCNEAALIAARDLNESINMKNFEQAIERVVAGMEKKTNVLSPEEKKTVAYHEAGHAVAGWFLRYADPLLKVSIIPRGKGLGYAQYLPKDQYLYTKEQLFDRMCMTLGGRVSEELFFQRITTGAQDDLKKVTQSAYAQVVHYGMNEKVGNVSFDMPREGEMMLEKPYSESTAQMIDVEVRNLIDQAYKRTTALLTEHKENVARVAERLLKQEIISREDMIELLGKRPFPEKSTYEEFVEGTGSLEEDTSLPEGLKDWNKEKAAEQQPQKSQA

SEQ ID NO: 60485 - DNA, 2151 bp, Tribolium castaneum
  CDS (1)..(2151)
atgttttcactccagaaccaaaaccaggcaatcttcactctctcccaaatctccgcgataataaccccccgtcagaatgccttcctgaccaaaaaagcccacaaagacaaatcgcaaatcatgtgcaaggaaagcttcctggaggcgctcaaaaactgcgacttctccttcaccaagcacctcaaagacacctcattcctcaacaacttcaaagtctcgtacgtctcgcacgacactttcttcgaaaacaaacacggtttctccgaagccgacttaaagagcgcagttccaaccctcatagtcaaaaatcgcaaacacttctacgtcccccaaaacttctaccagaagctaatccacggtttgcggcacgaaaacgccttcacgttcgacatccaagtgcggggcttcaagacagaccgcagtgtcaaggcggaaatgcagcgaaatccgggcctgggcgcccgcatcaaaaacgccctagggctgaccccaagcgagaatttggactcgaaattggccaaagacttgtcgttgggcaacgaaaagatgaaacagattttcgcagccgaggggaattcaatgacagaggcggaaaaacaaaggattaaggtggcttttgccgagggctatctcttggccaatagcccgggggcgcggacgggcaaagccgcgcggtattttaaggtgtttcagcaggtgttgaccattgtgatcttcctagccattgttattagtttgatggtcagtacaacgggctcgatttttagaattcaattagggaatcaagtggaggtggaccctgaggagatacatgtgacttttgatgacgtcaagggggctgatgaggccaaacaagagcttaaagacgtagttgagtttttgaaaaatcccgataaattttcacaattagggggcaaactaccaaagggggtgttgttagtagggcctccaggtactggtaaaacacttctagctagggctgtggctggtgaggcgggtgtgcccttttttcacgctgcagggccggaatttgatgaaattttggtggggcaaggggctaggcgtgtccgggatttatttaagtctgccaaagaaaaggccccctgtgtgattttcatcgatgaaatcgattcagttggtgcgaaacggacgaatagtgttttacatccgtatgcaaatcaaacgattaatcaacttttgagcgaaatggacggttttcatcaaaacgagggggttattgttttgggggcaactaatcgaagggatgatttagatcaagccttgctgagaccgggacggtttgatgttgaggtcacggtccctacgcccgatttcaccggccggaaagaaatcctgggcctctatttgggcaaagtccttgccaaggacgtggatttggaactcttggcccggggaaccaccggttttacgggcgcagacctcgaaaacatggtcaatcaagctgctctcaaggctgccatcgatggggccgattgcgttagcatgaaatacctcgaatcggcgcgcgataaagtcttaatgggccccgaacgcaaatcacgaattcccgacgaagaagccaaccttataacagcgtaccatgaagggggccacgcgattgtggcgttctacacgcgtgacagccatccgttgcataaagttacgataataccgagggggcccagtttggggcacacggcctacattccggagaaggagcgctatcatgtgaccaaatcgcaacttttggcaacgatggatgtcatgatggggggcagagccgccgaagagctgattttcgggacggaaaaaatcacctcaggggcgagctcggatttgaagcaagcgacgtccatagccacccatatggtgaaggactggggcatgtcggagaaaatcggcctgaggacgatgactgaaagctcgaagccgttccaaggcgacagtttggggccgtcgactaacgaactcgttgatagcgaaattaggagaattctgtcagaaagttacgacagagccaaacatattctcaaagcgcatgccaaggaacataaggccttagccgaggctttgatgaagtacgagacgttagatgcggaagatattaaagccataatgacagaaaaagggccacatgttgaaaaatcttaa

SEQ ID NO: 60486 - protein, 716 aa, Tribolium castaneum
MFSLQNQNQAIFTLSQISAIITPRQNAFLTKKAHKDKSQIMCKESFLEALKNCDFSFTKHLKDTSFLNNFKVSYVSHDTFFENKHGFSEADLKSAVPTLIVKNRKHFYVPQNFYQKLIHGLRHENAFTFDIQVRGFKTDRSVKAEMQRNPGLGARIKNALGLTPSENLDSKLAKDLSLGNEKMKQIFAAEGNSMTEAEKQRIKVAFAEGYLLANSPGARTGKAARYFKVFQQVLTIVIFLAIVISLMVSTTGSIFRIQLGNQVEVDPEEIHVTFDDVKGADEAKQELKDVVEFLKNPDKFSQLGGKLPKGVLLVGPPGTGKTLLARAVAGEAGVPFFHAAGPEFDEILVGQGARRVRDLFKSAKEKAPCVIFIDEIDSVGAKRTNSVLHPYANQTINQLLSEMDGFHQNEGVIVLGATNRRDDLDQALLRPGRFDVEVTVPTPDFTGRKEILGLYLGKVLAKDVDLELLARGTTGFTGADLENMVNQAALKAAIDGADCVSMKYLESARDKVLMGPERKSRIPDEEANLITAYHEGGHAIVAFYTRDSHPLHKVTIIPRGPSLGHTAYIPEKERYHVTKSQLLATMDVMMGGRAAEELIFGTEKITSGASSDLKQATSIATHMVKDWGMSEKIGLRTMTESSKPFQGDSLGPSTNELVDSEIRRILSESYDRAKHILKAHAKEHKALAEALMKYETLDAEDIKAIMTEKGPHVEKS

SEQ ID NO: 60487 - DNA, 1968 bp, Leptospira interrogans serovar Copenhageni str. Fiocruz L1-130
  CDS (1)..(1968): transl_table=11
atgaataaaaatttaaaaaacgtatttttcgttttaattattatgatggtcgttttgatcatcgcctacaactacgaaaataatgcaggcgctaccaaagatatttcttattcagactttttgaatatgttagaaccggtagaaggtaaaaaacctctcggtaaactatataagggaaacgttgacaaatacaacaaaatccaaattgaaaaggacgtaatcgaaggttattatattccttccgaatatgccgattcaaaaaccgctaaaccggttaagtttagaacgacggttgctcctttagacaaggatttaatttcttctttaagaagagctaatgtttcttttgacgctcgttctgcggaagaaggaaaattttggagcgtgatcggaagtaatattttactcatagtaattttgatcggtcttttttggtttattatgatgagacagattcagtctactggaaacaaggcgttctcctttggtaaatccaaagcgaagatgactatggatccgaaagtaaaagttacttttgaagatgtggcgggttgcgaagaagcaaaagaagaattagtcgaaatcattgaattccttaaagatcctaaaaagtttcatgcaatcggtgcgagaattcccaccggtgttttgttagttgggcctcctggaactggtaaaaccttacttgcaagagctgttgctggagaagcgggagttcctttcttttccatttcgggatcggacttcgtagaaatgttcgtcggggttggtgcttcgagggtcagggatctattcgatcaaggtaaaaagaattctccttgtatcatatttatagacgagatagatgccgtgggtcgtttaagaggtgccggacttggtggtggtcacgacgaaagagaacaaactctaaaccagatgcttgttgagatggacggctttgaaaagaacgaaggtgtaattgtaatggctgcaactaaccgtgcagatgttttagacccggctcttctccgtccgggtcgttttgatcgtcaggttatggtggatcttccggatattaaagggagagaagaaattctcaaagttcattctcgtaaagttccgatgaccagtgatatttctcttcattcgattgcgagagggaccccaggttttacaggagcggatctcgcgaatctcatcaatgagggagcgttgcttgcggcccgtaaaaataaaaaaagagtcactcaggaagaattagaagaggcacgcgataaagtaatgatgggtcctgagagaaaatcgttctttatttccgagaaagaaaaagaagtgatcgcttaccatgaagcgggacatgcgatcctgggaactcttcttccttatacagaaccagttcataaagttacgatcattccgagaggacgtgccctcggtctaactcaatctttaccaaaagaagataagcatattcttcctaaaacgtattggttggatcagatcgtagtagcaatgggtggatttatcgccgaagaatttaagtttggggttacttctaccggatccagcaacgatattcagcaagcttcgaatatcgcgcgtaagatggtttgcgaatgggggatgtcggaaaaactcggaaccgtaaattatagtggcgatcaagctaatgtttttattggaagagatatgggtcatagcagtaaatattattctgaagaatttgctgcgatgatcgacaaagaggtccgtgaaattattcaaacttgtttgaacaaaggaagggatcttgttcgcaaaaatgcctctaagtttgaaggtttagcgaaagctcttcttgccaaggaaaccatctctcacgacgaattgatgacgattgttcatcctgcaaatgaagaaggaaccaaaaaaaaaccggaaaaaacagtaaaatctaaaaaacaaaatgggattaaaacgaatccagcttataacgccggaatggaatga

SEQ ID NO: 60488 - protein, 655 aa, Leptospira interrogans serovar Copenhageni str. Fiocruz L1-130
MNKNLKNVFFVLIIMMVVLIIAYNYENNAGATKDISYSDFLNMLEPVEGKKPLGKLYKGNVDKYNKIQIEKDVIEGYYIPSEYADSKTAKPVKFRTTVAPLDKDLISSLRRANVSFDARSAEEGKFWSVIGSNILLIVILIGLFWFIMMRQIQSTGNKAFSFGKSKAKMTMDPKVKVTFEDVAGCEEAKEELVEIIEFLKDPKKFHAIGARIPTGVLLVGPPGTGKTLLARAVAGEAGVPFFSISGSDFVEMFVGVGASRVRDLFDQGKKNSPCIIFIDEIDAVGRLRGAGLGGGHDEREQTLNQMLVEMDGFEKNEGVIVMAATNRADVLDPALLRPGRFDRQVMVDLPDIKGREEILKVHSRKVPMTSDISLHSIARGTPGFTGADLANLINEGALLAARKNKKRVTQEELEEARDKVMMGPERKSFFISEKEKEVIAYHEAGHAILGTLLPYTEPVHKVTIIPRGRALGLTQSLPKEDKHILPKTYWLDQIVVAMGGFIAEEFKFGVTSTGSSNDIQQASNIARKMVCEWGMSEKLGTVNYSGDQANVFIGRDMGHSSKYYSEEFAAMIDKEVREIIQTCLNKGRDLVRKNASKFEGLAKALLAKETISHDELMTIVHPANEEGTKKKPEKTVKSKKQNGIKTNPAYNAGME

SEQ ID NO: 60489 - DNA, 1854 bp, Prochlorococcus marinus str. AS9601
  CDS (1)..(1854): transl_table=11
gtgaacaaacgttggagaaacgtaggactttacgttctagctgttattactgtaattttcattggtacctcagtttttgataaacctaatactgaaagttctacaaagaccttgagatatagtgattttatagaggcagttcaagataaagaaatcagtagagtcctaatatctccagataatgccacagctcaagttgttgaaaatgatgggagcaggtctgaggtcaatttagcccctgacaaagatttattaaaaatactgactgagaataatgtagatatagctgtaactcctacaaaattagccaatccatggcaacaagctataagtagcttaatttttccagtacttttgatcggaggcctattttttcttttcagaagatcccaaagcggtaatgctggaggtggtaaccctgccatgagttttggtaaaagcaaagctagattgcaaatggaaccatctacacaagtaaccttttcagatgttgcaggtgttgaaggggcaaaattagaacttacagaagttgtagattttcttaagagcccagatagatttactgcagtaggagcaaaaattccaaaaggagttcttcttgttggccctcctgggacaggaaaaacattattagcaaaagcagtagctggagaagcaggtgtaccttttttctcaatatctggttcagaatttgtagagatgtttgtaggagttggagctagcagagttagagatctttttgaacaagctaaaaagaatgctccttgtattgtttttattgacgaaatagatgcagttggaagacaaaggggtgctggtatgggcggaggaaatgatgaaagagagcaaacattaaatcaactcctaactgaaatggatggtttcgaaggtaattcaggaataataatagttgctgccaccaacagaccagatgtcttagattcagctttaatgcgtcctggaagattcgatagacaggtaacagtagatagaccagattatgctggaagattgcagatattaaatgttcatgcgaaagataaaactctttcaaaagacgtagatttagataaagttgctagaagaacaccaggatttactggtgcagatttagctaacctcttaaatgaagcagcaatattagcagctagaaaagatttagataaagtaagtaacgatgaagtcggtgatgccattgaaagagttatggctggcccagaaaagaaagatagagtcatcagtgataagaaaaaagaattagttgcttatcacgaagctggtcatgcactcgttggagcattaatgcctgattatgatccagtagcaaaagtttcaattattccaagaggtcaagctggaggtctaaccttctttactccaagtgaagaaagaatggaatctggtctttactcacgttcttaccttcaaaatcaaatggctgtagctcttggtggaagagttgctgaagaaattgtttatggagaagaagaagtaacaactggagcttcaaatgatttacaacaagttgctaatgtagcaagacaaatgatcactaaattcggcatgagtgacaaaataggtcctgtcgctctaggtcaatctcaaggtggaatgtttctaggaagagatatgagctctacaagagatttctctgaagacacggccgcaacaattgatgtagaggtttcagaacttgttgatgttgcctataagagagctacaaaagttttatcagataacagaacagttctagacgaaatggctcaaatgctaattgaaagagaaactatagatactgaagatatccaagatttgcttaaccgctcagaagtaaaagtcgcaaactatatttaa

SEQ ID NO: 60490 - protein, 617 aa, Prochlorococcus marinus str. AS9601
MNKRWRNVGLYVLAVITVIFIGTSVFDKPNTESSTKTLRYSDFIEAVQDKEISRVLISPDNATAQVVENDGSRSEVNLAPDKDLLKILTENNVDIAVTPTKLANPWQQAISSLIFPVLLIGGLFFLFRRSQSGNAGGGNPAMSFGKSKARLQMEPSTQVTFSDVAGVEGAKLELTEVVDFLKSPDRFTAVGAKIPKGVLLVGPPGTGKTLLAKAVAGEAGVPFFSISGSEFVEMFVGVGASRVRDLFEQAKKNAPCIVFIDEIDAVGRQRGAGMGGGNDEREQTLNQLLTEMDGFEGNSGIIIVAATNRPDVLDSALMRPGRFDRQVTVDRPDYAGRLQILNVHAKDKTLSKDVDLDKVARRTPGFTGADLANLLNEAAILAARKDLDKVSNDEVGDAIERVMAGPEKKDRVISDKKKELVAYHEAGHALVGALMPDYDPVAKVSIIPRGQAGGLTFFTPSEERMESGLYSRSYLQNQMAVALGGRVAEEIVYGEEEVTTGASNDLQQVANVARQMITKFGMSDKIGPVALGQSQGGMFLGRDMSSTRDFSEDTAATIDVEVSELVDVAYKRATKVLSDNRTVLDEMAQMLIERETIDTEDIQDLLNRSEVKVANYI

SEQ ID NO: 60491 - DNA, 1848 bp, Prochlorococcus marinus str. MIT 9303
  CDS (1)..(1848): transl_table=11
ttggataaacgctggcgcaacgtaggtctttacgttcttctggtggtcgtggttgtcgtggtcggcacggccttcctcggcaaacctggtacgactgagcgggagactctccgctacagcgaatttgttgaagcagttcaggacaaccaagtgagtcgtgtgctgatctccccagaccaggccaccgctcaggttgttgaaagcgatggtcgacgcgcggatgtcaaccttgcccctgacaaggaccttttgaagttgttaacggatcacaacgttgatattgctgttcaaccaacccgccaggcaggtgcttggcaacaggccgccggaagtttgattttccccttgttgttattgggtggacttttctttctcttcagacgttctcagagtggtggcggcggtggtaaccctgccatgaattttggcaagagcaaggccagagttcagatggagccgtccactcaggtcacctttagtgatgttgctgggatcgaaggggcaaagcttgaacttaccgaagtcgttgactttctcaaaaaccctgatcgatttactgctgttggcgcaaaaatccccaaaggtgttctgcttgtaggccctcctggaactggcaaaacattgctagccaaagcagtggctggtgaagcggcggtgccgttcttctcgatttcaggctcggagtttgtcgagatgtttgttggggttggcgccagtcgagtccgtgacctatttgagcaggccaagaagaacgctccttgcattgttttcattgatgaaattgatgcggtgggtcggcagcggggcgctggccttggcggtggcaacgatgagcgtgagcagactcttaaccagctgctgactgaaatggatggtttcgagggcaataccggcatcatcatcgtggcggccaccaatcggcctgatgtgctcgattcggcgttgatgcgccctggtcgctttgaccgacaggttgttgtggagcgccctgattacagcggtcgcctgcagatcctcaatgtgcatgcccgcgataagaccctgtccaaggatgttgatctcgacaaagtggcgcggcgcacaccaggcttcacaggggctgatcttgccaatttgctcaatgaagcggcaatcctcgcagctcgtcgagagctcacagaagtgagcaatgatgagattagcgacgccattgagcgggtcatggctggtcctgagaagaaggatcgtgtcatgagtgaacggcgtaagcaactggttgcttatcacgagtctggtcatgccctggtaggagcccttatgcctgattacgactcagtgcagaagatttccatcattcctcgtggtcaggctggtggtctcacattcttcaccccgagtgaggagcggatggagtctggtctctattccagggcttatttgcagaaccagatggctgttgctctgggtggtcgagttgcagaagaaatcgtctacggcgaagacgaggtgaccactggtgcatccaatgaccttcaacaggtcgctcaggtcgccaggcagatggtgacgaggttcgggatgagcgacaagcttggtccagtcgctttggggcggtctcagggagggatgttccttggtcgtgacatcgcctctgaacgcgatttctctgaagacactgcagcgattatcgatgcagaggtctctgatctggttgatgtggcttacaagcgtgccaccaaagtcttgatcgagaatcgttctgttcttgatgagttagcggatttgcttgtcgagaaggaaactgttgatgctcaggatttgcaggacttgctgatccgacgcgatgtcagggttgctgaatacgtctga

SEQ ID NO: 60492 - protein, 615 aa, Prochlorococcus marinus str. MIT 9303
MDKRWRNVGLYVLLVVVVVVVGTAFLGKPGTTERETLRYSEFVEAVQDNQVSRVLISPDQATAQVVESDGRRADVNLAPDKDLLKLLTDHNVDIAVQPTRQAGAWQQAAGSLIFPLLLLGGLFFLFRRSQSGGGGGNPAMNFGKSKARVQMEPSTQVTFSDVAGIEGAKLELTEVVDFLKNPDRFTAVGAKIPKGVLLVGPPGTGKTLLAKAVAGEAAVPFFSISGSEFVEMFVGVGASRVRDLFEQAKKNAPCIVFIDEIDAVGRQRGAGLGGGNDEREQTLNQLLTEMDGFEGNTGIIIVAATNRPDVLDSALMRPGRFDRQVVVERPDYSGRLQILNVHARDKTLSKDVDLDKVARRTPGFTGADLANLLNEAAILAARRELTEVSNDEISDAIERVMAGPEKKDRVMSERRKQLVAYHESGHALVGALMPDYDSVQKISIIPRGQAGGLTFFTPSEERMESGLYSRAYLQNQMAVALGGRVAEEIVYGEDEVTTGASNDLQQVAQVARQMVTRFGMSDKLGPVALGRSQGGMFLGRDIASERDFSEDTAAIIDAEVSDLVDVAYKRATKVLIENRSVLDELADLLVEKETVDAQDLQDLLIRRDVRVAEYV

SEQ ID NO: 60493 - DNA, 1818 bp, Clostridium difficile 630
  CDS (1)..(1818): transl_table=11
atggatgaacataaaccccaaaaaaggtcagcactctattattatacagttataataatagtagtaatgtttttaaatgctttaatatttccaagtttaatggataaaaaaatggttgagattgactatggaaagtttctcacaatgttggatacaggaaaggttaaatctgttgagatagaaaataatagaatagcaataaatccatctagtagcaaggataagaatatatacataactggtagaatggatgacccagaattggtagatagactaaaaaatgcaaaagtagaatttactaaggttattcctaaggaaaattcacctcttttaagtattttacttacatggataatacctataggtattcttatgctatttggtaacttaatgatgaagtctatgcaaaagcgaatgggtggtaatgctatgcaatttggaaaaagcaacgccaaaatgtatgtatctgctcaaagtggaaaaagatttaatgatgtagctggtcaagatgaggcaaaagaagctttaactgaaatagtagatttcttacacaatccagaaaagtataaaaagataggagcacaaatgcctaaaggagcacttttagtaggacctccaggtacaggaaaaacactccttgcaaaagctgtagcaggtgaagcaaatgtaccatttttctcaatatctggttctgagtttgttgagatgtttgtaggaatgggagcttctaggattcgtgatttatttaaacaagcaaaagaaaaagctccatgtatagtgtttatagatgagattgatactattggtaaaaagcgtgataatggaagtggattaggtggaaatgatgaacgtgaacaaactttaaatcagttgttaagtgagatggatggttttgatggtggaattggagtagtaatacttgctgctacaaatagacctgacagtcttgacaaagcattacttcgtccaggaagatttgatagacgtataccagttgaacttccagaccttggaggacgtgaagctatattaaaggtacatgctcaaaatgtaaatgtaagctcagatatagattataatgcaattgcaaggtctacatcaggagcatcaggtgcagaacttgcaaatattgtaaacgaagcagcacttttagcagttaagtctggcagagatatagtagaacaacaggattttgatgaatctgttgaaactgtaattgctgggtatcaacgtaaaggagctgtaatttcagataaggaaaagaaaattatagcatatcatgaaataggtcatgcacttgttgctgctatgcaaaaacattctgcacctgtccataagattactataatacctagaacttcaggagcattgggatatactatgcaagttgctgaagatgagagtgtacttatgtctaaagaagaagcaattgataaaataactacttttacaggtggtcgtgctgctgaagaggttatctttaacacttgtacatcaggagcatcaaatgatatagaacaagctactaaaattgcaagagctatggttactcgccttggtatgagtgaagagtttgatatggtcgctcttgaaactgtaagcaatcaatatttaggaggagatacttctcttgcttgttcttccgacactgctgctaaaatagatgaagaggtatttaaaatagtaaaggcttgtcacaaaaatgcaattgaaatcttagaaaataatattgataaattgcatgaacttgctaattatttattagaaaaagaaactattacaggtgatgagtttatggaaatacttaacttaaactaa

SEQ ID NO: 60494 - protein, 605 aa, Clostridium difficile 630
MDEHKPQKRSALYYYTVIIIVVMFLNALIFPSLMDKKMVEIDYGKFLTMLDTGKVKSVEIENNRIAINPSSSKDKNIYITGRMDDPELVDRLKNAKVEFTKVIPKENSPLLSILLTWIIPIGILMLFGNLMMKSMQKRMGGNAMQFGKSNAKMYVSAQSGKRFNDVAGQDEAKEALTEIVDFLHNPEKYKKIGAQMPKGALLVGPPGTGKTLLAKAVAGEANVPFFSISGSEFVEMFVGMGASRIRDLFKQAKEKAPCIVFIDEIDTIGKKRDNGSGLGGNDEREQTLNQLLSEMDGFDGGIGVVILAATNRPDSLDKALLRPGRFDRRIPVELPDLGGREAILKVHAQNVNVSSDIDYNAIARSTSGASGAELANIVNEAALLAVKSGRDIVEQQDFDESVETVIAGYQRKGAVISDKEKKIIAYHEIGHALVAAMQKHSAPVHKITIIPRTSGALGYTMQVAEDESVLMSKEEAIDKITTFTGGRAAEEVIFNTCTSGASNDIEQATKIARAMVTRLGMSEEFDMVALETVSNQYLGGDTSLACSSDTAAKIDEEVFKIVKACHKNAIEILENNIDKLHELANYLLEKETITGDEFMEILNLN

SEQ ID NO: 60495 - DNA, 1995 bp, Clostridium difficile 630
  CDS (1)..(1995): transl_table=11
atgtatgaaaggagggcttctatattgaataagttgctaaaaggggcaggtttttatctacttgtttttataattatagtaggtatagttcaattctcaggtaagcctacagaaaaaataaaagatttaaaattctctgaagtatatagagaattaacagatgagaatatatcaagattatactttgtaaatcaaacttctgtagaaggtactataaaagatacaaatacaaagtttaagtcatatgttccaacagaagtgatgggaaataaacttgcagatgaggtgttagaccaagctaaggctgggaaactaacttttggtggtgaagctaagccatctacaccttggtttgtcgaaatgttgcctacattactgttaatattcttcatggtgattatttggttcgtgtttatgaatcagtctcaaggtggaggcggaaaggttatgagttttggcaaatcaaaagctaaggttcataaagatgatgaaaaaactagagttacatttaaagatgtagctggactagatgaggaaaaagaagatttgcaggaggtagtagatttcttaaagaatcctaagaaatatattgaattgggtgcaagaataccaaaaggaatgcttatggtaggacctcctggaactggtaaaacatatctatcaagagcagttgcaggagaagcaggagttccctttttcagtataagtggttctgatttcgttgagatgtttgttggggttggtgcttcaagagtaagagatttatttgaacaggctaagaaaagtgctccagctatcatattcatagatgaaattgatgcagttggtagaaaaagaggtgcaggtcttggtggaggtcatgatgaaagagagcaaactcttaatcaacttctagttgaaatggatggatttggggtaaatcaaggtataataatcatggcagctacaaatagaccagatatacttgacccagctttacttagaccaggaagatttgacagacaagttgttgttggtacaccagatgtaaaaggtagagaggctatatttaaagttcactcaagaaataaaccattaagtgatgatgtaaaaatggatgtcttggctagaagaacaccaggatttactcctgctgatatagagaacttaatgaatgaggctgcaatattaacagctagaaaaagagaaaagaaaattaagatggaaactatagaagaagctataacaaaggttatagcaggtgtggctaaaaaatcgaaagtaataagtgagaaagaaagaagacttacagcataccatgaaggagggcatgcagtttgtgcccatgtacttgaagaagtaagtcctgttcatcaagttacaatagttccaagaggaagagctggagggtttacaatgcaacttcctgttgaagataagttctatgctacaaaaaatgaaatgaaagaaaatattgtagttttacttggtggtagagtagcagaagagctagtacttaaggatgtatctacaggtgcttcaaatgacttagaaagagttacagctactgcaagaagtatggtaacaaagtatggaatgagttctaaacttggtccaatgtcatttgacagtgatgatgaagtattcctaggtaatagtttttcaagtaagagaaattattctgaagaagttgcttttgagatagaccaagaaacaaagcgtatagttgatggtgcatatgataagacaagaagtatattacaagaaaatatggatagattagagtatgtagcacaagctttacttatatatgaaactttagatgcagaacaatttgtaaaagcatttaataaagagttacctctgaacgaaattgaaaatgcagttacagaggaaaattcttctaaagaagttgaagaacaattaactataaaattagaaaaagatgaagaagaaagaaacaatgttattgatataaataaaaatttagaagataaatctgataaagataaatag

SEQ ID NO: 60496 - protein, 664 aa, Clostridium difficile 630
MYERRASILNKLLKGAGFYLLVFIIIVGIVQFSGKPTEKIKDLKFSEVYRELTDENISRLYFVNQTSVEGTIKDTNTKFKSYVPTEVMGNKLADEVLDQAKAGKLTFGGEAKPSTPWFVEMLPTLLLIFFMVIIWFVFMNQSQGGGGKVMSFGKSKAKVHKDDEKTRVTFKDVAGLDEEKEDLQEVVDFLKNPKKYIELGARIPKGMLMVGPPGTGKTYLSRAVAGEAGVPFFSISGSDFVEMFVGVGASRVRDLFEQAKKSAPAIIFIDEIDAVGRKRGAGLGGGHDEREQTLNQLLVEMDGFGVNQGIIIMAATNRPDILDPALLRPGRFDRQVVVGTPDVKGREAIFKVHSRNKPLSDDVKMDVLARRTPGFTPADIENLMNEAAILTARKREKKIKMETIEEAITKVIAGVAKKSKVISEKERRLTAYHEGGHAVCAHVLEEVSPVHQVTIVPRGRAGGFTMQLPVEDKFYATKNEMKENIVVLLGGRVAEELVLKDVSTGASNDLERVTATARSMVTKYGMSSKLGPMSFDSDDEVFLGNSFSSKRNYSEEVAFEIDQETKRIVDGAYDKTRSILQENMDRLEYVAQALLIYETLDAEQFVKAFNKELPLNEIENAVTEENSSKEVEEQLTIKLEKDEEERNNVIDINKNLEDKSDKDK

SEQ ID NO: 60497 - DNA, 1908 bp, Herminiimonas arsenicoxydans
  CDS (1)..(1908): transl_table=11
gtgaataacatgttttccaaagccgccatctgggtggtgatcgggatggtacttttcaccgtattcaagcagttcgatggccgtactgtatcgggtgcggcgacggcgattccctattcggatttcctggacgaagtaaaaagcaagcgcatcaaagaagccacgattgaagatcgcacgattgttgcgactactaccgagggcaagaaagttaaatccgcgattacctatctggatcgcggtctgatcggtgatctggtcaacaatggcgtgaagttcgacgtcaagcaaccggaagaacaatccttcctttcgcaaattttcatttcctggttcccgatgctgttgctgatcggtgtctgggtctttttcatgcgacagatgcagggtggcggcaagggcggggcgttctccttcggcaagtccaaggcgcgtctgctggatgacacgacgaataccgtgacctttgcagatgttgccggttgtgacgaggcaaaagaagaagtgactgaactggttgagtttttgcgcgatccgactcgtttccagaaactgggtggacgcattccacgcggcgtgctgctggtgggccctccaggtacgggtaaaaccttgctggcacgtgcgattgcgggtgaagccaaggttcctttcttttccatttcgggttcggatttcgtcgagatgtttgtcggcgtcggtgcatcgcgcgtacgcgacatgttcgataacgcaaaaaaacacgctccctgcatcatctttatcgatgagatcgatgcggttggtcgtcatcgcggcgccggtatgggcggcggtaatgatgagcgtgaacaaacgctgaatcagatgctggtcgagatggacggttttgagcctaacgctggcgtgatcgtggtcgccgcaaccaaccgcgctgacgtgctggataaagcattgctgcgtccaggtcgttttgatcgacaggtgatcgttggtttgcctgacattcgtggtcgcgaacagatcttgatggtgcacatgcgcaaggtgcctatcgcgactgacgttaaagccgatattcttgcacgcggcacaccaggcttctccggcgctgatctggccaatctggtcaacgaagctgccttgtttgctgcacgtcgcaacaagcgtctggtcgagatgcaggatttcgaagatgcgaaagacaagatcgtcatgggcccggaacgcaagtcggctgtcatgcgcgaagaagagcgtcgcaatacggcttaccatgagtccggtcacgcagtcgttgccaagctcttgcctaaagcagatccggtacataaagtcaccatcatgccgcgtggctttgcactcggtttgacctggcaattgcctgagcatgatcgcgtcaatatgtacaaggacaagatgctggaagaaatttccatcctgttcggcgggcgtattgcggaagaggttttcatgcaccagatgtcgaccggcgcatcgaatgactttgaacgtgccaccaagctggcgcgtgcgatggtgacgcgttacggcatgtcggaaagcctgggtacgatggtgtacgaagataccgagcaggatgcctatttcggacgttcgtcggcaaaaaccgtttctgaagcgacgcagcaaaaagttgatacggaaatccgcacgattctggatacgcaatatgcgttgtcgcgcaagttgattgaagacaatcgcgacaaggttgagttgatggcaaagaccctgctggattgggaaaccatcgactccgaccagatcaacgacatcatggaaggacgggagccgcgtcagcctaaatatgggatcccggtcaaacgtgcaacgtctgatactccttcgagtggcgttccgccaaatgcaaccgcgccggatgcaccggcagcgcccgccgcgtaa

SEQ ID NO: 60498 - protein, 635 aa, Herminiimonas arsenicoxydans
MNNMFSKAAIWVVIGMVLFTVFKQFDGRTVSGAATAIPYSDFLDEVKSKRIKEATIEDRTIVATTTEGKKVKSAITYLDRGLIGDLVNNGVKFDVKQPEEQSFLSQIFISWFPMLLLIGVWVFFMRQMQGGGKGGAFSFGKSKARLLDDTTNTVTFADVAGCDEAKEEVTELVEFLRDPTRFQKLGGRIPRGVLLVGPPGTGKTLLARAIAGEAKVPFFSISGSDFVEMFVGVGASRVRDMFDNAKKHAPCIIFIDEIDAVGRHRGAGMGGGNDEREQTLNQMLVEMDGFEPNAGVIVVAATNRADVLDKALLRPGRFDRQVIVGLPDIRGREQILMVHMRKVPIATDVKADILARGTPGFSGADLANLVNEAALFAARRNKRLVEMQDFEDAKDKIVMGPERKSAVMREEERRNTAYHESGHAVVAKLLPKADPVHKVTIMPRGFALGLTWQLPEHDRVNMYKDKMLEEISILFGGRIAEEVFMHQMSTGASNDFERATKLARAMVTRYGMSESLGTMVYEDTEQDAYFGRSSAKTVSEATQQKVDTEIRTILDTQYALSRKLIEDNRDKVELMAKTLLDWETIDSDQINDIMEGREPRQPKYGIPVKRATSDTPSSGVPPNATAPDAPAAPAA

SEQ ID NO: 60499 - DNA, 1902 bp, Burkholderia vietnamiensis G4
  CDS (1)..(1902): transl_table=11
atggaaataaaacgcgagcatcagatcaacgtcctgtatatcgtcgccgcgtttctggcggtgatgatgatccagagctttttcgccaaacccgatcacatcaggacgatcccgtacagcgaatttcagcagctggtgagccaaggcaaggtaacggacctcgtcatcgggccaactcagattactggcacctacaaggacgtgacggccaaggacgtcgaggccggcaagccgcagcatttttcgacgcttcgggtcgaaccggggcttgcgcaggatctcgccaaggccaatctcgtgttttccggtgaaccctcgcccggcttgcttccgacgatcctgggctggctgatgccagctatcgggtttgcccttgtctggatgttcctgatccgtccaatggccatgggaggcggagcgggcggcatgatggcgatcggcaagagcaaggcgaagatctacgtcgagaaggacaccaaggtcacgtttgccgacgtcgcgggcgtcgatgaagccaaggatgaactgaaggaggtggtgtccttcctgaaggatccgcgcagttacggcagactcggcgcacacgtgccgaagggtgtactgctggtcgggccgcccggcaccggcaagacgctgttggcccgggccgtcgccggtgaggcgggcgtggcatttttttcgatctcgggctcggagtttgtcgagatgttcgttggtgtcggcgccgcgcgcgtgcgcgatcttttcgagcaggcgcgccagcatgcaccggccatcgtattcatcgacgaactcgactcactcggccgcgcgcgtggcagcgctctgcccggtggtggcggtcatgatgaaaaggaacaaacccttaaccagttgctgagcgagctggacggatttgatacgtcgataggcgtggtgctgctcgccgcgaccaaccgaccggagattctcgaccccgcgttgctgcgggcgggacgcttcgatcggcaggtcctggtcgaccggccggacaagaaggggcgctgtgaaatcctcgccgtccacctgaagaaaatcaggctggcctcgggcgtcccggtcgcggacatcgccgcgcttactccgggcttttccggcgccgatctggcgaacctcgtcaacgaggcagcgttgcttgcgacgcgccgcaacgcagacgacgtcacgctggacgacttcacgcaggccattgagcggatcgtggccgggctcgagaagcgcaatcgcctgctcaatccgcatgagcgggaggtcgtggctcaccatgagatggggcacgcgctggtggcgatggcactgcccggtgtcgaccctgtgcagaaaatatcaatcattccccgcggtattgccgcccttggctacacgattcaacgacccatcgaggaccgcttcctgatggaccgcggcgaactgatgaaccggatggcagtgctgcttggcgggcgcgcggccgaaagcctcgtcttcgaagaagtgtccacaggcgcggccgatgatctcgccaaggccagcgacattgcccgcagcatggttgtgcgctttggcatggacccgaagctcggccaggtcgcctatgaaccggaaagcgtctctgcgctgggcatgccggccggcaccgactggcgcccgcggcagtatggcgaggagactgctactgccatcgataccgcggtgcgcgagttgattgaagtcgcgttcaagcgagcctcttcgattctgactgcaaaccgtacgctgctcggcgaggccgcgcacgatctgctcgccagggaaacgatgtccggcgaagccttgcaagcgattgcagcgcggcttgccgatgtagtccatgccgggagcgaacttcgcgacgtggcggcggcgactgtcgcggcaagcggctga

SEQ ID NO: 60500 - protein, 633 aa, Burkholderia vietnamiensis G4
MEIKREHQINVLYIVAAFLAVMMIQSFFAKPDHIRTIPYSEFQQLVSQGKVTDLVIGPTQITGTYKDVTAKDVEAGKPQHFSTLRVEPGLAQDLAKANLVFSGEPSPGLLPTILGWLMPAIGFALVWMFLIRPMAMGGGAGGMMAIGKSKAKIYVEKDTKVTFADVAGVDEAKDELKEVVSFLKDPRSYGRLGAHVPKGVLLVGPPGTGKTLLARAVAGEAGVAFFSISGSEFVEMFVGVGAARVRDLFEQARQHAPAIVFIDELDSLGRARGSALPGGGGHDEKEQTLNQLLSELDGFDTSIGVVLLAATNRPEILDPALLRAGRFDRQVLVDRPDKKGRCEILAVHLKKIRLASGVPVADIAALTPGFSGADLANLVNEAALLATRRNADDVTLDDFTQAIERIVAGLEKRNRLLNPHEREVVAHHEMGHALVAMALPGVDPVQKISIIPRGIAALGYTIQRPIEDRFLMDRGELMNRMAVLLGGRAAESLVFEEVSTGAADDLAKASDIARSMVVRFGMDPKLGQVAYEPESVSALGMPAGTDWRPRQYGEETATAIDTAVRELIEVAFKRASSILTANRTLLGEAAHDLLARETMSGEALQAIAARLADVVHAGSELRDVAAATVAASG

SEQ ID NO: 60501 - DNA, 1908 bp, Burkholderia vietnamiensis G4
  CDS (1)..(1908): transl_table=11
atgaaaaaaaccttcgactactccggcctgctgattccgatcgcgttcgcggtactgatcgcggttcaactgttcgggcgtcagccggcggcgaccgcgatctcctacagcgatttccaccacctcgtggaagcgcggctcgtcgacgatctggagatcgggcagacgtcgatctccggcacgctgcgcatgccgcaggcgggggcggcgctgccggcctccgacgcggccgacgtgaaggcggccggcgcgccgtggcgcttcaccacgaaccgcgtgagcgacgacaatctggttgcggcgctgaccgcggccgggattcgctaccgcggcgcggccgatactggctggatcggcacgctcgcgacctggatctttccgttgatcggcttcgtcgtgatctggacgttcatgacgcgccggccgggcgggatgcgcgacctgagcgggatgggcaagagccgcgcgcgcgtgtacatgcagaaggaaaccggcatcacgttcgacgacatcgcgggcatcgacgaggcgaaggcagagctgcagcagatcgtcgcgtttctgcgcgatccggatcgctatcagcggctcggcggcaagattccgaagggcgtgctgatcgtcggcgcgccgggcaccggcaagacgctactcgcgcgcgccgtcgccggcgaggcggcggtgccgttcttcacgatcagcggctcggcattcgtcgagatgttcgtcggcgtcggcgcggcgcgcgtgcgcgacctgttcgaacaggcgcagcaaaccgcgccgtgcatcgtcttcatcgacgagctcgatgcgctcggcaaggcgcgcggcgtcgggctgatgtcgggcaacgacgagcgcgagcagacgctcaaccagctgctcgtcgagatggacggctttcaggccaactccggcgtgatcatcatggccgcgaccaaccggccggagattctcgatcccgcgctgctgcgccccggccgcttcgaccggcacatcgcgatcgaccggcccgacctgaacggccgcaagcagatcctgaccgtacatacgaagcgcgtgaaggtcgcacccggcgtcgatctcgccgagctcgcgcagcgcacgccgggcttcgtcggcgccgatctcgcgaacgtcgtcaacgaagccgcgctgcatgcggccgagctcggcaagccggcgatcgacatgaccgatttcgacgaggcgatcgatcgcgcgatgaccggcatggagcgcaagagccgcgtgatgaacgagcaggagaagcgcaccatcgcgtaccacgaatcggggcacgcgctcgtcgcgcaaagccgcgagcattgcgatccggtgaagaaggtgtcgatcatcccgcgcgggatcgcggcgctcggctacacgcagcaggtaccgaccgaagatcgctacgtgctgcgcaggagcgaactgctcgaccggctcgacgtgctgctcggcggacgcgtggccgaggaaatcgcgttcggcgacgtgtcgaccggcgcgcagaacgatcttgagcgcgccaccgcgctcgcgcgccacatggtcatgcagtacgggatgagcgagcggctcggcctcgcgacgctcgacgacggtgcactgcagcacggcgcgccgggcgtatggacgccgggcgacggccactgcagcgaacacacggcgcagctgatcgacgaggaggtgcgcgcgctgctcgaggacgcgcacgcgcgcgtgaccgcgacgctcgccgcgcaccgcgatgcgctcgaacggatcgcgcgcagcctgctgcagcacgaatcgatcgaccacgacatgctggtcgcgctgatcgcggcgccggacgacgccggcccgacgtcgggcgccgcatcgaccgatactgaaagcgtcagcggcacgtccgcctga

SEQ ID NO: 60502 - protein, 635 aa, Burkholderia vietnamiensis G4
MKKTFDYSGLLIPIAFAVLIAVQLFGRQPAATAISYSDFHHLVEARLVDDLEIGQTSISGTLRMPQAGAALPASDAADVKAAGAPWRFTTNRVSDDNLVAALTAAGIRYRGAADTGWIGTLATWIFPLIGFVVIWTFMTRRPGGMRDLSGMGKSRARVYMQKETGITFDDIAGIDEAKAELQQIVAFLRDPDRYQRLGGKIPKGVLIVGAPGTGKTLLARAVAGEAAVPFFTISGSAFVEMFVGVGAARVRDLFEQAQQTAPCIVFIDELDALGKARGVGLMSGNDEREQTLNQLLVEMDGFQANSGVIIMAATNRPEILDPALLRPGRFDRHIAIDRPDLNGRKQILTVHTKRVKVAPGVDLAELAQRTPGFVGADLANVVNEAALHAAELGKPAIDMTDFDEAIDRAMTGMERKSRVMNEQEKRTIAYHESGHALVAQSREHCDPVKKVSIIPRGIAALGYTQQVPTEDRYVLRRSELLDRLDVLLGGRVAEEIAFGDVSTGAQNDLERATALARHMVMQYGMSERLGLATLDDGALQHGAPGVWTPGDGHCSEHTAQLIDEEVRALLEDAHARVTATLAAHRDALERIARSLLQHESIDHDMLVALIAAPDDAGPTSGAASTDTESVSGTSA

SEQ ID NO: 60503 - DNA, 1896 bp, Burkholderia vietnamiensis G4
  CDS (1)..(1896): transl_table=11
ttgaacaacaatatgttttcgaaggcagcagtgtggctggtgattgcactggtgctgtttacagtgttcaagcagttcgacaagccccgcgtccaggaaggtgtgtcctattcgcagttcatggacgacgccaagaacggcaaggtcaagaacgtcgtcgtgcaggggcgcaacctcaccgtcactccggctgatggccagaaataccagatcgtgtcgcccggcgacatctggatggtcggcgatctgatgaagtacggcgtgcaggtcagcggcaaggccgacgacgagcccaatgcgctgatgtccgcgctgtattacctcgggccgacgatcctcatcatcgtgttctggttctacatgatgagacagatgcagggaggcggcaaaggcggcgcattctcgttcgggaaatcgcgcgcgcggctgatcgacgagaacaacaacgcggtcaacttctccgacgtcgcaggctgcgacgaagcgaaggaagaggtgtccgagctcgtcgacttcctgcgcgacccgcagaaattccagaagctgggcggccgcattccgcgcggcgtgctgctggtcggcccgccgggtaccggcaagacgctgctcgctcgcgcgatcgccggtgaagcgaaggtgccgttcttcagcatctcgggttccgacttcgtcgaaatgttcgtcggcgtgggcgcggcccgcgtgcgcgacatgttcgagcaggcgaagaagcacgcaccgtgcatcgtgttcatcgacgaaatcgacgcggtcggtcgccatcgcggcgccggcatgggcggcggcaacgacgaacgcgagcagacgttgaaccagatgctggtcgagatggacggcttcgaggcgaactcgggcgtgatcgtgatcgccgcgacgaaccgctccgacgtgctcgacaaggcgctgctgcgcccgggccgtttcgaccgtcaggtctatgtcgggctgccggacatccgcggtcgcgagcagatcatgcgcgtgcacctgcgcaaggtgccgatcgccaacgacgtcgacgcagccgtcatcgcacgcggcacgccgggcttctcgggcgccgacctcgcgaacctcgtcaacgaagcggcgctgttcgccgcacgccgcggcaagcggatcgtcgaaatgcaggatttcgaggacgcgaaggacaagatcttcatgggtccggagcgcaagtcggccgtcattcgcgaggaagcgaagcgggcgacggcttatcacgagtcgggccatgcggtcatcgccaagctgctgccgaaggccgacccggtgcacaaggtcacgatcatcccgcgcggtcgcgcgctgggcgtcacgtggcagctgccggagcatgacaacgaaacgtactcgaaggattatctgctcgaccgtctggcgatcctgttcggcggccgcgtggccgaggagctgttcttgaacctgatcagcaccggcgcgtcggacgacttcaacaaggcgacgcagacggcgcgcgcgatggtcgcccggttcgggatgaccgatgcgctcgggccgatggtctacgtcgacgacgagagcgacaacggcccgttcgggcgcggcttcacgcgcacgatctcggaagcgacgcaacagaaggtcgacggcgaaatccgccgcgtgctcgacgagcagtacaacctcgcgcggcgcctgctcgaagagaaccgcgacaaggtcgaggcaatgacggccgcgctgatggagtgggaaacgatcgacgccgatcagatcaacgacatcatggaagggcgcccgccgcgctcgccgaagagttcgccggcggtcggcggcgactcgtcgggcggcggcacgaccgccgaggtgaagaccggcaacgcgccggcgccggcttccccggcctga

SEQ ID NO: 60504 - protein, 631 aa, Burkholderia vietnamiensis G4
MNNNMFSKAAVWLVIALVLFTVFKQFDKPRVQEGVSYSQFMDDAKNGKVKNVVVQGRNLTVTPADGQKYQIVSPGDIWMVGDLMKYGVQVSGKADDEPNALMSALYYLGPTILIIVFWFYMMRQMQGGGKGGAFSFGKSRARLIDENNNAVNFSDVAGCDEAKEEVSELVDFLRDPQKFQKLGGRIPRGVLLVGPPGTGKTLLARAIAGEAKVPFFSISGSDFVEMFVGVGAARVRDMFEQAKKHAPCIVFIDEIDAVGRHRGAGMGGGNDEREQTLNQMLVEMDGFEANSGVIVIAATNRSDVLDKALLRPGRFDRQVYVGLPDIRGREQIMRVHLRKVPIANDVDAAVIARGTPGFSGADLANLVNEAALFAARRGKRIVEMQDFEDAKDKIFMGPERKSAVIREEAKRATAYHESGHAVIAKLLPKADPVHKVTIIPRGRALGVTWQLPEHDNETYSKDYLLDRLAILFGGRVAEELFLNLISTGASDDFNKATQTARAMVARFGMTDALGPMVYVDDESDNGPFGRGFTRTISEATQQKVDGEIRRVLDEQYNLARRLLEENRDKVEAMTAALMEWETIDADQINDIMEGRPPRSPKSSPAVGGDSSGGGTTAEVKTGNAPAPASPA

SEQ ID NO: 60505 - DNA, 1923 bp, Dichelobacter nodosus VCS1703A
  CDS (1)..(1923): transl_table=11
atgcgtaaatcattaattatttggggcggattaattctgctctttttggctttggtcgggcaggtgaatcaatcaggtatgagcgcccaaagtcgtcaagtttcttattcacaatttcttaatcgtgttgataacggcgaagtgaaatccgttgatatcaacgtgcaaacaatgacgattgtttttaccgatacttccggcaataaatatctcacccataatccggaaattaataccagcgctttggtgggacaattattgaaaaataatgttgaaattgtcagcgaaccggtcgagcaagaaagcgtattgatgcggattttgattaatttattgccggttattttattggttgctttgtttttatttgtttcacgacaggtgcaaggcggcggtggacgtggcggcgcattttcttttggaaaaagtaaagcgcgtttgattccggaagacaaaataaaagtgacttttgccgatgttgccggcgccgatgaagctaaagaagacgtggcagaaatggtggaatttttgcgcgcaccagcaaaatttagccgtttgggcggacaaattccgcgcggcgtattaatggttggacctccaggaacgggaaaaacattattagcacgcgcgatcgccggcgaggcaaaagtgccatttttcacaatttcgggttcggattttgtggaaatgtttgtcggcgtgggcgcatcacgggtgcgcgatatgtttgaacaagcgaaaaagcacgcgccgtgcattatttttattgatgaaattgatgcggtgggacggcaacgcggtgccggtttgggcggcggtcacgatgaacgcgagcaaacattaaaccaattattggtggaaatggacggttttgaaggtaatgaaggcgtgattgtgattgcagcaaccaaccgtcctgacgttttggatccggcgttattgcgtccgggacgttttgatcgtcaaatagtggttgatttgccggatttaaaaggacgcgaacaaattttaaaagtacacgtgcgcaaaaaaccgttaagccaagatgtggtgattcgtgatttagcgcgcggaacccctggtttttctggtgcagatttggcgaatttagtaaatgaagcagcgttatttgcgacgcggcgcgatcgcgatgaaatcacgatgaaagacatggaagacgccaaagataaaatcatgatgggcgctgaacgccgttcaatgatgatgagcgataaagaaaaggaaatgactgcttatcacgaagccggacattgcattgtggggcggttggtgccgaatcacgatccggtttataaagtaacgattattccgcgcgggcgggctttgggcgtgacgatgtttttgcccgatcacgatcgttattcctattcaaaagaacatttggaaagccaaatttctacgttgtacggcggacgattagcagaagaattgatttatggtaaagaacaagtttccaccggcgcctccaatgatattaaacgtgcgacacaaatcgcgcgcaatatggtgacgcagtggggtttgtcggaaaaattggggccgctgctttatgccgaagatgaaggcgaggtttttttgggacggtcggtaacgaagcataaaaatgtttctgaagaaacggcgaaattaattgatttggaaacacgcgcaattatcgatagaaattatcagcgggcacaaaatattctggaagaaaatcaagatattttgcacgaaatgaccaaagctttggtgaaatatgaaaccattgatgaggcgcaaattgatgatttgatgaaccgccgccccgtgcgtgaacccaaagattggaatcagcccgaaaatggtcattccgatcaagacggcatgggcaatattacggtggaattaaacaataacgataaaccagcggagcaatgttaa

SEQ ID NO: 60506 - protein, 640 aa, Dichelobacter nodosus VCS1703A
MRKSLIIWGGLILLFLALVGQVNQSGMSAQSRQVSYSQFLNRVDNGEVKSVDINVQTMTIVFTDTSGNKYLTHNPEINTSALVGQLLKNNVEIVSEPVEQESVLMRILINLLPVILLVALFLFVSRQVQGGGGRGGAFSFGKSKARLIPEDKIKVTFADVAGADEAKEDVAEMVEFLRAPAKFSRLGGQIPRGVLMVGPPGTGKTLLARAIAGEAKVPFFTISGSDFVEMFVGVGASRVRDMFEQAKKHAPCIIFIDEIDAVGRQRGAGLGGGHDEREQTLNQLLVEMDGFEGNEGVIVIAATNRPDVLDPALLRPGRFDRQIVVDLPDLKGREQILKVHVRKKPLSQDVVIRDLARGTPGFSGADLANLVNEAALFATRRDRDEITMKDMEDAKDKIMMGAERRSMMMSDKEKEMTAYHEAGHCIVGRLVPNHDPVYKVTIIPRGRALGVTMFLPDHDRYSYSKEHLESQISTLYGGRLAEELIYGKEQVSTGASNDIKRATQIARNMVTQWGLSEKLGPLLYAEDEGEVFLGRSVTKHKNVSEETAKLIDLETRAIIDRNYQRAQNILEENQDILHEMTKALVKYETIDEAQIDDLMNRRPVREPKDWNQPENGHSDQDGMGNITVELNNNDKPAEQC

SEQ ID NO: 60507 - DNA, 1854 bp, Synechococcus sp. WH 7803
  CDS (1)..(1854): transl_table=11
ttgaacaagcgctggcgcaacgtagggctgtacgtccttttagtggtcgtggtgatcgtggtcggaacggccttcctcgatcgtcccgatcccgcatcgaccgctcagaatctccgttacagcgatttcgttgagcaggttcaggaagaccaggtcagtcgcgttctgctgtctcccgatcgtggaaccgcttcggttgtggcaaccgatggccgtcgttccgaagtgaatctggctccggataaggatctgctcaagatgctcacggatcacaacgtggacattgctgtgcagccgtccaggcaacccggggcttggcagcaagccgcttcgagcttgatcttccctctgctgctgctgggaggcctgttcttcctcttccgtcgggcccagtccggtggcggtggcggcggaaacccggccatgaatttcgggaagagcaaggctcgcgttcagatggagccttccacccagatcacctttggggatgtggccggaattgagggcgccaagcttgaactcacggaggtggtggatttcctcaagaaccccgatcgcttcactgctgttggcgccaagattccgaagggtgtcttgctcgttggccctcctggaaccggcaagaccctgcttgccaaggccgtggctggtgaggcaggtgttccgttcttctccatctccggctcggagtttgtggaaatgttcgtgggtgtcggagccagccgcgtccgtgatctgtttgagcaggccaagaaaaatgctccttgcatcgtcttcatcgacgagatcgatgctgttggacgtcagcggggtgctggtctcggtggtggcaacgatgagcgcgagcagacgctgaaccagctgctcactgaaatggatggtttcgagggcaataccggaatcatcatcgtggctgccaccaaccgtcctgatgtgctggatgctgcgttgatgcgtcctggtcgtttcgaccgtcaggttgtcgtggaccgccctgactacgctgggcgtctgcagatcctcaacgttcatgcacgaggcaagacgctgtcgaaggatgtcgatctcgataaagtggctcgccgcacgcccggctacacaggtgctgatctctccaatctcttgaatgaggccgccattcttgcggcccgccgagatctcagtgaggtgagcaacgatgaaatcagcgatgccatcgaacgagtgatggccggccctgagaaaaaagatcgtgtgatgagcgagcgtcgcaaacgcctggtggcttatcacgaggccggtcacgctctggtgggggcgctgatgcctgattacgatccggtccagaagatttcgatcattccccgcggcaatgctggtggactgacgttcttcacccccagcgaagagcggatggagtcggggctgtattcacgcacctaccttcaaaatcagatggctgtggcccttggtggtcgtgtggccgaggaaattgtctacggcgaagacgaggtcacaaccggagcctccaacgatcttcagcaggtcgcccaggtggcgcgtcagatggtgacgcgtttcggcatgagcgataagcttggtccggtggccttgggccgatcccaaggtggaatgttcctgggtcgggatatcgctgctgaacgcgatttctctgaagacacggcggccaccatcgacgaggaggtttctgaactcgtggatgttgcctacaagcgcgcaaccaaggtgctcgttggcaaccgcagtgtgctcgatgagctcgctgagatgcttgttgaacaggagacggtcgacgccgaacagcttcaggaactgctgattcgtagtgacgttcgggttgctgaatacgtctga

SEQ ID NO: 60508 - protein, 617 aa, Synechococcus sp. WH 7803
MNKRWRNVGLYVLLVVVVIVVGTAFLDRPDPASTAQNLRYSDFVEQVQEDQVSRVLLSPDRGTASVVATDGRRSEVNLAPDKDLLKMLTDHNVDIAVQPSRQPGAWQQAASSLIFPLLLLGGLFFLFRRAQSGGGGGGNPAMNFGKSKARVQMEPSTQITFGDVAGIEGAKLELTEVVDFLKNPDRFTAVGAKIPKGVLLVGPPGTGKTLLAKAVAGEAGVPFFSISGSEFVEMFVGVGASRVRDLFEQAKKNAPCIVFIDEIDAVGRQRGAGLGGGNDEREQTLNQLLTEMDGFEGNTGIIIVAATNRPDVLDAALMRPGRFDRQVVVDRPDYAGRLQILNVHARGKTLSKDVDLDKVARRTPGYTGADLSNLLNEAAILAARRDLSEVSNDEISDAIERVMAGPEKKDRVMSERRKRLVAYHEAGHALVGALMPDYDPVQKISIIPRGNAGGLTFFTPSEERMESGLYSRTYLQNQMAVALGGRVAEEIVYGEDEVTTGASNDLQQVAQVARQMVTRFGMSDKLGPVALGRSQGGMFLGRDIAAERDFSEDTAATIDEEVSELVDVAYKRATKVLVGNRSVLDELAEMLVEQETVDAEQLQELLIRSDVRVAEYV

SEQ ID NO: 60509 - DNA, 1875 bp, Thermus thermophilus HB27
  CDS (1)..(1875): transl_table=11
atgcctcgagccccctttagccttctcgccctggtcctgggcctcgccttcctggcctgggccttcagcctcgcaggcaccgtgggcgccccaagcgggacggtgaactacacgaccttcctggaggacctcaaggcgggccgggtcaaggaggtggtggtgcgcgccggggacacccggatccagggggtcctggaggacggctccgccttcaccacctacgcggcgagccctccggacaacgccaccctcgagggctggatggcccggggggtgagcgtccgggtggagcccccccagggccaaaacgccctcggcttcctctggcccctcctcctcgtgggcctcctcatcggcgccctctactacttctcccgcaacggccgggccgggccttcggactccgccttcagcttcaccaaaagccgggcccgggtcctcaccgaggcccccaaggtcaccttcaaggacgtggccggggcggaggaggccaaggaggaactcaaggagatcgtggagttcctcaaaaaccccagccgcttccacgagatgggcgcccgcatccccaagggcgtccttctggtggggcccccgggggtgggcaagacccacctggcccgggccgtggccggggaggcccgggtgcccttcatcaccgcctcgggctccgacttcgtggagatgttcgtgggggtaggggcggcgagggtccgggacctctttgagaccgccaagcgccacgccccctgcatcgtcttcattgacgagattgacgccgtggggaggaagcggggaagcggggtggggggcggaaacgacgagcgggagcagaccctgaaccagctcctcgtggagatggacggctttgagaaggacacggccatcgtggtcatggccgccaccaaccgccccgacatcctggaccccgccctgctccgccccgggcgctttgaccggcagatcgccatagacgcccccgacgtcaagggccgggagcagatcctcaggatccacgcccggggcaagcccctggcggaggacgtggacctggccctcctcgccaagcgcaccccgggcttcgtgggggcggacctggagaacctcctgaacgaagccgccctcctcgccgcccgggaggggcggaggaagatcaccatgaaggacctggaggaggccgccgaccgggtgatgatgggcccggccaagaaaagcctcgtcctctccccccgcgaccgcaggatcaccgcctaccacgaggcggggcacgccctggcggcccacttcctggagcacgccgacggggtgcacaaggtgaccatcgtgccccggggaagggccttgggcttcatgatgcccaggcgggaggacatgctccactggtccagaaagcgccttttggaccagatcgccgtggccctggcggggcgggcggcggaggagatcgtctttgacgacgtgaccacgggggcggagaacgacttccgccaggccacggagctcgcccgccgcatgatcaccgagtgggggatgcaccccgagttcggccccgtggcctacgcggtgcgggaggacacctacctgggcggctacgacgtgcgccagtactcggaggagaccgccaagcgcattgacgaggcggtgcgccgcctcattgaggagcagtaccagagggtgaaggcccttctcctggaaaagcgggaggtcctggagcgggtggcggagaccctcctggaacgggagaccctcaccgccgaggagttccaacgggtggtggaggggctccccttggaggcccccgaggaggcccgggaggagcgggagcccccccgggtggtgcccaaggtgaagccggggggcgccctgggcggggcctga

SEQ ID NO: 60510 - protein, 624 aa, Thermus thermophilus HB27
MPRAPFSLLALVLGLAFLAWAFSLAGTVGAPSGTVNYTTFLEDLKAGRVKEVVVRAGDTRIQGVLEDGSAFTTYAASPPDNATLEGWMARGVSVRVEPPQGQNALGFLWPLLLVGLLIGALYYFSRNGRAGPSDSAFSFTKSRARVLTEAPKVTFKDVAGAEEAKEELKEIVEFLKNPSRFHEMGARIPKGVLLVGPPGVGKTHLARAVAGEARVPFITASGSDFVEMFVGVGAARVRDLFETAKRHAPCIVFIDEIDAVGRKRGSGVGGGNDEREQTLNQLLVEMDGFEKDTAIVVMAATNRPDILDPALLRPGRFDRQIAIDAPDVKGREQILRIHARGKPLAEDVDLALLAKRTPGFVGADLENLLNEAALLAAREGRRKITMKDLEEAADRVMMGPAKKSLVLSPRDRRITAYHEAGHALAAHFLEHADGVHKVTIVPRGRALGFMMPRREDMLHWSRKRLLDQIAVALAGRAAEEIVFDDVTTGAENDFRQATELARRMITEWGMHPEFGPVAYAVREDTYLGGYDVRQYSEETAKRIDEAVRRLIEEQYQRVKALLLEKREVLERVAETLLERETLTAEEFQRVVEGLPLEAPEEAREEREPPRVVPKVKPGGALGGA

SEQ ID NO: 60511 - DNA, 1971 bp, Desulfovibrio vulgaris subsp. vulgaris str. Hildenborough
  CDS (1)..(1971): transl_table=11
ttgaaccagttttcgcggaacctggtgctctgggcgaccatatcgctgttgatggtcgttctgttcaacctgttcaatcaaccacagggcacgcagcagagggtcacctatagcgagttcctgcaaagggtcgagaagggcgaggtcgtcgaggtcaccatccaggggcagaagctctctggcaagaccaccgaaggcaaacccttccagacatttgcgcccgaagatccctcgctggtaagccgcctcctcgacaagaagatcgaagtcaaggcagaaccgcaggaagaggccgcgtggtacatgacgctgctcgtttcgtggttccccatgcttcttcttattggtgtgtggattttcttcatgcgtcagatgcagggcggcggtggcaaggccatgtcgttcgggcgttctcgtgcgcgcatgatcacgcaggagtcggcacgcgtcactttcgaggacgttgccggtgtcgatgaggcaaaagaggaactcagcgaggtcgtcgagttcctgtccaacccacgcaagttcacccgcctcggcgggcgcatccccaagggtgtgctgcttgtcggtcctcccggtacgggcaagacgctgctggcgcgggctgttgccggtgaggcaggggtgcccttcttctccatctccggttcggacttcgtggagatgttcgtgggcgtgggcgcctcgcgcgtgcgcgacctgttcatgcagggcaagaagaacgcgccgtgcctcatcttcatcgatgaaatcgacgcagtcggtcgtcagcgtggtgctggccttggcggcggccatgacgaacgtgagcagactctcaaccagctgctggtggagatggacggcttcgaatccaacgagggcgtcatactcatcgcagccaccaaccgccccgacgtcctcgacccggcgttgctgcgccccggtcgtttcgacaggcaggtggtcgtgcccacaccggacgtgcgcggtcgcaagcgcatccttgaagtgcacggcaggcgcaccccgctgtccagcggggtcaacctcgagatcatcgccaagggcaccccgggcttttccggtgccgaccttgagaacctcgtcaacgaagccgcgttgcaggctgcaaagctcaacaaggacgtcgtggacatgggggatttcgagtacgccaaggacaaggtcctgatgggcaaagagcgtcgcagcctcatcctgagcgatgaagagaagcgcatcacggcctaccatgaagccggtcacgcccttgctgccaagctcattcccggttcagaccccatccacaaggtcaccatcatcccccgcggcagggctcttggcgttaccatgcagttgccggaaggcgacaggcacggctattcgcgcaactacctgctggggaacctcgtggtactgcttggcggacgtgtcgcggaggagatcatcttctcagacgtgaccacaggtgcaggcaacgatatcgatcgggccaccaagatggctcgcaagatggtctgcgaatggggcatgagcgaggccatcggcccgctggccatcggtgaacagggtgaagaggtgttcatcgggcgtgaatgggcccactcgcgcaatttcagcgaggagacggcacgtctggtcgacgccgaggtcaagcgcatcatcgaagaggctcgccagcgttgccacaccctgcttgaagagaacctgactgccctgcacgacatcgccaatgccttgctggaacgcgagaccatcagtggtgatgacatcgacatcctcatgcgtggcgagaagctgcctcccgaaaggggaaacggcggggccccggcaaactccgggacgacaccgccagcagggaacgccacggacggggcaaaggccgcgcagtcgccgcaggcttcggaagacgccgctaccccggccgaggagttcaccctcgaagctgaagaacccgaaaagagggacgaccgcgcatga

SEQ ID NO: 60512 - protein, 656 aa, Desulfovibrio vulgaris subsp. vulgaris str. Hildenborough
MNQFSRNLVLWATISLLMVVLFNLFNQPQGTQQRVTYSEFLQRVEKGEVVEVTIQGQKLSGKTTEGKPFQTFAPEDPSLVSRLLDKKIEVKAEPQEEAAWYMTLLVSWFPMLLLIGVWIFFMRQMQGGGGKAMSFGRSRARMITQESARVTFEDVAGVDEAKEELSEVVEFLSNPRKFTRLGGRIPKGVLLVGPPGTGKTLLARAVAGEAGVPFFSISGSDFVEMFVGVGASRVRDLFMQGKKNAPCLIFIDEIDAVGRQRGAGLGGGHDEREQTLNQLLVEMDGFESNEGVILIAATNRPDVLDPALLRPGRFDRQVVVPTPDVRGRKRILEVHGRRTPLSSGVNLEIIAKGTPGFSGADLENLVNEAALQAAKLNKDVVDMGDFEYAKDKVLMGKERRSLILSDEEKRITAYHEAGHALAAKLIPGSDPIHKVTIIPRGRALGVTMQLPEGDRHGYSRNYLLGNLVVLLGGRVAEEIIFSDVTTGAGNDIDRATKMARKMVCEWGMSEAIGPLAIGEQGEEVFIGREWAHSRNFSEETARLVDAEVKRIIEEARQRCHTLLEENLTALHDIANALLERETISGDDIDILMRGEKLPPERGNGGAPANSGTTPPAGNATDGAKAAQSPQASEDAATPAEEFTLEAEEPEKRDDRA

SEQ ID NO: 60513 - DNA, 2154 bp, Bartonella quintana str. Toulouse
  CDS (1)..(2154): transl_table=11
atgaattccaattaccgttcgctcttcgtttggggagtcattgccttgattttgattgtatcgttttctctctttaatggagatagccagcgttccggaggtggagagatctcctattccgaattcttgcggaaagtcgaaaataatgagcttaagactgtgaccattcaaggccaaaagttaacaggaaaaactgttgagaatagaattatttcgacctatgctccacgggatccaggcttgatacaaaaattggaaagcaaaaatgtgaatgttaaggctgttcctgaaagctctggcaatagtatctttctcaatcttctcttttccttgctccctgttattattatcgttggggcttggattttctttatgcgacaaatgcaaagtggatcacgcggggcaatgggatttggaaaatcaaaagcaaaattgcttactgaagcgcaggggcgcgttacttttcaggatgttgccggcgttgaagaagcaaagcaggatctacaggaaattgtcgaatttttacgtgaaccacaaaaatttcaacgcctaggtgggcgtatcccacggggcgttttgcttgttggtccgcctggaactggtaaaaccttgcttgcccgttctgttgcaggtgaagccaatgtaccgttctttaccatttcagggtccgattttgttgaaatgttcgtcggtgtgggtgcaagccgtgtgcgagatatgttcgaacaagctaaaaaaaatgcaccctgtattatttttatcgatgaaatcgatgctgtcgggcgccatcggggtgctggattgggtgggggcaacgatgaacgtgagcagactttaaatcagttgcttgtcgaaatggatggttttgagcccaatgaaagtatcattctcattgctgcaacaaaccgtcccgatgtgctcgaccctgccttgttaagaccaggccgctttgatcggcaagtcgttgtgccaaacccggatatttccggccgtgaacaaatcttgaaagtgcatgtgcgcaatgtacctttagccccaaatgttgatttgaaaattttggcaagaggaacgccaggattttccggtgctgacctgatgaatcttgttaatgaagccgctctcatggctgctagccgcaataaaagagtcgtgactatgcaagagttcgaagatgcgaaagacaaagtgatgatgggggctgaacgccgttcaaccgctatgacacaagaagaaaaagaactcaccgcatatcatgaagcaggacatgctatcgtagctctcaatgtgcctgttgctgatcctgtccacaaagcaacaatcgtgccaaggggaagagctttgggcatggtcatgcagttgcctgagggcgatcgctattcaatgagctatcggtggatgatttctcgtctggctattatgatgggagggcgcgtggccgaagaattgaaattcggcaaagaaaatatcacatccggtgcttcttctgatatcgaacaagcgacaaagttagcgcgggcgatgatcacacggtggggcttttctgatcttcttggaaatgtcgcctatggtgataaccaggatgaagtctttttaggccattctgttgcacgaacacaaaatgtctctgaagaaacagcgcgtatgattgatgctgaagtgcgtaagctcattgatgctgcttatacaagtgctacaaaaattctgaaaacaaaaaagaaagaatggttcgctcttgcacaaggtttattagaatatgaaactttaaccggtgctgaaattaatgaagttattgcaggaaaacctccttcacgaactcagaaagatgaaaatgcttctctgcgcacttcatctgtgcctaagaccggagcaagtaagattgaggccgataaagtaacggtgaatgaaacagatgtgcataaagcaaacggagggaagaaaaaactaaaagctgaaaacgaaaaaacaaaatccagtaatgccaaacccaatgatgctaagttaaaaggagcaaaaactcatggggctgagaaaaaaacacgaagcataaaagatcctgctggagcagcaaatttttctgaaagtaaaacaaacgctgaaaaagcgttaaatactgccgaacctaaaggcaaacagggatcatctagcgacgtttga

SEQ ID NO: 60514 - protein, 717 aa, Bartonella quintana str. Toulouse
MNSNYRSLFVWGVIALILIVSFSLFNGDSQRSGGGEISYSEFLRKVENNELKTVTIQGQKLTGKTVENRIISTYAPRDPGLIQKLESKNVNVKAVPESSGNSIFLNLLFSLLPVIIIVGAWIFFMRQMQSGSRGAMGFGKSKAKLLTEAQGRVTFQDVAGVEEAKQDLQEIVEFLREPQKFQRLGGRIPRGVLLVGPPGTGKTLLARSVAGEANVPFFTISGSDFVEMFVGVGASRVRDMFEQAKKNAPCIIFIDEIDAVGRHRGAGLGGGNDEREQTLNQLLVEMDGFEPNESIILIAATNRPDVLDPALLRPGRFDRQVVVPNPDISGREQILKVHVRNVPLAPNVDLKILARGTPGFSGADLMNLVNEAALMAASRNKRVVTMQEFEDAKDKVMMGAERRSTAMTQEEKELTAYHEAGHAIVALNVPVADPVHKATIVPRGRALGMVMQLPEGDRYSMSYRWMISRLAIMMGGRVAEELKFGKENITSGASSDIEQATKLARAMITRWGFSDLLGNVAYGDNQDEVFLGHSVARTQNVSEETARMIDAEVRKLIDAAYTSATKILKTKKKEWFALAQGLLEYETLTGAEINEVIAGKPPSRTQKDENASLRTSSVPKTGASKIEADKVTVNETDVHKANGGKKKLKAENEKTKSSNAKPNDAKLKGAKTHGAEKKTRSIKDPAGAANFSESKTNAEKALNTAEPKGKQGSSSDV

SEQ ID NO: 60515 - DNA, 2004 bp, Leifsonia xyli subsp. xyli str. CTCB07
  CDS (1)..(2004): transl_table=11
atgaacgtcaagaagatcttccgcggcccgatcctgtacgtcgtgctggcgatcatcaccgtgtgggtcggctcgagcctgcttacgatgtcgggattcaagggtgtgtcgacgcagaagggcttcgagctcctctcccagggcaaggtgtccagcgcgaagatcgtggatggcgagaaccgcgtcgacctcacgctcaaagcggcggacgcctcgctcggcacgcaggtgcagttctactacgtcacgccgcgcggcgcggatgtcgtcaaggcgatcgacgacgccaaactcccgaagggctacgacgacgaggtgccgcagccgaactggctggtcaacatcctcggcttcctgatcccggcgctgctgatcggggtgttcttctggatcatgatctccggcatgcagggcggcggcaacaaggtcatgcagttcggcaagtcccgggcgaagatggtcaccaaggagacgccgaaggtcacgttcgaagatgtcgccggctcggacgaggccatcgaagagctggaggagatcaaagacttcctcaaggagccggccaagttccaggcggtcggagcgcgcatccccaagggcgtgctgctctacggccctcccggaaccggtaagaccctgctggcccgcgccgtcgcgggagaggcgggcgtgccgttctactccatctccggttcggacttcgtggagatgttcgtcggtgtcggcgccagccgcgtgcgcgacctgttccagcaggcgaaggagaactctccggccatcatcttcatcgacgagatcgacgcggtcggccgtcaccgcggcgcgggtctcggcggcgggcacgacgagcgcgagcagacgctcaaccagctgctcgtggagatggacggcttcgacccgaaggccaacgtcatcctgatcgcggcgaccaaccgccccgacatcctcgaccccgcgctgctgcgtccgggccgcttcgaccggcagatcggcgtggacgcgcccgatttgcttggccgcaagaagatcctcgaggtccacggccgcggcaaaccgatcgccgcgtccgttgacctggaggtgctggcccgcaagacgcccggtttcaccggggccgacctcgccaacgtgctcaacgaggccgccctgctcaccgcccgctccaacgcgcagctcatcgacaaccgcgccctggacgaggccgtcgaccgcgtgatcgcgggaccgcagaagcgcacccgggtcatgaaggaccaggagaagctcatcaccgcctaccacgagggcggtcacgcgctcgcggcggcggcgatgcggcacaccgacccggtgaccaagatcaccatcttgccgcgcggccgcgccctcggctacacgatggtgatgccgctggaggacaaatactcggtcacccgcaacgagctgctcgaccagctcgcctacgccatgggcggccgggtggccgaagagatcgtgttccacgaccccactactggcgcgtccaacgacatcgagaaggcgacctccatcgcccgcaagatggtcaccgagtatggcatgagcgccgacatcggctcggtcaagctcggccaggccaacggcgagatgttcctcggccgcgacatgggccaccagcgcgactactccgagcggatcgccgagcgcgttgacgccgaggtgcgcgcgctcatcgagaaggcgcatgacgaggcctggcaggtactgaacgacaaccgcgccatcctggaccggctcgccgcagccctgctggagcaggagacgctcgaccacaaccagatcgctgagatcttcgcggacgtgaacaagctgccggaacgcccgcagtggctctccagcgacaagcggccgatctccgatctgcctccgatcgagttcccgaaggcgccgatcggcgccggtgcggtggacggcggcgtggacagcgcgccgccgtcgccgaagccgaagcgctcgcccgccatcaagccgcggccggcgacttcctag

SEQ ID NO: 60516 - protein, 667 aa, Leifsonia xyli subsp. xyli str. CTCB07
MNVKKIFRGPILYVVLAIITVWVGSSLLTMSGFKGVSTQKGFELLSQGKVSSAKIVDGENRVDLTLKAADASLGTQVQFYYVTPRGADVVKAIDDAKLPKGYDDEVPQPNWLVNILGFLIPALLIGVFFWIMISGMQGGGNKVMQFGKSRAKMVTKETPKVTFEDVAGSDEAIEELEEIKDFLKEPAKFQAVGARIPKGVLLYGPPGTGKTLLARAVAGEAGVPFYSISGSDFVEMFVGVGASRVRDLFQQAKENSPAIIFIDEIDAVGRHRGAGLGGGHDEREQTLNQLLVEMDGFDPKANVILIAATNRPDILDPALLRPGRFDRQIGVDAPDLLGRKKILEVHGRGKPIAASVDLEVLARKTPGFTGADLANVLNEAALLTARSNAQLIDNRALDEAVDRVIAGPQKRTRVMKDQEKLITAYHEGGHALAAAAMRHTDPVTKITILPRGRALGYTMVMPLEDKYSVTRNELLDQLAYAMGGRVAEEIVFHDPTTGASNDIEKATSIARKMVTEYGMSADIGSVKLGQANGEMFLGRDMGHQRDYSERIAERVDAEVRALIEKAHDEAWQVLNDNRAILDRLAAALLEQETLDHNQIAEIFADVNKLPERPQWLSSDKRPISDLPPIEFPKAPIGAGAVDGGVDSAPPSPKPKRSPAIKPRPATS

SEQ ID NO: 60517 - DNA, 1764 bp, Symbiobacterium thermophilum IAM 14863
  CDS (1)..(1764): transl_table=11
ttgagcagcgatcgaacacgtgaagtaaccaagcgcatcctgatggtgctgttcgggctctggctccttcagttcttcttccttccgccgctgacgacccggccgacggagctgtcgtactcggccttcctggatgccctggaggaccggcgcgtccaggaggcggtcgtcagagaccgcgtcctgcaggggaagatggtcggcggggagagtttcacggtgaccctgccgccggacgcggccggcctggcggagcggctggaggaggccggagtggagcagcgatatgaggtcacccggacgccgtggtgggtgaccctgttgccgacggtgctctggctcgccgtgatggtcggcctttttgcctgggcgcagaagcggcaggccggcgccttcgggctcgcccggtccaccgtgaagccgttggcgcccggggagtcccccgtgaccttcgccgacgtcgccgggatggacgaggtgaagggcgagctcgaggagatcgtggactacctgaagaacccggacaagtaccgggcgatcggcgcgcgcatccccaagggcgtgctgctgtacggtccgccggggacgggcaagacgctgctggcccgtgcggtggccggcgaggcgggggtgcccttcttcgccctgagcggctccagcttcgtcgagctgttcgtcggcatgggcgcctcccgcgtgcgcgagctgttcgcccaggcccggaagaacgcgccgtgcatcgtcttcatcgacgagatcgacgccgtcggccgccagcggggctccgccgcggtggtcggcggccacgacgagcgggagcagacgctgaaccagctgctcaccgagatggacggcttcggtgcctacgagggcgtcatcgtcatggcggccaccaaccggcccgacgtgctggacaaggccttgctccgccccggccggtttgaccggcagatccccgtaggtcccccggacgcggcggggcgcgaggagatcctgcgggtccacgcgaagggcaagcaactggatccctctctggacctggccgccgtcgcgcggcgaacccccggctttacgggggccgatctggccaacctgctgaacgaggccgccatcctggccgtgcgccgggggcgcagtcacatcacgatgagcgagatcgacgaggccatcgaccgggtggtggccggcggcccggcccgcaaggggcggatgatccgtcccgaggagaagcggcgggtggcggtgcacgaggcgggccacgccctggtggccacgctcaccccgggcgccgacccggtgcagaaggtgaccatcatcccccgcgggcgtgccgggggcttcaccctgaccacgcccgaggaggaccagatgctctacacccgctccgagctggaagcccggctgaagatgctcctgggcggcctggccgccgaggaggtgctcctgggcgagcggtccaccggcgcccaggacgacctgaggcgggcgacccaggtggcccgggagatgatcagccgctacggcatgggtcagtcggtgggcctgatggcggtgcccgacaccgactggcccggcgtgcagaacctctctcaagagtcggccgccgccatcgagcgggaggtgcaggcgctgctggaccggctgtatcgggaggtccggagcctgatcgagacgaatcgagaccggctggtcgcactggtggtcgagctttcggaccgggagacgctggatggcgacgacgtgcgccgcatcctgagcgcctga

SEQ ID NO: 60518 - protein, 587 aa, Symbiobacterium thermophilum IAM 14863
MSSDRTREVTKRILMVLFGLWLLQFFFLPPLTTRPTELSYSAFLDALEDRRVQEAVVRDRVLQGKMVGGESFTVTLPPDAAGLAERLEEAGVEQRYEVTRTPWWVTLLPTVLWLAVMVGLFAWAQKRQAGAFGLARSTVKPLAPGESPVTFADVAGMDEVKGELEEIVDYLKNPDKYRAIGARIPKGVLLYGPPGTGKTLLARAVAGEAGVPFFALSGSSFVELFVGMGASRVRELFAQARKNAPCIVFIDEIDAVGRQRGSAAVVGGHDEREQTLNQLLTEMDGFGAYEGVIVMAATNRPDVLDKALLRPGRFDRQIPVGPPDAAGREEILRVHAKGKQLDPSLDLAAVARRTPGFTGADLANLLNEAAILAVRRGRSHITMSEIDEAIDRVVAGGPARKGRMIRPEEKRRVAVHEAGHALVATLTPGADPVQKVTIIPRGRAGGFTLTTPEEDQMLYTRSELEARLKMLLGGLAAEEVLLGERSTGAQDDLRRATQVAREMISRYGMGQSVGLMAVPDTDWPGVQNLSQESAAAIEREVQALLDRLYREVRSLIETNRDRLVALVVELSDRETLDGDDVRRILSA

SEQ ID NO: 60519 - DNA, 1785 bp, Symbiobacterium thermophilum IAM 14863
  CDS (1)..(1785): transl_table=11
gtgcggtggtgggcgggtgcggccctgctcctcgcggccctgctcttcgggcggccggccgcggcgatggaggcgcagccggtggcgtacagcgagttcatccaggacgtgcaggcgcgccgcgtggcgtacgcgcgcatcacggggcagcggctggaggcggcctacagggacgggaccgtccgcgtcgtgacgcttccccccggcgaggcgcgcctgccgctcgtgctgatgcagtacggggcgcgggtggagtttgtccggccggcggacccgatcgccttccggaccctgctccggttcattccgcccctgctcatcctcggcgcgatcctgtggttcacccgccgcaccgccggcggcagcggggggctgctcaccatggagcagagcccggcgcgcctgtaccgggtcggcgaggccagcgtgacgctgcaggacgtcgccggcctggacgaggtgaaggcggaactgcaggaggtcatcgacttcctgcgggagccggagcggtaccgggccatgggcgcccgcatcccccggggcatcctgctctccggcccgccggggacgggcaagaccctgctcgccagggccctggccggcgaggccggcgtccccttcttctcggcctccggctccgacttcgtggaactgttcgccggtaccggggccgcgcgggtgcgggcgctgttcgaccgggcccgcaaggccgcgccctgcatcgtcttcatcgacgagatcgacgccctcgcccgacggcggggggtcggcgcaggcggtggcaccgaggagcgggagcagaccatcaaccagctgctggtggagatggacggcttcgacagcggcgagggcgtcatcgtcgtggccgcgaccaaccggcctgacgtgctggaccctgcggtcctccggccggggcggttcgaccggcacctgaccgtggacccgccggaccggaagggacgggagcagatcctggcggtgcatgcccgggagaagcggctgagccaggcggtggccctggccgaggtggcgcgccttacgcccggcttcaccggggccgacctggcgaatctgctcaacgaggcggcgctgctggcggtccgcgccggcgagcgggagatcgggtggccgcaggtggcgatggcgctggagcgggtgacgagtggtggcccgccccggcgggtgcgcgcggctgcggccgaccgggttcgggcggcctaccacgaggcgggacacgcgctggccggcctggccctgcgggggtcggatcgcctggtccgggtgacgatcctgccccacgggcgcgggctggggcacaccctgttccgggatcaggacgaggagcgctacctacatacccggcgggatgccttcgaccggctcaccgagctcctggccggccgggcggcggaggcgctggtcctgggcgaggtcagcgccggcgcggcggacgatctggaacgagccaccgggctggcccgggagatggtgacccgctgggggatggatgccgacatcggcccgctgcggctggagcacgccgtcgagggcgaggagagcctgcggagggcggatggtgcgatgcgcgcgctggtggcggcggccgagcgcgccgcccgcgcactgctggaggcccgccgcagcgggctggagcggctggccgcggcgctgctggagcgggaacggctggaaggccccgaggtcgaagcgctgctggagttgacacctggtgaaaagccttatataatcgtggccaatagtcgaggcgatgaagggaaccagtag

SEQ ID NO: 60520 - protein, 594 aa, Symbiobacterium thermophilum IAM 14863
MRWWAGAALLLAALLFGRPAAAMEAQPVAYSEFIQDVQARRVAYARITGQRLEAAYRDGTVRVVTLPPGEARLPLVLMQYGARVEFVRPADPIAFRTLLRFIPPLLILGAILWFTRRTAGGSGGLLTMEQSPARLYRVGEASVTLQDVAGLDEVKAELQEVIDFLREPERYRAMGARIPRGILLSGPPGTGKTLLARALAGEAGVPFFSASGSDFVELFAGTGAARVRALFDRARKAAPCIVFIDEIDALARRRGVGAGGGTEEREQTINQLLVEMDGFDSGEGVIVVAATNRPDVLDPAVLRPGRFDRHLTVDPPDRKGREQILAVHAREKRLSQAVALAEVARLTPGFTGADLANLLNEAALLAVRAGEREIGWPQVAMALERVTSGGPPRRVRAAAADRVRAAYHEAGHALAGLALRGSDRLVRVTILPHGRGLGHTLFRDQDEERYLHTRRDAFDRLTELLAGRAAEALVLGEVSAGAADDLERATGLAREMVTRWGMDADIGPLRLEHAVEGEESLRRADGAMRALVAAAERAARALLEARRSGLERLAAALLERERLEGPEVEALLELTPGEKPYIIVANSRGDEGNQ

SEQ ID NO: 60521 - DNA, 1881 bp, Symbiobacterium thermophilum IAM 14863
  CDS (1)..(1881): transl_table=11
ttgaacaagctatttcgcagtcttgccttctatatgctgattctggtcatctccgtggcgatcgccgtccagttgggagggaccagtcagcagaccacccagctggtgtactctgacctggtcaggtacattcagcagggggaggtcaggagcatcaccctgagcggcgcgtacgctgagggcgagctcgtgagcggcgaaaagttcaccgtacagctccccccgagctcctcgcaggcgccgctggtggagatgctgcagcagcatccgaacatcaagctcgacttccggcaggacaacacgtccggcatctgggccatgttgctgcagaccctggtgccggtcgtgctggtgcttctcgcgttcttcttcatcatgcagcagacccaggggtccgggaaccgggtgatgcagttcggcaagagccgggcgcgcctggtgaccgacgaccgcaagcgggtgaccttcgacgacgtggccggcatcgacgaggtcaaggaggagctggccgagatcgtcgacttcctgaagcacccgaagcggtacctggagctgggcgcccgcatccccaagggcgtgctgctgtacgggccacccggaacgggcaagacgctcctggccaaggcggtggccggcgaggcgggggtgccgttcttctcgatctccggttcggacttcgtcgagatgttcgtcggcgtcggcgccagccgggtgcgcgacctgttcgagcaggcgaagaagaactcgccctgcatcgtgttcatcgacgagatcgacgcggtgggccgtcagcggggcgccggctacggcggcggccacgacgagcgggagcagacgctgaaccagctgctggtggagatggacggcttctcggccaacgaggggatcatcatcatcgcggccaccaaccggcccgacgtgcttgacccggccctgctccggcccggccggttcgaccggcagatcgtcatcgaccgcccggacctgaaggggcggctcgccatcttccaggtgcacgccaagggcaagcccctggagccggacgtggacctggaggtgctggccaagcgaacgcccggcttcacgggcgccgacatcgccaacctcatgaacgaggccgccctgctggccgcccgccggcgcaagaagaagatctccatgcaggacgtggaggacgccatcgaccgcgtgctggccggcgggcccgagaagaagtcccgggtgatctccgagaaggagaagcgggtcaccgcgtaccacgaggccggccacgcggtggtgggccacatgctgccgcacatggacccgctgcataagatcaccatcatcccccggggccgggcgatgggctacaccctgttcctgccggtggaggaccgctacaacatctccaagtcggagatcctcgaccgcatgaccatggccctcggcggccgggccgcggaggagatcaccttcggtgagatcaccagcggcgcccaggacgacatcgagcgcacgacgcagtgggcgcgccgcatggtcaccgagtggggcatgagcgagaagctcggcccgctcacctacggcatgaagcaggacgaggtcttcctcgcgcgcgacatgacccggctgcgcaactactccgaggaggtcgccgggctgatcgacgaagaggtgcggaagttcgtccacatggcctatcagcgggccatcgacatcctcaccgagcaccgggacgccctcgaaaaggtgtcggaggtcctgctggagaaggagaccttggagggcaaggaactgcaggatctgctggagcagctgctgccgccccggcccaagcccgagccgctgaagccgcggatggtcggcggcggcacctcgcaggtggctcctgccttctga

SEQ ID NO: 60522 - protein, 626 aa, Symbiobacterium thermophilum IAM 14863
MNKLFRSLAFYMLILVISVAIAVQLGGTSQQTTQLVYSDLVRYIQQGEVRSITLSGAYAEGELVSGEKFTVQLPPSSSQAPLVEMLQQHPNIKLDFRQDNTSGIWAMLLQTLVPVVLVLLAFFFIMQQTQGSGNRVMQFGKSRARLVTDDRKRVTFDDVAGIDEVKEELAEIVDFLKHPKRYLELGARIPKGVLLYGPPGTGKTLLAKAVAGEAGVPFFSISGSDFVEMFVGVGASRVRDLFEQAKKNSPCIVFIDEIDAVGRQRGAGYGGGHDEREQTLNQLLVEMDGFSANEGIIIIAATNRPDVLDPALLRPGRFDRQIVIDRPDLKGRLAIFQVHAKGKPLEPDVDLEVLAKRTPGFTGADIANLMNEAALLAARRRKKKISMQDVEDAIDRVLAGGPEKKSRVISEKEKRVTAYHEAGHAVVGHMLPHMDPLHKITIIPRGRAMGYTLFLPVEDRYNISKSEILDRMTMALGGRAAEEITFGEITSGAQDDIERTTQWARRMVTEWGMSEKLGPLTYGMKQDEVFLARDMTRLRNYSEEVAGLIDEEVRKFVHMAYQRAIDILTEHRDALEKVSEVLLEKETLEGKELQDLLEQLLPPRPKPEPLKPRMVGGGTSQVAPAF

SEQ ID NO: 60523 - DNA, 1905 bp, Mannheimia succiniciproducens MBEL55E
  CDS (1)..(1905): transl_table=11
ttgaacgatatggtcaaaaacataatactttgggtggttgttgcagtcgtaatgatgacggcataccaaggttttagctctagcgcgaacggttcggcggtagattatacaacgttcgttacggatgtcggaaataatcagattgcccaagcccgttttgaagacacggaaattcttgtcactaaaacggacggctcaaaatattcgacggttatgccgatttatgacgataagattttgaacgatctgcttaacaaaaaagtgaaagtagaaggcacaatgccggaaaaacgcggattgttatcgcaaattctcatttcctggttcccgatgctgtttttaatcggcgtgtggttattcttcatgcgtcaaatgcaaggtggcggcggcaaagccatgagctttggtaaaagccgtgccaaaatgttgacgaaagagcagattaagaccacgtttgccgatgtcgccggttgcgatgaagcgaaagaagaagtgggggaaatcgttgattttctgcgcgatcccggtaaattccagaaattgggcggtaaaattcctaaagggattttaatggtcggcccgccgggcacgggtaaaaccttaatcgcaaaagccattgccggtgaagcgaaagtgcctttcttcaccatttcgggttctgacttcgttgagatgttcgtgggtgtcggtgcttctcgtgtgcgcgatatgttcgaacaggccaagaaaaacgcaccttgtttgatttttattgacgagattgatgcggtaggtcgccaacgtggtgctgggcttggcggcggtcatgatgaacgcgaacaaaccctcaaccaaatgttagttgaaatggacggttttgaaggtaacgaaggggtaatcgttattgccgcgacaaaccgtccggacgtactggacccggcattaactcgtcctggtcgttttgaccgtcaggttgttgtcggtttgccggatgtacgcggtcgtgagcagattttaaaagtacatatgcgtaaagttccgataggcgcggatgtggatgccatgactcttgcgcgcggtacgccgggttattcaggtgcggatttagccaacttagtgaatgaagccgccttgtttgccgcccgtactaataaacgtgttgtgacaatgcttgagtttgaaaaagcgaaagataagatcaatatggggccggaacgccgcactatgatcatgacggataaacaaaaagaatcaacggcttatcacgaagccggtcatgcgattgtgggctatttggtgcctgagcatgatcctgttcacaaagtgacgattattcctcgcggccgagcgctgggcgtgaccttcttcttaccggaaggcgaccaaatcagtgtgagccaaaaacaattggaaagcaagttatccacactttatgccggacgtttagcggaagatctcatttacggcgaagaaaatatttcaaccggggcatcgaacgatattaaagttgcgaccaatatcgcgcgtaatatggtgacgcaatggggtttctcagacaaactggggccgattctttataccgaagatgacggtgaagtattccttggccgctcaatggctaaagcgaagcatatgtctgatgaaacggcgcatattattgatgaagaagtacgtgagatcgtcgcaagaaactacgatcgcgcaagacagttactaattgataatatggatattttgcacgccatgaaagatgcgttagtaaaatacgaaaccattgaagaaatacaaattaagcaattaatgaatcgtgaagcggtgacaccgccggcaggttgggaagatcattcgagtgcggataattcttcttcaaatacggctgaaacggagccttcggaaaatgaaaccgaagaaaactcagtaaactaa

SEQ ID NO: 60524 - protein, 634 aa, Mannheimia succiniciproducens MBEL55E
MNDMVKNIILWVVVAVVMMTAYQGFSSSANGSAVDYTTFVTDVGNNQIAQARFEDTEILVTKTDGSKYSTVMPIYDDKILNDLLNKKVKVEGTMPEKRGLLSQILISWFPMLFLIGVWLFFMRQMQGGGGKAMSFGKSRAKMLTKEQIKTTFADVAGCDEAKEEVGEIVDFLRDPGKFQKLGGKIPKGILMVGPPGTGKTLIAKAIAGEAKVPFFTISGSDFVEMFVGVGASRVRDMFEQAKKNAPCLIFIDEIDAVGRQRGAGLGGGHDEREQTLNQMLVEMDGFEGNEGVIVIAATNRPDVLDPALTRPGRFDRQVVVGLPDVRGREQILKVHMRKVPIGADVDAMTLARGTPGYSGADLANLVNEAALFAARTNKRVVTMLEFEKAKDKINMGPERRTMIMTDKQKESTAYHEAGHAIVGYLVPEHDPVHKVTIIPRGRALGVTFFLPEGDQISVSQKQLESKLSTLYAGRLAEDLIYGEENISTGASNDIKVATNIARNMVTQWGFSDKLGPILYTEDDGEVFLGRSMAKAKHMSDETAHIIDEEVREIVARNYDRARQLLIDNMDILHAMKDALVKYETIEEIQIKQLMNREAVTPPAGWEDHSSADNSSSNTAETEPSENETEENSVN

SEQ ID NO: 60525 - DNA, 1920 bp, Bacillus licheniformis ATCC 14580
  CDS (1)..(1920): transl_table=11
atgaatcgggtcttccgtaataccattttttatttacttattttattagttgtgatcggagttgtgagctacttccaaaccgcaaatccgaaaacagaaaatatgacgtatagtgactttgtttcaaacctagaaaacgggaaggttgaaaatgtctccatccagcctgtcaggggtgtgtacgaggttcgggggcagctgacgacctatgaaaaagatcagtatttcctgacccatgttcctgaaggaaaaggggcagatcaaatcattgatcaagtgaaaaaaacgaagatacaaatagaacctgcgcaagaagcaaatggatggatgacgttctttaccaccatcatcccttttgttattatcttcattcttttcttcttcctgcttaatcaggctcaaggcggcggcagccgtgttatgaactttggaaaaagcaaggcgaagctctatacagaagaaaagaaacgcgtcaaattcaaagatgtggcaggagcggatgaagaaaagcaagagcttgtggaagtcgttgatttcctcaaggatccccgcaaatttgccgagctcggtgcaagaattccgaaaggcgtgcttttggtcggacctccgggtaccggtaaaacattgctggcgaaagcatgtgccggtgaagcaggggtgcctttcttcagcatcagcggatctgacttcgttgaaatgttcgtcggggttggtgcatcacgtgttcgcgacttgtttgaaaacgccaagaaaaatgcgccgtgtctgattttcatcgatgagattgatgctgtcggacgccagcggggagcaggccttggcggaggtcacgatgaacgtgaacagacgctcaaccagcttcttgttgaaatggacggattcagcgccaatgaaggaatcatcatcatcgctgcgacaaaccgcgccgatattttagaccctgcattgctgcgcccgggacgttttgaccgtcaaattactgttgaccgcccggatgtcaaaggccgtgaagctgtacttcaagtacacgcaagaaacaagcctcttgatgaatccgtaaacctaaaagcgatcgcgatgcggacgccagggttctcgggtgcagaccttgaaaaccttttaaatgaagcggctcttgtggcggcgcgtcaagataagaaaaagatcgatatgcgagacatcgatgaagcgacagaccgcgtcatcgccggacctgcaaagaaaagcagggtgatctcgaaaaaagaacgcaatatcgtggcttatcacgaggcgggacacaccgttatcggacttgtcttggatgaggcggatatggtgcataaagtaacgattgtaccgcgcggccaagcaggcggatatgccgtcatgcttcctaaggaagaccgttatttccaaaccaaacccgaacttctcgataagattgtcggcttgcttggaggccgtgtagctgaggaaatcatcttcggcgaggtcagcacgggcgcccataatgacttccagcgcgctacaggcattgccagacgaatggtaaccgaattcggtatgtctgaaaagctcggtcctcttcaattcggacaatcgcaaggcgggcaagtattcttgggtcgagatttcaacaatgaccaaaactacagcgacgcgattgcgtatgaaatcgataaagaaatccagcgcttcattaaggaatgttatgaacgtgcaaaaacaatccttactgaaaatcgcgacaaacttgagctgatcgctcaaacattgctggaagttgaaacgctcgacgctgagcaaatcaagcatttgtctgagcacggaagacttcctgatcgaacatactctgatgatcaggagaagacagatgatgtgaaagtcaacatcaataaacgagatgacgaagagaaaaacgaggatgaaaaagagtaa

SEQ ID NO: 60526 - protein, 639 aa, Bacillus licheniformis ATCC 14580
MNRVFRNTIFYLLILLVVIGVVSYFQTANPKTENMTYSDFVSNLENGKVENVSIQPVRGVYEVRGQLTTYEKDQYFLTHVPEGKGADQIIDQVKKTKIQIEPAQEANGWMTFFTTIIPFVIIFILFFFLLNQAQGGGSRVMNFGKSKAKLYTEEKKRVKFKDVAGADEEKQELVEVVDFLKDPRKFAELGARIPKGVLLVGPPGTGKTLLAKACAGEAGVPFFSISGSDFVEMFVGVGASRVRDLFENAKKNAPCLIFIDEIDAVGRQRGAGLGGGHDEREQTLNQLLVEMDGFSANEGIIIIAATNRADILDPALLRPGRFDRQITVDRPDVKGREAVLQVHARNKPLDESVNLKAIAMRTPGFSGADLENLLNEAALVAARQDKKKIDMRDIDEATDRVIAGPAKKSRVISKKERNIVAYHEAGHTVIGLVLDEADMVHKVTIVPRGQAGGYAVMLPKEDRYFQTKPELLDKIVGLLGGRVAEEIIFGEVSTGAHNDFQRATGIARRMVTEFGMSEKLGPLQFGQSQGGQVFLGRDFNNDQNYSDAIAYEIDKEIQRFIKECYERAKTILTENRDKLELIAQTLLEVETLDAEQIKHLSEHGRLPDRTYSDDQEKTDDVKVNINKRDDEEKNEDEKE

SEQ ID NO: 60527 - DNA, 1920 bp, Legionella pneumophila subsp. pneumophila str. Philadelphia 1
  CDS (1)..(1920): transl_table=11
ttgaacgacatggttaaaaatttatttttgtggctgataatagcgatagttcttgtctctgttttcagtaattttggtcctcgtaactcagttgctgagaaaatttcttatagccagtttttacaggaagtggatcaagggatgattaactctgttacgattgaggataacaaaatcatcaagggcgtaaccaagaataataaacgctttgtcacgtacatgccgatgcaagacaatgctttgttaggcgaattgttgaaaagcaaagtcgatgtcagtggtcaggaaaaacaacaggaaagtttccttttgcatttatttattaactggttcccaatgttgttattgataggtgtatggatatttttcatgcgccaaatgcaaggcggcggtggtcgcggcgcaatgtctttcggcagatcaagagctcggctattaggtgaagatcaggttaaagtcacctttgcagatgttgcaggtgttgatgaagccaaagaagaagtgaaagagcttgtcgattttttacgtgatccaacaaagtttcaaaatttgggtggacgcattccccgcggtgttttgctggtcggttcccctggtacaggtaaaacattattagccagggcagttgccggggaagcgaaagtccctttctttaccatttcaggttctgattttgttgagatgtttgttggggtcggtgcgtcccgagtgcgtgatatgtttgagcaagccaaaaagcatgcgccatgtatcatctttatagatgaaatcgatgcagtaggtagacacagaggcgccggcttgggtggcggtcatgatgaacgcgagcaaacacttaaccaattgcttgttgaaatggatggatttgaaggtaatgaaggagttattgtcgtagcggcaactaaccgtcccgatgttttggaccccgcgcttttacgtcccggccgctttgatcgtcaagtcgttgttcctttgcctgatatcagaggtcgtgagcaaatattaaaagttcatttacaaaaggtccctgtagatagccatgtagaagtgaaagctattgcacgcggtaccccaggtttttcaggagcggatttagccaatcttgttaatgaagcggcattatttgctgccagggctaataaacgcaaagtgggtatgattgaactggataaagcaaaagataaaattatgatgggggctgaaagacgctccatggtaatggatgataacgagaaaaaactcaccgcatatcatgaagcaggtcatgctatcgttggtctgtcagttcctgagcatgatccagtttataaagtatcaataattcctcgaggccgagctttgggtgtaactatgtttttaccagaacaagacagatatagtcacagcaaacgccgtttggaaagtcaattatgcagtctgtttggtggtcgaattgcagaggaattaatttttggtcctgaaagtgtgacaacgggtgcttccaatgacattatgcggtctactgagattgctcgcaaaatggttacaacttggggcttatctgctttaggtcctctaacttttggtgaggaagaggaagaaatatttttaggacgctcagtgaataaacataaggagatgtccgatagaacagcacagcaaattgatgacgaggttcgtgctattattgacaggaactatcaaagagcaaaagaaatattggaaactaatatcgataaattacatttaatggctcaaagcctcatcaaatacgaaacgatagacaccaatcaaattcaagaaattatgtctggtaaagagcctacccctccggaggattgggggtcaacaaaaccgatggataaggctgagtcggttaatgatgctcctgcaaagcctattaatggcgaaacaatagaaaatccggcagaaggacattaa

SEQ ID NO: 60528 - protein, 639 aa, Legionella pneumophila subsp. pneumophila str. Philadelphia 1
MNDMVKNLFLWLIIAIVLVSVFSNFGPRNSVAEKISYSQFLQEVDQGMINSVTIEDNKIIKGVTKNNKRFVTYMPMQDNALLGELLKSKVDVSGQEKQQESFLLHLFINWFPMLLLIGVWIFFMRQMQGGGGRGAMSFGRSRARLLGEDQVKVTFADVAGVDEAKEEVKELVDFLRDPTKFQNLGGRIPRGVLLVGSPGTGKTLLARAVAGEAKVPFFTISGSDFVEMFVGVGASRVRDMFEQAKKHAPCIIFIDEIDAVGRHRGAGLGGGHDEREQTLNQLLVEMDGFEGNEGVIVVAATNRPDVLDPALLRPGRFDRQVVVPLPDIRGREQILKVHLQKVPVDSHVEVKAIARGTPGFSGADLANLVNEAALFAARANKRKVGMIELDKAKDKIMMGAERRSMVMDDNEKKLTAYHEAGHAIVGLSVPEHDPVYKVSIIPRGRALGVTMFLPEQDRYSHSKRRLESQLCSLFGGRIAEELIFGPESVTTGASNDIMRSTEIARKMVTTWGLSALGPLTFGEEEEEIFLGRSVNKHKEMSDRTAQQIDDEVRAIIDRNYQRAKEILETNIDKLHLMAQSLIKYETIDTNQIQEIMSGKEPTPPEDWGSTKPMDKAESVNDAPAKPINGETIENPAEGH

SEQ ID NO: 60529 - DNA, 1917 bp, Methylococcus capsulatus str. Bath
  CDS (1)..(1917): transl_table=11
gtgaacgacatgttaaagaatatcctgctctgggtggtcatcgccgtcgtgctgatgtccgtcttcaacaacttcgggtcccgtaaatcggtcgattccagcatgtcctattcgcagttcatcgcggcggtgaatgaaggacaggtcaagtcggtgacgatcgacgggcagaacgtgcgcggcatgctgggtacgggtgagaaattctcgacctacaacccggaagacccgcacctgatcgacgacctgctcaagaaccacgtggagatcaaggcgcagccgccggagtcgcagtcgctcctgatgcaaatcttcatctcctggttccccatgctgctgctggtggcggtatggatattcttcatgcgccagatgcagggcggcgcgggcggccggggggcgatgtccttcggcaagagcaaggcacggctgatcgaagaagatcaggtcaaggtgaccttcgccgatgtggcgggtgccgacgaggccaaggaggacgtagccgagatggtcgatttcctcaaggatccgagcaagttccagaaactgggcggcaagatcccgcgcggcgcgctcatggtcggcccgccgggcaccggcaagacgctgctggcacgggccattgccggcgaggcgcgggtgccgttcttctcgatatcgggttcggatttcgtggaaatgttcgtcggggtgggcgcgtcgcgcgtgcgtgacatgttcgaacaggccaagaagcacgctccctgtatcatcttcatcgacgaaatcgatgcggtcggccgtcaccgcggtgcgggtctgggcggcgggcatgacgagcgcgagcagaccctgaaccagctgctggtcgagatggacggtttcgaaggcaccgaaggcatcatcgtgatcgccgcgaccaaccgccccgacgtgctcgatcccgcgctgctgcggccgggccggttcgaccgccagatcgtggtggggctgccggacgtccgcggccgtgagcagatcctcaaggtccacatgaaacgcgtgccactggctgacgacgtggaagcgaagtatctggcacggggcacgcccggtttctcgggggccgatctggccaacctcgtcaacgaggccgccctgttcgccgcccgcaaaaacaagcgggtcgtggaaatggaggatttcgagaaggccaaggacaagatcctcatgggcgtcgagcgcaagtccatggtcatgagcgatgaggaaaagaagctcacggcctaccacgaagccggccatgccatcgttggcttgatggtccccgagcatgaccccgtgtacaaggtcagcatcatgccacgcggccgcgcccttggcatcacgatgttcctgccggagcgtgacacctacagcgccagcaagcagaaactggagagccagatttccagcctgttcggcggccggctggccgaggagatcgtgttcggtcgtgagcacgtcaccaccggtgcccagaacgacatcgaacgtgccaccaatttggcgcggaacatggtgacgcgctgggggctctcggagcggctggggccgctggcttacagcgaggaggagggcgaggtcttcctggggcggtccgtgaccaagcacaagagcgtatcggaggagacggcgcacctgatcgacgaggagatccgctcgatcatcgaccgtaactacgagcgcgccgagcgtatcctccgggaaaatatggataagatgcacctcatggccgaagcgctgatcaaatatgaaaccatagaccgtctgcagatcgccgacatcatggaaggcaggtcccccagggttccccagagctgggaggacaatacgcctcccggtagcggcgagtcggcatcgaagggtggcgatcagccggtatcggggtccttcggcaaaccggcggagcagacctga

SEQ ID NO: 60530 - protein, 638 aa, Methylococcus capsulatus str. Bath
MNDMLKNILLWVVIAVVLMSVFNNFGSRKSVDSSMSYSQFIAAVNEGQVKSVTIDGQNVRGMLGTGEKFSTYNPEDPHLIDDLLKNHVEIKAQPPESQSLLMQIFISWFPMLLLVAVWIFFMRQMQGGAGGRGAMSFGKSKARLIEEDQVKVTFADVAGADEAKEDVAEMVDFLKDPSKFQKLGGKIPRGALMVGPPGTGKTLLARAIAGEARVPFFSISGSDFVEMFVGVGASRVRDMFEQAKKHAPCIIFIDEIDAVGRHRGAGLGGGHDEREQTLNQLLVEMDGFEGTEGIIVIAATNRPDVLDPALLRPGRFDRQIVVGLPDVRGREQILKVHMKRVPLADDVEAKYLARGTPGFSGADLANLVNEAALFAARKNKRVVEMEDFEKAKDKILMGVERKSMVMSDEEKKLTAYHEAGHAIVGLMVPEHDPVYKVSIMPRGRALGITMFLPERDTYSASKQKLESQISSLFGGRLAEEIVFGREHVTTGAQNDIERATNLARNMVTRWGLSERLGPLAYSEEEGEVFLGRSVTKHKSVSEETAHLIDEEIRSIIDRNYERAERILRENMDKMHLMAEALIKYETIDRLQIADIMEGRSPRVPQSWEDNTPPGSGESASKGGDQPVSGSFGKPAEQT

SEQ ID NO: 60531 - DNA, 1833 bp, Anaplasma marginale str. St. Maries
  CDS (1)..(1833): transl_table=11
atgaattttaggaaagtggctgaggggttgattgtatggtcagcagtgattgccctcactgctgtgctttacacccagtttggtgacaagattataggcaacaaggaactacgtgtacctttctccgagtttcttgtaaagctagatgctggggaagttgagcatgttaacataacagagcgcgaaatatcaggaaagctgcgtgacggcacaaggtttaggaccgggggcgtgatatatgatagcctgataaaaaccttgcacgctcagaaagttacttttgagttctcatctggagaaacagtgctgggcatcctgggcagcttgctcatttcctgtctgccgatgttatccctggtagttatatggtgcatcttcctcaaacagattcaggttgggggcaaccgcacgatgagtttcagcaagtcccgcgcaaggcttatgaccgataaccgcggcaaggtcacattcgaagacgtggccggcattgatgaggcaaaagaagaacttgtagagatagtagactttctcaagcatcggcaaaagtttcaaaagttaggtggaaaaattccgaaagggtgcttgctgataggcccacctgggactggtaaaacgctgttggctcgtgcaattgctggtgaggccagcgtccccttctttagcatctctggttctgatttcgtagaaatgtttgttggtgtaggagccagcagggtgcgggacatgttcgagcaggggaagaagcatgcgccatgtataattttcgtggacgagatagacgccgtaggccggcatcgcggcataggtcttggtgggggtaatgacgaacgcgagcaaacgctgaatcagttgcttgtagaaatggatggatttgaatccaacgatggcgtaatcataatcgccgcaaccaaccgcccagacgttcttgatcccgccttgctaaggccgggtaggtttgaccggcaggttactatatccattccagatataaacgggcgtgagaagattataaacgtgcacgctaaaaaggtgcccatggccccggatgttgatgtcagagtagtggcaagggggacccctgggttctccggtgctgacctggccaatttggtcaacgaagccgcattgattgctgccaggcttaacaagaaagtcgtcactatgagtgactttgagtacgccagagacaaggtcatgatgggcgccgaaagaaggtctatgattatgacggatgaggagcgccgccttactgcgtatcacgaagctgggcacgcggtaacggcatttcacaaccccgcctccgatcctatacacaaagctactatcataccgagaggtagaacactgggtttggtaatgcgcctgccagaaactgacagagtctcgcacacgagagaaaaaatgcttgctgacttggtagtggccatggggggcagggccgcagaggagctgattttcggatacagtaaagtgactagtggtgcatcttcggacattaagcaggccacagaattggctagatctatggtcatgaagtggggcatgagtgatagtgtaggacctctttaccacagcgacgaccggaacgagtcaatttctgacaacatggcaaacctcatagacgaggaggtaaagtctatagtatcgaaagcgcttgaagaggctaaggccaccctggaaaagcacattaactccctacatgtgatagcggaaaaccttctggaatttgagacgcttaccggcgacgaaataagcgatctgatgtccggcaagaaaataaccaggaatgagggagaagctaaaccaataaagcgttcttttgtgccggactga

SEQ ID NO: 60532 - protein, 610 aa, Anaplasma marginale str. St. Maries
MNFRKVAEGLIVWSAVIALTAVLYTQFGDKIIGNKELRVPFSEFLVKLDAGEVEHVNITEREISGKLRDGTRFRTGGVIYDSLIKTLHAQKVTFEFSSGETVLGILGSLLISCLPMLSLVVIWCIFLKQIQVGGNRTMSFSKSRARLMTDNRGKVTFEDVAGIDEAKEELVEIVDFLKHRQKFQKLGGKIPKGCLLIGPPGTGKTLLARAIAGEASVPFFSISGSDFVEMFVGVGASRVRDMFEQGKKHAPCIIFVDEIDAVGRHRGIGLGGGNDEREQTLNQLLVEMDGFESNDGVIIIAATNRPDVLDPALLRPGRFDRQVTISIPDINGREKIINVHAKKVPMAPDVDVRVVARGTPGFSGADLANLVNEAALIAARLNKKVVTMSDFEYARDKVMMGAERRSMIMTDEERRLTAYHEAGHAVTAFHNPASDPIHKATIIPRGRTLGLVMRLPETDRVSHTREKMLADLVVAMGGRAAEELIFGYSKVTSGASSDIKQATELARSMVMKWGMSDSVGPLYHSDDRNESISDNMANLIDEEVKSIVSKALEEAKATLEKHINSLHVIAENLLEFETLTGDEISDLMSGKKITRNEGEAKPIKRSFVPD

SEQ ID NO: 60533 - DNA, 1893 bp, Azoarcus sp. EbN1
  CDS (1)..(1893): transl_table=11
ttgaataatctcttcaagaatctcgcgatctggatggttatcggcgtcgtgctgatgacggtattcaaccagttcaatacgcggcaggtttcggccagtacgatggagtactcccagtttctggaggaagccagggccgggcgcatcgcgaaagcgactatcgacggccgtctggtgcgtgcgacgacgcaggaaggccggcagatcactgtgtatacgcctggtgtgcaggatatctggatggtgtcggacctgatccgcgccggcgtggccgtgaacgcgtcgaagcccgaagaagagcagtcgttcctgatgagcatcttcgtttcctggttcccgatgttgctgctgatcggcgtctgggtgttcttcatgcggcagatgcagggaggcggacggggcggcgcgttttcgttcggcaagtcgaaagccagaatgctcgatgagagcgccaattcgctctcttttgcggatgtcgcaggctgcgacgaagcaaaggaggaagtgtccgaactcgtcgatttcctgcgtgacccgtccaagttccagaaacttggcgggcacattccgaaaggcgtgctgatggtcggttcgccgggtaccggcaagactttgctcgcgaaggcgattgccggcgaggcgaaagtgccgttcttctcgatttccggctccgatttcgtcgagatgttcgtcggtgtcggcgcggcgcgcgtacgtgacatgttcgagcaggcgaagaaacacgcgccatgcatcatcttcatcgacgagatcgatgctgtcggacgtcagcgtggcgcaggcatggggggcggcaacgacgagcgcgaacagactctcaaccagttgctcgtcgagatggacggcttcgaagggcaaacgggagtcatcgtgatcgccgcgacgaaccgccctgacgtgctcgatccggcgctgctgcgcccgggacggttcgaccggcaggttgtcgtcccgctgcccgatatccggggccgggagcagatcctgaaagtccatatgcgcaaggtgcccattgcaccggacgtcgaacctgtcgtccttgcgcgcggcacgcccggattttccggcgccgacctggcgaacctcgtcaacgaagcggcattgttcgcggcgcggggcggcaagcgactcgtggatatggaagacttcgagcgcgccaaggacaagatcatgatggggtccgaacgtcgttcgatggtgatgccggaagaggaacgccgtaacacggcgtaccacgaatccggtcatgcgttggtcgcgaagttgctcgacaagaccgacccggtgcacaaggtcacgatcatcccgcgaggtcgtgcactgggggtgacgatgcagctgccggagcaggatcgttacagccaggaccgcgaacggctgctccagacgatcgccgtgctgttcggtggccggatctgcgaagagatcttcatggaccagatgactaccggcgcttcgaacgactttcagcgggccactgacctcgctcgccggatggtgacgcagtggggcatgtcggacaatctcgggccgatggtgtatggcgaagaagagggagagatctttctcggccggcaggtgacgacccaccggaacgtgtccgaagccacgatgcagaaagtggatgccgagatacgccgcatcatcgatcagcagtacgcactggcgcggcgcctgatcgaagacaaccgcgacaagatcgaggcgatgacgcgtgcgctgctcgaatgggaaactctggatgcggaacaactgaacgacatcatggcgggacgtgctccgcgggcacccaagccgatcactccggcgcagagtcgcccgaaggacgacgctccgggagccgagcccacggcgccggccccggcagcgtaa

SEQ ID NO: 60534 - protein, 630 aa, Azoarcus sp. EbN1
MNNLFKNLAIWMVIGVVLMTVFNQFNTRQVSASTMEYSQFLEEARAGRIAKATIDGRLVRATTQEGRQITVYTPGVQDIWMVSDLIRAGVAVNASKPEEEQSFLMSIFVSWFPMLLLIGVWVFFMRQMQGGGRGGAFSFGKSKARMLDESANSLSFADVAGCDEAKEEVSELVDFLRDPSKFQKLGGHIPKGVLMVGSPGTGKTLLAKAIAGEAKVPFFSISGSDFVEMFVGVGAARVRDMFEQAKKHAPCIIFIDEIDAVGRQRGAGMGGGNDEREQTLNQLLVEMDGFEGQTGVIVIAATNRPDVLDPALLRPGRFDRQVVVPLPDIRGREQILKVHMRKVPIAPDVEPVVLARGTPGFSGADLANLVNEAALFAARGGKRLVDMEDFERAKDKIMMGSERRSMVMPEEERRNTAYHESGHALVAKLLDKTDPVHKVTIIPRGRALGVTMQLPEQDRYSQDRERLLQTIAVLFGGRICEEIFMDQMTTGASNDFQRATDLARRMVTQWGMSDNLGPMVYGEEEGEIFLGRQVTTHRNVSEATMQKVDAEIRRIIDQQYALARRLIEDNRDKIEAMTRALLEWETLDAEQLNDIMAGRAPRAPKPITPAQSRPKDDAPGAEPTAPAPAA

SEQ ID NO: 60535 - DNA, 1932 bp, Azoarcus sp. EbN1
  CDS (1)..(1932): transl_table=11
atgaagctattctctgcgtggccccgctgggtccaaatccttttttccgtcgccctttttacctccgtcgtcgccggctggatcgcgttcgactaccacagccacgcgccgagcacggctggcaagaccgaactcgcacgcgagttcgagtccggcccccacatgtggctggaccgtccgctcgacgcatcggttttcgcggacaagcttcgacagggcgagatcgccgcggtcggggtcgacggccagcgcgtgctggcgacgacccgcagcggtgagcaattcagcaccgagctcgtcgcgggcgaggaaggactgctggccggcctcgaaaccgcgagccgggagcagggtttcgcgctgacccgcatcagcgtggacgcgcgcacggtcggcgaacgcatcgtcgccagcacgggcagcgtgctcgagcgactcttcacgctgttgacggtcgccgcaatggtggtgctcggcgtctatctgctgcggcaaggtgcaatgggcggcggcgcgaaagccaggctcgccgagaagccgcagacgagtttcgtcgacgtggtcggcgcgtcggatgcgaaaacctcgctgcagcaggtgactgccttcatgcgcgacccgcagaaatatctcgcgctcggggccaagccgccgcgcggcgtgcttctcgaaggcccgccgggaaccggaaaaaccttgctcgcgcgcgcactcgccggcgaatgcaaggcgaacttcatcgccgtcgatggctcgcatttttcgagcatgttctacggccagggcatcgcgaaagtccgcgaactcttcgcgaccgcccgcaagaatgcgccctgtatcattttcatcgacgagttcgacggcatcggcaagcgcgcgagtggtgcgaaagtcgagggcgggcagtccgaagagaaccgcatcatcaacaagctgctcgtcgagatggacggtttctcgacctccgacaacatcatcgtcatcggcgcgacgaaccacgtcggcaacgtcgacgaagcgctgcgccgccccggtcgtttcgacctcgtcgcgcgcgtcaacctgcccaccgtgcacgatcgccgcgaactgttcgagctgtgtctcgcccgcgtccgggccgagtccgggcagatcgacgcggaggcgctcgcgcgcgcgagcagcggcctgtcgcacgccgacatcacgaacatcgtcaatcgcgcgacggtactggcggcggagtcgggcagcgcttcggtgacccaggctcacctgcaccgcgcgctcgaaacgcaccagctcggcggcgaagtctcgagcctgaaggccgcgttcaccgaaacgcaccgcgagcgcattgcggtgcacgaagcgggccacgcgctggtcgcccatgcgctgaaagcgggccgcgtcgagcgcatcagcatcgagccgcgcggccaggcgctcggcgtgaccttcgtcagccgcgaggacgaagtgccgctgtatggcgagcgcgaactgaaggcgcggctgtcgatgctgctggccgggcgcgaggccgaactgatgaattacggcaacacgacgtcgggcgcggccgatgacctcaagcgggcctcggaactggcaatcgaaatggtcagctcgatggggttttcgagccagttcgggctgctgagcctcgccggtgtgcccgatgcgctggtcggaccacatatccaggagcgggcgctgggcgaagcgcgcgcgatgctcgaagcggcccagcgcgcgtgccgcgagacgctcgaacgccattgtcacgtgctgcacgcggtgaccgcagcgctgctgaaggacgacacggtttccggcgcgttgctgcgcgagatgttgccggcgcatgatttccacgccgacgcggcgaacgacgcggcagcactgcgtgttgcgatggaaacggttcccgggccggtgtaa

SEQ ID NO: 60536 - protein, 643 aa, Azoarcus sp. EbN1
MKLFSAWPRWVQILFSVALFTSVVAGWIAFDYHSHAPSTAGKTELAREFESGPHMWLDRPLDASVFADKLRQGEIAAVGVDGQRVLATTRSGEQFSTELVAGEEGLLAGLETASREQGFALTRISVDARTVGERIVASTGSVLERLFTLLTVAAMVVLGVYLLRQGAMGGGAKARLAEKPQTSFVDVVGASDAKTSLQQVTAFMRDPQKYLALGAKPPRGVLLEGPPGTGKTLLARALAGECKANFIAVDGSHFSSMFYGQGIAKVRELFATARKNAPCIIFIDEFDGIGKRASGAKVEGGQSEENRIINKLLVEMDGFSTSDNIIVIGATNHVGNVDEALRRPGRFDLVARVNLPTVHDRRELFELCLARVRAESGQIDAEALARASSGLSHADITNIVNRATVLAAESGSASVTQAHLHRALETHQLGGEVSSLKAAFTETHRERIAVHEAGHALVAHALKAGRVERISIEPRGQALGVTFVSREDEVPLYGERELKARLSMLLAGREAELMNYGNTTSGAADDLKRASELAIEMVSSMGFSSQFGLLSLAGVPDALVGPHIQERALGEARAMLEAAQRACRETLERHCHVLHAVTAALLKDDTVSGALLREMLPAHDFHADAANDAAALRVAMETVPGPV

SEQ ID NO: 60537 - DNA, 1920 bp, Silicibacter pomeroyi DSS-3
  CDS (1)..(1920): transl_table=11
atgtccttgggcaacgcacgtaacatcgccttctgggtcgtccttttcctgttgattctcgctctgttcaacctcttcagcgggtcgggcggaactttgcagagccaggaaaagacctattccgaatttgtcagtgccgtcgatgaaggcaatgtgacaaaggtgatcctcgacggtgagcaaatccgctaccgcaccagtgacggtcgcgatttcgtcaccatcaagcctggcgatgccgaggtgaccaccctgctgatcgacaagaacatcccggtgcgcgcggaaaagcagcagcaatcggggttccagtccttcatcatcaccctgctgccattcctgctgctgatcggtgtctgggtctatttcatgaaccggatgcagggcggcgggcgcggtggcgccatgggtttcggcaagtccaaggccaagatgctgaccgagaaacatggccgcgtcacctttgacgacgtggcgggcatcgatgaggccaaggaagagctggaagagatcgtcgaattcctgcgcaacccgcagaaattcagccgcctgggcggcaagatccccaagggtgcgctgctggtgggccctccgggcaccggtaagacgctgctggcgcgtgccattgcgggcgaggcgggcgtgcccttcttcaccatctctggctcggatttcgtggaaatgttcgttggtgtcggtgcctcccgtgtgcgcgacatgttcgaacaggccaagaagaacgcaccctgtatcgtgttcatcgacgagatcgacgccgtgggccgccatcgtggtgccggctatggcggcggcaatgacgaacgcgaacagacgctgaaccagttgctggtcgaaatggacgggttcgaggccaacgagggtgtcatcatcctggccgccaccaaccgcaaggacgtgctggaccccgcgctgctgcgcccgggccggttcgaccgcaacgtcaccgtcggcaaccccgatatcaaggggcgcgagaaaatcctgggcgtacatgcccgcaagaccccgctgggtcctgatgtcgatctgcgcatcatcgcgcgcggcacgcccggcttctcaggcgccgatctggccaacctcgtgaacgaagcggcgctgatggccgcccgcgtgggccggcgtttcgtgaccatggaggatttcgagaacgccaaggacaaggtcatgatgggggccgagcgccgctcgatggtgctgacccaggaccagaaggaaaagaccgcctatcacgaggccggtcacgcggtggtggggcttgccctgccgatgtgcgatccggtctacaaggccacgatcatcccgcgcggcggcgcgctgggcatggtggtcagcctgccggaaatggaccggctgaactggcatcgtgacgaatgccagcaaaaactggcgatgaccatggctggcaaggccgccgagatcctcaaatacggcgaggatcacgtgtccaacggcccggcgggcgatatccagcaggccagccagctggcccgtgcgatggtgatgcgctggggcatgtccgacaaggtcggcaatatcgactatgccgaggcgcatgagggctattccggcaataccgccgggttctcggtctcggctcataccaaggagctgatcgaggaagaggtcaaacgcttcatccagcagggctatgatcaggcccatgccatcctgaccgaacgccgcgaggattgggatcgcctggctcagggcctgctggaatacgaaaccctgaccggcgaagagatcaagcgggtgatgaagggcgaaccgccccatgccggcgatgacgaggatcagggtacggatcagggcaatgctgccagtgtgaccgcgatccccaagaccaagcccaaggcgccgccggcaggcgggatggaacccgaacccaccgcctga

SEQ ID NO: 60538 - protein, 639 aa, Silicibacter pomeroyi DSS-3
MSLGNARNIAFWVVLFLLILALFNLFSGSGGTLQSQEKTYSEFVSAVDEGNVTKVILDGEQIRYRTSDGRDFVTIKPGDAEVTTLLIDKNIPVRAEKQQQSGFQSFIITLLPFLLLIGVWVYFMNRMQGGGRGGAMGFGKSKAKMLTEKHGRVTFDDVAGIDEAKEELEEIVEFLRNPQKFSRLGGKIPKGALLVGPPGTGKTLLARAIAGEAGVPFFTISGSDFVEMFVGVGASRVRDMFEQAKKNAPCIVFIDEIDAVGRHRGAGYGGGNDEREQTLNQLLVEMDGFEANEGVIILAATNRKDVLDPALLRPGRFDRNVTVGNPDIKGREKILGVHARKTPLGPDVDLRIIARGTPGFSGADLANLVNEAALMAARVGRRFVTMEDFENAKDKVMMGAERRSMVLTQDQKEKTAYHEAGHAVVGLALPMCDPVYKATIIPRGGALGMVVSLPEMDRLNWHRDECQQKLAMTMAGKAAEILKYGEDHVSNGPAGDIQQASQLARAMVMRWGMSDKVGNIDYAEAHEGYSGNTAGFSVSAHTKELIEEEVKRFIQQGYDQAHAILTERREDWDRLAQGLLEYETLTGEEIKRVMKGEPPHAGDDEDQGTDQGNAASVTAIPKTKPKAPPAGGMEPEPTA

SEQ ID NO: 60539 - DNA, 1884 bp, Synechococcus elongatus PCC 6301
  CDS (1)..(1884): transl_table=11
gtgagagcgatcatggccatcaaggagaatcccacgcggccgagccgcaaccgtattatcagcttcgtcctgtttggtgtgggtctgttctttttgctgattgggttaattcccggcgtgggcagtccccaagtctctcgggtgccctacagcctattcatcgatcaggtgaatgatggcttggttgcccgggcttacatcacgcaggaacaaattcgctaccaactcaaggatgttgagggcgaagcgggtgatgtcctcagcacaacgcccatctttgacttggaactccctcagcgtctggaacaaaagggggttgagtttgctgctgccccacctcagaaaggaaatttctttaccactctgctcggttggatcattccgcccttgattttcattggggtgctgcaattctttgcagctcggcaagcccgcaatggcccgcaaggcgcgctgtctttcacgaagagtcgcgctaaggtctacgtcgaaggtgatgatacccgtaccaccttcagtgatgtggcgggcgtcgaagaggcgaaggccgaactgcaagagattgttgacttcctcaaaacccctgaacgctacctcaacattggcgctcgtattccaaaaggggtattgctggtcgggcctccgggtaccggtaaaaccctgctggcgaaagccgtagccggtgaagcccgcgtgccgttcttctcaatttctggttcggaattcgtcgaactctttgttggcgctggggcagctcgcgtccgtgacctgtttgaacaagccaagcagaaggcaccttgtatcgtcttcatcgatgagttggatgcgatcgggaaatctcgtgccagcggcaatttcatgggtggcaacgatgagcgggagcaaaccctcaaccagttgctgaccgaaatggatgggttctcggcagatggcgccactgtcattgtccttgcagccaccaaccggccagaaacactggatccggcattactacgtccgggtcgcttcgatcgccaagtcctagtcgatcgccctgatctggcgggacggaaggcaattttggacatttatggccgcaaggtcaagctggatccggaagtcgatttacaagcgatcgcggtacgaacctcaggctttgccggtgcggaccttgccaacctcatcaatgaagctgctctactggcagcgcgtaacggtcgcacagaagtcgcgcaagctgatctgaatgaagcgatcgagcgggtggtcgcgggtctggagaagaagagccgcgtcctcaacgacaacgaaaaacggattgttgcctaccacgaagtcggccacgcgatcgtgggtgccctgatgcccggtggcagcaaagtggccaagatttcgatcgtgccgcgcggtatggcagctctgggttacaccctgcaactgccgacggaagatcgcttcttgctcagtgccgaggaactcaaaggccagattgccacgctgctaggtgggcgatcggcggaagagatcatctttggcagcatcaccaccggcgcttccaatgacctgcagcgagccacagacgtggcggagcagatggtcaccacctacggcatgagccaagtcttgggcccgttggcctttgataaaggcggcggcaataacttccttggcggtgagggtatgaatcctcgccggcgggtcagtgatgagacggcgaaggcgatcgacgcagaggtcaagcaactcgtggatgatggtcacgatcaagccctggcaattctgaatcgcaatcgcgatctactcgaggaaattgctcagcgcatcttggatgtggaagtgattgaaggcgacgagctgcaatccctcctccaacgcgctgaactgcccgagttgcagccagcctaa

SEQ ID NO: 60540 - protein, 627 aa, Synechococcus elongatus PCC 6301
MRAIMAIKENPTRPSRNRIISFVLFGVGLFFLLIGLIPGVGSPQVSRVPYSLFIDQVNDGLVARAYITQEQIRYQLKDVEGEAGDVLSTTPIFDLELPQRLEQKGVEFAAAPPQKGNFFTTLLGWIIPPLIFIGVLQFFAARQARNGPQGALSFTKSRAKVYVEGDDTRTTFSDVAGVEEAKAELQEIVDFLKTPERYLNIGARIPKGVLLVGPPGTGKTLLAKAVAGEARVPFFSISGSEFVELFVGAGAARVRDLFEQAKQKAPCIVFIDELDAIGKSRASGNFMGGNDEREQTLNQLLTEMDGFSADGATVIVLAATNRPETLDPALLRPGRFDRQVLVDRPDLAGRKAILDIYGRKVKLDPEVDLQAIAVRTSGFAGADLANLINEAALLAARNGRTEVAQADLNEAIERVVAGLEKKSRVLNDNEKRIVAYHEVGHAIVGALMPGGSKVAKISIVPRGMAALGYTLQLPTEDRFLLSAEELKGQIATLLGGRSAEEIIFGSITTGASNDLQRATDVAEQMVTTYGMSQVLGPLAFDKGGGNNFLGGEGMNPRRRVSDETAKAIDAEVKQLVDDGHDQALAILNRNRDLLEEIAQRILDVEVIEGDELQSLLQRAELPELQPA

SEQ ID NO: 60541 - DNA, 1827 bp, Dehalococcoides ethenogenes 195
  CDS (1)..(1827): transl_table=11
ttgaggtaccaaatgaattcaaattggaaacgcagcaccattatttatatcgtgatgctggtggctatcatagcaatcttttcgtttctggtgccgaactcccagaaaccggaggaagtgcctctgagccagataataaccctgtctcaggaacacaagattgccgaaattacagttgacagtgaaaatatagaggtaactaccactgacggcacaaaactgtccaccgtaaaggaatacattgccagtatttacgacattgaaggcctggacctgactgatgtcaaggtaaatatccagccggcaggcggactggactggggcactatgattcttacctatctgcccttcctgatattcggcggcctgctcatcttcatctttacccaggccaggggcgccaacaatcaggccgtctctttcggccgctccaaggccaagctctttaatatggacaagcccaccattacctttgccaacgtggccggggtagacgaagccaaacaggaagtaggcgaagtagtagagttcctgaaatcccgtgaaaagtttcaggcgctgggtgcccgcattcccaaaggtattttgctgataggcccccccggtacgggtaaaactttgctggccaaggctattgccggagaagccggagttcccttcttctctataagcggctccgagtttgtagaaatgtttgtgggcgtgggtgcttccagggtgcgtgatttgtttgaccaggctaaaaagaatgccccctgcattatctttatagacgaaatagatgctgtcggacgccagcgcggtgccggactgggcggcgggcatgacgaacgcgaacagacccttaaccagatactggtggaaatggacgggtttgataccgataccagcgtaatagttattgcggctaccaaccgccctgatatccttgaccccgccctgctccgccccggccgttttgaccgcagagtagtgctggacaaaccggatataaccgggcgtgaagccatactgaaaatacatgccaagggcaaacccctggcagatacggttaatctggaaaatctggctaagcaaacagtcggcttttcgggtgcggacctggctaaccttcttaacgaggccgccatactggctgcccgcaagaaccgcaaagtggttgagaccgaagaccttgaagagtccattgaccgggttattgccgggccggaacgcaagagccgccgcataagcacccaggaaaaagaggtcaccgcctaccacgaaaccggacacgggctggtgcttcggctggtacagggggctgaccctgttcacaaaatatccattgtggccagaggcatgaccctggggcatacccgccagctacccaacgaagaccgctacctgatgacccgctcccagttcaaggccatgatggccgggctgctggccgggtatgtagcggaggagctgacctttaaagaactttccaccggtgcttcagatgacctgcgccgggctaccgatattgcccacaagatggtcaccagctatggtatgagtgacaaactggggccgcgcacctttggcaacaaagaagaaatggtttttttggggcgtgagatatccgaacagaaagactacggcgaaaaagtagccgatatgattgacgaagaagtccgcgggctgattgaagaagcccatcaaaaggctaaaactatactcaccgaaaataaaaaccgtcttaagttcattgccgagaagttgtttgaaaaagaaaccctggaaggggctgaactggaaaacctgtttgtaggtgagtttcccgtatctgaatccgcctga

SEQ ID NO: 60542 - protein, 608 aa, Dehalococcoides ethenogenes 195
MRYQMNSNWKRSTIIYIVMLVAIIAIFSFLVPNSQKPEEVPLSQIITLSQEHKIAEITVDSENIEVTTTDGTKLSTVKEYIASIYDIEGLDLTDVKVNIQPAGGLDWGTMILTYLPFLIFGGLLIFIFTQARGANNQAVSFGRSKAKLFNMDKPTITFANVAGVDEAKQEVGEVVEFLKSREKFQALGARIPKGILLIGPPGTGKTLLAKAIAGEAGVPFFSISGSEFVEMFVGVGASRVRDLFDQAKKNAPCIIFIDEIDAVGRQRGAGLGGGHDEREQTLNQILVEMDGFDTDTSVIVIAATNRPDILDPALLRPGRFDRRVVLDKPDITGREAILKIHAKGKPLADTVNLENLAKQTVGFSGADLANLLNEAAILAARKNRKVVETEDLEESIDRVIAGPERKSRRISTQEKEVTAYHETGHGLVLRLVQGADPVHKISIVARGMTLGHTRQLPNEDRYLMTRSQFKAMMAGLLAGYVAEELTFKELSTGASDDLRRATDIAHKMVTSYGMSDKLGPRTFGNKEEMVFLGREISEQKDYGEKVADMIDEEVRGLIEEAHQKAKTILTENKNRLKFIAEKLFEKETLEGAELENLFVGEFPVSESA

SEQ ID NO: 60543 - DNA, 2103 bp, Staphylococcus epidermidis RP62A
  CDS (1)..(2103): transl_table=11
atgcagaaagcttttcgcaatgtgctagttatcgcaattattggcgttattatatttggcctcttttcatttttaaatggaaatgggaatatgccaaaacaacttacatatactcagtttgttaataagttgaataaaggcgatttaaaaactttagaaattcaaccagagcaaaacgtatatatggtaagtggtaaaacaaaaaaagatgaagattactcatcgacaattttatataacaatgaaaaagatttacaaaaaatcacagatacagctaagaaacaagataatcttaaatttacagttaaagaagaagaaaaacaaagtgtattcgttagtattttaacgacactgattcctgtattaatcattgcattattatttattttcttccttagccaagcccaaggtggcggcggtggtggtcgtatgatgaactttggaaaatccaaagctaagatgtacgacagtaataaacgtcgagttcgtttctcagatgtagcaggagctgacgaagagaaacaagaattaatagaaattgtagatttcttaaaagataacaagaaatttaaacaaatgggttcaagaattccaaaaggtgtcttacttgttgggcctccaggtacaggtaaaacattattagcacgtgcggttgcaggtgaagctggtgcaccattcttctcaattagtggatctgacttcgttgagatgtttgttggtgttggtgcgagtcgtgttcgtgatttatttgaaaatgctaagaaaaatgccccatgtatcatttttattgatgaaattgatgctgttggacgtcaacgtggtgcaggtgtaggtggcggtcatgatgagcgtgaacaaacattaaaccaactattagttgagatggatggttttggagaaaatgaaggtattattatgattgcggctacaaaccgcccagatatcttagaccctgcattgttacgtcctggtcgttttgatagacaaattcaagttggacgaccagatgttaaaggtcgtgaagcaattcttcatgtgcatgcgaaaaataaacctcttgatgaaacagtagatttaaaagctatttctcaaagaacgccaggtttttctggtgcagacttagaaaacttgctaaatgaggcatctttaattgcagcacgtgagggtaaaaataaaattgatatgcgcgatattgaagaagcaactgaccgtgttattgcaggtccagctaaaaaatctcgtgtaatttctgaaaaagaacgtaatattgtagcgcatcacgaagcaggtcatactatcatcggtatggtgcttgatgaagctgaaattgtacacaaggtaacaattgtccctcgtggacaagcaggcggttatgcaatgatgttaccaaaacaagatcgcttcttaatgacagaaccagaattactcgacaaaatatgtggtttattaggtggacgagtatctgaggatattaactttggtgaagtatcaacaggtgcttcgaatgactttgaacgagcaacgcaaattgcaagatctatggttacagaatatggtatgagtaagaaattaggaccattacaattctcaagcaatagtggtggacaagtattccttggtaaagatatgcaaggtgagccgaattattctggtcaaattgcttatgaaattgacaaagaagttcaacgaattgttaaagagcaatatgaacgttgtaaacaaatcttgttagaacatgaagaacaacttaagttaattgctaaaacactactttcagaagaaacattagttgcagaacaaattcaatcattattctatgatggtgttttaccagaagtagattatgactctgcaaaagttgtgaaaaatgaaaatagtgattatagtgatggaaagtatggaaaatcatacaacgacattcgtaaagaacagttagaagatgacgataaagaagatgatgacaaccatgaaaaagatgaagtaaaccaagacaacacagacagagaagctgataatacttcacatacgaatgaaccaggtcatcaacaatctccgaacatcgataaaccatacaatcctaacgatccaaatcatagacaatag

SEQ ID NO: 60544 - protein, 700 aa, Staphylococcus epidermidis RP62A
MQKAFRNVLVIAIIGVIIFGLFSFLNGNGNMPKQLTYTQFVNKLNKGDLKTLEIQPEQNVYMVSGKTKKDEDYSSTILYNNEKDLQKITDTAKKQDNLKFTVKEEEKQSVFVSILTTLIPVLIIALLFIFFLSQAQGGGGGGRMMNFGKSKAKMYDSNKRRVRFSDVAGADEEKQELIEIVDFLKDNKKFKQMGSRIPKGVLLVGPPGTGKTLLARAVAGEAGAPFFSISGSDFVEMFVGVGASRVRDLFENAKKNAPCIIFIDEIDAVGRQRGAGVGGGHDEREQTLNQLLVEMDGFGENEGIIMIAATNRPDILDPALLRPGRFDRQIQVGRPDVKGREAILHVHAKNKPLDETVDLKAISQRTPGFSGADLENLLNEASLIAAREGKNKIDMRDIEEATDRVIAGPAKKSRVISEKERNIVAHHEAGHTIIGMVLDEAEIVHKVTIVPRGQAGGYAMMLPKQDRFLMTEPELLDKICGLLGGRVSEDINFGEVSTGASNDFERATQIARSMVTEYGMSKKLGPLQFSSNSGGQVFLGKDMQGEPNYSGQIAYEIDKEVQRIVKEQYERCKQILLEHEEQLKLIAKTLLSEETLVAEQIQSLFYDGVLPEVDYDSAKVVKNENSDYSDGKYGKSYNDIRKEQLEDDDKEDDDNHEKDEVNQDNTDREADNTSHTNEPGHQQSPNIDKPYNPNDPNHRQ

SEQ ID NO: 60545 - DNA, 1836 bp, Ehrlichia ruminantium str. Welgevonden
  CDS (1)..(1836): transl_table=11
atgagaaaaataattgaagggctagctatttggattatagcaattgttttaattgctggagcatactcccaattcaatgataaaattataaatggcaatacaattaaactaccattctcagaatttttaaataaagttgaacacgatgaagttaaaagtgtaaatatcaatgaacataatatcactggtacacttaaagacgaatctaaatttcaaacaactggcgtagtatatgatagtttaataaaaatactacacaacaaacaagtaactttttcatttctaccccaagatacgttacttgggatattaggtagcatattaatttcatggttcccaatgttactgttagttataatatggtttatatttttaaaacgtatgcaaataggtggtaaccgtaccataaacttcagtaagtcacgtgcaaaattaatgacagaaaatcgtaacaaggtaacttttaatgatgtagcaggtattgacgaagcaaaagaagaactagtagaaattgtagattttttaaaacataggcaaaaatttcaaaaattaggaggtaaaataccaaagggatgcttattgataggatcacctggaactggaaaaaccttattagctcgtgcaattgcaggcgaagcaaatgtaccattcttcagtatatcaggttctgattttgtagaaatgtttgttggagtaggagcaagtcgtgtacgtgatatgtttgaacaaggtaagaagaacgctccatgtattatattcatcgacgaaatagatgcagttggtagacatcgtggtattggtttgggaggtggtaatgatgaacgtgaacagacattaaatcagttacttgttgaaatggatggctttgaatctaacgaaggagtaatcattattgcagcaacaaaccgcccagatgttttagactcagctttattaagacctggaaggtttgatagacaagttactattggtatccctgatattaacggacgtgaaaagataattaatgtacacataaaaaaggtaccaacagcccccgatgtcaatattcgtaccatagcacgtggaacaccaggattttccggtgctgatctagcaaatttagtaaatgaagcagcactaattgcagcaagattaaataaaaaaattgtaaccatgaatgactttgaatatgcaagagataaagtcatgatgggtgctgaaagaaaatcattaatgatgacagaagaagaaaagaaattaacagcatatcatgaagcaggacacgcaattattgcgttttatacaccagcatccgatccaatacacaaggcaacaattattccacgtgggagaagtttaggtttagtgatgcgattacctgaatcagatcgtgtatctcacacacgtgaaaaaatggtagcagatttaacagtatccatgggtggaagagcggcagaagaactaatcttcggatataataaagtaactagtggtgcttcgtcagatatcaaacaagcaactgatcttgctaaagccatggttatgaagtggggtatgagtgataaagttggtccgttatatcatagcgatgaaaaaaatgaagctatttccactaatttagcaaacttaatagatgaagaagtaaaatcaatagtaacctctgcacttgatagagcaaaaagcttattaaatgaacatttagaatcactacatatagtagctaaaaacctattagagtttgaaacattaactggagaaaatataaaagacataataaatggtaaagagcttactaaagacagcatagatgatgaaaaacctataagaagatcattcacatcaaaagtacaatga

SEQ ID NO: 60546 - protein, 611 aa, Ehrlichia ruminantium str. Welgevonden
MRKIIEGLAIWIIAIVLIAGAYSQFNDKIINGNTIKLPFSEFLNKVEHDEVKSVNINEHNITGTLKDESKFQTTGVVYDSLIKILHNKQVTFSFLPQDTLLGILGSILISWFPMLLLVIIWFIFLKRMQIGGNRTINFSKSRAKLMTENRNKVTFNDVAGIDEAKEELVEIVDFLKHRQKFQKLGGKIPKGCLLIGSPGTGKTLLARAIAGEANVPFFSISGSDFVEMFVGVGASRVRDMFEQGKKNAPCIIFIDEIDAVGRHRGIGLGGGNDEREQTLNQLLVEMDGFESNEGVIIIAATNRPDVLDSALLRPGRFDRQVTIGIPDINGREKIINVHIKKVPTAPDVNIRTIARGTPGFSGADLANLVNEAALIAARLNKKIVTMNDFEYARDKVMMGAERKSLMMTEEEKKLTAYHEAGHAIIAFYTPASDPIHKATIIPRGRSLGLVMRLPESDRVSHTREKMVADLTVSMGGRAAEELIFGYNKVTSGASSDIKQATDLAKAMVMKWGMSDKVGPLYHSDEKNEAISTNLANLIDEEVKSIVTSALDRAKSLLNEHLESLHIVAKNLLEFETLTGENIKDIINGKELTKDSIDDEKPIRRSFTSKVQ

SEQ ID NO: 60547 - DNA, 1995 bp, Bacteroides fragilis NCTC 9343
  CDS (1)..(1995): transl_table=11
atgcccaagttcaacctgaactggatgtatatgattatcgccctaatgcttttagggctgtatttcgctaacggaagcagttctgtcagtaagaacatctcttacgatgagttccagcagtacgtacgtgacggctatgtaagtaaagtgatcggttatgatgataattcggttgagatttatatcaaaccccagtacgtaggaaccgtattcaaacaagattccacccgtgtaggccggaatccgatgatcactacggaagccccttcacgcgagaacctggataactttctacaaaaagaaaaagaggagacgcactttgacggttctgtcagctatgataagaaaaaagactatttcagtgcaatactttggaatgtactgccgattgtcttcctgattgctttatggatattcttcatgcgacgcatgggcagtggtgccagcggaggtgcaggcggagtattcaatgtaggaaagtcgaaagcccagctttttgaaaaaggcggttccatcaaagtaactttcaaagatgtagccggactggcagaagccaaacaagaagtagaagaaattgtggaattcctgaaagaaccccagaaatatactgacctgggaggtaaaattcctaaaggcgctctattggtgggccctccgggaacaggtaaaacgttgcttgcgaaagctgtggccggtgaagccaatgtacctttcttctctttggccggttccgatttcgttgaaatgtttgtcggtgtaggtgcatcccgtgtacgcgacctcttcaaacaagctaaagagaaagctccttgtatcgttttcatcgacgagattgatgctgtaggacgtgctcgcggtaagaatcctgcaatgggcggaaatgatgaacgtgaaaatacgttgaaccagttgctgacggaaatggatggtttcggctcaaatagcggtgttattatcctggcagccaccaaccgtgtggatgtactagacaaggcattgctccgtgccggacgtttcgaccgacaaatccatgtagatttacctgatctgaacgaacgtaaagaagtatttggcgtacacttgcgccccatcaaaatagacgatacggtagatgtagacttactggcacgccagacacccggattttcgggtgcagacattgccaatgtatgtaatgaagctgctctgatcgccgcgcgtcacggaaagaaattcgtaggcaagcaagactttctggacgcagtagaccgtattattggcggacttgaaaagaaaacaaagattactacggaagccgaacgtcggtctattgccctgcacgaggccggacacgccagcatttcctggttattggaatatgccaatccattgattaaggtaactatcgtcccccgcggacgggccttgggcgctgcctggtatctgccggaagaaagacagatcacgactaaagagcaaatgctcgacgagatgtgtgctactttgggcgggcgtgctgctgaagaccttttcatcggccgtgtatcaagcggagctgctaacgatcttgagcgcgtaaccaaacaggcgtatggcatgatcgcatatttgggcatgagtgaaaagctacccaatttatgctattataataatgatgagtattcattccagcgtccatatagtgaaaaaactgccgaactgattgacgaagaggtcaaaagaatggtaaacgaacagtatgaacgtgccaaacagattctctcggaacacaaagagcaacacaacgaattggcacagctactgatcgataaagaagtcatctttgctgaggatgtagaacgtatctttggaaaacgtccttgggcttctcgttcggaggaaatcatggcagctaataacaaacaagaaaacgccgttcatcctgcagatggagaagatgtagacacaactactccgcaagcaacagagtctcaagagggcaatacgcaacaagagtcagcggcatcacaaaactaa

SEQ ID NO: 60548 - protein, 664 aa, Bacteroides fragilis NCTC 9343
MPKFNLNWMYMIIALMLLGLYFANGSSSVSKNISYDEFQQYVRDGYVSKVIGYDDNSVEIYIKPQYVGTVFKQDSTRVGRNPMITTEAPSRENLDNFLQKEKEETHFDGSVSYDKKKDYFSAILWNVLPIVFLIALWIFFMRRMGSGASGGAGGVFNVGKSKAQLFEKGGSIKVTFKDVAGLAEAKQEVEEIVEFLKEPQKYTDLGGKIPKGALLVGPPGTGKTLLAKAVAGEANVPFFSLAGSDFVEMFVGVGASRVRDLFKQAKEKAPCIVFIDEIDAVGRARGKNPAMGGNDERENTLNQLLTEMDGFGSNSGVIILAATNRVDVLDKALLRAGRFDRQIHVDLPDLNERKEVFGVHLRPIKIDDTVDVDLLARQTPGFSGADIANVCNEAALIAARHGKKFVGKQDFLDAVDRIIGGLEKKTKITTEAERRSIALHEAGHASISWLLEYANPLIKVTIVPRGRALGAAWYLPEERQITTKEQMLDEMCATLGGRAAEDLFIGRVSSGAANDLERVTKQAYGMIAYLGMSEKLPNLCYYNNDEYSFQRPYSEKTAELIDEEVKRMVNEQYERAKQILSEHKEQHNELAQLLIDKEVIFAEDVERIFGKRPWASRSEEIMAANNKQENAVHPADGEDVDTTTPQATESQEGNTQQESAASQN

SEQ ID NO: 60549 - DNA, 1905 bp, Pseudomonas fluorescens Pf-5
  CDS (1)..(1905): transl_table=11
atggcaaagaatctgatcctgtggttgatcatcgccgccgtcttggtgacggtgatgaacaacttctccagccctaacgagccgcagaccctcaactattccgacttcatccagcaagttaaggatggcaaggtcgagcgcgtagcggttgatggctacgtgattaccggcaagcgcaacgatggcgacagcttcaagaccattcgtcctgccattcaggacaatggcctgatcggcgacctggtggacaaccacgtggtggtcgaaggcaagcagcctgaacagcaaagcatctggactcaactgctggtggccagcttcccgatcctggtgatcatcgcggtgttcatgttcttcatgcgccagatgcagggtggtgccggaggcaagggcgggccgatgagtttcggcaagagcaaggcgcgcttgctgtctgaagatcaggtgaaaactaccttggctgacgttgccggttgcgacgaggccaaggaggaagtaggtgagttggttgaattcctccgcgacccaggcaagttccagcgtctgggcggtcgtattcctcgcggcgtgttgatggtgggcccaccaggtaccggtaagacgttgctggccaaagccatcgctggtgaagccaaggtgccgttcttcaccatttccggttccgacttcgtcgagatgttcgtcggtgtgggtgccagccgcgtccgtgacatgttcgagcaagccaagaagcatgctccttgcatcatcttcatcgacgagatcgacgccgtcggtcgtcaccgtggcgccggcatgggcggcggtcatgatgagcgtgagcagaccctcaaccagttgctggttgagatggatggcttcgaaatgaacgacggcattatcgtgattgccgcgaccaaccgtcctgacgtactggacccggccttgctgcgtccgggccgtttcgaccgtcaggtcgtggttggcctgccggacattcgcggtcgcgaacagattctcaaggtgcacatgcgtaaagtaccaatgggcgacgacgtcgcacctgcggtaatcgcccgcggtaccccgggtttctccggtgccgacctggcgaacctggtcaacgaggcctcgctgtttgcggcgcgtaccggcaagcgcatcgttgaaatgaaggaattcgaactggccaaggacaagatcatgatgggcgcggagcgcaaatccatggtcatgtccgaaaaagagaagcagaacacggcttatcacgaagctggccacgccattgttggtcgtgtcgtgcccgagcatgacccggtctacaaggtgtcgatcattcctcgcggccgggccttgggtgtcaccatgttcctgccggaagaagatcgttacagcctctccaagcgtgccttgatcagccagatctgctcgctctacggcggtcgtatcgccgaagaaatgacccttggcttcgacggcgtgaccaccggcgcctccaacgacatcatgcgtgccagccagatcgcgcggaacatggtgaccaaatggggtctttccgagaagcttggtccgctgatgtatgccgaagaagagggtgaggtgttcctggggcgcagcgcgggtagccagcatgctagcctttctgcggaaacggcgaaactgatcgactccgaggtgcgcagcatcatcgatcagtgctacggcaccgccaagcagatcctgacggacaaccgcgacaagctggacgccatggcagacgccctgatgaagtacgaaaccatcgacgccgatcagatcgacgacatcatggcagggcgtactccacgcgaacctcgtgattgggagggcggctcgggtactcctcctccagtagtgcagaatgagcgtccggaaacacccattggcggcccagcagccgaccactaa

SEQ ID NO: 60550 - protein, 634 aa, Pseudomonas fluorescens Pf-5
MAKNLILWLIIAAVLVTVMNNFSSPNEPQTLNYSDFIQQVKDGKVERVAVDGYVITGKRNDGDSFKTIRPAIQDNGLIGDLVDNHVVVEGKQPEQQSIWTQLLVASFPILVIIAVFMFFMRQMQGGAGGKGGPMSFGKSKARLLSEDQVKTTLADVAGCDEAKEEVGELVEFLRDPGKFQRLGGRIPRGVLMVGPPGTGKTLLAKAIAGEAKVPFFTISGSDFVEMFVGVGASRVRDMFEQAKKHAPCIIFIDEIDAVGRHRGAGMGGGHDEREQTLNQLLVEMDGFEMNDGIIVIAATNRPDVLDPALLRPGRFDRQVVVGLPDIRGREQILKVHMRKVPMGDDVAPAVIARGTPGFSGADLANLVNEASLFAARTGKRIVEMKEFELAKDKIMMGAERKSMVMSEKEKQNTAYHEAGHAIVGRVVPEHDPVYKVSIIPRGRALGVTMFLPEEDRYSLSKRALISQICSLYGGRIAEEMTLGFDGVTTGASNDIMRASQIARNMVTKWGLSEKLGPLMYAEEEGEVFLGRSAGSQHASLSAETAKLIDSEVRSIIDQCYGTAKQILTDNRDKLDAMADALMKYETIDADQIDDIMAGRTPREPRDWEGGSGTPPPVVQNERPETPIGGPAADH

SEQ ID NO: 60551 - DNA, 1983 bp, Colwellia psychrerythraea 34H
  CDS (1)..(1983): transl_table=11
atggcgaaaaatcttattttatggttagttattgcagttgttttgatgagtgtatttcagagtttttctccaaataccacagaagatcaacaaatggattacacccgctttattcaggatgtacgtcaaggacagattcgcgatgcgagtgttgatagaaatggcgtaatcacgggtgaaaagcgtagtggcgaagcatacaaaaccgttatacctggtggctatgatcgtgatttaattaacgatcttgttaaacagggtgttcgtgctgaaggtaaattacctgaagaaacgagtttcttaacgactattttcgtttcttggttcccaatgattttgcttattggtgtatggattttcttcatgcgtcaaatgcaaggtggtggcggcaaaggagctatgtcttttggtaagtctaaagcacgtcagttaagtgaagagcaaatcaaaacgactttcgccgatgtggctggttgtgatgaagcgaaagaagacgttgctgaattagttgattacttgcgtgaacctagccgttttcaaaagcttggtgggcgtattccatcaggtattttacttgtcggtcaaccaggtacaggtaaaaccttattagcgaaagctattgctggtgaagcgaaagttcctttctttactatttcaggctcagactttgttgaaatgtttgttggtgttggtgcatctcgtgtacgtgacatgttcgaacaagctaaaaaagcggctccttgtattatcttcatcgatgaaatcgatgcggtaggtcgccaacgtggcgctggtatgggtggtggtcatgatgaacgtgagcaaacacttaaccaaatgttagttgaaatggatggttttgaaggtaatgaaggcgttatcgttattgccgcaactaaccgtcctgacgtattagaccctgcattacttcgtcctggtcgttttgaccgtcaagtaaccgttggtttacctgatattcgaggtcgtgaacaaattcttaaagtacatatgcgcaaagtaccattaggtgatgatgttaaagctgaagttattgcgcgtggtacgccaggcttctctggtgcagatttagctaacttagtgaatgaagctgctttatgtgctgcacgtacggcgcgtcgtgttgttagcatgaaagaattcgatgctgctaaagacaaaataatgatgggctcagaacgaaaatcaatggtaatgagtgagtctgaaagagaaatgactgcttatcatgaagctgggcatgcaatcattggtcgtttagtgccagatcatgatcctgtttataaagtgagtattattcctcgtggccgtgctcttggtgtgactatgtacttaccagaacaggatagatttagccattctaagcaacatctagaaagtaacatttcttctttatatggtggtcgtgttgccgaagaagttatttacggtagtgataaagtttctactggtgcttcgaacgatattgagcgtgcaactaacattgctcgcaaaatggtaactcaatggggcttatctgaaaaaatgggtcctatgttattcgctgaagaagaaggtgaagtattcttaggtcgtacgtctgcaaaatcattgcatatgtctgatgaaacagcgaaaacaattgatgaagaaattaaatcagtaattagccgtaactatcaacgagcagaagacttaatcaaagcaaacatggatgtattacatgccatgaaagattgtttgatgaagtatgaaacgattgatgccttacaaattgatgacttgatggctagaacatctgttcgtcctcctgctggttgggaagacaaaggtggttcaagctctaattcggatgacagcaaaggtgataaagctgcagatgttgaagcgacggataaagatgctgaaacaactagtgacccagaagaaactagtcaagtaaaacctgatacaactaagccaagtggtgatacaccagcaagctaa

SEQ ID NO: 60552 - protein, 660 aa, Colwellia psychrerythraea 34H
MAKNLILWLVIAVVLMSVFQSFSPNTTEDQQMDYTRFIQDVRQGQIRDASVDRNGVITGEKRSGEAYKTVIPGGYDRDLINDLVKQGVRAEGKLPEETSFLTTIFVSWFPMILLIGVWIFFMRQMQGGGGKGAMSFGKSKARQLSEEQIKTTFADVAGCDEAKEDVAELVDYLREPSRFQKLGGRIPSGILLVGQPGTGKTLLAKAIAGEAKVPFFTISGSDFVEMFVGVGASRVRDMFEQAKKAAPCIIFIDEIDAVGRQRGAGMGGGHDEREQTLNQMLVEMDGFEGNEGVIVIAATNRPDVLDPALLRPGRFDRQVTVGLPDIRGREQILKVHMRKVPLGDDVKAEVIARGTPGFSGADLANLVNEAALCAARTARRVVSMKEFDAAKDKIMMGSERKSMVMSESEREMTAYHEAGHAIIGRLVPDHDPVYKVSIIPRGRALGVTMYLPEQDRFSHSKQHLESNISSLYGGRVAEEVIYGSDKVSTGASNDIERATNIARKMVTQWGLSEKMGPMLFAEEEGEVFLGRTSAKSLHMSDETAKTIDEEIKSVISRNYQRAEDLIKANMDVLHAMKDCLMKYETIDALQIDDLMARTSVRPPAGWEDKGGSSSNSDDSKGDKAADVEATDKDAETTSDPEETSQVKPDTTKPSGDTPAS

SEQ ID NO: 60553 - DNA, 1881 bp, Dechloromonas aromatica RCB
  CDS (1)..(1881): transl_table=11
ttgaacaacatgttcaaaaacctcgcaatctggctggtcatcggcctggtcctgatgacggtctttaatcagtttaacaaccgtcaggttgcgaccggttccgtcgaatactcccagtttatcgaggaagttaaggctggccgtatttccaaggtggtcatggaaggccgcacattgaaggcgacgacgagtgaaggcaagcgtattacctcttacgcaccacccgatctctggctggtttcggatctgctgaagaatggcgtcaagatcgaagccaaaccggaagaggaaccttcgttcctgatgaatcttttcgtcagttggttcccgatgctgctgttgatcggcgtctgggtctttttcatgcgccagatgcagggcggcggcaagggcggggctttttcgttcggcaagtcgaaggctcgcatgatggatgagtcgaccaacgtcatcacctttgccgatgtggccggttgtgacgaagccaaggaagaggtacaggaaattgttgatttcctgcgcgatccgtccaagttccagaagcttggtggccgtattcccaagggggtgctgatggttggcaatccggggaccggcaaaacgctgcttgccaaggctattgccggtgaagccaaggtgcccttcttcagcatttccggctccgactttgtcgaaatgttcgtcggtgttggtgctgcccgcgttcgcgacatgttcgagaacgccaagaagcacgccccatgtatcatctttatcgatgaaatcgatgctgtcggtcgccatcgtggtgccggcctggggggcggcaacgacgaacgcgaacagacactgaaccagttgctggttgagatggatggcttcgaagggcataccggcatcatcgtgatcgccgcgaccaaccgaccggacattcttgatccggcgctgctgcgtccgggccgtttcgaccgccaggtcgttgtgccgctgccggatatccgcggccgcgaggaaattctcaaggttcatatgcgcaaggtgccaatcgctggcgacgtcaaggctgatgtgattgcccgtggtaccccgggtttctccggcgccgatctggccaatttggtcaatgaggcggccctatttgcggcacgtcgcaacaagcgcctagttgacatggacgacttcgagatggccaaggacaagatcatgatgggtgccgagcgccgtagtatggtcatgaccgaagacgaaaagatgaacacggcctaccacgagtctggtcacgccgtggtagcgaagctggtgccgaagtctgacccggtgcacaaggtgacgatcattccgcgtggtcgtgccttgggcctgaccatgcagttgcctgagcaggatcgctacgcgtacgaccgtgaatacctgatgagccgtattgctgtgctgttcggcggtcggattgccgaagagctgttcatgaaccagatgaccaccggggcatccaacgacttcgagcgggcaaccgcaatggctcgtgatatggtgactcgctacggcatgtctgacctgggcgtgatggtttacggtgaaaatgagggtgaagtcttccttggtcgctcggtgacacagcacaagaacgtgtctgaggcgaccatgcagaaggtcgattcggaaattcgtcgcatcatcgaccagcagtacgctttggcgcgccaactgctggaagaaaatcgcgacaaggtcgaagcgatgaccaaggccttgctcgagtgggaaaccattgatgcggaccagatcgacgacatcatggccagcaaacccccgcgtccgccgaagccgtctcagggctcgtctcgcgcgacgacacccacggataccccgggagccgagcctagcgctacggcacccgcctga

SEQ ID NO: 60554 - protein, 626 aa, Dechloromonas aromatica RCB
MNNMFKNLAIWLVIGLVLMTVFNQFNNRQVATGSVEYSQFIEEVKAGRISKVVMEGRTLKATTSEGKRITSYAPPDLWLVSDLLKNGVKIEAKPEEEPSFLMNLFVSWFPMLLLIGVWVFFMRQMQGGGKGGAFSFGKSKARMMDESTNVITFADVAGCDEAKEEVQEIVDFLRDPSKFQKLGGRIPKGVLMVGNPGTGKTLLAKAIAGEAKVPFFSISGSDFVEMFVGVGAARVRDMFENAKKHAPCIIFIDEIDAVGRHRGAGLGGGNDEREQTLNQLLVEMDGFEGHTGIIVIAATNRPDILDPALLRPGRFDRQVVVPLPDIRGREEILKVHMRKVPIAGDVKADVIARGTPGFSGADLANLVNEAALFAARRNKRLVDMDDFEMAKDKIMMGAERRSMVMTEDEKMNTAYHESGHAVVAKLVPKSDPVHKVTIIPRGRALGLTMQLPEQDRYAYDREYLMSRIAVLFGGRIAEELFMNQMTTGASNDFERATAMARDMVTRYGMSDLGVMVYGENEGEVFLGRSVTQHKNVSEATMQKVDSEIRRIIDQQYALARQLLEENRDKVEAMTKALLEWETIDADQIDDIMASKPPRPPKPSQGSSRATTPTDTPGAEPSATAPA

SEQ ID NO: 60555 - DNA, 2049 bp, Thermobifida fusca YX
  CDS (1)..(2049): transl_table=11
atgaatctgaagcgtttgtaccgtggaccgtggctgtggttcattgccatcctgctcatgctcctggtgacctcccagttcatgggatggggcagtggacccgaacacgtcaagaccgacacgtcgaaggtcttcaccctgatcgagcaggaccaggtcagggatgccaagatcattgacaaggaccagcgcatcgagctgaccaccgttgacggcaagctgtatgaggcttactgggtggacggccagggcgctgagctggccgaagctctccgcgccaaccagggcggcaacctggaggcgtacgacgtcgaggttcccggcgacaacatctggctatccctgctcttcagcttcctgccgctcctgctggtcatcgccgtcttcttcttcatcatgaaccagatgcaaggcggcggctcccgggtcatgaacttcggcaagtctcgggcaaagctgatctccaaagacactcccaagaccaccttcgctgacgtggcgggagcagacgaggcgatcgaagagctcaaggagatcaaggacttcctgcagaacccggggaagttccagagcctgggcgccaagatccccaaaggtgtgctcctgtatggtccgcccggtaccggtaagaccctgctggcccgggctgtcgcaggcgaagcgggagtgccgttctactccatctccggttcggacttcgtcgaaatgttcgtcggtgtgggcgcctcccgggtccgcgacctgttcgagcaggccaaggccaacgcccccgcgatcatcttcatcgacgagatcgacgcggttggccgccaccgcggcgccggcatgggcggcggccacgacgaacgcgagcagaccctcaaccagttgctcgtggaaatggacggcttcgactcccggggcggggtcatcctgatcgccgcgacgaaccgtccggacatcctcgacccggcgctgctgcgccccggccgtttcgaccggcagattgtcgtggaccgtcccgacctggagggccgcaaaggcattctccgggtgcacgcccaaggcaagccgctcggccccgacgtcgacctcgacgtcatcgcccggcgcacccccgggttcaccggtgccgacctggccaacgtgatcaacgagggggccctgctgacggcccgccgcggcaagcagcagatcgacatggccaccttggaggaggccatcgaccgcgtcatcgcggggccggagcgcaagagccgcgtcatgtccgaggcggagaagaagatcatcgcctaccacgagggcgggcacgccctggtgggccacgctctgccgaacgccgacccggtgcacaaggtcaccatcctgccgcgcggccgtgccctcggctacaccatgtcgctgccgaccgaggacaaattcctcacctcgcgttccgagatgatggaccagttggccatgatgctgggtggacgtgccgccgaggagctggtcttccacgagcccaccaccggcgcggccaacgacatcgagaaggccaccaacctggcccgcagcatggtcaccgagtacggcatgagtgaacggctcggtgcccgcaagttcggcaacagcaacaccgaaccgttcctgggccgggagatggcgcacagccgcgaatactccgaggagatcgcggccctcatcgacgaggaagtgcgccgccttatcgaagccgcccacgacgaagcgtgggagatcctcgtcgaataccgggacgtcctcgacgagctggtgctccagctgctggacaaggagaccctgtccaaggaggaggtcctggagatcttcgccccggtgcgtaaacgcccgtcccgcggctcctacaaggggtacggcaagcggatcccctcagacaagccgccggtcctcacccccaaggagctcgccctgatgggccccaaggacgtggaagacctcgtcgggggcagcaacggacaggcgaacaccgccggcgaactgagctgggaacagaagcacgaccgcaaggccggtccgggagacgccaatcctggagcagaccgtgactga

SEQ ID NO: 60556 - protein, 682 aa, Thermobifida fusca YX
MNLKRLYRGPWLWFIAILLMLLVTSQFMGWGSGPEHVKTDTSKVFTLIEQDQVRDAKIIDKDQRIELTTVDGKLYEAYWVDGQGAELAEALRANQGGNLEAYDVEVPGDNIWLSLLFSFLPLLLVIAVFFFIMNQMQGGGSRVMNFGKSRAKLISKDTPKTTFADVAGADEAIEELKEIKDFLQNPGKFQSLGAKIPKGVLLYGPPGTGKTLLARAVAGEAGVPFYSISGSDFVEMFVGVGASRVRDLFEQAKANAPAIIFIDEIDAVGRHRGAGMGGGHDEREQTLNQLLVEMDGFDSRGGVILIAATNRPDILDPALLRPGRFDRQIVVDRPDLEGRKGILRVHAQGKPLGPDVDLDVIARRTPGFTGADLANVINEGALLTARRGKQQIDMATLEEAIDRVIAGPERKSRVMSEAEKKIIAYHEGGHALVGHALPNADPVHKVTILPRGRALGYTMSLPTEDKFLTSRSEMMDQLAMMLGGRAAEELVFHEPTTGAANDIEKATNLARSMVTEYGMSERLGARKFGNSNTEPFLGREMAHSREYSEEIAALIDEEVRRLIEAAHDEAWEILVEYRDVLDELVLQLLDKETLSKEEVLEIFAPVRKRPSRGSYKGYGKRIPSDKPPVLTPKELALMGPKDVEDLVGGSNGQANTAGELSWEQKHDRKAGPGDANPGADRD

SEQ ID NO: 60557 - DNA, 1923 bp, Prochlorococcus marinus str. NATL2A
  CDS (1)..(1923): transl_table=11
atggataagaaatggaaagttgtagcactttgggtgctacccataacgatagtaatactaattacgtggcaaattcttggctcttcaacaaatacccaagttaatcaaacaaatacatctaatccatcaagaaatgctccggttgcaaagatcagttatggaagatttcttgattatgtaaaagctggaagagtaacttctgttgacatttacgaaggtggtagaaatgcaatcgtcgagtccgttgatcccgaaattgataacagaattcaacgtttaagagttgatctaccaggtttggctcctgaattagtctcctccctaaaagatgagggaatcagttttgacattcatccacctaaaacggcaccagcgggagttggaattcttggcaaccttctctttccaattattctaataggaggtctgattttactttcaagaagatcaaactctatgccaggcggtccagggcaagctatgcaatttggtaaaacaaaagcaagatttgcaatggaagctgagactggtgtcaaattcgatgatgtagcaggagtaaatgaagcgaaacaggatttagaagaggttgtcacatttttaaaacaacctgaaagatttacatctgtaggggctcaaataccaagaggtgttttactagttggtcctccaggaacaggtaaaaccctattagcaaaggctattgctggagaagctggagttcctttcttctctctttcaggttcagaatttgtagaaatgtttgtaggtgtaggtgcaagtcgtgtcagagatttatttaaaagagccaaagaaaacagtccttgcttgatttttattgatgaaattgatgcagtcggaagacagaggggtgctggaattggaggaggtaatgacgaaagagagcaaacactcaatcaacttctgactgagatggatggatttgaaggtaatagtggaatcatcatcattgcagctacaaatagacctgacgttcttgactcagcattgatgaggccaggtagattcgatagacaagtaaccgttgacgcgccagacatatcagggagattgtcaattctcaaagttcactcaagaaataaaaaattagaaaaggatttaactttagaaagtattgctagaagaacccctggttttacaggtgctgatttagccaatttgctaaatgaagcagctattcttacagccagaagaagaaagaatcaaataggtctttctgaaattgatgatgctgttgatcgcatcattgcaggaatggaagggacaccactagtagatggaagaagcaagagactcatcgcctatcacgaggttggtcatgccttgatagggtcattggtaaaagatcatgatcctgttcaaaaagtaactgttatcccaagaggacaagcacagggtttgacatggttctctccagatgatgatcagtctttgattagcagggcacaattaaaagcaagaattatgggggctcttggagggagagctgcagaggatattattttcggaagagaagaagtaacaactggggctggaggtgatgtacaaatggttgcatcaatggcaaggcaaatggttacgaggtttggcatgagcagcctcggtccagtttcattagaaggtgatagccaagaagtatttgtaggaagaagcttaatgaacacatctgatatatcagatggaatttcaaagcaaattgatgaacaagtcagatcaatagttaaaaagtgctaccaagaaacacttgaattggttgaaaagaatagatcagccatggataaattggttgaaattttaatcgaaaaggaaactatggatggagatgaattctgcaaaatattatctcaatatacgactattcctgagaaagatagatttatacctgttctaccggatgcaaaatag

SEQ ID NO: 60558 - protein, 640 aa, Prochlorococcus marinus str. NATL2A
MDKKWKVVALWVLPITIVILITWQILGSSTNTQVNQTNTSNPSRNAPVAKISYGRFLDYVKAGRVTSVDIYEGGRNAIVESVDPEIDNRIQRLRVDLPGLAPELVSSLKDEGISFDIHPPKTAPAGVGILGNLLFPIILIGGLILLSRRSNSMPGGPGQAMQFGKTKARFAMEAETGVKFDDVAGVNEAKQDLEEVVTFLKQPERFTSVGAQIPRGVLLVGPPGTGKTLLAKAIAGEAGVPFFSLSGSEFVEMFVGVGASRVRDLFKRAKENSPCLIFIDEIDAVGRQRGAGIGGGNDEREQTLNQLLTEMDGFEGNSGIIIIAATNRPDVLDSALMRPGRFDRQVTVDAPDISGRLSILKVHSRNKKLEKDLTLESIARRTPGFTGADLANLLNEAAILTARRRKNQIGLSEIDDAVDRIIAGMEGTPLVDGRSKRLIAYHEVGHALIGSLVKDHDPVQKVTVIPRGQAQGLTWFSPDDDQSLISRAQLKARIMGALGGRAAEDIIFGREEVTTGAGGDVQMVASMARQMVTRFGMSSLGPVSLEGDSQEVFVGRSLMNTSDISDGISKQIDEQVRSIVKKCYQETLELVEKNRSAMDKLVEILIEKETMDGDEFCKILSQYTTIPEKDRFIPVLPDAK

SEQ ID NO: 60559 - DNA, 1875 bp, Prochlorococcus marinus str. NATL2A
  CDS (1)..(1875): transl_table=11
atgccaatacgacaggacgaaaatcaaccaaataaacgctttggaataattaatttagttttaattggttttggagcgcttcttctctttagtagttttttcccaagccaaaatacacaagtcccaagagttccttattcacttttcataaatcaagttgatgatggagaagttaaacgtgcatacataacacaagatcaaattagatatgaactttctacagctgaagaaggtgccccttctgttttggcaacgactccaatttttgatatggagttacctcaaaggctcgagaaaaaaggcgtcgagttcgcagcggcacctcccaaaaaacccaatatattcactactattcttagctgggtagtaccaccactaatatttattcttgttttacagttttttgctcgaagaagcatgggtggtggtggagctcaaggagccctaagtttcacaaaaagtaaagctaaagtttatgttcctgacgatgaatcgaaggttactttcgcggatgttgcaggagttgatgaagcaaaagacgaattaacagaaatagttgatttcctcaagaagccacaaagatatacagatattggtgcaagaattccaaaaggtgttttattagtaggaccaccaggaactggtaaaactctcttatctaaggctgtagcaggtgaagcggaagttcctttctttatcatttctggttctgaatttgttgagttatttgttggtgctggtgcggcgagagttagagatttatttgaacaagctaagaaaaaagctccgtgcataatatttatcgatgaattagatgctattggtaaaagtagatctggatcaatgggagtagttggaggtaatgatgaaagagagcaaactcttaatcaattacttacagaaatggatggatttgcttcaactgataaacctgtaattgtccttgcagcgacaaaccaacctgaggtgttggatgcagctctattacgtccaggtagattcgatagacaagttcttgtggatagacctgatttatctggtaggaaaactattttagaaatttacacaaagaaagtaaaactctcggcaaaaatagatcttgatagaattgctcaagctacaagtggattcgcaggcgccgatttagcaaacatggtaaatgaagcggctcttttagcggcaagatcttaccgctcagaagttgagcagcaagatttaaatgaagccattgaaagagttgttgctgggcttgagaaaaaaagcagagttttacaagacgatgagaaaaagattgtggcttatcacgaggttggccacgcaatagtgggacacttaatgcctggtggaagcaaagtggcaaaaatttcaatagtaccaagaggtatgagcgctttaggctatactctccaactcccaacagaggaaagattcctaaattccaaagaagaacttcaaggtcaaatcgctactctccttgggggaagatctgcagaggagataatttttggaaaagttactacaggtgcttcaaacgatttacaaagagcaacagatattgctgagcaaatggtaggtacatatggaatgagcgatatcctaggtccattagcatatgacaaacaaggaggaggtcaattccttggagggaacaataatcctagaagagaattaagtgatgctactgctcaagcaattgataaagaagtcagaagcttggtagatgatgcacatgaaaaagccctaaatatcctaaaaaataatctttcattacttgaagatatttctcaaaaaattcttgagaaagaagttatagaaggagatgatctaattaagatgctatcaagcagcgtaatgcctgaaaaagtttctaattaa

SEQ ID NO: 60560 - protein, 624 aa, Prochlorococcus marinus str. NATL2A
MPIRQDENQPNKRFGIINLVLIGFGALLLFSSFFPSQNTQVPRVPYSLFINQVDDGEVKRAYITQDQIRYELSTAEEGAPSVLATTPIFDMELPQRLEKKGVEFAAAPPKKPNIFTTILSWVVPPLIFILVLQFFARRSMGGGGAQGALSFTKSKAKVYVPDDESKVTFADVAGVDEAKDELTEIVDFLKKPQRYTDIGARIPKGVLLVGPPGTGKTLLSKAVAGEAEVPFFIISGSEFVELFVGAGAARVRDLFEQAKKKAPCIIFIDELDAIGKSRSGSMGVVGGNDEREQTLNQLLTEMDGFASTDKPVIVLAATNQPEVLDAALLRPGRFDRQVLVDRPDLSGRKTILEIYTKKVKLSAKIDLDRIAQATSGFAGADLANMVNEAALLAARSYRSEVEQQDLNEAIERVVAGLEKKSRVLQDDEKKIVAYHEVGHAIVGHLMPGGSKVAKISIVPRGMSALGYTLQLPTEERFLNSKEELQGQIATLLGGRSAEEIIFGKVTTGASNDLQRATDIAEQMVGTYGMSDILGPLAYDKQGGGQFLGGNNNPRRELSDATAQAIDKEVRSLVDDAHEKALNILKNNLSLLEDISQKILEKEVIEGDDLIKMLSSSVMPEKVSN

SEQ ID NO: 60561 - DNA, 1848 bp, Prochlorococcus marinus str. NATL2A
  CDS (1)..(1848): transl_table=11
ttgaacaaacgctggagaaacattggtctttatgtcctaattgttgtagttgtgatttttgttggaagtgcttttttcgataagccaagcccgacaaagtcatctagaacactcagatacagtgacttcatagaagctgttcaagagaagcaaataagcagggttcttatttctccagataaaggaactgctcaaattgttgaaagtgatgggaacagggctttagtcaatttggctcctgatcaacaattactccaattacttactgataatgacgtcgatattgccgtacaaccaactactcaagcgaatcctttacagcaagctgctactagcttaatttttccaattcttttattaggaggtctattttttctatttagaagagcaggttctggtggtggtggaaacccagcaatgaattttgggaagagtaaagcaagacttcaaatggagcctgaaacaaaagttacttttggagatgttgctggaattgaaggtgcaaagcttgaacttactgaagtagttgatttcttaaaaaatcctgatcgcttcacagctgtaggagcaaaaattcctaaaggtgttttattggttggacctccagggacaggtaaaactttgcttgcaaaggcagttgcaggtgaagcttcagttccattcttttccatatctggatctgagtttgtagagatgtttgttggcgttggtgcgagcagagtcagagacctttttgaacaagctaaaaagaatgctccttgtatagtttttattgatgaaatagatgctgttggtcgtcagcgtggcgcaggacttggaggaggtaatgatgaaagagagcaaacgctaaatcaactgctaactgaaatggatggatttgagggaaactcaggaataattattgttgcagctacaaatagacctgatgtgctcgactcagcactcatgagaccaggaagatttgacaggcaagtaactgttgacagacctgattactcagggagattgcaaatactgaatgttcatgcaaaaagtaaaacactttcaaaggcagttgaccttgatcaagtagcgagaaggacccctggatttactggggcagatttagcaaatctattaaatgaagctgccatattggctgccagaagagaattaacagaagtcagtaacgatgaggtcagtgatgcaatcgagagaataatggtaggtcctgagaagaaagactcagtgattagtgaaaaacgtaaaaaattagttgcttatcatgaagctggccatgcagtagttggtgctgtgatgcctgattatgaccctgtgcaaaagatctcaatcattccaagaggtggagctggaggattaacttttttcacgccaagtgaagaaagaatggaatctggactttattcaaggtcttacctacaaaatcaaatggctgttgctcttggaggaagagttgcagaggaaatcatttatggagaagacgaagtaaccacaggagcatcaaatgatctaaagcaagtagcttcagttgcacggcaaatgattaccaaatttggtatgagtgacaagttgggaccagtagctttaggacgttcgcagggtgggatgttccttggtagagacatctctgcagaaagagatttttctgaagatacagcagcaacaattgattcagaagtttcagttcttgttgagattgcatacgaaagagctaaaaaggctttaaacgacaatcgtcaagtacttgaggagttaacagcaatgcttatggaaactgagacagttgattctctagagttccaggatttgttaattcgccatgaagttaaagttgctgaatatgcttag

SEQ ID NO: 60562 - protein, 615 aa, Prochlorococcus marinus str. NATL2A
MNKRWRNIGLYVLIVVVVIFVGSAFFDKPSPTKSSRTLRYSDFIEAVQEKQISRVLISPDKGTAQIVESDGNRALVNLAPDQQLLQLLTDNDVDIAVQPTTQANPLQQAATSLIFPILLLGGLFFLFRRAGSGGGGNPAMNFGKSKARLQMEPETKVTFGDVAGIEGAKLELTEVVDFLKNPDRFTAVGAKIPKGVLLVGPPGTGKTLLAKAVAGEASVPFFSISGSEFVEMFVGVGASRVRDLFEQAKKNAPCIVFIDEIDAVGRQRGAGLGGGNDEREQTLNQLLTEMDGFEGNSGIIIVAATNRPDVLDSALMRPGRFDRQVTVDRPDYSGRLQILNVHAKSKTLSKAVDLDQVARRTPGFTGADLANLLNEAAILAARRELTEVSNDEVSDAIERIMVGPEKKDSVISEKRKKLVAYHEAGHAVVGAVMPDYDPVQKISIIPRGGAGGLTFFTPSEERMESGLYSRSYLQNQMAVALGGRVAEEIIYGEDEVTTGASNDLKQVASVARQMITKFGMSDKLGPVALGRSQGGMFLGRDISAERDFSEDTAATIDSEVSVLVEIAYERAKKALNDNRQVLEELTAMLMETETVDSLEFQDLLIRHEVKVAEYA

SEQ ID NO: 60563 - DNA, 1941 bp, Ralstonia eutropha JMP134
  CDS (1)..(1941): transl_table=11
atggaaccgcgccaacagcagttttccctctggtatctgctcctgacagtctcggcgatgctcatccttcagagcgtcctattctcgtcccatgtcgagacgttgccctacagcgacttcaaggtcctgctcaaggcaggcaagctcaaggagcttaccctaggagagggggtcatcacgggtacggtcaacactgatggcattgagaatttgcttcccaagccgcaggtcgaagagatgcaacgtcagggtaagggagaccacccgttttccacgctccgggtaaatgacccgaatctggtccaagaactcgaatctgccaaagtgcgtttcgtaggccaggccgataacaagtggattggtacgctgctgtcctgggtggttcccgccatgctcttctttgtcgtctggagctttctcatcaagcggatgggcggtgccgccggcggaatgctagagattggcaagagcaaagccaaggtctacatgcagaaagagaccggcgtcacgttcgctgacgtcgccggcatcgacgaggccaaagaggagctcgccgaaatcgtcaacttcctgaaggatccccagcgctaccggcgcctgggcggaaagattcccaaaggcgtattgcttctcggcgcgccgggcacgggcaagacactgctggccaaggcggtagccggtgaagccggcgtgccattcttcagcatgagcggttcggagttcgttgagatgtttgtcggcgtgggggccgcgcgggtacgtgacctgttcaaccaggcggaaaccaaggcaccgtgcatcatcttcatcgacgaactggacgcgctgggcaagactcgtgccctcggagcagtgaccggtaacgatgaacgcgaacagaccctgaaccaattactggttgagatggatggctttgatactaacaagggcgtcatcatcatggcggccaccaaccggcctgaaattctcgacccagcactgttgagaccaggtcgatttgaccgccacatcgcactggaccggcccgacttgaaggggcgcgagcagattctcaaggtccacatcaagaacgtcgttctggcgcccactgtcgagctgaagaagctggccgcacgcacacctggattcgccggcgcagatctcgccaacctcgtcaatgaggcggcattgctggcagctcgcaaaggtaaggatgccgtggaaatggccgacttcgacgatgcgctggaccgcattatcggaggccttgagaagaagaatcgcgtaatgaatcagcaggagaaggagaccatcgcctaccacgaagcgggtcacgccatcgtggcagagttgcgtccacgcgctgaccgcgtatcgaaggtctccatcattccccgtggcgtggccgcacttggctatacacagcagaccccgaccgaggaccgatatctcctgaaacagagtgagctccttgaccggctcgatgttctgctcgggggacgcattgccgagcaaatcatcttcggtgatgtctccaccggcgcccagaacgaccttcagcgcgccaccgatatggcccgccagatgattacgcagtttggcatgagcgaacagctcggactcgcaacctacgaggagatgcccaatcccctgttcatgggagcaggcatgatgccaagagaccgcaaagagtacagcgagaatacagcgcaactgattgatgccgaagtccgccagcttctgactgacgcgagcaagcgggtaaagcagactctgatggagaatcgtcaccggctcgatgcgctggcgaagctactgctcgaacaggaggtcgtggagcgaccagctttggacttgctcctctccgacaaagttacaccgctaatacctgggaggccagtgaccgatgttgccagcacatccggctcacagaaacggagccacgaaaatgacagcaagtag

SEQ ID NO: 60564 - protein, 646 aa, Ralstonia eutropha JMP134
MEPRQQQFSLWYLLLTVSAMLILQSVLFSSHVETLPYSDFKVLLKAGKLKELTLGEGVITGTVNTDGIENLLPKPQVEEMQRQGKGDHPFSTLRVNDPNLVQELESAKVRFVGQADNKWIGTLLSWVVPAMLFFVVWSFLIKRMGGAAGGMLEIGKSKAKVYMQKETGVTFADVAGIDEAKEELAEIVNFLKDPQRYRRLGGKIPKGVLLLGAPGTGKTLLAKAVAGEAGVPFFSMSGSEFVEMFVGVGAARVRDLFNQAETKAPCIIFIDELDALGKTRALGAVTGNDEREQTLNQLLVEMDGFDTNKGVIIMAATNRPEILDPALLRPGRFDRHIALDRPDLKGREQILKVHIKNVVLAPTVELKKLAARTPGFAGADLANLVNEAALLAARKGKDAVEMADFDDALDRIIGGLEKKNRVMNQQEKETIAYHEAGHAIVAELRPRADRVSKVSIIPRGVAALGYTQQTPTEDRYLLKQSELLDRLDVLLGGRIAEQIIFGDVSTGAQNDLQRATDMARQMITQFGMSEQLGLATYEEMPNPLFMGAGMMPRDRKEYSENTAQLIDAEVRQLLTDASKRVKQTLMENRHRLDALAKLLLEQEVVERPALDLLLSDKVTPLIPGRPVTDVASTSGSQKRSHENDSK

SEQ ID NO: 60565 - DNA, 1884 bp, Ralstonia eutropha JMP134
  CDS (1)..(1884): transl_table=11
ttgaataacaacctgtttcaaaaggcggcaatctggctcgtgatcgcgctggtgttgtttaccgtcttcaagcagttcgacaagccccgtgcacaggacggcgtcacctactcgcagttcatggatgacgccaagaacggcaaggtgtcgcgtgtcgacgtgcagggccgcaacctcgtggtgtcgccgaaagagggcgccaagtacaccatcatctcgccgggcgacatctggatggtcggcgacctgatgaagtacggcgttcaggtgaccggcaaggctgacgacgaacccaacgtgctggtgcaggccctctattacctcgggccgaccctgctgatcatcgtgttctggttctacatgatgcggcagatgcagggcggcgggaaaggcggtgccttctcgttcggcaaatcgcgtgcgcgcctgatcgacgaaaaccagaatgccgtcacgttccaggacgtggccggctgcgatgagtccaaggaagaagtggtcgaactggtcgacttcctgaaggatccgcagaaattccagaagctgggcggccgcatcccgcgcggcgtgctgctggtcggccctccgggtaccggcaagacgctgctggcacgtgccattgccggcgaagccaaggtgccgttcttcagcatctcgggttcggacttcgtggaaatgttcgttggcgtgggcgcggcccgcgtgcgcgacatgttcgaaaacgccaagaagcaggcgccgtgcatcgtgttcatcgatgaaatcgacgcggtgggccgtcatcgtggcgccggcatgggcggcggcaacgacgagcgcgagcagaccctgaaccagatgctggtcgagatggacggcttcgaagccaactcaggcgtgatcgtgatcgccgcgaccaaccgttccgacgtcctcgacaaggcgctgctgcgtccgggccgtttcgaccgccaagtctacgttggcctgccggatattcgcggccgtgagcagatcctcaaggtccatatgcgcaaggtgcccatcggcaacgatgtggacgcttcggtgatcgcgcgcggtaccccgggcttctctggcgccgacctggccaacctggtcaacgaagctgccctgttcgccgcccgccgcagcaagcgcgtggtcgacatgcaggacttcgaagacgcgaaggacaagatctacatgggcccggagcgcaagtcgacggtcatgcgcgaggaagagcgcaaggccacggcttaccacgagtcaggccatgcagtggtcgccaagctgctgccgaaggccgatccggtccacaaggtcaccatcatgccgcgtggctgggcgctgggcgtgacctggcagctaccggagcatgacaagtactcgaagtacaaggacaacatgctcgaagagatcgccattctcttcggcggccgtgcggcggaagaagtcttcctcaacgccatgagcacgggcgcgtccaacgacttcgagcgtgcgaccaagattgcccgcgacatggtgacccgcttcggcatgagcgacgaactcggcgccatggtctacgtcgacaccgagcaggacggtatgttcggcaagctgtcgtcgaagacggtgtccgaggctacgcagcagaaggtcgatgccgagatccgccgcattatcgacgagcaatatggcctggccaagcgcctgctcgaagagaaccgcgacaaggtcgaggccatgacttcggcgctaatggagtgggaaacgatcgacgccgatcaggtcaacgacatcatggctggcaagccgccgcgtccgccgcgtggtgtgtcgggcccgaacggtggtggcaatgccccgtccggtggttcgccggtggcgccgaccaacgcgcctgccacggcctga

SEQ ID NO: 60566 - protein, 627 aa, Ralstonia eutropha JMP134
MNNNLFQKAAIWLVIALVLFTVFKQFDKPRAQDGVTYSQFMDDAKNGKVSRVDVQGRNLVVSPKEGAKYTIISPGDIWMVGDLMKYGVQVTGKADDEPNVLVQALYYLGPTLLIIVFWFYMMRQMQGGGKGGAFSFGKSRARLIDENQNAVTFQDVAGCDESKEEVVELVDFLKDPQKFQKLGGRIPRGVLLVGPPGTGKTLLARAIAGEAKVPFFSISGSDFVEMFVGVGAARVRDMFENAKKQAPCIVFIDEIDAVGRHRGAGMGGGNDEREQTLNQMLVEMDGFEANSGVIVIAATNRSDVLDKALLRPGRFDRQVYVGLPDIRGREQILKVHMRKVPIGNDVDASVIARGTPGFSGADLANLVNEAALFAARRSKRVVDMQDFEDAKDKIYMGPERKSTVMREEERKATAYHESGHAVVAKLLPKADPVHKVTIMPRGWALGVTWQLPEHDKYSKYKDNMLEEIAILFGGRAAEEVFLNAMSTGASNDFERATKIARDMVTRFGMSDELGAMVYVDTEQDGMFGKLSSKTVSEATQQKVDAEIRRIIDEQYGLAKRLLEENRDKVEAMTSALMEWETIDADQVNDIMAGKPPRPPRGVSGPNGGGNAPSGGSPVAPTNAPATA

SEQ ID NO: 60567 - DNA, 1884 bp, Ralstonia eutropha JMP134
  CDS (1)..(1884): transl_table=11
atggaacgtcagcaaaccgagttctcgctttggtacctcattctcacaaccgtagcgatactgattctgcagttctacatcagtgcggccagtatccagacactggcgtacagcgacttcaaggcgctgctcaaagccgacaaggtccgtaccgcgagcgttggcgaaaccgaaatcagtggcacggtcgtcacagccgggctggaagccattgtgccccgcgaccaggccgcggcactgcagaagtcaggacgagccgagcatgtgttcactaccgtacgcatcaatgaccccaacctcctgtccgatctggacgccgcacatgtgcggtacgccggtgaagccgacaacaagtggattggcgcggtcctttcatggatcgtaccggcgctcgtcttcctgggaatctggacattggtgatcaagcgcatgggcggaggcagggacggcttgctcgaaattggcaagagcaaggcaaagatctatctgcagcagcagaccggcgtcacgttcgctgacgtcgccggcattgacgaagccaaggccgagttgatggaagtggtcgacttcctcaaggaaccccaacgctatcggcgactgggcggcaagatacccaaaggggtgctgctcctcggtgcccccggcaccggaaagacgctactggcgcgcgcggttgcaggcgaagctggcgtgccgttcttcagcatgagcggatccgagtttgtcgagctgttcgtgggtgttggcgccgcgcgtgtcagagacctgtttgcccaggccgaacagaaggcaccctgcatcatcttcatcgacgagctggatgcgctgggcaagacccgcaccctcaacgtcgcaggcggccaggacgagcgagaacagacgctcaatcagttgctcgtgcaaatggacggcttcgacaccaacaaaggggtcatcatcatggccgccaccaaccggccggagatcctcgacgcagcgctcctgcggccgggccggttcgaccgccacatcgtacttgaccgccccgaccttgccggacgcgagcagatcctgctcgtccatgttcgcaatgtcacgctcgcccctgaagtcgccctgcatgacctcgccgcacgcacccccggtttcgccggtgctgatctcgcaaacctggtcaacgaggcggccctgcttgccgcgcgcaagaacaaggctgccgtcgacatggccgatttcgacgaggcgctcgaccgcatcatcggcggcctcgaaaagcgcaatcgcgtcatgatcgcgctggagaagcagaccattgcctaccacgaggcaggccacgcactggtcgcggaaagccgcgcgcatgccgaccgggtatcgcgcatctccatcatcccgcgtggcgtaggcgcgcttggctatacacagcagacaccggcggaggaccgctatctgctccggcgcagcgaattgcttgacaggctcgatgtgttgctgggcggacgcatggccgaacagattgtcttcgacgacgtctccaccggcgctcagaacgacctggagcgtgccaccgacatggcccgccagatggtgacgcaatacggaatgagcagctcgcttgggctgccatgctatgaacgcaccggcaacagcctgctgccgatgggccccgcgctgccccggcctgaccgggactacagcgagcgcactgcgcaaaccatcgacgaagaagttcgcctgattctggccgaggccgccgagcggacccgcaagaccctcttcgcccggcgcccggtgcttgacgctctggcgcagttgctgctcgacaaggaggtcgtcgatcgaccaacgctggatacgctgctcaagcgcatgcccgcgcacgaatcgcgcgccgaggccgcctga

SEQ ID NO: 60568 - protein, 627 aa, Ralstonia eutropha JMP134
MERQQTEFSLWYLILTTVAILILQFYISAASIQTLAYSDFKALLKADKVRTASVGETEISGTVVTAGLEAIVPRDQAAALQKSGRAEHVFTTVRINDPNLLSDLDAAHVRYAGEADNKWIGAVLSWIVPALVFLGIWTLVIKRMGGGRDGLLEIGKSKAKIYLQQQTGVTFADVAGIDEAKAELMEVVDFLKEPQRYRRLGGKIPKGVLLLGAPGTGKTLLARAVAGEAGVPFFSMSGSEFVELFVGVGAARVRDLFAQAEQKAPCIIFIDELDALGKTRTLNVAGGQDEREQTLNQLLVQMDGFDTNKGVIIMAATNRPEILDAALLRPGRFDRHIVLDRPDLAGREQILLVHVRNVTLAPEVALHDLAARTPGFAGADLANLVNEAALLAARKNKAAVDMADFDEALDRIIGGLEKRNRVMIALEKQTIAYHEAGHALVAESRAHADRVSRISIIPRGVGALGYTQQTPAEDRYLLRRSELLDRLDVLLGGRMAEQIVFDDVSTGAQNDLERATDMARQMVTQYGMSSSLGLPCYERTGNSLLPMGPALPRPDRDYSERTAQTIDEEVRLILAEAAERTRKTLFARRPVLDALAQLLLDKEVVDRPTLDTLLKRMPAHESRAEAA

SEQ ID NO: 60569 - DNA, 1836 bp, Ehrlichia canis str. Jake
  CDS (1)..(1836): transl_table=11
atgagaaaaatcattgaaggattagcaatttggattatagtaattgttctagttgctgcagcatatgtacaattcaacgataaagttattaatggaaacgtactaaaattaccattctcagaattcttaaacaagatcgataacaatgaaatagaaactattaacataagtgaacacaatattactggaaaattgaaagacagtgctaaattccaaacaactggtgtaatatatgacagtttaataaaaacattacacagtaagcaggttactttcacctttttacctgaggatacactatttggaatattagggagcatattgatatcttggttccctatgctcctacttgttataatatggtttatatttctcaaacgaatgcaaataggaggtaatagaactataaatttcagtaaatcacgtgctaaactgatgactgaacaccgtaataaagttacttttaacgatgtagcaggtattgatgaagcaaaagaagaactaattgaaatagtagattttttaaaacatagacaaaggtttcaaaaattaggaggtaaaataccaaaagggtgcttattaatagggtcaccaggaacagggaaaactttattagcacgtgcaattgcaggtgaagcaaatgttcctttttttagtatatctggttcagattttgtagaaatgtttgtaggggtcggtgcaagtcgtgtacgtgatatgtttgaacaaggcaaaaaaaatgcaccatgtatcatatttattgatgaaatagacgcagtaggaagacatagaggaattggtttaggtggaggaaatgatgaacgagaacaaacattaaaccaactattagtcgaaatggatggttttgaatctaatgaaggagtaattattattgctgcaactaaccgtccagatgtattagattccgcacttcttagaccaggaagatttgatagacaagttactattagtattcctgacattaatgggagagagaagatcattaacgtacatattaaaaaagttcctacagcaccagatgtagacatcagaaccattgcacgtggcacaccaggattctcaggcgctgaccttgcaaatctagtaaatgaagcagcattaatagcagcaagacttaataaaaaaattgtcacaatgagtgactttgaatatgcaagagataaagttatgatgggagctgaaagaaaatcattaatgatgacagaagaagaaaaaaaattaacagcctatcatgaagcaggacatgctgttattgcattttttacagtggcatcggatccaatacataaagcaacaataattccaagaggaagaagtctagggttagtaatgaggctaccagagtcagatcgcgtatctcatacaagagaaaaaatgactgcagacttaacagtagcaatgggaggaagagcagctgaagaattaatttttggatatcataaagtcacaagcggcgcatcatcagacataaaacaagcaacagatctagcaagagcaatggtcatgaagtggggtatgagcgacaaagtaggtccgctatatcacagtgatgaaaaaaatgaaactatttctaataacttagcaaatttgatagatgaagaagtcaaatccatagttacatctgcactggaaagagcaaaaagtcttctacatgagcatttagaatcattacatatagttgctaaaaacttactagaatttgagaccttaactggagaagacatcaaaaatgtaatcaatggcaaagaattaaccaaaaataatgaagatgaagcccaacctttaaaaagatcatttgcatcaaaagaacagtag

SEQ ID NO: 60570 - protein, 611 aa, Ehrlichia canis str. Jake
MRKIIEGLAIWIIVIVLVAAAYVQFNDKVINGNVLKLPFSEFLNKIDNNEIETINISEHNITGKLKDSAKFQTTGVIYDSLIKTLHSKQVTFTFLPEDTLFGILGSILISWFPMLLLVIIWFIFLKRMQIGGNRTINFSKSRAKLMTEHRNKVTFNDVAGIDEAKEELIEIVDFLKHRQRFQKLGGKIPKGCLLIGSPGTGKTLLARAIAGEANVPFFSISGSDFVEMFVGVGASRVRDMFEQGKKNAPCIIFIDEIDAVGRHRGIGLGGGNDEREQTLNQLLVEMDGFESNEGVIIIAATNRPDVLDSALLRPGRFDRQVTISIPDINGREKIINVHIKKVPTAPDVDIRTIARGTPGFSGADLANLVNEAALIAARLNKKIVTMSDFEYARDKVMMGAERKSLMMTEEEKKLTAYHEAGHAVIAFFTVASDPIHKATIIPRGRSLGLVMRLPESDRVSHTREKMTADLTVAMGGRAAEELIFGYHKVTSGASSDIKQATDLARAMVMKWGMSDKVGPLYHSDEKNETISNNLANLIDEEVKSIVTSALERAKSLLHEHLESLHIVAKNLLEFETLTGEDIKNVINGKELTKNNEDEAQPLKRSFASKEQ

SEQ ID NO: 60571 - DNA, 1893 bp, Thiobacillus denitrificans ATCC 25259
  CDS (1)..(1893): transl_table=11
gtgaacaacttgtcgaagaacgtcgccatctggttgatcatcgctgtcatcctgatgacggtcttcaaccaattcggcgcgcagcgcagcgcccagtcgcagattccttattcgcaattcatcgaggaagtgcggcagcagcagatcgccaaagtggtgatcgagggcaacgtgctgaagggcgagcgcagcgatggccagcgcttcacgagttatgcgccgagcgatccgtggatggtgtcggatctgctgaaaaatggcgtcatggtcgaggccaagcccgaggagcagccgtccttcctgatgagcctcttcatctcgtggttcccgatgctgctgctgatcggcgtgtggatcttcttcatgcgtcagatgcagggcggcggacgcggcggcgcgttctcgttcggcaagagccgcgcgcgcctgctcgacgagaacgccaacccggtgaccttcgcggacgtcgccggctgcgacgaagcgaaggaagatgtcgccgaactggtcgacttcctcaaggatccgtccaagttccagaaactcggcggccgcattccgcgcggcgtgttgatggtcggtccgcccggcacgggcaagacgctgctcgcgcgctcgatcgccggggaggcgaaggtgccgttcttcagcatttcgggctccgatttcgtcgagatgttcgtcggcgtcggcgccgcgcgcgtgcgcgacatgttcgaacaggcgaagaagaacgcaccgtgcatcatcttcatcgacgaaatcgacgccgtgggccgtcagcgcggcgccggcctcggcggcggcaacgacgagcgcgagcagacgctcaaccagctgctggtggagatggacggcttcgaggcgacgactggcgtcatcgtgatcgcggcgaccaaccgccccgacgtgctcgaccccgcgctgctgcgccccggccgtttcgaccgccaggtcgtggtcggcctgccggacattcgtggacgcgagcagatcctgctcgtgcacatgcgcaaggtgccggtcgcacccgacgtccgtgccgacatcctcgcgcgcggcacgcccggcatgtccggcgccgacctcgccaaccttgtgaacgaggcggcactgtttgcggcccggggcaacaagcgcctcgtcgatatggacgatttcgagcaggccaaggacaagatcctgatgggcgccgagcgcaaatccatggtcatcacgcccgaggacaagaagaagacggcttaccacgagtcgggccacgcggtgatcggcatgtccttgcctggctgtgacccggtacacaaggtgaccgtgatccctcgcgggcgcgccctgggcgtgacgatgtcgctgcccgaaatcgaccgcttcagcctgtacaaggaccagatgctggcgcagatcagcatgctgttcggtggacgcgtcgccgaagaaatcttcgtcggcagcgtctcgaccggggcatcgaacgacttcgagcgtgcgacgagcatcgcccgcgacatggtgacgcgctacggcatgtcggaagcgctgggacccatggtctatggcgaaaacgagggcgaagtcttcctcggccgctcggtgacgacgcacaagaacatgagcgaggcgacgatgcagaaggtcgacgccgaaatccgccgcattctcgacgagcaatacgacgtcgcgcgcaaaatcctcaccgacaaccgcgacaaggtcgaggcgatgacggccgcgctgctcgagttcgagacgatcgatgcggagcagatcgccgacatcatggccggtcgtccggtccgtccgccgcggccttccgcgccgccgcagccgcccgcgagcgggggagacaagcccagcgcacctgcgcccacggcgcacccggcgcaggaaacctag

SEQ ID NO: 60572 - protein, 630 aa, Thiobacillus denitrificans ATCC 25259
MNNLSKNVAIWLIIAVILMTVFNQFGAQRSAQSQIPYSQFIEEVRQQQIAKVVIEGNVLKGERSDGQRFTSYAPSDPWMVSDLLKNGVMVEAKPEEQPSFLMSLFISWFPMLLLIGVWIFFMRQMQGGGRGGAFSFGKSRARLLDENANPVTFADVAGCDEAKEDVAELVDFLKDPSKFQKLGGRIPRGVLMVGPPGTGKTLLARSIAGEAKVPFFSISGSDFVEMFVGVGAARVRDMFEQAKKNAPCIIFIDEIDAVGRQRGAGLGGGNDEREQTLNQLLVEMDGFEATTGVIVIAATNRPDVLDPALLRPGRFDRQVVVGLPDIRGREQILLVHMRKVPVAPDVRADILARGTPGMSGADLANLVNEAALFAARGNKRLVDMDDFEQAKDKILMGAERKSMVITPEDKKKTAYHESGHAVIGMSLPGCDPVHKVTVIPRGRALGVTMSLPEIDRFSLYKDQMLAQISMLFGGRVAEEIFVGSVSTGASNDFERATSIARDMVTRYGMSEALGPMVYGENEGEVFLGRSVTTHKNMSEATMQKVDAEIRRILDEQYDVARKILTDNRDKVEAMTAALLEFETIDAEQIADIMAGRPVRPPRPSAPPQPPASGGDKPSAPAPTAHPAQET

SEQ ID NO: 60573 - DNA, 1842 bp, Anabaena variabilis ATCC 29413
  CDS (1)..(1842): transl_table=11
gtgaataaaagatggagaaatgcggggctgtacgcgctgctatttattgttgtaattgcgcttggcacagctttttttgaaaaacaaccccaaagtcgggaatcatggcgctatagccagtttattcaagaagttgaaaaaggcagagtagaaagagttagtttgagtgcagaccgttccacggcactagtcacacccaaatatgaccctagtaaaaaacttgttactttagtcaacgatccagaattaattaatactctgactgcaagaggcgttgatattactgttttgccacaaaccgatgaaggattttggtttaaagcattaagcagcttatttttccctgtattacttctggtgggcttattcttcttactccgtcgcgcccaaagtggccctggtagccaagccatgaactttggcaaatccaaagccagagtgcaaatggagccacaaacccaagttacctttggtgatgttgcggggattgaccaagcaaaattagaactaaacgaagtcgtagactttcttaaaaacgccgatcgctttactgctgtcggtgcgaaaattcctaaaggtgttttgttagtagggcctccaggtacaggtaaaaccctcctagctcgtgcagtagccggggaagcaggcgtacctttcttctccatctctggttctgagtttgtagaaatgttcgttggtgtgggtgcgtcccgcgtccgcgatttatttgaacaagctaagtccaacgctccttgtatcgtcttcatcgatgaaatcgacgctgtcggtcgtcaacggggtgctggtttaggtggtggtaacgatgaacgggaacaaacccttaaccagttactcaccgaaatggatggttttgaaggtaacactggcatcatcattatcgctgctaccaaccgtcccgacgtactcgatgccgccttgttgcgtcctggtcgctttgaccgtcaagttgttgttgaccgtcccgactacggcggacgtagcgaaattctcaaagttcacgcccgtggtaaaaccttggctaaggatgtggacttggataaaatcgctcgtcgtacccccggatttaccggtgcagatttatccaacctgctaaacgaagccgcaatcttagcagcacggcgcaacctgaccgaaatttcgatggacgaaatcaacgacgcgattgaccgcgtgttggctgggccagaaaagaaagaccgcgtaatgagcgaaaaacgcaaagtcctggtagcttatcacgaagctggtcacgctttagttggtgcattgatgcccgactatgacccagtacaaaaaatcagcattattcctcgcggacgtgccggtggtttgacttggttcacccccagcgaagaccgcatggatacaggtttatacagccgcgcttatctggaaaaccagatggctgtagctttgggtggtcggattgctgaagaaattatctttggtgatgaagaagttactacaggtgcttccaacgacttacaacaagtagcccgtgtagcccgtcagatgattacccgatttggcatgagcgataaactcggccctgtcgccctcggtcgtcagcaaggcaatatgttcctcggtcgtgacatcatgtcagagcgtgacttctcggaagagactgctgctgctattgatgaagaagttcacaaactagtagaaacagcatatacccgtgctaaagatgtgttggtaaataaccgccacatcctcgaccaaatcgcgcaaatgctggttgataaagaaacagtagatgccgatgagttacaagaaattttggcaaataacgatgtaaaaacagccgcgtttgcctaa

SEQ ID NO: 60574 - protein, 613 aa, Anabaena variabilis ATCC 29413
MNKRWRNAGLYALLFIVVIALGTAFFEKQPQSRESWRYSQFIQEVEKGRVERVSLSADRSTALVTPKYDPSKKLVTLVNDPELINTLTARGVDITVLPQTDEGFWFKALSSLFFPVLLLVGLFFLLRRAQSGPGSQAMNFGKSKARVQMEPQTQVTFGDVAGIDQAKLELNEVVDFLKNADRFTAVGAKIPKGVLLVGPPGTGKTLLARAVAGEAGVPFFSISGSEFVEMFVGVGASRVRDLFEQAKSNAPCIVFIDEIDAVGRQRGAGLGGGNDEREQTLNQLLTEMDGFEGNTGIIIIAATNRPDVLDAALLRPGRFDRQVVVDRPDYGGRSEILKVHARGKTLAKDVDLDKIARRTPGFTGADLSNLLNEAAILAARRNLTEISMDEINDAIDRVLAGPEKKDRVMSEKRKVLVAYHEAGHALVGALMPDYDPVQKISIIPRGRAGGLTWFTPSEDRMDTGLYSRAYLENQMAVALGGRIAEEIIFGDEEVTTGASNDLQQVARVARQMITRFGMSDKLGPVALGRQQGNMFLGRDIMSERDFSEETAAAIDEEVHKLVETAYTRAKDVLVNNRHILDQIAQMLVDKETVDADELQEILANNDVKTAAFA

SEQ ID NO: 60575 - DNA, 1938 bp, Anabaena variabilis ATCC 29413
  CDS (1)..(1938): transl_table=11
atgcctgttgaaactgataaaaaaaattcaattaaaccaccaaggttacgacaatttggcggcagtttcctgattctgctaactttgctgttattgcttaactttattgttcccagtttttctggccctcgcttgccacaggttccttatagtgactttatcgctcaagtacaagcaggtaaagtagataaggcgattgtagggggcgatcgcattcaatactccatcaaaactcaaacccccgacggtaaagtcgtagaccaggtatttgctaccacgccggtcgctattgatttagacttacccaaaattctccgcgaaaataatgttgagtttgccgcaccaccaccagaccagaacggctggattggaacgctactaagttgggtagcaccaccattaattttctttgggatttgggcatttttaattaatcgtcaaggtggtggcccagctgcattgacagtcgggaaaagtaaagcccggatttactcagaaggtagcactggggtgaaatttctcgatgtggctggggtggatgaagccaaggcggaattagaagaaattgttgacttcttgaaaaatgccactaagtacacaaatttaggtgcgaaaattcctaagggtgtgttgttagtcggccctcctgggactggtaaaactttactagcaaaggcgatcgctggtgaagcgggtgtaccattcttcagtatctctggttcagaatttattgagttgtttgtcggtgtcggtgcggcgcgcgtccgtgacttatttgagcaagccaaaaaacaagctccctgtatcgtcttcatcgatgagttagacgcattaggtaaatctcgcggtggtgctggcggctttgttggcggtaacgacgaacgcgaacaaaccctcaaccaattactcacagaaatggatggctttgatgctaatacaggtgtaattatcatcgccgctaccaaccgtcccgaagttctagaccctgctttgcgccgtcctggtcgctttgaccgccaagtcgtagtcgatcgccctgataaaattggtcgagaagcaattctcaaagtccacgccagaaatgtgaaattagcgaatgatgtcgatttaggtaacatcgctatcaaaacacctggttttgctggtgcagatttagccaatcttgtgaatgaagctgcactattagccgccagacaaaatcgccaagctgtcgtgatggctgatttcaacgaagctattgaaaggttagtagctggcttagaaaaacgttctcgtgtcttgaatgaaaccgagaagaagaccgtcgcctatcacgaagttggtcacgccattatcggcgcattaatgccgggcgctggtagagttgagaaaatctctgttgttcctcgtggtgttggcgctttgggttatacaattcaaatgcctgaagaagaccgcttcttgatgattgaagatgaaattcgcgggcgaattgctactctgttgggtggacgttcggcggaagaaacagtctttggtaaagtctccaccggtgcaagcgatgacattcaaaaagccacggacttagcagaacgttacgtcactttatatggaatgagtgacaaattagggccagtagcttttgagaagattcaacaacaattcctcgaaggttacggtaatcctcgccgttccattagtcccaaagtagctgaggaaatcgaccgcgaagtgaagcagattgtagataatgctcaccacatcgccttgagtatcctgcaaaataaccgtgacttgttggaagaaactgcacaggaacttctgcaaacagaaattctcgaaggtgctgcactcagggaacgcctcagccaagctcaagcaccagaagaactacaagaatggttgcggacaggtaagatatcggaagataaacccctaatgcaaacacttctggtctaa

SEQ ID NO: 60576 - protein, 645 aa, Anabaena variabilis ATCC 29413
MPVETDKKNSIKPPRLRQFGGSFLILLTLLLLLNFIVPSFSGPRLPQVPYSDFIAQVQAGKVDKAIVGGDRIQYSIKTQTPDGKVVDQVFATTPVAIDLDLPKILRENNVEFAAPPPDQNGWIGTLLSWVAPPLIFFGIWAFLINRQGGGPAALTVGKSKARIYSEGSTGVKFLDVAGVDEAKAELEEIVDFLKNATKYTNLGAKIPKGVLLVGPPGTGKTLLAKAIAGEAGVPFFSISGSEFIELFVGVGAARVRDLFEQAKKQAPCIVFIDELDALGKSRGGAGGFVGGNDEREQTLNQLLTEMDGFDANTGVIIIAATNRPEVLDPALRRPGRFDRQVVVDRPDKIGREAILKVHARNVKLANDVDLGNIAIKTPGFAGADLANLVNEAALLAARQNRQAVVMADFNEAIERLVAGLEKRSRVLNETEKKTVAYHEVGHAIIGALMPGAGRVEKISVVPRGVGALGYTIQMPEEDRFLMIEDEIRGRIATLLGGRSAEETVFGKVSTGASDDIQKATDLAERYVTLYGMSDKLGPVAFEKIQQQFLEGYGNPRRSISPKVAEEIDREVKQIVDNAHHIALSILQNNRDLLEETAQELLQTEILEGAALRERLSQAQAPEELQEWLRTGKISEDKPLMQTLLV

SEQ ID NO: 60577 - DNA, 1902 bp, Anabaena variabilis ATCC 29413
  CDS (1)..(1902): transl_table=11
atgaaaaattttgggaaaaaggcattgataaaacagcaatcaccaaagcgcgttgcttggactggtgctttggcagccagtttgattatgttaccaacgatgtttggcggtaatcctgtcttagcgcaaaaagcagagcgtgagtctctgtcatacggagagttgattcaaaaagttaatcaagagcaagtcaaaagagtagaactggacgaaactgaacagatagctaaagtttatttaaaagggcaaaaaccagacgcaccaccaatacaggtgaggttgttggagcagaacaacgagttaattaacagactcaaagaaaaaaatgttgattttggtgagatttcttctgccaatagtagagctgctgtagggttattaattaacctgatgtggattttgccattggtggctttaatgctgctatttctgcgtcgttctacaaatgcttctagccaagcaatgaattttggcaaatctagggcgcgtttccaaatggaagccaagactggggtgaagtttgacgatgtagcgggtattgaagaagcgaaggaagaattacaagaagttgtgacattcctcaagcagccagaaagatttacggctgtgggtgcgcggatacctaaaggtgtgctgttggtggggcctccaggtactggtaaaactttactagcaaaagcgatcgctggggaagcggctgtaccatttttcagcatttccggttcggaatttgtggaaatgttcgtgggtgtgggtgcttctcgcgtccgcgatttgtttaagaaagctaaagacaatgcgccttgtctgatatttatcgatgaaatcgatgcagttggcagacaacggggtacgggtattggtgggggtaacgatgagagagaacaaaccctcaatcagttactcacggagatggatggttttgaaggtaacacaggcatcattattattgctgcaaccaaccgtcccgacgtattagattcagctttgttacgtcctggtcgtttcgacagacaagtaattgttgatgcaccagacttgaaaggacgcttagagattttgcaagtccattcacgcaataagaaagttgaccccagtgtatcactagaggcgatcgctcgtcgcacacccggatttacaggtgcagatttagccaacttactcaacgaagccgctatcctcacagcacgtagacgcaaagaagcaattacgattctagaaattgatgacgctgttgatagggtagttgctgggatggaagggacacccctagtagacagcaagagtaagcgcttaattgcttaccatgaagttggacatggtttagtcgggacgttattaaaagaccatgacccagtgcagaaagtcaccctgattcccagaggacaagcacaaggtttaacttggtttactcccaacgaagaacaagggttaatctctcgttcccaactcaaagctagaattacttctactttggccggtcgtgctgctgaagaaattgtctttggtaagccagaagtgaccacaggtgcgggtgatgacctgcaaaaagtcacatcaatggcaaggcaaatggtgacaaggtttggtatgtctgaactaggccccttatctctggaaaatcaaagtggcgaggtatttttaggacgcgactggatgaataaatccgactattctgaagaaatagctgccaagatagattctcaagtccgagaaattatcaacacctgttaccaaacatcaaaggaacttttgcaaactaaccgcgtggttatggaacgactagtagatttgttgacagaacaagaaactattgaaggtgatttgttccgtaaaattgttagcgaaagtcaaaaccaagtggttgatgagcaattgtcgatggtaatgggtaatgggtaa

SEQ ID NO: 60578 - protein, 633 aa, Anabaena variabilis ATCC 29413
MKNFGKKALIKQQSPKRVAWTGALAASLIMLPTMFGGNPVLAQKAERESLSYGELIQKVNQEQVKRVELDETEQIAKVYLKGQKPDAPPIQVRLLEQNNELINRLKEKNVDFGEISSANSRAAVGLLINLMWILPLVALMLLFLRRSTNASSQAMNFGKSRARFQMEAKTGVKFDDVAGIEEAKEELQEVVTFLKQPERFTAVGARIPKGVLLVGPPGTGKTLLAKAIAGEAAVPFFSISGSEFVEMFVGVGASRVRDLFKKAKDNAPCLIFIDEIDAVGRQRGTGIGGGNDEREQTLNQLLTEMDGFEGNTGIIIIAATNRPDVLDSALLRPGRFDRQVIVDAPDLKGRLEILQVHSRNKKVDPSVSLEAIARRTPGFTGADLANLLNEAAILTARRRKEAITILEIDDAVDRVVAGMEGTPLVDSKSKRLIAYHEVGHGLVGTLLKDHDPVQKVTLIPRGQAQGLTWFTPNEEQGLISRSQLKARITSTLAGRAAEEIVFGKPEVTTGAGDDLQKVTSMARQMVTRFGMSELGPLSLENQSGEVFLGRDWMNKSDYSEEIAAKIDSQVREIINTCYQTSKELLQTNRVVMERLVDLLTEQETIEGDLFRKIVSESQNQVVDEQLSMVMGNG

SEQ ID NO: 60579 - DNA, 1887 bp, Anabaena variabilis ATCC 29413
  CDS (1)..(1887): transl_table=11
atgaaattctcttggagagtcctagtactctggacattgccagctttggtaattggttttttcttttggcaagggacgtttgctggcgctcctgcggacatgagcaagaatgcagctaacactcgcatgacttacggccgctttctggaatatgtggatgctggacgtgttaccagcgttgacttatacgaaggcggcagaacagctattgtggaagcccaggatcaagatatcgaaaaccgtgtccaacgttggcgggtggatttgccagttagcgctcctgagttaatcagcaaacttaaagaaaagaaagtaagttttgatgctcatccagcacgtaatgatggcgctatttggggattgttgggcaatctagtgttccccatcttattgattactggattgttctttttgttccgtcgctctaataatctccctggtggccctggtcaagccatgaactttggcaaatccagagcgcgtttccaaatggaagccaaaactggggtgaagtttgacgatgtagctggtatcgaagaagcgaaggaagaattacaagaagttgtgacattcctcaaacagccagaaagatttacggctgtgggtgcgcggattcccaaaggtgtactgttagtagggcctccagggactggtaaaactttactagcaaaagcgatcgctggggaagctggtgtaccattctttagtatttccggttcggaattcgtggaaatgttcgtgggtgtgggtgcttcccgcgtgcgtgacttatttaagaaagctaaagataatgctccctgtatcatcttcattgatgaaattgacgctgttggtagacaacggggtgctggtattggtggcggtaacgatgagagagaacaaactctcaaccagttactcaccgagatggatggttttgaaggcaatacaggcatcattattattgctgctaccaaccgtcctgacgtattagatgcggcgttgttacgtcctggtcgttttgacagacaagtaaccgttgatgctccagatattaaaggacgcttggaagtcctgcaagtccacgcccggaataagaaactagatccgagtgtatcattggaagcgatcgcccgtcgtacccctggattcaccggtgcagatttagccaacttgctcaacgaagccgctattcttaccgccagaagacgtaaagaaggtatcaccctcagcgaaattgatgatgcggtggatagagtcgtcgcggggatggaaggaactcccctcgtagatagcaagagcaagcgcttaattgcttaccacgaagtaggacacgccttggtaggtactttattaaaagaccatgacccagtgcagaaagtcaccctgattcctagaggacaagcccaaggtttaacttggtttactcccaacgaagaacaaggtttaatttctcgttcccaactcaaagccagaattaccggcgctttgggtggtcgtgcggcggaagaaataatttttggttctgcggaagtgaccacaggtgcaggcggagacttgcaacaggtgtcaggaatggcacggcaaatggtgacaagatttgggatgtctgatttaggccccttgtccttggaaagtcaacaaggagaagtattcttaggtcgtgactggatgaccagatcagattattctgaatccattgcggcaagaattgactctcaagtccggttgattgttgacgaatgctatgaaaacgctaagaagattatgcgtgatcatcgcaccgttacagatcgcatcgttgacctgctgattgaaaaagaaaccattgacggcgacgagttccggcaaattgtggctgagtacactgatgtacctgataagcagcagtttgtaccacaactgtaa

SEQ ID NO: 60580 - protein, 628 aa, Anabaena variabilis ATCC 29413
MKFSWRVLVLWTLPALVIGFFFWQGTFAGAPADMSKNAANTRMTYGRFLEYVDAGRVTSVDLYEGGRTAIVEAQDQDIENRVQRWRVDLPVSAPELISKLKEKKVSFDAHPARNDGAIWGLLGNLVFPILLITGLFFLFRRSNNLPGGPGQAMNFGKSRARFQMEAKTGVKFDDVAGIEEAKEELQEVVTFLKQPERFTAVGARIPKGVLLVGPPGTGKTLLAKAIAGEAGVPFFSISGSEFVEMFVGVGASRVRDLFKKAKDNAPCIIFIDEIDAVGRQRGAGIGGGNDEREQTLNQLLTEMDGFEGNTGIIIIAATNRPDVLDAALLRPGRFDRQVTVDAPDIKGRLEVLQVHARNKKLDPSVSLEAIARRTPGFTGADLANLLNEAAILTARRRKEGITLSEIDDAVDRVVAGMEGTPLVDSKSKRLIAYHEVGHALVGTLLKDHDPVQKVTLIPRGQAQGLTWFTPNEEQGLISRSQLKARITGALGGRAAEEIIFGSAEVTTGAGGDLQQVSGMARQMVTRFGMSDLGPLSLESQQGEVFLGRDWMTRSDYSESIAARIDSQVRLIVDECYENAKKIMRDHRTVTDRIVDLLIEKETIDGDEFRQIVAEYTDVPDKQQFVPQL

SEQ ID NO: 60581 - DNA, 1908 bp, Pseudomonas fluorescens PfO-1
  CDS (1)..(1908): transl_table=11
atggcaaagaatctgatcctgtggttgatcatcgcggctgtcctggtgacggtgatgaacaacttctccagccctaacgagccgcagaccctcaactattccgacttcatccagcaggtcaaggatggcaaggtcgagcgcgtggccgtcgacggctatgtgattaccggcaagcgcaacgatggcgacagcttcaagaccattcgtccggcaattcaggacaatggcttgattggcgacctggtcgacaaccacgttgtagtagaaggcaagcagcctgaacagcaaagcatctggacccagcttctggtagccagcttcccgatcctggtgatcatcgcggtgttcatgttcttcatgcgccagatgcagggcggtgcgggtggcaagggcgggccgatgagctttggcaagagcaaggcgcgtctgctgtccgaagatcaggtgaaaaccaccctggctgacgttgccggttgcgacgaagcgaaggaagaagtgggtgagctggtcgagttcctccgtgatccgggcaagttccagcgcctgggcggccgcattcctcgcggcgtgctgatggttggccctccgggtaccggtaaaaccttgctggccaaggcgattgccggcgaagccaaggtgccgttcttcaccatttccggttccgacttcgtcgaaatgttcgtcggtgtcggtgcgagccgcgttcgtgacatgttcgaacaggccaagaagcacgctccatgcatcatcttcattgacgagatcgacgccgttggtcgccatcgtggcgccggcatggggggcggtcacgacgagcgcgaacagactctcaaccagttgctggtcgagatggacggtttcgaaatgaatgacggcatcatcgtcattgcagcgaccaaccgtcctgacgtgctggaccctgctttgctgcgtccgggtcgtttcgaccgtcaggtggtggtcggcttgccggacatccgtggtcgcgagcagatcctcaaggttcacatgcgtaaagtgccaatgggtgacgatgtcgctccggccgttatcgcacgtggcacgccgggtttctccggtgccgatctggcgaacctggtcaacgaggcttctttgtttgctgcccgtgccggcaagcgcatcgtcgaaatgaaggagttcgaactggccaaagacaagatcatgatgggcgccgagcgcaaatccatggtcatgtccgagaaggaaaagcagaacaccgcttatcacgaagcaggccacgccattgttggccgcgtcgtgcccgagcatgatccggtctacaaggtgtcgatcatcccgcgcggtcgtgcgttgggtgtgaccatgttcctgccggaagaggatcgctacagcctgtccaagcgtgcgctgatcagtcagatctgctcgctgtacggcggccgtattgccgaagagatgactttgggctttgacggtgtaaccacgggtgcttccaacgacatcatgcgtgcgagtcagattgcgcggaacatggtgaccaagtggggtctgtcggaaaaactgggtccgttgatgtacgccgaagaagagggtgaagtattcctcggtcgcggcggtggcggtcagaatgccagcttctcaggtgagacagccaagctgatcgactccgaagtgcgcagcatcatcgatcagtgctacggcaccgccaaacagatactcacggacaaccgcgacaagctcgatgccatggcggatgccctgatgaagtacgagacgatcgatgccgagcagatcgacgacatcatggccggtcgtacaccgcgcgagcctcgcgactggtcgggtggtaccggtactggcacgccgcctgtcattcagggcgagcgtccggaaacaccgattggcggcccggctgccgacgtttaa

SEQ ID NO: 60582 - protein, 635 aa, Pseudomonas fluorescens PfO-1
MAKNLILWLIIAAVLVTVMNNFSSPNEPQTLNYSDFIQQVKDGKVERVAVDGYVITGKRNDGDSFKTIRPAIQDNGLIGDLVDNHVVVEGKQPEQQSIWTQLLVASFPILVIIAVFMFFMRQMQGGAGGKGGPMSFGKSKARLLSEDQVKTTLADVAGCDEAKEEVGELVEFLRDPGKFQRLGGRIPRGVLMVGPPGTGKTLLAKAIAGEAKVPFFTISGSDFVEMFVGVGASRVRDMFEQAKKHAPCIIFIDEIDAVGRHRGAGMGGGHDEREQTLNQLLVEMDGFEMNDGIIVIAATNRPDVLDPALLRPGRFDRQVVVGLPDIRGREQILKVHMRKVPMGDDVAPAVIARGTPGFSGADLANLVNEASLFAARAGKRIVEMKEFELAKDKIMMGAERKSMVMSEKEKQNTAYHEAGHAIVGRVVPEHDPVYKVSIIPRGRALGVTMFLPEEDRYSLSKRALISQICSLYGGRIAEEMTLGFDGVTTGASNDIMRASQIARNMVTKWGLSEKLGPLMYAEEEGEVFLGRGGGGQNASFSGETAKLIDSEVRSIIDQCYGTAKQILTDNRDKLDAMADALMKYETIDAEQIDDIMAGRTPREPRDWSGGTGTGTPPVIQGERPETPIGGPAADV

SEQ ID NO: 60583 - DNA, 1902 bp, Rhodobacter sphaeroides 2.4.1
  CDS (1)..(1902): transl_table=11
gtgggcaacgcgcgaaatatcgctttctgggtggtcctgtttctgctgatcctggcgcttttcaacctgttcagcggcggccagaccaccagcagctcgcgcaccatctcctattccgatttcatcgcccgggtggacaatggcgaggtttcctcggtcacgctcgacggcgaacgggtaatggtgcgcggcaaggacggcacgcagtatgtggcgatcaagccgcagggcgaagaggtgacagaccgtctgatcaatcatggcgtggaagtgcgtgccgaggcgcaggagcagtcgggcttcttctcgctgatctcgctctggcttcccttcctcgtgctgatcggcatctggatcttcttcatgaaccggatgcagggcggcgggcgcggcggggcgatgggcttcggcaagagccgggccaagcttctgaccgaaaagcagggccgcgtcaccttcgacgacgtggccggcatcgacgaagccaaggaagagctggaagagatcgtcgaattcctgcgcaacccgcagaaattcagccgtctcggcggcaagatccccaagggcgcgctgctcgtgggcccgcccggcaccggcaagacgcttctggcgcgtgccatcgcgggcgaggccggcgtgcccttcttcaccatctcgggttcggatttcgtcgaaatgttcgtgggtgtcggtgcctcccgtgtccgtgacatgttcgagcaggccaagaagaacgcgccctgcatcgtcttcatcgacgagatcgacgccgtgggccgcgcccgtggcgtgggcatcggcggcggcaacgacgagcgcgagcagacgctgaaccagcttctggtcgagatggacgggttcgaggccaacgagggcgtcatcatcgtcgcggccaccaaccgcaaggacgtgctggacccggcgctgctgcgccccggccgcttcgaccgcacgatccatgtgccgaaccccgacatcaagggccgcgagaagatcctgtcggtccatgcccgcaaggttccgctggggccgaacgtcgacctgcgcctgatcgcgcgcggcacgccgggcttctcgggcgccgacctgatgaacctcgtgaacgaggcggcgctgctcgcggcccgcgtcgggcggcggttcgtcacgatggacgatttcgagaatgccaaggacaaggtcatgatgggggccgagcggcgctcgatggtcctcaccgccgaccagaaggagaagaccgcctaccacgaggccggtcacgccatcgtcggtctgaaccttcccaagtgcgacccggtatacaaggccacgatcatcccgcggggcggtgcgctcggcatggtggtcagcctgcccgagatggaccggctgaacatgcacaaggacgagggcaagcagaagatcgccatgaccatggcgggcaaggcggccgagatcatcaaatacggtgaagaggcggtctcctccggcccggcgggcgacatccagcaggcctcggcgctcgcgcgcgccatggtgatgcgctggggcatgtcggacgtcgtcggcaacatcgactatgccgaggcgcatgagggctatcagggcaataccgcgggcttctcggtctcggccgagaccaagaagatgatcgaggcggaggtgaagcgcctgatcgacgagggctaccagaccgcttaccggatcctcaccgagaagtcggaagagttcgaacgtctggccaagggcctcctcgaatacgagacgctcaccggcgaccagatccgccgtgtgatcgcgggcgagccgatcgactcggacgacgatgccgaccgtccggtgggcggcggctcggtggccgcgatcccgaagacccggccgaaggtcatcaaggcggatggcgggctcgagccctccgtctga

SEQ ID NO: 60584 - protein, 633 aa, Rhodobacter sphaeroides 2.4.1
MGNARNIAFWVVLFLLILALFNLFSGGQTTSSSRTISYSDFIARVDNGEVSSVTLDGERVMVRGKDGTQYVAIKPQGEEVTDRLINHGVEVRAEAQEQSGFFSLISLWLPFLVLIGIWIFFMNRMQGGGRGGAMGFGKSRAKLLTEKQGRVTFDDVAGIDEAKEELEEIVEFLRNPQKFSRLGGKIPKGALLVGPPGTGKTLLARAIAGEAGVPFFTISGSDFVEMFVGVGASRVRDMFEQAKKNAPCIVFIDEIDAVGRARGVGIGGGNDEREQTLNQLLVEMDGFEANEGVIIVAATNRKDVLDPALLRPGRFDRTIHVPNPDIKGREKILSVHARKVPLGPNVDLRLIARGTPGFSGADLMNLVNEAALLAARVGRRFVTMDDFENAKDKVMMGAERRSMVLTADQKEKTAYHEAGHAIVGLNLPKCDPVYKATIIPRGGALGMVVSLPEMDRLNMHKDEGKQKIAMTMAGKAAEIIKYGEEAVSSGPAGDIQQASALARAMVMRWGMSDVVGNIDYAEAHEGYQGNTAGFSVSAETKKMIEAEVKRLIDEGYQTAYRILTEKSEEFERLAKGLLEYETLTGDQIRRVIAGEPIDSDDDADRPVGGGSVAAIPKTRPKVIKADGGLEPSV

SEQ ID NO: 60585 - DNA, 1860 bp, Carboxydothermus hydrogenoformans Z-2901
  CDS (1)..(1860): transl_table=11
ttgaataaagtattaaaaaatttagcaatttatttgttgattgttttggttgcagtaatgctcataaactattcccggccgtcggcaacttctattcgcgatttgaaatatgatgagttttatagccttttggaaaaagggcaggtagcgtcggtagcgattcagacggaccggacaattaatgaaatttcaggggttttaagggatggaaccaggtttaaaacccgggggcccctggaagatgctgaactatataaagatctaaaaaagatgaatgttacggtagaaattatgccgccgaaagaaccggccttttgggccaaccttttaagttccctgttaccggtccttttaatggtgggtttgttctttttctttatgcaacaggcccagggcgggggtaaccgggtgatgtccttcggcaaaagccgggccaagctgcataccgatgagaaaaagcgggttacctttgccgatgtggctgggattgatgaagtaaaggaagaattggcggaaatcgtcgagtttttgaaaaacccccggaagtataacgaattaggagccagaattcccaagggcgttctcctttttggccaaccgggtaccgggaaaactttgctggcccgggcaatagccggtgaagcgggggtgccgttttttagcattagcggctccgattttgtggagatgtttgtaggggttggtgcttcccgggtaagggatctttttgagcaggccaagaaaaatgctccctgcattgtttttattgatgagattgatgctgttggtcggcagcggggagcggggttaggtggcggtcacgacgaacgggagcaaaccttaaaccagctgttggtggaaatggacggctttaattccaacgaaggaattatcattattgccgctaccaaccgaccggacattttagatccagcccttttgcggccgggacgtttcgaccgacacatagtggtggatactccggatattaacggtcgcaaggaaatcttaaaagttcacgttaaagggaaaccgctgggagatgatgtggatttggatgttctggcccggcgtaccccaggttttaccggtgctgatttagcaaatatggttaatgaagcggccctgcttgctgctcgccgcaataagaaagttattaacatggaagagatggaagaagcaattgaaagggttattgccggtccggaaaagaaaagcaaggtcatttccgaacgggagaagcggcttgtagcttaccatgaggcgggccatgccatggtcggttacctccttccccataccgacccggtccacaagatttccattattccccggggacgggccgggggctatactttactgttacccgaagaagaccgttcgtacatgacaaaatcccagcttctcgatgaaattaccatgcttttgggaggtcgggtagcggaggctctggttttagaagacattagcaccggtgcccgtaacgatctggagcgggctaccgaaacggccaggcgcatggttatggaatacggaatgagcgaagaattgggccctctgacctttggtaaaggtaccgaagcggtgtttttaggccgggatttggcccgggatagaaattattccgaagaaatagcctataccattgataaagaagtaagaaaaattattgatagctgttatagccgggcggaggagattttaaagaaaaatattaatgtgcttcaccttgtagcgacaaaacttatggaagtggaaacgatggaaggggaagagtttgaaaagttaatgaaagaaaatggcttaaccaagcccagggtaaatggaaataacgattcacctgcggatgttctccagtag

SEQ ID NO: 60586 - protein, 619 aa, Carboxydothermus hydrogenoformans Z-2901
MNKVLKNLAIYLLIVLVAVMLINYSRPSATSIRDLKYDEFYSLLEKGQVASVAIQTDRTINEISGVLRDGTRFKTRGPLEDAELYKDLKKMNVTVEIMPPKEPAFWANLLSSLLPVLLMVGLFFFFMQQAQGGGNRVMSFGKSRAKLHTDEKKRVTFADVAGIDEVKEELAEIVEFLKNPRKYNELGARIPKGVLLFGQPGTGKTLLARAIAGEAGVPFFSISGSDFVEMFVGVGASRVRDLFEQAKKNAPCIVFIDEIDAVGRQRGAGLGGGHDEREQTLNQLLVEMDGFNSNEGIIIIAATNRPDILDPALLRPGRFDRHIVVDTPDINGRKEILKVHVKGKPLGDDVDLDVLARRTPGFTGADLANMVNEAALLAARRNKKVINMEEMEEAIERVIAGPEKKSKVISEREKRLVAYHEAGHAMVGYLLPHTDPVHKISIIPRGRAGGYTLLLPEEDRSYMTKSQLLDEITMLLGGRVAEALVLEDISTGARNDLERATETARRMVMEYGMSEELGPLTFGKGTEAVFLGRDLARDRNYSEEIAYTIDKEVRKIIDSCYSRAEEILKKNINVLHLVATKLMEVETMEGEEFEKLMKENGLTKPRVNGNNDSPADVLQ

SEQ ID NO: 60587 - DNA, 1851 bp, Synechococcus sp. CC9605
  CDS (1)..(1851): transl_table=11
gtgaacaagcgttggcgaaatatcggtctcggagcccttctggttctgtcgatcgttgtgattgcaccagcgttctttggtggcggtggtggcagccagccccaggtgaacaccatccgctacagcgagttcgttgaggcggtgaaggacgaccaaatcagccgtgtgctgatttctcccgatcagggcaccgctcaggtggttgaaaacgacggccgtcgtgctcaggtcaacctggcccctgatcgtgagctgctcggtttgctgaccgaacacagcgtggacatcgctgtgcagccctcccgtcagacccccggctggcagcaggctgctggaagtctgatcttccctctgcttctgcttggtggtctgttcttcctcttccggcgcgcccagggtggtggtggtggcaatccagccatgcagttcggcaagagcaaggcgcgggttcagatggagccctccacccaagtgacctttaccgatgtggccggcattgaaggcgcgaagcttgagctgactgaggttgtcgacttcctaaagaaccctgatcgcttcacggcggtcggcgccaagatccccaagggtgttctgcttgtgggacctcccggtaccggtaagaccctgctcgctaaagccgtggcgggcgaagcaggtgttcccttcttctcgatctccggttctgaattcgttgagatgttcgtcggcgttggcgcaagccgcgttcgtgaccttttcgagcaagccaagaaaaacgctccctgcatcgtcttcatcgacgagattgacgccgttggtcgacagcggggcgcaggtctcggcggtggtaacgacgagcgagagcaaacgctgaaccagctcctgacggagatggatggtttcgagggcaacaccggcatcatcatcgtggcggccaccaaccgcccggacgtgctcgatgctgctctgatgcgccccggtcgtttcgatcgtcaggtaaccgtggatcgccctgactattccggacgtctacagatccttggcgtccatgcccgcggcaagacccttgccaaggacgttgatctcgacaaggttgcccgccggacacccggctataccggcgctgatctggccaaccttctcaacgaagccgccatccttgcggcccgtcgcgaactcaccgaagtgagcaacgacgaaatcagcgatgccattgaacgggtgatggcgggtcctgagaagaaggaccgcgtgatgagtgagcgtcgtgctcgccttgttgcctatcacgaggctggccatgcccttgtgggtgccctgatgcctgactacgacccagttcagaagatctccatcattccccgcggtaatgccggcggtctgaccttcttcacccccagtgaggagcggatggaatccggcctgtattcacgggcttatctccagaaccagatggccgtggcccttggaggccgggttgctgaagagattgtttacggcgaagatgaggtcaccacgggtgcctccaacgacctccagcaggttgcttcaaccgcgcgtcagatgatcacccgattcggtatgagcgacgagctggggcccgttgcccttggtcgtgcgcaaggcggcatgttccttggacgcgacattgctgcagagcgtgatttctctgaggaaaccgccgcgatgatcgacaaagaggtttccgagctggtggatgtggcctacaagcgggccaccaaggttctcgtcgataaccgagccgttctggatgaattggctgagatgctcgttgagcaggagactgttgatgctgaagagcttcaggagctgctgatcaaacgtgacgtccgggtcgccgaatacgtctga

SEQ ID NO: 60588 - protein, 616 aa, Synechococcus sp. CC9605
MNKRWRNIGLGALLVLSIVVIAPAFFGGGGGSQPQVNTIRYSEFVEAVKDDQISRVLISPDQGTAQVVENDGRRAQVNLAPDRELLGLLTEHSVDIAVQPSRQTPGWQQAAGSLIFPLLLLGGLFFLFRRAQGGGGGNPAMQFGKSKARVQMEPSTQVTFTDVAGIEGAKLELTEVVDFLKNPDRFTAVGAKIPKGVLLVGPPGTGKTLLAKAVAGEAGVPFFSISGSEFVEMFVGVGASRVRDLFEQAKKNAPCIVFIDEIDAVGRQRGAGLGGGNDEREQTLNQLLTEMDGFEGNTGIIIVAATNRPDVLDAALMRPGRFDRQVTVDRPDYSGRLQILGVHARGKTLAKDVDLDKVARRTPGYTGADLANLLNEAAILAARRELTEVSNDEISDAIERVMAGPEKKDRVMSERRARLVAYHEAGHALVGALMPDYDPVQKISIIPRGNAGGLTFFTPSEERMESGLYSRAYLQNQMAVALGGRVAEEIVYGEDEVTTGASNDLQQVASTARQMITRFGMSDELGPVALGRAQGGMFLGRDIAAERDFSEETAAMIDKEVSELVDVAYKRATKVLVDNRAVLDELAEMLVEQETVDAEELQELLIKRDVRVAEYV

SEQ ID NO: 60589 - DNA, 1827 bp, Geobacter metallireducens GS-15
  CDS (1)..(1827): transl_table=11
ttgaaccagttctacaaaaacctggcgctctggcttgtgatcagcttgatgatgattcttctctttaacctgttcaataaaccgcgcaccacctctgagcggttgagctacagcgacttcatcaccgccgtcgacgcgggcaaggtgaatgcggtaaccattcagggaaatgaaattatcggcaagtttgccgacggcaaggagttcagaagctacaagcccttggacgccacgctctcggacaagcttctcgagaagaagatcagcatttcagccaagccggaggaagagaaggtttcctggttctccatcttcatctcctggttcccgcttctttttctggtgggtgtctggatattcttcatgcgtcagatgcaggggggtggcggcaaggccatggccttcggcaagagccgggctaagctccttaccgaggcccaaggacggatcaccttcgaggacgtggcaggcgtcgacgaggccaaggaagaactggaggagattatccagttcctgaaggatccgaagaagtttaccaagctcggcggtcgtatccccaaaggtgtgctcctggttggccctccgggaaccggcaaaaccctcctggcccgtgccgtggccggcgaggcgggcgttcccttcttctccatctccggttccgactttgtcgagatgttcgtgggggtcggtgcatcccgagtccgtgacctcttcgtccaggggaagaagaatgccccatgcatcatcttcatcgacgagatcgacgctgtcggccgccaccgcggggcaggactcggcggcggacatgatgagcgcgaacagacccttaaccagcttctggttgaaatggacggtttcgagtccaacgagggtgtcattctgatcgccgcaaccaaccgtcccgacgttctcgacccggctctccttcgtcccggccgcttcgaccgccaggtcgttgttccccagcccgacgtgaaggggcgggagatgatcctcaaggttcataccaaaaagacccccctggggcccaacgtcaatctcgatgtcattgcccgcggaacccccggtttttcgggcgccgatctggccaacgtggtgaacgaggcagcgcttcttgctgcgcgcaaggacaagagtgttgtggatatgcaggatttcgacgatgccaaggacaaggtcctcatgggggtcgagcgccggagcatggtcatctccgaggacgaaaagaagaacaccgcctaccacgaggcgggccataccctggtggcaaagctcatccccggttccgatcctgttcacaaggtttccatcatcccccgcggccgggccttgggaatcaccatgcagctccccagcgaggacaagcacagctactcgaaggaagcactcctcaatcgcatcgccgttctcatgggggggcgtgccgcagaggacatcatctttggaagcctcaccaccggtgcgggcaacgatatcgagcgggccacggatcttgcccgcaagatggtctgcgaatggggcatgagcgacaagatgggccccgtgtccttcggcaagaaggaggagtcgatcttcctgggccgcgacatgtccatgcacaagaactacagcgaggccacagccgtggagatcgacggcgagatccgcaagatcgtcgaagatagttacagccgcgtaaccacgcttctcagggacaacatcgatattctccacaagctttccctggagcttattgagaaggaaaacctgactggcgacgaagtggagcagatcgtcaggtccgtcaggggaacggttccggcttccgaggaaattcctgcctcctga

SEQ ID NO: 60590 - protein, 608 aa, Geobacter metallireducens GS-15
MNQFYKNLALWLVISLMMILLFNLFNKPRTTSERLSYSDFITAVDAGKVNAVTIQGNEIIGKFADGKEFRSYKPLDATLSDKLLEKKISISAKPEEEKVSWFSIFISWFPLLFLVGVWIFFMRQMQGGGGKAMAFGKSRAKLLTEAQGRITFEDVAGVDEAKEELEEIIQFLKDPKKFTKLGGRIPKGVLLVGPPGTGKTLLARAVAGEAGVPFFSISGSDFVEMFVGVGASRVRDLFVQGKKNAPCIIFIDEIDAVGRHRGAGLGGGHDEREQTLNQLLVEMDGFESNEGVILIAATNRPDVLDPALLRPGRFDRQVVVPQPDVKGREMILKVHTKKTPLGPNVNLDVIARGTPGFSGADLANVVNEAALLAARKDKSVVDMQDFDDAKDKVLMGVERRSMVISEDEKKNTAYHEAGHTLVAKLIPGSDPVHKVSIIPRGRALGITMQLPSEDKHSYSKEALLNRIAVLMGGRAAEDIIFGSLTTGAGNDIERATDLARKMVCEWGMSDKMGPVSFGKKEESIFLGRDMSMHKNYSEATAVEIDGEIRKIVEDSYSRVTTLLRDNIDILHKLSLELIEKENLTGDEVEQIVRSVRGTVPASEEIPAS

SEQ ID NO: 60591 - DNA, 1998 bp, Desulfovibrio desulfuricans G20
  CDS (1)..(1998): transl_table=11
ttgaatcagttctcgcgcaatttggttttatgggccgtcatctcactgctgatggtggttcttttcaacctgttcagccagccccccgggccgcaggcccagatgtcctacactgagtttcttaacaaagtcactcagggggaagtcgttcaggtaactattcagggcgaaaagctgaaaggacagaccgccgaagggcagtcgttccagaccatagcacccaatgaccccgacctggtcaaccgcctgctggaaaagggtgtgcaggtaaaggcagagcccaaggaagaagctccgtggtacatgacgctgctggtgtcgtggttccccatgctgctgcttatcggtgtatggatattcttcatgcgccagatgcagggtggcggcggaaaagccatgtctttcggccgttcgcgggcccgcatgatctcgcacgaatcggcaaaggtcacctttgacgatgtggcgggtgtggacgaagccaaagaagagcttactgaagttgttgactttctgagtaatcctaaaaaattcacccgtcttggcgggcgcatccccaagggggtgctgcttgtggggcctcccggcaccggtaaaacgctgctggcccgtgccgtggcgggtgaagccggcgtgcccttcttttccatttccggttcggactttgtggaaatgtttgtcggggtcggtgcctcgcgcgtgcgtgacctgtttgtacagggcaagaaaaacgctccctgccttatcttcatcgatgaaattgatgcggtggggcgtcagcgcggtgccggtcttggcggcggacacgacgagcgtgaacagactctgaaccagctgcttgtcgaaatggacggctttgaatccaacgaaggcgttattctgatagccgccaccaacagacctgacgtgctggacccggctttgctgcggcccggacgttttgacaggcaggtggtggtgccgacgcccgacctgcgcggacgtaagcgcattctggaagtacacagcaagcgtactccgctggcgcgtgacgtggatatggaaatgctggccaaaggtactccgggcttttccggtgccgatcttgaaaaccttgtcaacgaagcggctctgcaagctgccaagatgaacaaggatcaggtgaacatgcttgatttcgagacggccaaagacaagctgctgatgggcaaggaacgccgcagtctggtgatgagcgacaaggaaaagcgtgtcacagcctaccacgaaggcggtcatgcccttactgcgcgtctgctgcccggcacagatcccgtgcacaaggtttccatcattccccgtggcagggcgctgggcgtaaccatgcaactgcccgacgaagaccgccacggctattcgcgcacatatctgctgaataatcttgtggtgctgctcggcgggcgtctggccgaagaagtcgtcttcggagagattaccacaggagccggtaacgacatcgaacgcgccaccaaaatggcccgcaagatggtgtgtgaatggggcatgagcgacgccatcggccccatgaacatcggcgagcagggtgaagaagtcttcatcggccgcgaatgggctcattcgcgcaactacagcgaagagaccgcccgcatggtggatgccgaagtaaaacgcatcattgacgaagcccgtgaaaaggcccgcacgctgctgcaggagaatctggatacactgcaccgtatcgcagaggctctgctggagcgcgagaccattaatgcggatgatcttgagcgtcttatcgaaggacggcccctgctgcctgttcctgaaatcacggccacacatcctgaaggcgacgcagaaaatgccgggccggaggattccgtggccgccgcaccggctgagcatgccggagacgaattcctgctggaatcggacgaggctgcacgccccgccgcaaaggacggggaggatgctccggacgggcaggaggaagataccactgaccggagggagaagtag

SEQ ID NO: 60592 - protein, 665 aa, Desulfovibrio desulfuricans G20
MNQFSRNLVLWAVISLLMVVLFNLFSQPPGPQAQMSYTEFLNKVTQGEVVQVTIQGEKLKGQTAEGQSFQTIAPNDPDLVNRLLEKGVQVKAEPKEEAPWYMTLLVSWFPMLLLIGVWIFFMRQMQGGGGKAMSFGRSRARMISHESAKVTFDDVAGVDEAKEELTEVVDFLSNPKKFTRLGGRIPKGVLLVGPPGTGKTLLARAVAGEAGVPFFSISGSDFVEMFVGVGASRVRDLFVQGKKNAPCLIFIDEIDAVGRQRGAGLGGGHDEREQTLNQLLVEMDGFESNEGVILIAATNRPDVLDPALLRPGRFDRQVVVPTPDLRGRKRILEVHSKRTPLARDVDMEMLAKGTPGFSGADLENLVNEAALQAAKMNKDQVNMLDFETAKDKLLMGKERRSLVMSDKEKRVTAYHEGGHALTARLLPGTDPVHKVSIIPRGRALGVTMQLPDEDRHGYSRTYLLNNLVVLLGGRLAEEVVFGEITTGAGNDIERATKMARKMVCEWGMSDAIGPMNIGEQGEEVFIGREWAHSRNYSEETARMVDAEVKRIIDEAREKARTLLQENLDTLHRIAEALLERETINADDLERLIEGRPLLPVPEITATHPEGDAENAGPEDSVAAAPAEHAGDEFLLESDEAARPAAKDGEDAPDGQEEDTTDRREK

SEQ ID NO: 60593 - DNA, 1842 bp, Synechococcus elongatus PCC 7942
  CDS (1)..(1842): transl_table=11
gtgaagaaacgatggaaaaacgccggcctctacgcactactcgcgatcgtggtgatcgctttggggaccgctttactggatcagcgcggcacggaaaccgtggcgacctggcgctatagcgagtttgtccagcgcgtggaaaacaagcaagtcgctaaggttatcctcagtcccgatcgcagctcggcactggttcaagccgaagacggcgacaaagtgcaggtcaatctgcccaacgacccgcaactgctgaaaatcctgaccgataacaacgtcgatatctccgtccgtcctcagaaccaagacagcgtttggctgcgggctctgagcagcctcttcttcccgatcctcttgctcgtgggtctgttcttcatcctgcgccgtgcccaaggtggccctggcaaccaggcaatgaacttcggcaagagcaaagctcgcgtccaaatggagccgcaaacccaagtcacctttaacgatgtggcggggattgatcaggccaaactggaactgaccgaagtcgtcgacttcctcaaaaacgccgatcgcttcaccgccgtcggtgcacaaattcccaaaggcgtgctgctagtgggtcctcccggtaccggtaaaaccctgttggcgaaagccgtggctggcgaagcaggcgttcccttcttcagcatctctggctccgagtttgtggaaatgttcgtcggggtcggcgctagccgcgtccgcgacctgttcgagcaagccaaagccagtgcgccttgcatcgtcttcatcgatgagatcgacgccgttggtcgtcagcgcggtgctggcctcggcggtggtaacgacgagcgtgagcaaaccctcaaccagttgctgaccgaaatggatggctttgagggcaacagcggcatcatcatcgttgcggcgaccaaccgtcctgatgtcttggatgcggccttgatgcgtcccggtcgtttcgatcgccaagtggtggtcgatcgccccgactacaacggtcgtctggaaatcctgcgcgttcacgctcgtggcaagagcctcagcaaagatatcgacctcgacaaaatcgcccgccggacgcctggctttaccggtgcggatctgtccaacctgctgaacgaagccgcgattctggctgctcgccgcagcttggcagaaatctcgatggatgaagtcaacgatgcgatcgatcgcgtcttggcgggtcctgagaagaaagaccgcgtcatgagcgaaaaacgcaaagtcttggtggcttaccacgaagctggtcacgccttggtcggtgccttgatgcctgactacgaccccgtccaaaaaatcagcattattccccgcggccgtgcgggtggcctgacctggttcacccccagcgaagagcggatggagtcgggcctctactcccgtacctacctgcaaaaccaaatggcggttgcccttggcggtcgtctggcggaagaaattgtcttcggtgaggaagaagtgacgactggcgcttctaacgacttgcagcaagtcgcccgcgtggctcgtcagatggtgacccgcttcgggatgagcgatcgccttggccctgtggccctcggtcgccagcaaggcaacatgttcctcggtcgcgacattgctgccgagcgtgacttctcggaagagactgccgccacgattgacgacgaagtgcgtcagctggtggatgttgcctatgatcgcgccaagaaagtgttgattgaaaaccgctcgattcttgatcaacttgccaaaatgctggttgagaaagaaaccgttgatgcggaagaactgcaagatctgctcaacaacaatgaagtgcggatggccgcgatcgcctaa

SEQ ID NO: 60594 - protein, 613 aa, Synechococcus elongatus PCC 7942
MKKRWKNAGLYALLAIVVIALGTALLDQRGTETVATWRYSEFVQRVENKQVAKVILSPDRSSALVQAEDGDKVQVNLPNDPQLLKILTDNNVDISVRPQNQDSVWLRALSSLFFPILLLVGLFFILRRAQGGPGNQAMNFGKSKARVQMEPQTQVTFNDVAGIDQAKLELTEVVDFLKNADRFTAVGAQIPKGVLLVGPPGTGKTLLAKAVAGEAGVPFFSISGSEFVEMFVGVGASRVRDLFEQAKASAPCIVFIDEIDAVGRQRGAGLGGGNDEREQTLNQLLTEMDGFEGNSGIIIVAATNRPDVLDAALMRPGRFDRQVVVDRPDYNGRLEILRVHARGKSLSKDIDLDKIARRTPGFTGADLSNLLNEAAILAARRSLAEISMDEVNDAIDRVLAGPEKKDRVMSEKRKVLVAYHEAGHALVGALMPDYDPVQKISIIPRGRAGGLTWFTPSEERMESGLYSRTYLQNQMAVALGGRLAEEIVFGEEEVTTGASNDLQQVARVARQMVTRFGMSDRLGPVALGRQQGNMFLGRDIAAERDFSEETAATIDDEVRQLVDVAYDRAKKVLIENRSILDQLAKMLVEKETVDAEELQDLLNNNEVRMAAIA

SEQ ID NO: 60595 - DNA, 1923 bp, Rhodospirillum rubrum ATCC 11170
  CDS (1)..(1923): transl_table=11
ttgaacctcagcagaaacctgctcctgtggatcatcatcgccgtacttctggtggtgctgttcaatctgttccagacgtcggcgccgcgtggaccgcagaccacggttccctattcggatttcctgtcgagcgtcgatgcccgggaagttcgtgacgtcgtcatcaagggcgattcgatcagcggccacaccaccgatggccgcgccttcaccacctatgctccccgcgacgcggacatggtcagccatctgcgcgacagcggcgtgcagatctcggccgtgccggccgaggacaatgttccgaccttctggagcatcctgatttcctggttcccgttcctgctgctgatcggcgtgtggatcttcttcatgcgccagatgcagtccggcggcggcaaggccatgggctttggcaaatcgcgggccaagctgctgaccgagaagaccggccgcgtcaccttcgacgacgtggcgggcatcgacgaggccaagcaggaactggaagaagtggtggaattcctgcgcgatccgcagaagttccagcgcctgggcggcaagattcccaagggcgtgctgcttgtcggccccccgggtacgggtaagacgctgctggcccgcgccatcgccggcgaagccaatgtgccgttcttcaccatctcgggctcggatttcgttgaaatgttcgtcggtgtcggcgccagccgtgtccgcgacatgttcgagcagggcaagaagaacgcgccttgcctgatcttcatcgacgaaatcgacgccgtcggtcgccatcgcggcgccggtcttggcggcggcaacgacgaacgcgagcagaccctgaaccagctgctggtcgagatggacggcttcgaggcgaacgagggggtgatcctgatcgccgccaccaaccgccccgacgtgttggatccggccttgctgcgtccgggccgcttcgaccgtcaggttaccgtctccaaccccgatatcatggggcgcgagaagatcctgaaggtccatatgcgcaagacgccgctcggcccggatgtcgacgccaaggtcatcgcccgtggcacccccggattctcgggcgccgatctgtccaaccttgtcaacgaagccgccctgctcgccgcccgcaagggcaagcgcgtggtgaccatggccgagttcgaggaggccaaggacaaggtgctgatgggcgccgagcgccgctcgatggtgatgaccgaggacgagaaggaaaagaccgcctatcacgaggccggccatgccctgatcgccatccaccaggaaggccacgatccgctgcacaaggtgacgatcatcccgcgtggccgcgccctgggcgtgaccatgtccctgcccgaacgcgatcgctacggctattcgctgaaggaactgaaggcccgcatcgccatggccttcggcggccgcgtcgccgaggaaatgatctatggcaccgagaacgtcaccaccggcgcctccaacgacatcatgcaggcgaccgatctcgcccgccggatggtcaccgagttcggcttctcggaaaagctggggcccttgcgctataccgataaccaggaagaggttttccttggccattcggtgacccagcacaagaacctgtccgacgagaccgcccgcatgatcgacgaggaggttcgccgcttcgtcgagcagggcgaggcccgggcccgcgaaatcctgggcaagtacaaggacgagctggaaatcatcacccgcggcttgctggaatacgagacgctgtcgggcgatgaggtcaataagctgctgcgcggcgaggatctcaaccgcgccgaacagcccgcgccgccccgggaccgctcgggccgtcgggcctcggttcccaccagcgggccggcggcgggcggtgtcggcggcgatccggaaccccagccgggtgcctga

SEQ ID NO: 60596 - protein, 640 aa, Rhodospirillum rubrum ATCC 11170
MNLSRNLLLWIIIAVLLVVLFNLFQTSAPRGPQTTVPYSDFLSSVDAREVRDVVIKGDSISGHTTDGRAFTTYAPRDADMVSHLRDSGVQISAVPAEDNVPTFWSILISWFPFLLLIGVWIFFMRQMQSGGGKAMGFGKSRAKLLTEKTGRVTFDDVAGIDEAKQELEEVVEFLRDPQKFQRLGGKIPKGVLLVGPPGTGKTLLARAIAGEANVPFFTISGSDFVEMFVGVGASRVRDMFEQGKKNAPCLIFIDEIDAVGRHRGAGLGGGNDEREQTLNQLLVEMDGFEANEGVILIAATNRPDVLDPALLRPGRFDRQVTVSNPDIMGREKILKVHMRKTPLGPDVDAKVIARGTPGFSGADLSNLVNEAALLAARKGKRVVTMAEFEEAKDKVLMGAERRSMVMTEDEKEKTAYHEAGHALIAIHQEGHDPLHKVTIIPRGRALGVTMSLPERDRYGYSLKELKARIAMAFGGRVAEEMIYGTENVTTGASNDIMQATDLARRMVTEFGFSEKLGPLRYTDNQEEVFLGHSVTQHKNLSDETARMIDEEVRRFVEQGEARAREILGKYKDELEIITRGLLEYETLSGDEVNKLLRGEDLNRAEQPAPPRDRSGRRASVPTSGPAAGGVGGDPEPQPGA

SEQ ID NO: 60597 - DNA, 1938 bp, Moorella thermoacetica ATCC 39073
  CDS (1)..(1938): transl_table=11
ttgaaccgaatttttaagaacctggctatctatcttttaatagtattactggcggtttccgttatcaggctttccacaccgccggagaaaccagcgcaggaatgggatctcacccgtttctatcaggccgtcgatcaggaccaggttcgggaagtaaccttgacacctcaggacaacattattaaagttgacggggtcttaaaggacaacaccaagtttaccgttaatgccctgtcttcaaccccgctgacggacaggttaatcagcaaaggcgtcaggatcaaaacccagccgtcaccccagccgccctggtggaccagcctgctgggcagccttttacctatcctcctgctggtggggctggtcttctttatgatgcagcagacccagggtgggggttcgcgggtcatgcaattcggcaagagccgggccaggttgcataccgatgataagcggaaagtcacgtttgaagatgttgccggggccgatgaggtcaaggaagaactggaggaagtcgtcgagtttctgaagaacccgcgcaaatttaatgagctgggggccaggatacccaaaggggttctccttttcggcccgccaggtacaggcaaaaccttgctggccagggctgtggccggagaagcaggggtacccttttttagtatcagcggctctgactttgtagaaatgttcgtcggtgtgggcgcttcccgggtgcgggatctttttgaacaggccaagaaaaattcgccctgtatcgtttttattgacgagattgatgccgtcggccgccagcgaggtgccggcctgggcggcggccacgatgagcgcgagcagaccctgaaccagctgctggtagagatggacggttttaatgccaatgaaggcattatcattattgccgccaccaaccggccggatatcctggacccggccctgctacgcccgggccgttttgaccgccagattgtagttgatatacctgatgtcaacggcaggaaggatattttaaaggtgcatgtccgggggaaaccccttgatgaaaccgttgacctggacgtccttgcccgccgtacccctggcttcaccggtgccgacctggccaacctggtcaatgaggcggccctcctggcagccaggcgcggtaaacataaaatcagtatggaagaaatggaggactctatcgaacgggtcatcgccgggcctgagaaaaagtcccgggtcatcagcgactacgagaaaaggctggtggccttccacgaagcgggccatgccctgctggggcattatttaccccatacggatcccctccacaaagtatccattattccccggggcagggccggcggttataccctgcttttgcccaaggaagaccgtcgctatatgaccaaatcccagattatcgaccaggtcaccatgctcctgggtgggcgggttgccgaggccctggttcttaaagagatcagcaccggtgcccagaacgacctggaacgggccaccgagctggttcgtaagatgatcaccgagttcggcatgtcggaggaactgggccctctgaccttcggacgcaggcaggaaaccgtcttcctgggccgggatatcgcccgggatcgcaattatagcgaggctgtagccttttccatcgacaaagaagcccggcacatcatcgatgagtgttataaccgggcaaaggaaatgctccagaagcacctggcggaattgcacctggtggccagggcgttgatggaaaaagaaaccctggaagccgaggagtttacggctattatcgaggcttatgaccgggaacacggggttcctgagaattcttccgacgccgggaaaccggcagctgccggcggccaggatacgggaaaagatacccccgggaatactcttattaagttaaccttcctgcagggcctgaaaggggtatggtag

SEQ ID NO: 60598 - protein, 645 aa, Moorella thermoacetica ATCC 39073
MNRIFKNLAIYLLIVLLAVSVIRLSTPPEKPAQEWDLTRFYQAVDQDQVREVTLTPQDNIIKVDGVLKDNTKFTVNALSSTPLTDRLISKGVRIKTQPSPQPPWWTSLLGSLLPILLLVGLVFFMMQQTQGGGSRVMQFGKSRARLHTDDKRKVTFEDVAGADEVKEELEEVVEFLKNPRKFNELGARIPKGVLLFGPPGTGKTLLARAVAGEAGVPFFSISGSDFVEMFVGVGASRVRDLFEQAKKNSPCIVFIDEIDAVGRQRGAGLGGGHDEREQTLNQLLVEMDGFNANEGIIIIAATNRPDILDPALLRPGRFDRQIVVDIPDVNGRKDILKVHVRGKPLDETVDLDVLARRTPGFTGADLANLVNEAALLAARRGKHKISMEEMEDSIERVIAGPEKKSRVISDYEKRLVAFHEAGHALLGHYLPHTDPLHKVSIIPRGRAGGYTLLLPKEDRRYMTKSQIIDQVTMLLGGRVAEALVLKEISTGAQNDLERATELVRKMITEFGMSEELGPLTFGRRQETVFLGRDIARDRNYSEAVAFSIDKEARHIIDECYNRAKEMLQKHLAELHLVARALMEKETLEAEEFTAIIEAYDREHGVPENSSDAGKPAAAGGQDTGKDTPGNTLIKLTFLQGLKGVW

SEQ ID NO: 60599 - DNA, 1836 bp, Syntrophus aciditrophicus SB
  CDS (1)..(1836): transl_table=11
ttgaattcattgcagaagaatattgcattgtggctgatcatcagtctcatttttgtccttttgtatcatctcttcagccagccgaaaggcacgcatgaaaatgtcattttcagcgattttgtcgcttatgtcgataagggtcagatcagcgaggtcaccatccagggtgaaagcatcacgggtaaaatgacagacggcaagcgcttcaagagtcatgcaccaaacgatccgacactgatcccgttgctgaaatccaaaggagtacgcattaccgccaaacccgaagacgattctccctggtttgtaacggtcctcgtttcctggtttcccatgctgctgctgatcggagtgtggatatttttcatgcggcagatgcaatccggcggcggaaaggcgatggcgttcggcaagagtcgggcccgattgatgacagacaaaacaaaaaaggtgacattttccgatgttgccggaattgacgaagctaaggccgaactggaagaagtcatagaattcctgaaggaccccaaaaaattcacccgtcttggcggaagaattcccaaaggcctgctgctcgttggacctccaggaacgggaaagacgctgttagccaaggctattgccggcgaagccgatgttccctttctgaccatcagcggctctgatttcgtggaaatgtttgtcggggtaggcgcttcccgtgtcagggatctctttacgcaggcaaaaaagaacgccccctgcattatcttcatagatgagatcgatgctgtcgggaggcatcggggagccggacttggaggtggccatgatgaaagagagcagacactgaatcagctccttgttgaaatggatggcttcgaatccaacgaaggagtgattctggtatctgcaaccaaccgtccggacgtgctcgatccagctctgcttagaccggggcgctttgacaggcaggttgtcgttccactgccggatgtgaaggggagggaaaagatttttcaggtccattcccggaagaccatcctggaggatgacgtcgatttttcgctcctggccaggggaacgcctggcgcttcaggggcggatatcgagaatctcgtcaatgaggcgatattgcatgcagccggttcaggcaaggaaaaggtggaacttgccgacttcgagtttgccaaggataaggtgctcatgggagcggaacggaaaaccatggtaataagtgacgaagaaaaacgaaatacggcttatcatgaatcggggcacgcgctggttgcccgtttgctgccgggcagtgatcctattcacaaagtgaccatcattcccagaggaagggctctgggcttaacgcagcagcttccagtggatgaaaagcatacgtaccccaggaaatttctcctgacgaacatttcgatcctgctgggagggcgggctgcagaggaactgattcttgatgactttaccacaggggcaggaaatgatattgatcgggcaaccagtctggccagaaagatggtgtgcgaatggggaatgagcaacgtcatgggtccgctcagctatggacgcaaggaagaacagatatttctcggaagagaattcgcgactcataaggattacagcgaggaaacagcaagacggattgatgaagaaatatcttccattgtaacgggctgctataataacgcaaaaaaaattcttcaggaaaatatagatacacttaatcggcttgccacggaattgctggacaaagaagttcttaacgccgctgaactggatgcaatcataggaatacctgtcgaagaaaaagaccgtgggcaggaaaatcccgtgagtgtggaagcgtga

SEQ ID NO: 60600 - protein, 611 aa, Syntrophus aciditrophicus SB
MNSLQKNIALWLIISLIFVLLYHLFSQPKGTHENVIFSDFVAYVDKGQISEVTIQGESITGKMTDGKRFKSHAPNDPTLIPLLKSKGVRITAKPEDDSPWFVTVLVSWFPMLLLIGVWIFFMRQMQSGGGKAMAFGKSRARLMTDKTKKVTFSDVAGIDEAKAELEEVIEFLKDPKKFTRLGGRIPKGLLLVGPPGTGKTLLAKAIAGEADVPFLTISGSDFVEMFVGVGASRVRDLFTQAKKNAPCIIFIDEIDAVGRHRGAGLGGGHDEREQTLNQLLVEMDGFESNEGVILVSATNRPDVLDPALLRPGRFDRQVVVPLPDVKGREKIFQVHSRKTILEDDVDFSLLARGTPGASGADIENLVNEAILHAAGSGKEKVELADFEFAKDKVLMGAERKTMVISDEEKRNTAYHESGHALVARLLPGSDPIHKVTIIPRGRALGLTQQLPVDEKHTYPRKFLLTNISILLGGRAAEELILDDFTTGAGNDIDRATSLARKMVCEWGMSNVMGPLSYGRKEEQIFLGREFATHKDYSEETARRIDEEISSIVTGCYNNAKKILQENIDTLNRLATELLDKEVLNAAELDAIIGIPVEEKDRGQENPVSVEA

SEQ ID NO: 60601 - DNA, 2211 bp, Syntrophus aciditrophicus SB
  CDS (1)..(2211): transl_table=11
atggattcgaatgtcgattctcaacgtgtcccggatgggcagattttcttccgaccggtccatccgggaatatctggaaaagatatggagagtggaacctctgatggtcaacagagaaaaatgatggagtttgaaatatccgaggaggcggacatgagattgacacgccagcagacgcaaaaccggaccggcttcgcatcggctgataccaagcagggatctcctgagggcgccgataggaaaaaaatgccgccgggcaaggcatggctgtggtttgtcctcattctaatcgtgaactttctgatggtaagactgttgattcccgatgcggaacagccggtcatggtgccatataccctcttcaagggtgaagtcggtaagggcaatgtcaaggaaatcttcagccggggagacaccatcacgggtcgattcaaggaagagatagcttaccaggctgcggaggaaaaggcaggagattcccggaaagcatccaaggcggtgaccacgtttacgacgacagtgccctccttcgtagatccgggtctggaagcctttctgatctcgaacggggttgagatcagcgccaagccgatccacgaagaacgcagcccctgggcgacgattgtctacagcttcggtcccggactgctcttcatcgccttttatatctggcttttccgacggatggcccagcagggcggtctgggcggcgggattatgggaatcggaaagagcaaggcgcgtcgctacgaccaggaagaaggccggaaggtcactttcgacgatgttgccggtattgatgaagcagagaacgaactggtcgagattgtggattttctcaaggatcctccgaagtatacccgtctgggcggaaccgctccgaaaggagtgctgctggttggtgcgccgggcacgggaaagacgctgctggcaaaagcagtcgccggagaggccggagtgccgtttttctcgatgagtgccgcggaattcgtggagatgatcgtgggggtcggtgcggcgagggtgcgtgacctgttcaagcaggcgcgcgagcatgcgccggcgatcatcttcatcgatgaactggatgcgatcggtcgtgcgcgcgggcaggtggcgatcgggggggcaagtgagcaggaacagaccctgaatcagattcttaccgagatggacggcttttccagccgggagggcattatcgtgctggcggcaaccaaccagccggatgttctggataaagcgctcctgaggccggggcgcttcgatcggcgcgtcgtggtcaaccttccggacaaggtcgggcgtgaggcgatcttaaaagtccacacccgcagcgttcccctcgcgaaggatgccagtctgggggaacttgccgccgcgacgccggggttttccggcgccgacctgaggaatctggtgaatgaggcggcactgatggcggcccggcgggatcaggatgatgtccgcgccagggacttcctggacgcgctggaaaagatcgtgctcggtcctgaacgcccccttcttctgagtcacgcggacaaggaacgcatcgcctaccacgaaggggggcatgccattcttggtctggttgcgcacggggccgaccgggtgcatcgtgtaacgatcgttccccggggacaggccctcggcgtgacctaccagcggcctgacagcgaccgctataactatacggaagcctatctgcgcgcgaaaatcgtcggaatgctcgggggacgagctgccgaggagattgtttacggcacccggactaccggggccgaaagcgatatcgagcaggccactggactggctcaccggatggtcacacgctgggggatgagtgagcgccttggactgattcagctcgcgccccgtgaaaatccatacttgggcggtccggccggctatggcagcgccagaccgttcagcgacggaaccgcggaagccatcgatgccgaggtgatcaggattattgccgaaagtcacgaggaggccaaacggcttctgagagcataccgcaaacaactcgatgtcctggccgaagcccttgtagcgcaggagaccctcgacgagcaggaaattctcaggatcacggggcttccgccggcaccagccctggacgccggaaaactgcccgttcctgatgggggagacaaaaacgccgaaccctccgtgtcccttcccggcgttgcgggaccatcgtga

SEQ ID NO: 60602 - protein, 736 aa, Syntrophus aciditrophicus SB
MDSNVDSQRVPDGQIFFRPVHPGISGKDMESGTSDGQQRKMMEFEISEEADMRLTRQQTQNRTGFASADTKQGSPEGADRKKMPPGKAWLWFVLILIVNFLMVRLLIPDAEQPVMVPYTLFKGEVGKGNVKEIFSRGDTITGRFKEEIAYQAAEEKAGDSRKASKAVTTFTTTVPSFVDPGLEAFLISNGVEISAKPIHEERSPWATIVYSFGPGLLFIAFYIWLFRRMAQQGGLGGGIMGIGKSKARRYDQEEGRKVTFDDVAGIDEAENELVEIVDFLKDPPKYTRLGGTAPKGVLLVGAPGTGKTLLAKAVAGEAGVPFFSMSAAEFVEMIVGVGAARVRDLFKQAREHAPAIIFIDELDAIGRARGQVAIGGASEQEQTLNQILTEMDGFSSREGIIVLAATNQPDVLDKALLRPGRFDRRVVVNLPDKVGREAILKVHTRSVPLAKDASLGELAAATPGFSGADLRNLVNEAALMAARRDQDDVRARDFLDALEKIVLGPERPLLLSHADKERIAYHEGGHAILGLVAHGADRVHRVTIVPRGQALGVTYQRPDSDRYNYTEAYLRAKIVGMLGGRAAEEIVYGTRTTGAESDIEQATGLAHRMVTRWGMSERLGLIQLAPRENPYLGGPAGYGSARPFSDGTAEAIDAEVIRIIAESHEEAKRLLRAYRKQLDVLAEALVAQETLDEQEILRITGLPPAPALDAGKLPVPDGGDKNAEPSVSLPGVAGPS

SEQ ID NO: 60603 - DNA, 2262 bp, Frankia sp. CcI3
  CDS (1)..(2262): transl_table=11
atgactccaagaagaatcttccgcggctgggtgccactgctgctcctggtcctgttcgtgatcattctcacgacgggcgtcctctcgggtcccagtgagtacggcaagcgagacctgaacttcgtccagcagcagatcgacgaaggccaggtggcgaaggccaagatccaggattcgaagcagctcatccagatccagacgaaggacggccagaagttcgagtcgtcctatgtcaccgaacagggtgtcgtcctggcgaacgagctccgcaacaagcgggtcgcctacgacgtctcggtcgaccgtggaaacatcctggtctcgctcctgctgaacctgctgcccgtactgctggtcgtccttctgctgttctttttcatgaaccagatgcagggcggcggtaaccgggtcatgaacttcggcaagtccaaggcgaagctggtgagcaaggacacgccgaagacgacgttcgccgacgtggccggtgcggacgaggccatcgaggagctcgaggagatcaaggagttcctcgaaaacccgggcaagttccaggcgatcggagccaagattcccaagggggtcctgctctacggcccgccgggaaccggcaagacgctgctggcccgggccgtcgcgggtgaggccggggtgcccttctactccatctcgggttccgacttcgtcgagatgttcgtcggtgtcggcgccagccgggttcgcgacctgttcgaacaggccaaggccaacgcgcccgccatcatcttcgttgacgagatcgacgccgtgggccgccaccgcggagcgggactcggcggtggccacgacgagcgggagcagacgctcaaccagctcctggtcgagatggacgggttcgacgtcaagggcggggtcatcctcatcgccgcgacgaaccggcccgacatcctcgacccggccctgctgcggcccggccgcttcgaccggcagatcgtcgtggatcggccggacctgctcggccgcgaggccatcctgcgggtgcacgccaagggcaagccgatcggcccggacgccgacatgatggtcatcgcccggcggacccccgggttcaccggtgccgatctggccaacgtactgaacgaggcagccctgctggccgcccgctccaacctgaaattcatctcgtcggcgctgctcgaggagtccatcgaccgcgtgatggcgggaccggagcgcaagacccgcgcgatgagcgacaaggagaagaagcgcatcgcttaccacgagggcggccacgccctcgtggcgcacgcgctgcccaactccgacccggtgcacaaggtgaccatcctgccccgggggcgcgcgctcgggtacacgatgcagcttcccctggaggacaagtacctctcgacccgctcggagatgctcgaccgcctcgccgtcctgctcggcgggcgcaccgccgaggagctggtgttccacgacccgaccacgggggcgagcgacgacatcgagaaggccacccagatctcgcgagcaatgatcacccagtacgggatgagcgacaagctcggcgcgatcaagttcggcaccgagaacagcgaggtcttcctcggcaaggaggtcggccaccaacgcgactactccgaagaggtcgccagtgagatcgacatcgaggtgcgccggctgatcgaggccgcacacgacgaggcctgggagatcctggtgacctaccgggacgtactggacaacctcgtgttgcggctgatggacaccgagacgctgagcaaggacgaggtcgccgaggtcttcgcgacggtccagaaacgccccgtgcgtggcatctacaccggggtggggcgtcgcgtcccctccgaccggccaccggtgcagaccccggccgagctcggcctgctgacggcggatgtcgccgacctggtgaacgacccgggccacggtaatggtgccgccggacgcggaccgggcggcaacggaaccgggggcaacagggccggcggtcacggtcagcccgccggcgtgccgggggcaccagcgggctcgggccccggggtcgacccgtccggtccgggcgggggcgtaccgcacggcacggatgtcggtggtccgggtgggaatggcagccccggggggcacggttatccccagggccagggcacgccggcgccccccggaggcgagggtccggcccatgacgggccgaggatcgccaacccgtgggccccgccaagctggccgagcgacgacgagaggagacgccgttga

SEQ ID NO: 60604 - protein, 753 aa, Frankia sp. CcI3
MTPRRIFRGWVPLLLLVLFVIILTTGVLSGPSEYGKRDLNFVQQQIDEGQVAKAKIQDSKQLIQIQTKDGQKFESSYVTEQGVVLANELRNKRVAYDVSVDRGNILVSLLLNLLPVLLVVLLLFFFMNQMQGGGNRVMNFGKSKAKLVSKDTPKTTFADVAGADEAIEELEEIKEFLENPGKFQAIGAKIPKGVLLYGPPGTGKTLLARAVAGEAGVPFYSISGSDFVEMFVGVGASRVRDLFEQAKANAPAIIFVDEIDAVGRHRGAGLGGGHDEREQTLNQLLVEMDGFDVKGGVILIAATNRPDILDPALLRPGRFDRQIVVDRPDLLGREAILRVHAKGKPIGPDADMMVIARRTPGFTGADLANVLNEAALLAARSNLKFISSALLEESIDRVMAGPERKTRAMSDKEKKRIAYHEGGHALVAHALPNSDPVHKVTILPRGRALGYTMQLPLEDKYLSTRSEMLDRLAVLLGGRTAEELVFHDPTTGASDDIEKATQISRAMITQYGMSDKLGAIKFGTENSEVFLGKEVGHQRDYSEEVASEIDIEVRRLIEAAHDEAWEILVTYRDVLDNLVLRLMDTETLSKDEVAEVFATVQKRPVRGIYTGVGRRVPSDRPPVQTPAELGLLTADVADLVNDPGHGNGAAGRGPGGNGTGGNRAGGHGQPAGVPGAPAGSGPGVDPSGPGGGVPHGTDVGGPGGNGSPGGHGYPQGQGTPAPPGGEGPAHDGPRIANPWAPPSWPSDDERRRR

SEQ ID NO: 60605 - DNA, 1935 bp, Novosphingobium aromaticivorans DSM 12444
  CDS (1)..(1935): transl_table=11
atgaacgacgaccagccccagggcaatccttggatcaagagcctcctcgtctggggcggcatcttccttgcactcctgctggtcgtctcgatgttcggctcgcgggttgaccagaccgctgcgaccatcccctattcggccttccgctcgcaggtcagcgacggcctcgtccgctcggtggagatcgcgcctgagcgcattaccggtacgctcaagaacggtggccagttcgcgaccattccggtccccggcgactccgacctgcccaagctgctgcaggacaacggcgtgcagtatgccggcaaggcggccgagcagccgaacatgctgatgtacatactcgtcaattcgctgccgttcctgctgatcctgggcgtcgcgttcttcgcgctgcggcaggtgcagaagggcggcgggtcgggcgcaatgggcttcggcaagtcgaaggccaagatgctgaccgagcgttcgggccgtgtcaccttcgacgacgttgccggcatcgacgaagcgcgcgaggaacttcaggaaatcgtcgagttcctgcgcgatccctcgcgcttttcgaagctcggcggccagattcccaagggcgcgctgctggtcggctcgcccggtaccggcaagaccttgctcgcccgcgccatcgcgggtgaggcgggcgtccccttcttcacgatctccggttctgatttcgtcgagatgttcgtcggcgtcggtgcaagccgcgtgcgcgacatgttcgagcaggccaagaagaacgcaccgtgcatcgtcttcatcgacgaaatcgacgcggtcggccgccatcgcggccacggcctcggcaattcgaacgacgagcgcgagcagacgttgaaccagctcctcgtcgagatggacgggttcgaggccaacgaaggcatcatcatcatcgcggcgaccaaccgccccgacgtgctcgaccccgcgctgctgcgcccgggccgcttcgaccggcaggtcgtcgtgccgatcccggacatcgaagggcgcgagaagatcctttcggtccacatgaagaaggtgccgctggcgcccgacgtcaatccgcgcaccatcgcgcgcggcacgcccggtttttcgggcgcggacctcgccaacctcgtcaacgaagccgccctgctcgccgcgcgccgcaacaagcgtctcgtcgcgatgcaggagttcgaggacgccaaggacaaggtcatgatgggcgcggaacgccgctcgatggtcatgaccgacgacgagaagaagatgaccgcctatcacgaggccgggcacgccatcgtctctgtccacgagcctgcgtccgacccaatccacaaggcaacgatcatcccgcgcggccgcgcgctgggcatggtcatgcgcctgcccgagcgggacagctattcctaccaccgcgacaagatgcacgcgaacctctcggtctcgatgggcggtcgcgtggccgaagagatcatcttcgggcacgacaaggtctcgtcgggtgcctcctcggacatccagtacgccacgtcgctggcgcgctcgatggtcaccaagtggggtatgtcggacaagctcggcccgctgcagtacgaggaccagcaggaaggctacctcggcatgggcggttcgcagcgcctgttcgtctcggacgagaccaacaagctgatcgacatggaaatccgtggtctggtcgacggcgcacacgagcgcgcgcgcgatatcctcaagaccaacgaggacaagctgcatctcctcgctcaggcgctgctcgaatacgagacgctgaccggcgacgagatcaaggaactgctcgagacaggtcacatcgaccggccgcaaagcccgagcggcccctcgcgtccggtcaccgcgcagggttcagctgtgccgcgcgccggcaagaagttcggcggttcggccagtccgcaaccggcctga

SEQ ID NO: 60606 - protein, 644 aa, Novosphingobium aromaticivorans DSM 12444
MNDDQPQGNPWIKSLLVWGGIFLALLLVVSMFGSRVDQTAATIPYSAFRSQVSDGLVRSVEIAPERITGTLKNGGQFATIPVPGDSDLPKLLQDNGVQYAGKAAEQPNMLMYILVNSLPFLLILGVAFFALRQVQKGGGSGAMGFGKSKAKMLTERSGRVTFDDVAGIDEAREELQEIVEFLRDPSRFSKLGGQIPKGALLVGSPGTGKTLLARAIAGEAGVPFFTISGSDFVEMFVGVGASRVRDMFEQAKKNAPCIVFIDEIDAVGRHRGHGLGNSNDEREQTLNQLLVEMDGFEANEGIIIIAATNRPDVLDPALLRPGRFDRQVVVPIPDIEGREKILSVHMKKVPLAPDVNPRTIARGTPGFSGADLANLVNEAALLAARRNKRLVAMQEFEDAKDKVMMGAERRSMVMTDDEKKMTAYHEAGHAIVSVHEPASDPIHKATIIPRGRALGMVMRLPERDSYSYHRDKMHANLSVSMGGRVAEEIIFGHDKVSSGASSDIQYATSLARSMVTKWGMSDKLGPLQYEDQQEGYLGMGGSQRLFVSDETNKLIDMEIRGLVDGAHERARDILKTNEDKLHLLAQALLEYETLTGDEIKELLETGHIDRPQSPSGPSRPVTAQGSAVPRAGKKFGGSASPQPA

SEQ ID NO: 60607 - DNA, 1836 bp, Anaplasma phagocytophilum HZ
  CDS (1)..(1836): transl_table=11
gtgaactttaggagagtggtcgagggcttaattgtgtggtccgcagtgatcgcacttgctgctatgctatatgcccattttggtgacaggataataggaagtaaggaagtttctatacctttttccgagtttttggtaaggctggaagatggtagtgttgagagtgtaagcattactgagcacgaaatttccggaaaatttcacaatggtgttaagtttcgcacccatggggtagtttatgatggcctgattaagaccatgcatgctcagaaggtaatgtttgagtttgtttcagaagtaaccttactgagtgtcattggtagcttattcgtttcgtgcctgcccatgctatctttggtggtgatttggtgcctttttctcaagcagatgcaactgggtgggaatcgaaccatgggcttcagtaagtctcgcgctcgtttaatgactgatagccgcggaaaggtaacgtttgatgacgtagcgggtatagaagaagcaaaagaggagttaatagagatagttgacttcttaaagcatcgccagaagtttacaaagcttggtggtaaaattcccaagggatgcttacttatagggtctccgggtaccggtaaaaccttattagccagggctatagctggtgaggcaaatgtgccgttttttagcatatcgggttccgattttgtggagatgtttgttggtgtgggtgccagcagggtgcgtgatatgtttgagcagggtaagaagcatgctccttgtataatttttgtagatgagatagacgcagtaggccgtcaccggggcattggtcttgggggaggtaatgatgagcgtgagcaaacgctgaatcagctgctagtagaaatggatggcttcgagtcaaatgaaggagttgtgattatagctgcgacgaaccgtcctgatgtgctagatcctgcactattgaggcctgggaggtttgataggcaggtgactatatcgattcctgatatcaatggtagagagaaaataatagctgtgcatgcgaaaaaggttccgttagctcctgatgttgatttgagagttatagctagaggaacaccggggttttcgggagctgatttggctaatctggtgaatgaggctgcgttaatagctgcgcggttggataaaaagatcgtcactatgtgtgattttgagtacgcacgcgacaaggttatgatgggtgctgaaagaaagtccatggtcatgcgtgaagaggagcgtaggctgactgcatatcatgaagcggggcatgctgtagtggcttttcacaatccagcatctgatccaatacacaaggcgaccataataccacgtggtagatctttggggttggtgatgaggttgcctgaaacagatagggtatcccacactagggagaagatgcttgcggatctgacggttgctatgggtggtcgggctgctgaagagttgatattcggatataataaagttacgagcggggcttcctctgatataaagcaggctacagatctcgcaaagtccatggttatgaagtggggtatgagcgatagtgtagggccgttgtatcatagtgatgaagcccatgagcgcatctctacaaatttggcaaatttgatagatgatgaggtaaagtcgatcgtatctacggctttggctgaagcaaaggatgttttaacaaagcattcggatgcattacacgcgattgctgcgaaccttcttgagtttgaaactcttacgggagatgatattgctgatatcattgctggtaagaagttagaaaaggacggaggtatcagtactcgtcctctgaagcggtctgttgtacctaattag

SEQ ID NO: 60608 - protein, 611 aa, Anaplasma phagocytophilum HZ
MNFRRVVEGLIVWSAVIALAAMLYAHFGDRIIGSKEVSIPFSEFLVRLEDGSVESVSITEHEISGKFHNGVKFRTHGVVYDGLIKTMHAQKVMFEFVSEVTLLSVIGSLFVSCLPMLSLVVIWCLFLKQMQLGGNRTMGFSKSRARLMTDSRGKVTFDDVAGIEEAKEELIEIVDFLKHRQKFTKLGGKIPKGCLLIGSPGTGKTLLARAIAGEANVPFFSISGSDFVEMFVGVGASRVRDMFEQGKKHAPCIIFVDEIDAVGRHRGIGLGGGNDEREQTLNQLLVEMDGFESNEGVVIIAATNRPDVLDPALLRPGRFDRQVTISIPDINGREKIIAVHAKKVPLAPDVDLRVIARGTPGFSGADLANLVNEAALIAARLDKKIVTMCDFEYARDKVMMGAERKSMVMREEERRLTAYHEAGHAVVAFHNPASDPIHKATIIPRGRSLGLVMRLPETDRVSHTREKMLADLTVAMGGRAAEELIFGYNKVTSGASSDIKQATDLAKSMVMKWGMSDSVGPLYHSDEAHERISTNLANLIDDEVKSIVSTALAEAKDVLTKHSDALHAIAANLLEFETLTGDDIADIIAGKKLEKDGGISTRPLKRSVVPN

SEQ ID NO: 60609 - DNA, 1911 bp, Neorickettsia sennetsu str. Miyayama
  CDS (1)..(1911): transl_table=11
atgaagaaacttttagaaaacctttctctctggatggggataataatccttgtaactcttctgtttggacaggttgcattgaactttggttttggggtcagaaatgagaaaatacagttttcagaatttttggacctggtagagaaaggggaagtccagaaaatagtcatagaaggttatgacatatcgggtgtgttaaaaagcggaacgcatttttacaccaaagctactcagtacacagaactgattccacttctaagaaaaaataatgttgactttcaggtagcttctggagacagcttcctgggtttactcttcaacattctcatatcttggtttccaatgcttcttttaatcggtgtgtggatcttttttatgaagcagatgcaagccgggggcaacaagaccatgacctttggaaaatcaaaggcaagacttctgagtgacagaagtaataaagtgactttccatgatgttgcagggatagacgaagcaaaggaagaactcgctgagattgttgagtttttgagggaaccaaagaaatttcaaaaattaggcggaaaaatccctaaggggtgtttattaataggacctccaggtaccggtaaaacattgctggctaaggcaattgctggagaagcaaaggttccgtttttcagcatctctggttcagatttcgttgagatgtttgtcggtgttggcgcaagtagggtcagagatatgtttgaacagggcaaaaagaatgccccatgcctaatattcatagacgagatcgatgcagttggacgtcaccgtggagttggattcggtggcggtaatgatgaacgtgaacaaaccctgaatcagctcttagtcgagatggatggttttgaagcaaatgagggcgtcattattattgctgcaacgaataggccagatgtgcttgaccctgctctgttacgaccaggtagattcgatagacaaataacaatttctattcctgatatagcaggaagacaaaaaatattggaagttcacttaaaaaagattcctacagcaccaaatgtggaggtttcaatcatagcacgaggtacgcctggcttctctggcgcagatcttgcaaacctagtcaatgagtcagcacttatcgcggctcgtaggaacaagaaagtagtaactaatgaggattttgaatacgcaagagataaaatactcatgggaatggaaagaaaatctcttgtcatgagagaagaagaaaagttactgactgcctatcacgaagcgggacatgctattactagtctaaaacttgaagcatctgatccaatacataaagcaactattatcccgcgtggacgagctctgggacttgtgatgcgactccctgaacatgaccgtgtttcctttaccagagcgaagatgcacgccgatttaattgttgcgatgggtggaagagctgctgagcaggtaatttttggagatgataagaccaccagtggtgctgcttcagatattaaacaagcaactcatctcgcaagatcaatggttacaaagtggggaatgagtgaaaaagtcggtccactcctttatggtgaacaaaatgatccaaataatcatatcctttcaattgagatgtctaatctcattgatagtgaggtgaagcaacttgttacagatgcccttaaagaagccactaaaatcctcaatgagaatatagaatcacttcatcgggtagcaaaagcattgcttgagtatgaaacccttacaggacaggaattatctgatctacttgaaggaaagtcattcctcaaaaaggctcctgatgataaaaaggttgtttctaaatcttcattagacgttgaagatgatacagtagataaggaaacattggaaaaattggaatccgatcttgatgctggagacaaggaatga

SEQ ID NO: 60610 - protein, 636 aa, Neorickettsia sennetsu str. Miyayama
MKKLLENLSLWMGIIILVTLLFGQVALNFGFGVRNEKIQFSEFLDLVEKGEVQKIVIEGYDISGVLKSGTHFYTKATQYTELIPLLRKNNVDFQVASGDSFLGLLFNILISWFPMLLLIGVWIFFMKQMQAGGNKTMTFGKSKARLLSDRSNKVTFHDVAGIDEAKEELAEIVEFLREPKKFQKLGGKIPKGCLLIGPPGTGKTLLAKAIAGEAKVPFFSISGSDFVEMFVGVGASRVRDMFEQGKKNAPCLIFIDEIDAVGRHRGVGFGGGNDEREQTLNQLLVEMDGFEANEGVIIIAATNRPDVLDPALLRPGRFDRQITISIPDIAGRQKILEVHLKKIPTAPNVEVSIIARGTPGFSGADLANLVNESALIAARRNKKVVTNEDFEYARDKILMGMERKSLVMREEEKLLTAYHEAGHAITSLKLEASDPIHKATIIPRGRALGLVMRLPEHDRVSFTRAKMHADLIVAMGGRAAEQVIFGDDKTTSGAASDIKQATHLARSMVTKWGMSEKVGPLLYGEQNDPNNHILSIEMSNLIDSEVKQLVTDALKEATKILNENIESLHRVAKALLEYETLTGQELSDLLEGKSFLKKAPDDKKVVSKSSLDVEDDTVDKETLEKLESDLDAGDKE

SEQ ID NO: 60611 - DNA, 1974 bp, Desulfitobacterium hafniense Y51
  CDS (1)..(1974): transl_table=11
ttgaaatttttcaaaaacgctgctgtttatttactgattattctcattgcgattatgctcataagatttgccaacccaccggcgactcagcccttggatatggattacaccaaattttatgaggcggtggttacgggtcaggttgaagaagttgtaatcagtaccgatgataatgtcaatacctatgaagttaaaaccaaagacggtcagcaatatgtagtgctcggtgaagcaaaggatgttgatctgtctgcgcaaatgaacgagcataaagttaacgtgcgggtcaatccgccggtcaccactccttggtgggccggtttgatcaccacggtactgcctttcctgttaatcggcggctttatcttctttatgatgcagcagagccaagggggcggcaaccgggtcatgcagttcgggaaaagccgggctaaactggtgacggatgaaaagaaaaaggtgacctttgccgatgtggcaggagccgacgaggtgaaggaagagcttgaagaagttgtggaattcctcaagttccctaagaaatttaatgagttgggagctaaaattcccaaaggagtgctgctctttggccctcccggaaccggtaagactcttttggcccgggctgtggcaggagaagcgggggttcccttcttcagtatcagcggctcggactttgtagagatgttcgtcggggtgggagcatcccgggtgcgtgatttatttgaacaagccaaaaagaatgccccttgcatcgtgtttatcgacgagatcgacgcggtaggccggcaaagaggcgccggtctggggggcggtcatgatgagcgggagcaaaccctgaaccagctgctcgttgagatggatggttttaatgggaatgaaggcatcatcattatcgcggccaccaaccgccctgatattctcgacccggccttgttgcgtccagggcgtttcgaccgccaggtagtggtggatgttcccgatgtcaaaggccgtgaggagatcttaaaagtccatgttaaaggtaaacccatgcacagcgatgtggagctggatgtcttagcccgccgcacgccgggatttaccggagcagatctggccaaccttgtcaatgaagcggccctgctgtctgcccgccgcaatgaaaaagagattaaaatgaatgcactggaggattcagtggaacgggttattgccgggccggagaaaaaggcccgggtcatcagtgactatgaaaagaaattggtttcttaccacgaggcaggccatgccttagtgggagaaatgctgacccatacggatcccttgcacaaggtgtccattattccccggggacgggccggcgggtataccctgctcctgcctaaggaagatcgcaactatatgacaaagtctcatttgttggatcaggtcaccatgctcttaggtgggcgggtcgcagaagccttggttctccatgagatcagcaccggagcctccaatgacttggagcgggctaccggtcttgtccgcaagatgattacagaactgggaatgtccgaggagctgggaccccttacctttggacagaaggaaggtcaggtgttcttgggtcgggatattgcccgggatcgcaattatagtgaagcggtggcttactctatcgataaagaagcgcgccggatgatcgatgaatgctatttgaaggcgcagaccattattcaggagaacatgcataagcttaacgcgattgccgagactttgatggagaaagaaaccatcgaagccaaagaattcgccgagctgatggcccgctttgatcaaccagtggaaaccgcacaagtcccggagccgtcggagactgaaaataatacaacggaacatgatgatcttcttccagccacagaggagacctccgtggaggaagaaggcaggacggaagccgagggtttgagcgggtcaaccttagaagaagaaaaaaataagattgactag

SEQ ID NO: 60612 - protein, 657 aa, Desulfitobacterium hafniense Y51
MKFFKNAAVYLLIILIAIMLIRFANPPATQPLDMDYTKFYEAVVTGQVEEVVISTDDNVNTYEVKTKDGQQYVVLGEAKDVDLSAQMNEHKVNVRVNPPVTTPWWAGLITTVLPFLLIGGFIFFMMQQSQGGGNRVMQFGKSRAKLVTDEKKKVTFADVAGADEVKEELEEVVEFLKFPKKFNELGAKIPKGVLLFGPPGTGKTLLARAVAGEAGVPFFSISGSDFVEMFVGVGASRVRDLFEQAKKNAPCIVFIDEIDAVGRQRGAGLGGGHDEREQTLNQLLVEMDGFNGNEGIIIIAATNRPDILDPALLRPGRFDRQVVVDVPDVKGREEILKVHVKGKPMHSDVELDVLARRTPGFTGADLANLVNEAALLSARRNEKEIKMNALEDSVERVIAGPEKKARVISDYEKKLVSYHEAGHALVGEMLTHTDPLHKVSIIPRGRAGGYTLLLPKEDRNYMTKSHLLDQVTMLLGGRVAEALVLHEISTGASNDLERATGLVRKMITELGMSEELGPLTFGQKEGQVFLGRDIARDRNYSEAVAYSIDKEARRMIDECYLKAQTIIQENMHKLNAIAETLMEKETIEAKEFAELMARFDQPVETAQVPEPSETENNTTEHDDLLPATEETSVEEEGRTEAEGLSGSTLEEEKNKID

SEQ ID NO: 60613 - DNA, 1836 bp, Desulfitobacterium hafniense Y51
  CDS (1)..(1836): transl_table=11
gtgaaaaaaatgaatgaaaaaccaacgccgaagaaaccgcttatctattattccctggttgccttgctgattcttctgcttctgaatgcttttgtgtttccgcacttgctgaaaagacaggttacccaagtggattatggctctttcctgtcctatcttgagagtggaacgatttcggaagtcgaagttcaggataatcagattgcctttatgaccaaggattcaacaggcaaagaaacgatttttgttacgggcgctatggcagaccctgaattggttaatcgtcttaaggctgccggggtggataaatattctcaggttatccccaaggagaactcacccctcatgaacattctcttaacctggattctccccatgattctcttatttggactttggatgctgctgggaaatctgatgcagaaaaaaatgggcggcggcatgaacgccatgacctttggcaagagcaatgctaaaatctacgttcaagcccagacaggtaagacctttgccgatgtggccggtcaggatgaggcgaaagaagctctgactgagatcgtggattttcttcacgaccccagccgttatgccgccattggagccgatctgccgaaaggggctctcttggtgggtcctccgggaacggggaagaccttgctggccaaggccgttgccggagaggctaaagtgccctttttctccatatccggaagtgagtttgtagagatgtttgtgggtatgggcgcggccaaagtcagagatctatttaaacaagccaatgaaaaagccccctgcatcgtttttatcgacgagattgataccatcggcaaaaaacgggatggcggctccttcggcggcggcaatgatgaacgggaacaaaccttgaaccagcttctgtccgagatggatggttttgacggcaagaagggtgtggtgattctcgcggctaccaaccggccggagtccttagacaaggctttgctgcgtccggggcgcttcgatcgccggatccctgtggagcttccggatttggcaggtcgggaagccatcctgagagttcatgggcaaaaggtaaaaatggactcccctatcgactttaaagccatcgcccgggccactgccggagcatccggggcggaattagccaatattattaatgaaggagctttacgggctgttcgctgcgggagaagccgggtgaatcaaagtgatttggaggagtctgtggaagttgtgattgccggttaccagcggaagggggcggtgatttctcatcgcgagaaagagattattgctttccacgagattggccatgctttagtagccgccaaacaaacggactctgctcctgtgcataagattaccattattccaaggacttccggggccttaggctataccatgcaagtggaagaagatgagcgcgttctcatgagcaaagaagaggccttcaataaaatcaccacctttacagggggccgggcagccgaagaattgatctttggaacctatacttcaggagcctccaatgatattgaacaagccaccaaaattgcccgggccatggttacccgtctggggatgagcaagaatttcgatatgatggctttggagacagtgaataatccttaccttggcggcgatacttccttgatgtgttctccggaaaccgcagcgaggattgatgaggagattttatccatcatcaaaagcgcccacaaaaaagcgtttgaaattttaaaagataatattgaaaagcttcatgaattagcacgttatttgttggaaaaggaaaccatcaccggagaagaatttatggcggtgctctccaggtag

SEQ ID NO: 60614 - protein, 611 aa, Desulfitobacterium hafniense Y51
MKKMNEKPTPKKPLIYYSLVALLILLLLNAFVFPHLLKRQVTQVDYGSFLSYLESGTISEVEVQDNQIAFMTKDSTGKETIFVTGAMADPELVNRLKAAGVDKYSQVIPKENSPLMNILLTWILPMILLFGLWMLLGNLMQKKMGGGMNAMTFGKSNAKIYVQAQTGKTFADVAGQDEAKEALTEIVDFLHDPSRYAAIGADLPKGALLVGPPGTGKTLLAKAVAGEAKVPFFSISGSEFVEMFVGMGAAKVRDLFKQANEKAPCIVFIDEIDTIGKKRDGGSFGGGNDEREQTLNQLLSEMDGFDGKKGVVILAATNRPESLDKALLRPGRFDRRIPVELPDLAGREAILRVHGQKVKMDSPIDFKAIARATAGASGAELANIINEGALRAVRCGRSRVNQSDLEESVEVVIAGYQRKGAVISHREKEIIAFHEIGHALVAAKQTDSAPVHKITIIPRTSGALGYTMQVEEDERVLMSKEEAFNKITTFTGGRAAEELIFGTYTSGASNDIEQATKIARAMVTRLGMSKNFDMMALETVNNPYLGGDTSLMCSPETAARIDEEILSIIKSAHKKAFEILKDNIEKLHELARYLLEKETITGEEFMAVLSR

SEQ ID NO: 60615 - DNA, 1845 bp, Desulfitobacterium hafniense Y51
  CDS (1)..(1845): transl_table=11
ttgaaattagtggaggaatgtaacatggctaaacagaaaaagccaccgaaacacttaatattttattatataattgcaatgctaactatgttgatgcttcatgcattcatatttccattattatctgagcaacaggttacgaaagtggattatagcacgtttctaaaccaagttgaaagtggagccgttagtgaggtagaaattcaagaatctcaaattatctttacgacgaaggacgaatcggagcagaacaaaaaatatatgacgggagctattaatgatccggaacttgtggatcgtctttacaaagcgggtgtgaatttttcgcaagacattccgaaagaaaattcgcctctaactaatatcttgttgacatggattctacctttaatcttctttatcgggattggacaactgttagtgaatcaaatgcagaaacgcatgggtggaatgaattccatgacgttcgggaagagcaaggctaaaatctacgtgcaggcacaaacgggtaaaacgtttgatgatgtcgctggacaggatgaatctaaagaggcactggcagagatcatagacttcctacacaaccctaaaaagtattctgagattggagcgaacttaccgaaaggagcactccttgttggtcctcccggtacaggtaaaacactactagccaaagcagtcgcgggagaagcaaaggttcccttcttctccatttccggctccgagtttgtcgaaatgtttgtgggtatgggtgcagctaaagtacgggatttatttcaacaagccaatgaaaaggccccttgcattgttttcatcgatgagattgataccatcgggaaaaagcgggacagcggtcgtggtttcggagggaatgatgaacgagaacagacccttaatcaactgctgaccgaaatggatggttttgatggcaaaaaaggagttgttattctggctgcaaccaaccgccctgaatccttagacaaagcactgcttcgcccaggtcgattcgaccgtcggatcccagtggagctccccgatctcaaaggtcgtgaagctattttgaaggtccacgctcagagggttaagatggaagatagcattgattttaatgcgattgcacgagcgacttctggtgcgtcaggtgctgagctcgccaatatcattaatgaaggagcattgcgagcggttaaaaacggaaggtcgcatgtggaccaggctgacttagaagaatccgttgaggtcgtcattgcaggttaccagcgtaaaggagccgtaatttcacagaaggaaaaagaaattatagcttatcacgaaattggtcatgctttggttgcagcgaaacaaacggattcagctcccgtgcataagattaccatcattccaaggacatccggtacacttggctacacgatgcaagttgaggaaggcgagcgagtactaatgagtaagggagaagctttcaataagattgcaacgtttacaggaggccgtgctgccgaggagcttgtttttggtacgtttacctcgggtgcttccaatgacatcgaacaggcaactaagattgcaagggcgatggttactcggttaggtatgagtaaaaactttgacatgatggcactggagacagtgaacaatccctatcttggcgcagatacttccttgacatgttcagccgaaacagcggctaagattgatgatgaagtccttggtatcattaagagtgcccatgaaaaagcaatcagtattttacaagaaaatatcgagaagttgcacgaattagctcgctacttgttggagaaggaaaccattacgggagaagaatttatggagattcttgcacattaa

SEQ ID NO: 60616 - protein, 614 aa, Desulfitobacterium hafniense Y51
MKLVEECNMAKQKKPPKHLIFYYIIAMLTMLMLHAFIFPLLSEQQVTKVDYSTFLNQVESGAVSEVEIQESQIIFTTKDESEQNKKYMTGAINDPELVDRLYKAGVNFSQDIPKENSPLTNILLTWILPLIFFIGIGQLLVNQMQKRMGGMNSMTFGKSKAKIYVQAQTGKTFDDVAGQDESKEALAEIIDFLHNPKKYSEIGANLPKGALLVGPPGTGKTLLAKAVAGEAKVPFFSISGSEFVEMFVGMGAAKVRDLFQQANEKAPCIVFIDEIDTIGKKRDSGRGFGGNDEREQTLNQLLTEMDGFDGKKGVVILAATNRPESLDKALLRPGRFDRRIPVELPDLKGREAILKVHAQRVKMEDSIDFNAIARATSGASGAELANIINEGALRAVKNGRSHVDQADLEESVEVVIAGYQRKGAVISQKEKEIIAYHEIGHALVAAKQTDSAPVHKITIIPRTSGTLGYTMQVEEGERVLMSKGEAFNKIATFTGGRAAEELVFGTFTSGASNDIEQATKIARAMVTRLGMSKNFDMMALETVNNPYLGADTSLTCSAETAAKIDDEVLGIIKSAHEKAISILQENIEKLHELARYLLEKETITGEEFMEILAH

SEQ ID NO: 60617 - DNA, 1926 bp, Saccharophagus degradans 2-40
  CDS (1)..(1926): transl_table=11
ttgaacgatatggctaagaatttggtactttggttggttattgccactgtactgtttatggtctttaaaaactttaatgagccggctgtacagcaagaaatggcctattcagacttcgttaccgaagtgcgcgcaggtaatgtgcgcgaagtggtttttgagggcaacattattcgcggtgttgggtataacaaccagccgtttagagtggtaatgctaccaacaatcgatttggatttacgcagcgagctagttgaaaacggcgtagcgtttaaggccgagaaaaaagaagaggctgggttctttgagaacttgctactggcaaccgtacctgtattgttgtttatcgctgtgttcatattctttatgcgtcaaatgcagggtggtagcggtggtcgcggcgggcctatgagctttgctaaaagtaaagcgcgtttgcttggcgaagatcaggttaaaacaacctttgcagatgtagccggcgtagatgaagccaaagaagaagtgtctgagttggtggaatatttgcgcgatccaagcaagtttcagcgcttaggtggccgaatcccccgtggtgttttaatgtctgggcctcccggtacaggtaaaacgctgctcgcaaaagcaattgcgggtgaggcgaaagtacctttcttctctatttcgggctcagatttcgtagaaatgttcgttggtgtgggtgcatcccgcgtgcgagacatgtttgagcaggctaaaaagcaggctccttgtattatctttatcgatgagatcgatgccgtgggtcgccatcgtggcggcggtggtcatggtgggggtcacgacgagcgcgagcaaacgctcaaccagttactagtagagatggacggttttgaaggtaacgaaggtgtaattgttattgctgcaacgaaccgctcagatgtactggataaagcattgcttcgcccaggccgtttcgaccgccaagtaaacgttggcttgccagatgtgcgaggccgggagcaaattcttaaagtgcatatgcgtaaagtgcccattagcgatgcagttaaagcttctattattgcgcgcggtacgccagggttctctggtgccgacttggccaaccttgttaacgaggccgctttgctagctgcccgtggcaataagcgcttagttaccgaagaagagtttgaaaatgcgcgcgataaaatccttatgggtaccgagcgtcgcactttagtgatgaccgagcaagagaaagagagcacggcttatcacgaagccggtcacgctattgttggctacttgtcgccagagcacgaccctattcacaaagttactattattcctcgcggtcgcgctttaggtgtaacgcacttcttgccggaaggcgatcgtattagtgagagcaagcgcaaaatgatgggcgatatcgcctgtgcatatggcggcagaattgcagaagagatgatctatggcgccgatggggtatctaccggtgcatacggcgatattcgtggtgccacggcaattgcccgcgctatggttgtaaactacggtttgtcagacacgcttggccctctagattacgatgctcgagatagtgacggtattggctctaaaaagatttctgggcacaccgcgcgtttgatcgacgaagaagttaaaaatattaccgatgcttgctacaagcgagcagaacaaatacttgaagagaatcgcgatattctagaagccatgaaagatgcgcttatggagtatgagactttagattccgaccaagtatcagatttaatggcgcgcagaaagatacgtcctcccaaaagttggagtgacgatttgactgatggtggtgcttcagctggcgaaaccgactctggtagcacagcggaaaaaaccaaagcatcggattcgtccttaggcggccctgctagcgagcattaa

SEQ ID NO: 60618 - protein, 641 aa, Saccharophagus degradans 2-40
MNDMAKNLVLWLVIATVLFMVFKNFNEPAVQQEMAYSDFVTEVRAGNVREVVFEGNIIRGVGYNNQPFRVVMLPTIDLDLRSELVENGVAFKAEKKEEAGFFENLLLATVPVLLFIAVFIFFMRQMQGGSGGRGGPMSFAKSKARLLGEDQVKTTFADVAGVDEAKEEVSELVEYLRDPSKFQRLGGRIPRGVLMSGPPGTGKTLLAKAIAGEAKVPFFSISGSDFVEMFVGVGASRVRDMFEQAKKQAPCIIFIDEIDAVGRHRGGGGHGGGHDEREQTLNQLLVEMDGFEGNEGVIVIAATNRSDVLDKALLRPGRFDRQVNVGLPDVRGREQILKVHMRKVPISDAVKASIIARGTPGFSGADLANLVNEAALLAARGNKRLVTEEEFENARDKILMGTERRTLVMTEQEKESTAYHEAGHAIVGYLSPEHDPIHKVTIIPRGRALGVTHFLPEGDRISESKRKMMGDIACAYGGRIAEEMIYGADGVSTGAYGDIRGATAIARAMVVNYGLSDTLGPLDYDARDSDGIGSKKISGHTARLIDEEVKNITDACYKRAEQILEENRDILEAMKDALMEYETLDSDQVSDLMARRKIRPPKSWSDDLTDGGASAGETDSGSTAEKTKASDSSLGGPASEH

SEQ ID NO: 60619 - DNA, 2025 bp, Myxococcus xanthus DK 1622
  CDS (1)..(2025): transl_table=11
atgggcccacgcggaaagaagacagacaagccaacgccaacggggaaggggttcaagttcggctctccgttgggctacatcctgttactcgtcctgggcttcctgctgttccgcaacgtcttccaggacgcgggcgtgcggcgcgtgagctacagccagttccgtgacggggtggaagctgggaacttcagccgggtccagatttcgaacgagtgggtgaagggcttcctcaaggacacggcgcagccgcctcctcctccagcggacggggagcgcacgctgcgcggcgagccgagcgccctgccgtggatggcctaccgcgtcgccggtgacgaggggctggtgccgttgctggagcagaagggcatccagttcgaggccgtgccgcagtcagggctgggcgaggcgctgtggatatggctgttgcccctgggcctcttcttcctcttctggagcttcatgatgcgccgggtggccggcggcatgggccagggcccgcagagcgtcatgagcttcgggaagacgcgcgccaaggtgcaggccgaggccgataccggcgtgggcttcaaggacgtggctggcgtggacgaggcggtcgacgagctgcgtgaaatcgtcgagttcctcaagacgcccgagaagttccgccgcctgggcgggcgcatccccaagggggtgctgctggtgggccctccgggtacgggcaagacgctgctggcgcgagccgtggcgggtgaagcgggcgtccccttcttcagtctgtcgggctccgagttcgtggagatgttcgtcggcgtgggcgccgcgcgagtccgcgacttgttcgcccaggccacgtcgaaggcgccgtgcatcatcttcatcgacgagctggatgccattggcaagagccgcaactcgggcgtggccggtgggcatgacgagcgtgagcagacgctcaaccaactgctcgcggagatggacggcttcgacagccgcgcgggtctcatcatcctggcggccaccaaccgtccggagatcctggacagcgcgctgatgcgtccgggccgcttcgaccggcaggtgctggtggaccggccggacaagcggggccgcgagcgggtgctggagattcacgccaagggcgtgaagttgggaccggacgtggacctcaaggccattgcctcgcgcaccccgggcttcgcgggcgcggacctggccaacgtggtgaacgaggccgcgctcctggccgcgcggcgcaaccgcgacgcggtgatgcgggcggacttcgaggaagccatcgagcgtgtcgtcgccggtctggagaagaagaaccgccggatgaacgagcgtgagaaggagattgtcgcgcaccacgaggcgggccacgcggtggtggggtggatgctgcctcacgcggagcgggtgacgaaggtgtccatcatcccgcgcggcctggcggcgctgggctacaccatgtcgctgccgctggaggaccgctatctcatgtcgctggacgagctgcgcgacaagatggcggggatgatgggcggccgggccgcggaggagatcttcatcggggaaatctccaccggcgcgtccaacgacatccgccaggccacggaaatggcccggatgatggtgcgggactacggcatgagcacgctggggccggtggccctgagcgcggaccatggcccgggcttcctccgctcggcgggcgtgccggagacgcgcagctactccgagcagacggcgcggatgattgacgaggaggtgcgcaagctcgtcagtgaagcgctcgacagggcccgtcaggtgctgaccacccacaaggacagggcccaggcgttggcggcccggcttctggccgtggaggtggtggaggaggacaccatggtgacgattctgggtcccaaggtgttggcgcagcgtggcctgctgcacccggaggcgcgtcaggtcatctccgcgcacccggtggacgtcgggggcggtgacgaccagacgccgcccacgcagcactcggacgcgctcgactcctga

SEQ ID NO: 60620 - protein, 674 aa, Myxococcus xanthus DK 1622
MGPRGKKTDKPTPTGKGFKFGSPLGYILLLVLGFLLFRNVFQDAGVRRVSYSQFRDGVEAGNFSRVQISNEWVKGFLKDTAQPPPPPADGERTLRGEPSALPWMAYRVAGDEGLVPLLEQKGIQFEAVPQSGLGEALWIWLLPLGLFFLFWSFMMRRVAGGMGQGPQSVMSFGKTRAKVQAEADTGVGFKDVAGVDEAVDELREIVEFLKTPEKFRRLGGRIPKGVLLVGPPGTGKTLLARAVAGEAGVPFFSLSGSEFVEMFVGVGAARVRDLFAQATSKAPCIIFIDELDAIGKSRNSGVAGGHDEREQTLNQLLAEMDGFDSRAGLIILAATNRPEILDSALMRPGRFDRQVLVDRPDKRGRERVLEIHAKGVKLGPDVDLKAIASRTPGFAGADLANVVNEAALLAARRNRDAVMRADFEEAIERVVAGLEKKNRRMNEREKEIVAHHEAGHAVVGWMLPHAERVTKVSIIPRGLAALGYTMSLPLEDRYLMSLDELRDKMAGMMGGRAAEEIFIGEISTGASNDIRQATEMARMMVRDYGMSTLGPVALSADHGPGFLRSAGVPETRSYSEQTARMIDEEVRKLVSEALDRARQVLTTHKDRAQALAARLLAVEVVEEDTMVTILGPKVLAQRGLLHPEARQVISAHPVDVGGGDDQTPPTQHSDALDS

SEQ ID NO: 60621 - DNA, 1884 bp, Rubrobacter xylanophilus DSM 9941
  CDS (1)..(1884): transl_table=11
ttgggcagaatcctgagaaacggcgggttgctgtacttcatcgtcctcctggtgttcgcggtgatcctggtgcgtttcctctccgcgggcaacccggacgtcgagaagctcaactcgcaggagttccagagggccatagagaacaaccagataaagaccgacatcccgcagggccaggagggggccctggtggtccgggacgaagaccagacggtcgaggggaccctcaagaacgggcagcgcttcgagtactcctaccccgagtactacgacatagcccgggtgctgaacgaggccaacatccccttcaccaccgacccgcagaacaccggcttctggctgaccctgctcggcacgctcgggcccatactcctgatcatcctgttcttcctgctcttcatgagctccatgcagggcgggggcaaccgggttatgagcttcggcaagagccgggcgcgcaggatgaccaaggaccagcccaaggtgaccttcgccgacgttgcgggggcggacgaggcggtgcaggagctcaccgagataaaggagtttctggagaacccgcagaaattccagaagctgggggccaggataccgaagggggcgctcctggtggggcctccggggacgggcaagaccttgcttgcgcgggcggtggccggggaggcgggggtaccgttcttctccatttcgggctctgactttgtggagatgttcgttggggttggggcctcgagggtgcgcgacctcttcgagcaggccaagcagaacagcccgtgcatcatctttgtggacgagatagacgcggtggggcgccagaggggggctgggcttggcggcggccacgacgagcgggagcagaccctgaaccagctgttggtggagatggacggctttgactcaaagagcgggatcatcatgctcgccgccacaaaccgccccgacatcctcgacccggcgctcttgaggcccgggcgctttgaccggcagatagtggtcgaccggcccgatcttccgggcaggatcaagatcctcaaggtccacacccggggcaagccgcttggggaggacgtggacatagagaccatagccaggggcacgccgggcttcacgggggcggaccttgccaacctggtcaacgaggcggcgctgcttgctgcgcggcacaacaaagagcagatcgagatggccgagatggaggaggccatagaccgggtcattgccggtcccgagcgcaagacccgcctgataagcgagaaggagaaggagatcaccgcctaccacgaggcgggccacgccatagtgggggcgctcctgcccgaggccgaccccgtgcacaaggtgaccatcatcccgagagggcaggcccttggggtgaccatgagcctgccggaggaagaccgcttcatgatgagccgggcgcagctgatggcccagctctcctacatgctggggggcagggcggccgagcgggtggtctttgaggagatcaccaccggcgcctcaaacgacatagagcgggccaccaaggttgcccggcagatggtcacccgctacgggatgagcgagaagctggggctcatagcgcttggccagcacgacgggcaggtgttcatggggcgcgacctgcacgcccagcccgactactccgacgagatcgccttccagatagacaaggagataagacggctggtggacgaggcctacgacaccgcggaggatctgctggtgcgcaaccggcggctgctggagaagcttgcctctgacctcatcgagtacgaaaccgtcgacgccgagcacctgcgccggctggtggaggagtacgcggtggaccgcacgggcgtcgagaagctcgggagcggctcccgcaacggccgccaggactag

SEQ ID NO: 60622 - protein, 627 aa, Rubrobacter xylanophilus DSM 9941
MGRILRNGGLLYFIVLLVFAVILVRFLSAGNPDVEKLNSQEFQRAIENNQIKTDIPQGQEGALVVRDEDQTVEGTLKNGQRFEYSYPEYYDIARVLNEANIPFTTDPQNTGFWLTLLGTLGPILLIILFFLLFMSSMQGGGNRVMSFGKSRARRMTKDQPKVTFADVAGADEAVQELTEIKEFLENPQKFQKLGARIPKGALLVGPPGTGKTLLARAVAGEAGVPFFSISGSDFVEMFVGVGASRVRDLFEQAKQNSPCIIFVDEIDAVGRQRGAGLGGGHDEREQTLNQLLVEMDGFDSKSGIIMLAATNRPDILDPALLRPGRFDRQIVVDRPDLPGRIKILKVHTRGKPLGEDVDIETIARGTPGFTGADLANLVNEAALLAARHNKEQIEMAEMEEAIDRVIAGPERKTRLISEKEKEITAYHEAGHAIVGALLPEADPVHKVTIIPRGQALGVTMSLPEEDRFMMSRAQLMAQLSYMLGGRAAERVVFEEITTGASNDIERATKVARQMVTRYGMSEKLGLIALGQHDGQVFMGRDLHAQPDYSDEIAFQIDKEIRRLVDEAYDTAEDLLVRNRRLLEKLASDLIEYETVDAEHLRRLVEEYAVDRTGVEKLGSGSRNGRQD

SEQ ID NO: 60623 - DNA, 1938 bp, Mesorhizobium sp. BNC1
  CDS (1)..(1938): transl_table=11
atgaatccaaattatagaaatttcgcgctatgggcgatcatcgcggtcttgctcattgcgctgttcaacctgtttcaggcgccgcagcagcgtggggccactcgggacattgcctactctcaatttctcgaagaggtctcacagggtcgcgttgaaagcgtcaccatcaccggcagtcggatctccggcacttatacggacaaccgcacgccgtttcagacctattctcccggcgatcccagtctcgtccagcggcttgaagaacacaatgtgacgatcacggcccgccccgagtctgacggttccaactccatcctcggctatttcatctcctggctgccgatgatcctgatcctggcggtctggattttcttcatgcggcagatgcagtcggggtccggccgcgcaatgggcttcggcaagtccaaggccaagcttctgaccgaggcgcatgggcgcgtcaccttccaggatgtagccggtgtggatgaagccaagcaggatctagaggagatcgtcgagttcctgcgcgatccgcagaaattccagcgcctcggcggcaagattccgcgcggcgtgctgctcgtcggccctcccggcactggcaagacgctgctcgcgcgatccgtcgcgggcgaggcgaatgtgccgttctttaccatttccggttcggatttcgtcgagatgttcgtcggcgtgggcgcaagccgtgtgcgcgacatgttcgatcaggcgaagaagaacgcgccctgcatcatcttcatcgatgagatcgatgcggtcggccgtcaccgcggcgcgggcctgggcggcggcaatgacgagcgcgagcagacgctgaaccagttgctggtggagatggacgggttcgaagccaatgaaggcatcatcctgatcgcggccaccaaccggccggacgtgcttgaccccgcgctcttgcgtccgggccgtttcgaccgtcaggtggtcgtgcccaatccggacatcgtgggccgcgaaaagatcctcaaggtgcatgtgcggaatgtgccgctggctcccaatgtcgatctgaagaccattgcgcgcggcacccccggcttctccggcgccgacctcgccaatctggtcaacgaggccgcgctgatggccgcgcgccgcaacaagcgcctcgtcacgatggctgaattcgaggacgccaaggacaaggtcatgatgggtgcggagcgccgctcgcacgcaatgacccaggaagagaaggagctgaccgcctttcacgaggcgggccatgccgtggtggcgctcaacgtgcccgcttccgaccctgtccacaaggccactatcatcccgcgtggccgcgcgctcggcatggtcatgcagctgcccgagggcgaccgctattccatgagctacaaatacatgatctcccgcctggcgatcatgatgggcgggcgtgtcgccgaggagctgaaattcggcaaggagaacatcacttcaggtgccgcttccgatatcgagcaggccaccaagctggcgcgcgccatggtcacgcgctggggcttctccgacaagcttggccaggtggcttatggcgagaaccaggaagaggtcttccttggccattccgtcacgcgccagcagaacatgtcggaggagacgcagcagaagatcgacgacgaggtgcgccggctgatcgacgaggcccatgagaaagcgcgggagatccttacgaccaagcgcgatgcctggatcgccgttgcggaaggcctgcttgaatacgagacgctgtcgggcgaggagatccaggcgatcatccgcggcgaaaagcctgcgcgggacctcggcgacgacacgcctccttcacgcggttccactgtgcccaaggccggtgtgcgcaaagagggcaagaagggcggcgaggaacccgacgctggcctggagccgcagcctcaaggctaa

SEQ ID NO: 60624 - protein, 645 aa, Mesorhizobium sp. BNC1
MNPNYRNFALWAIIAVLLIALFNLFQAPQQRGATRDIAYSQFLEEVSQGRVESVTITGSRISGTYTDNRTPFQTYSPGDPSLVQRLEEHNVTITARPESDGSNSILGYFISWLPMILILAVWIFFMRQMQSGSGRAMGFGKSKAKLLTEAHGRVTFQDVAGVDEAKQDLEEIVEFLRDPQKFQRLGGKIPRGVLLVGPPGTGKTLLARSVAGEANVPFFTISGSDFVEMFVGVGASRVRDMFDQAKKNAPCIIFIDEIDAVGRHRGAGLGGGNDEREQTLNQLLVEMDGFEANEGIILIAATNRPDVLDPALLRPGRFDRQVVVPNPDIVGREKILKVHVRNVPLAPNVDLKTIARGTPGFSGADLANLVNEAALMAARRNKRLVTMAEFEDAKDKVMMGAERRSHAMTQEEKELTAFHEAGHAVVALNVPASDPVHKATIIPRGRALGMVMQLPEGDRYSMSYKYMISRLAIMMGGRVAEELKFGKENITSGAASDIEQATKLARAMVTRWGFSDKLGQVAYGENQEEVFLGHSVTRQQNMSEETQQKIDDEVRRLIDEAHEKAREILTTKRDAWIAVAEGLLEYETLSGEEIQAIIRGEKPARDLGDDTPPSRGSTVPKAGVRKEGKKGGEEPDAGLEPQPQG

SEQ ID NO: 60625 - DNA, 1842 bp, Trichodesmium erythraeum IMS101
  CDS (1)..(1842): transl_table=11
gtgaataataaaaagtggagaaacgctggcctgtatgccctattggcaatagtggtcatcgctttagcaacagcattcttcgatcaacaaccccaagctcgcgaaacctggaaatacagtcagtttattcagcaagtagaaaacaaaaatgtagagaaagtagatataagcgctgaccggacagtagctagagtcaaagtagctgacggcagtgtagtccgagttaatctacctaatgacccggacctaattaacatactcactcaaaacaatatagatatttcagtactacctcagaatgaagaaggtttctgggtcagagcattaagcagtttattcttccctatcctattgttggtaggattgttcttcctactacgacgggctcaaagtggacctggtagtcaagcgatgaactttggcaaatctaaagctagagtgcaaatggaacctcaaacccaagtcacatttagcgatgtagcaggtattgaacaggccaaactagaactaacagaagtagtagacttcctcaaaaatgccgatcgcttcacagcaataggagccaaaattcctaaaggtgtactattagtaggccctcccggaacaggtaaaactctattagctaaggctgttgctggggaagcaggagtaccattcttctccatctccggctctgaatttgtagaaatgtttgtaggtgtaggtgcttcccgggttcgagacctatttgaacaggccaagtctagtgctccctgtatcgtatttatagatgaaatagatgcagtaggtcgtcaaagaggtgctggtttaggtggtggtaatgatgaaagagaacaaactttgaaccagctactcaccgagatggatggctttgaaggaaacacaggtattattattatagctgctactaaccgccctgatgttttagacgctgccctactccgccctggtcgttttgaccgccaggtagtagtagaccgccccgactatgcaggtcgtcttgaaattctcaacgttcatgctcgtggcaaaagtctctccaaagatgtagacttagaaaaaattgcccgtcggacaccagggtttactggtgcagatttatctaatctattaaatgagggagctattctagcagctcgtcgcaatttaactgaaatttctatggatgaagttaatgattccattgatcgggtattggctggcccagaaaagaaagatcgagtaatgagcgagaagcgtaaggagttagtggcatatcatgaggctggtcatgctttggttggagctttaatgcctgattatgacccagtacagaagattagtattattcctcgtggtagagctggtggtttaacttggtttactcctagtgaagaccgaatggactctggtttgtattctcgcgcttacctacaaaatcagatggctgtagctttgggtggtcgtcttgctgaggaaattgtttttggtgatgaagaggtcaccactggagcttctaatgatttgcagcaagtggctcgtgtggcccgccagatggtaactaggtttggaatgagcgatcgcctcggtcctgtagctcttggtcgtcagaacggtaatatgttcttaggtagagatattatgtctgagcgtgatttttctgaggaaactgctgctgctattgatgatgaggttagtaatttggtagaccaagcttatcgtcgtgctaaagaagttttagtaggcaaccgtcatattttggataggttggcagagatgttggttgataaggagactgttgactctgatgagttacaggagttgttggcaactaatgatgtgaaaatggcagctttaatttag

SEQ ID NO: 60626 - protein, 613 aa, Trichodesmium erythraeum IMS101
MNNKKWRNAGLYALLAIVVIALATAFFDQQPQARETWKYSQFIQQVENKNVEKVDISADRTVARVKVADGSVVRVNLPNDPDLINILTQNNIDISVLPQNEEGFWVRALSSLFFPILLLVGLFFLLRRAQSGPGSQAMNFGKSKARVQMEPQTQVTFSDVAGIEQAKLELTEVVDFLKNADRFTAIGAKIPKGVLLVGPPGTGKTLLAKAVAGEAGVPFFSISGSEFVEMFVGVGASRVRDLFEQAKSSAPCIVFIDEIDAVGRQRGAGLGGGNDEREQTLNQLLTEMDGFEGNTGIIIIAATNRPDVLDAALLRPGRFDRQVVVDRPDYAGRLEILNVHARGKSLSKDVDLEKIARRTPGFTGADLSNLLNEGAILAARRNLTEISMDEVNDSIDRVLAGPEKKDRVMSEKRKELVAYHEAGHALVGALMPDYDPVQKISIIPRGRAGGLTWFTPSEDRMDSGLYSRAYLQNQMAVALGGRLAEEIVFGDEEVTTGASNDLQQVARVARQMVTRFGMSDRLGPVALGRQNGNMFLGRDIMSERDFSEETAAAIDDEVSNLVDQAYRRAKEVLVGNRHILDRLAEMLVDKETVDSDELQELLATNDVKMAALI

SEQ ID NO: 60627 - DNA, 1854 bp, Synechococcus sp. CC9311
  CDS (1)..(1854): transl_table=11
ttgaacaagcgttggcgcaatgtggggctttatgtcctgctcgtagtggtagtgatcgttgtgggtactgcgttccttgaccgcccagatcctgcaactgcagcccgcacgctgcggtacagcgactttgtggaatccgttcaggaagatcaagtcagcagagttttgctgtctcccgaccggggaaccgctcaaattgttgagaccgatggtcgtcgggcggaggtcaacctcgctccggacaaggatttgctgaagatgctgacggatcacaacgttgacattgcggtgcagccttcacgccagccaggcgcttggcagcaagcagcaaccagcttgatcttcccgctgctgcttcttggcggcctgtttttcctgttccgccgcgcccagggtggcggcggcggcggtggaaaccaagccatgaatttcggcaagagcaaggcacgggtccaaatggagcccaccacacaagttaccttcggtgatgtggctggaattgaaggcgccaagctcgagctcactgaggtggtcgacttcctcaaaaatccagatcgtttcacggctgtaggagcgaaaatccctaagggttgtttgcttgttggccctccaggtacaggtaaaacgctgctcgcaaaagcagtggccggtgaggcaggagtgcccttcttctcaatctcaggttctgagtttgtggagatgttcgtgggtgttggtgccagccgtgtacgcgacctgtttgaacaggccaagaaaaacgccccttgcatcgtgttcattgatgagatcgatgcagtcggtcgacagcgtggcgctggtcttggcggaggtaacgacgagcgtgaacaaaccttgaaccagctccttacggagatggatggttttgaaggcaataccggaatcatcatcattgctgcaaccaaccgacctgacgtattggattcagccctaatgcgcccagggcgtttcgatcgccaggtcacggttgatcgtcctgactacgccggacgtctccaaattcttggcgtccacgcccgcagtaaaaccctctcgaaggatgttgacctcgacaaggtggctcgccggactcctgggtatacaggtgctgacttggccaaccttctcaatgaagccgccatccttgcggcccgccgccaactcactgaggtgagcaacgacgagatcagcgatgcgatcgagcgcatcatggtgggccccgagaagaaagatcgggtgatgagcgagcgtcgcaagcgtctggttgcttatcacgaggctggccatgcactggtgggtgctttgatgcctgattacgacgctgttcagaagatttcgatcattccccgtggcaatgctggtggtttgaccttcttcacaccgagcgaagaaaggatggaatctggcctttattcacgcacctatcttcaaaaccaaatggctgtggcgttgggtggccgggttgcagaggagatcgtctatggggaagacgaggtcacaacgggtgcctccaacgatctccagcaggtagcttcagtggcccgtcagatggtcactcgctttgggatgagcgacaagctgggccctgttgcccttggccgtgctcaaggaggcatgttcttgggtcgtgacatcgcggctgaacgtgacttctcagaagacactgccgcaacgattgattctgaagtctctgatcttgttgatgtggcctatcaccgtgccaccaaggtgctgaacgacaaccgttctgttcttgatgagctcgctgaaatgctggttgaaagcgaaactgttgattctcaggagttacaggatctgttgatccgacgtgatgtacgaattgctgagtacgtctga

SEQ ID NO: 60628 - protein, 617 aa, Synechococcus sp. CC9311
MNKRWRNVGLYVLLVVVVIVVGTAFLDRPDPATAARTLRYSDFVESVQEDQVSRVLLSPDRGTAQIVETDGRRAEVNLAPDKDLLKMLTDHNVDIAVQPSRQPGAWQQAATSLIFPLLLLGGLFFLFRRAQGGGGGGGNQAMNFGKSKARVQMEPTTQVTFGDVAGIEGAKLELTEVVDFLKNPDRFTAVGAKIPKGCLLVGPPGTGKTLLAKAVAGEAGVPFFSISGSEFVEMFVGVGASRVRDLFEQAKKNAPCIVFIDEIDAVGRQRGAGLGGGNDEREQTLNQLLTEMDGFEGNTGIIIIAATNRPDVLDSALMRPGRFDRQVTVDRPDYAGRLQILGVHARSKTLSKDVDLDKVARRTPGYTGADLANLLNEAAILAARRQLTEVSNDEISDAIERIMVGPEKKDRVMSERRKRLVAYHEAGHALVGALMPDYDAVQKISIIPRGNAGGLTFFTPSEERMESGLYSRTYLQNQMAVALGGRVAEEIVYGEDEVTTGASNDLQQVASVARQMVTRFGMSDKLGPVALGRAQGGMFLGRDIAAERDFSEDTAATIDSEVSDLVDVAYHRATKVLNDNRSVLDELAEMLVESETVDSQELQDLLIRRDVRIAEYV

SEQ ID NO: 60629 - DNA, 1974 bp, Shewanella sp. MR-4
  CDS (1)..(1974): transl_table=11
atgaggtctagtaatttgagtgacatggcaaaaaatctaatactctgggttgtcatcgccgttgtgctgatgtcagtgtttcagggttactccccctcttcttcgtcatcgcagaagatggattattctacgttcctagacaatgttcgtgatggacaagtcgccagtgttgaagtgaaaagtgaccaacgtactatcgaaggtgctaagcgcacgggcgaaaaattcacgaccatcatgccactgtatgaccaagatttaattaatgatcttgaccgtaaaggcatcaccatgaaaggccaagaagccgaagagtcgggtttcttaacccagatctttatttcttggttcccgatgttgttgctgattggggtatggattttctttatgcgccagatgcagggcggcggtggcaaaggcgctatgtcctttggcaagagcaaagccaagctgatgagcgaagatcaaatcaagaccacttttgctgacgttgctggctgtgatgaagccaaagaagaagtgaaagagctggtcgattatctgcgtgatccaaccaaattccaaaaactgggtggccgtattccaacgggcgtgctcatggttggcccaccaggtacaggtaaaaccttactggctaaagcgattgcgggcgagtcaaaggtacctttctttaccatttcgggttctgacttcgtcgaaatgttcgtcggggtcggcgcatctcgcgtgcgtgacatgttcgaacaagcgaaaaaatcagccccttgtattatcttcatcgacgaaatcgatgccgtaggtcgccaacgtggcgcaggcttaggtggtggtcacgatgagcgtgagcaaacccttaaccaaatgctggttgagatggacggcttcgaaggtaacgaagggattatcgtgattgcggcgactaaccgcccagacgtattagactctgcgctgctgcgtccaggtcgtttcgaccgtcaagtggttgtaggtctgccggacgttcgcggtcgtgagcaaatccttaaagtgcatatgcgtaaagtgccgctttctgaagatgtgaaagcaagcgtaattgctcgtggtacgccaggtttctccggtgccgatttagccaacttagtcaacgaagctgcactgtttgcggcgcgcggtaatcgccgtgttgtcggtatggaagaattcgagcgtgcaaaagacaagatcatgatgggtgcagagcgccgctctatggtgatgtcagaagccgagaaagaaatgacggcataccacgaagcgggacacgcgattgtgggctgtttagtgccagagcatgaccctgtgcacaaggtaaccattatcccgcgaggtcgtgcgctgggtgtgaccttcttcttgcctgaggccgatgcgattagccaaagccgtcgtaagttagaaagccagatttcggttgcctacggtggtcgtttagccgaagagctgatttacggcagcgaaaaagtgtctacaggtgcttcgcaagatattaaatacgcgacatcgattgcccgtaacatggtgacccaatggggcttctccgacaaactcggtccattactctatgccgaggaagaaggtgaagtgttcttaggccgtagcatgggtaaagccaaggcgatgtccgatgaaaccgcgacgcttatcgatgccgaggtgaaggcctttatcgataaaaactacggtcgtgccaagcaaattctgctggataacatcgatattctgcattcgatgaaagacgcgctgatgaagtacgaaaccattgattcactgcaaattgacgatttgatgaatcgccgtgaagtgcgtcagcctgccgattggcaagcggatgataatggttcaaacgacaaaggcagtgacaaaggcgagcctgcggttaaagtcgacgaagtggtaaagaccgctcccgttgaggcagagctgaaagatgccgatgagtcacccgttaagtag

SEQ ID NO: 60630 - protein, 657 aa, Shewanella sp. MR-4
MRSSNLSDMAKNLILWVVIAVVLMSVFQGYSPSSSSSQKMDYSTFLDNVRDGQVASVEVKSDQRTIEGAKRTGEKFTTIMPLYDQDLINDLDRKGITMKGQEAEESGFLTQIFISWFPMLLLIGVWIFFMRQMQGGGGKGAMSFGKSKAKLMSEDQIKTTFADVAGCDEAKEEVKELVDYLRDPTKFQKLGGRIPTGVLMVGPPGTGKTLLAKAIAGESKVPFFTISGSDFVEMFVGVGASRVRDMFEQAKKSAPCIIFIDEIDAVGRQRGAGLGGGHDEREQTLNQMLVEMDGFEGNEGIIVIAATNRPDVLDSALLRPGRFDRQVVVGLPDVRGREQILKVHMRKVPLSEDVKASVIARGTPGFSGADLANLVNEAALFAARGNRRVVGMEEFERAKDKIMMGAERRSMVMSEAEKEMTAYHEAGHAIVGCLVPEHDPVHKVTIIPRGRALGVTFFLPEADAISQSRRKLESQISVAYGGRLAEELIYGSEKVSTGASQDIKYATSIARNMVTQWGFSDKLGPLLYAEEEGEVFLGRSMGKAKAMSDETATLIDAEVKAFIDKNYGRAKQILLDNIDILHSMKDALMKYETIDSLQIDDLMNRREVRQPADWQADDNGSNDKGSDKGEPAVKVDEVVKTAPVEAELKDADESPVK

SEQ ID NO: 60631 - DNA, 1920 bp, Alkalilimnicola ehrlichei MLHE-1
  CDS (1)..(1920): transl_table=11
atggccaagaatctgatcctctggatcatcatcgccgtggtcctgatgtccgtgttcagcaacttccaggaacgcggtgccccggggccggagcagatgaaatactccgagttcctccgccatgtggaggccggagaggtccgtgaggtgatgatccagggcgataagatcaccgtggagcgcgccgatggcacgcgggcccacacctacaacccggagtcggacaaccgggcgctgattggcaccctgctggagcacgacgtcaccatcgatgcccgcgagccggaaggccgcaacatgttggtgcagattctcatctcctggttcccgttcctgctgctgattgccgtgtggatctacttcatgcgccagatgcaggggggtggcgcgggtcgtggggccatgtccttcggtaagagcaaggccaagctcatgaccgaggagcagagcaaggtcaccttcaacgacgtggccggctgcgacgaggccaaggacgacgtggcggagctggtggacttcctgcgggatccgtccaagttccagcgcctgggcgggaccatcccccgcggggtgttgatggtcggcccccccggcaccggtaaaacgctgctcgccaaggcgatcgccggtgaggccaaggtgccgttcttcagcatctccggctccgatttcgtcgagatgttcgtcggcgtgggtgcttcccgcgtgcgcgatatgttcagccaggccaagaagcacagcccctgcatcatcttcatcgacgagatcgacgccgtgggccgccagcgcggtgccggcctgggcggggggcacgacgagcgtgagcagaccctgaaccagctgctggtggagatggacggtttcgagggcaatgagggcgtcatcgtcatcgccgccaccaaccgccccgacgtgctcgacccggccctgctgcgcccgggccgttttgatcgccaggtggtggtgccgttgccggacgtacgcggccgcgagcacatcctcaaggtgcacatgaagaaggtgcccctggacgacgatgtcacccccgcgatcctggcccgcggcaccccgggcttctcgggcgctgacctggccaacctggtcaacgaggccgccctgttcgccgcccgcgccaacaagcgggtggtggaccaggaggacttcgagaaggccaaggacaagatcatgatgggctccgagcgtaagtccatggtgatgaaggaggatgagaagcgcctgaccgcctaccacgaggccggccacgccatcgtcgggttggtcaccccggagcacgatccggtgcacaaggtgaccatcatcccccgcggccgggccttgggcgtgaccatgttcctaccggaagaggaccgttacagctacaccaagcaacgcctgaacagcatgatcgccagcctgttcggcggccgtatcgccgaggagctgatcttcggccacgagcgggtgaccaccggcgcctccaatgacatccagcgggccaccgagattgcccgcaacatggtcaccaagtgggggctgtccgcccgcctgggccccctggcctacggagatgaggagggcgaggtcttcctcggtcattcggtgacccagcataaggacgtttcggaagagacccagcacgccatcgacgaggaggtgcgggccatcatcgacgccaactacacggcggcggagaagatcatccgcgagcacatggatcagcttcacgtgatggccgatgcactgatgcgctacgagaccatcgatcgtgctcagatcgacgacatcatggccgggcgcgagccgcggccgccgaagggctggtccgggccttcggacgatgacgatgaccgtgccgagggcgagaaggtgggtaaggacgagcgcggccgtattggcggccccgccaccagcgaacactga

SEQ ID NO: 60632 - protein, 639 aa, Alkalilimnicola ehrlichei MLHE-1
MAKNLILWIIIAVVLMSVFSNFQERGAPGPEQMKYSEFLRHVEAGEVREVMIQGDKITVERADGTRAHTYNPESDNRALIGTLLEHDVTIDAREPEGRNMLVQILISWFPFLLLIAVWIYFMRQMQGGGAGRGAMSFGKSKAKLMTEEQSKVTFNDVAGCDEAKDDVAELVDFLRDPSKFQRLGGTIPRGVLMVGPPGTGKTLLAKAIAGEAKVPFFSISGSDFVEMFVGVGASRVRDMFSQAKKHSPCIIFIDEIDAVGRQRGAGLGGGHDEREQTLNQLLVEMDGFEGNEGVIVIAATNRPDVLDPALLRPGRFDRQVVVPLPDVRGREHILKVHMKKVPLDDDVTPAILARGTPGFSGADLANLVNEAALFAARANKRVVDQEDFEKAKDKIMMGSERKSMVMKEDEKRLTAYHEAGHAIVGLVTPEHDPVHKVTIIPRGRALGVTMFLPEEDRYSYTKQRLNSMIASLFGGRIAEELIFGHERVTTGASNDIQRATEIARNMVTKWGLSARLGPLAYGDEEGEVFLGHSVTQHKDVSEETQHAIDEEVRAIIDANYTAAEKIIREHMDQLHVMADALMRYETIDRAQIDDIMAGREPRPPKGWSGPSDDDDDRAEGEKVGKDERGRIGGPATSEH

SEQ ID NO: 60633 - DNA, 1920 bp, Hyphomonas neptunium ATCC 15444
  CDS (1)..(1920): transl_table=11
atgaatgtccggaatttggcgatctggggcgcgctcgccctgcttgtgatcggtatggctgttatgatgggcggcaaccctgaagttgcccgcgccgatccgactaagctgtccgagatctatcagctggcagaagacggcaaacttgccgacgccacgctgggcgacaccacgatcatcgccaagaccaccgacggccgcacgctgaaaagcgagctgcgcgcgctggacatgaaaaccgaagatattctcactcagaacaatgttcctttctcggtgaagcccgatacgggccgcaacaatgtggcctccgtactcctgtcgcttttgccgatcctgctgatcgtcggctttgtcttcttcatgatgcgccagatgcagggtgggggcacccgcggcgccatgagctttggcaagtcgcgggcgcgcctgctgaccgaaaagcatggacgcgtcacctttgatgacgtggccggtgtggatgaggcaaaggaagaactccaggaaatcgttgagttcctgcaagacccttccaagttccagcgcctgggcggcaaaattccgaaaggcgcgctgctggtcggcccgcccggtacaggtaaaaccctgcttgcgcgcgctgttgccggcgaagctggtgtgccgttcttcacgatttccggttctgacttcgtcgaaatgttcgtcggcgttggcgccagccgcgtccgcgacatgttcgagcaggccaagcgctcggcgccttgcatcatcttcatcgacgaaattgatgccgttggccgctcacgcggcgcaggcctcggcggcggcaatgacgaacgcgagcagacgctgaaccagctcctcgtcgagatggatggttttgaggccaatgaaggcatcatcatcatggcggccaccaaccgcccggatgtgctcgaccctgcgctgctgcgccccggccggtttgaccgtcaggtgactgttggcaatcctgacataatcggccgcgagaagatcctgcgcgttcacatgcgcaatgtgccgctcgccaaggatgtcgagaccaagacgatcgcgcgcggtacgcccggcttttccggcgctgacctcgccaacctcgtgaacgaggccgctctcctggcggcacgccgcggcaaacgtgtcgttgcgatgcaggaatttgaggacgccaaggacaaggtgcttatggggccagagcgccgctcgatggtcatgtcggagaaggaaaagatcctgaccgcctggcacgaggccggccacgctgttgtggcgatgaaagtgcctgctgccgatcccgttcataaggcgacgatcattccgcgcggccgggctctcggcatggtcatgcagctgcccgaagacgacaagctgtcgatgtccaaggtcgagatgacttcgcgcctggccatcatcatgggcggccgggtcgccgaggaactgaagttcggagatgacaatgtcaccgccggcgctgcctccgacatccagcaggccacacggctcgcccgcgcgatggtcacacgctggggctattcggacatcatcggcccggttgattacggctcggatcagggcgacgtgttcctgggccagcagctcatgcagtccagccatatctcggaagatacctcgcgcaagatcgaggaagaagtccgtaagctgattgaaaagggcaaggaagacgcccggcaggtcatgacggagttccgcaaggaatgggaagcgatcgcgaccggtctgctcgaattcgaaacgctgacgggtgaagagattgccggcctgctgaaaggtacgccgccgagccgtccggatatttccgatgacgacgcaggccctgcctctgctgttccggtcatcggtaagcgcaagaagccgaaagatgacggcattggcgacgcagaacccaatccggcctga

SEQ ID NO: 60634 - protein, 639 aa, Hyphomonas neptunium ATCC 15444
MNVRNLAIWGALALLVIGMAVMMGGNPEVARADPTKLSEIYQLAEDGKLADATLGDTTIIAKTTDGRTLKSELRALDMKTEDILTQNNVPFSVKPDTGRNNVASVLLSLLPILLIVGFVFFMMRQMQGGGTRGAMSFGKSRARLLTEKHGRVTFDDVAGVDEAKEELQEIVEFLQDPSKFQRLGGKIPKGALLVGPPGTGKTLLARAVAGEAGVPFFTISGSDFVEMFVGVGASRVRDMFEQAKRSAPCIIFIDEIDAVGRSRGAGLGGGNDEREQTLNQLLVEMDGFEANEGIIIMAATNRPDVLDPALLRPGRFDRQVTVGNPDIIGREKILRVHMRNVPLAKDVETKTIARGTPGFSGADLANLVNEAALLAARRGKRVVAMQEFEDAKDKVLMGPERRSMVMSEKEKILTAWHEAGHAVVAMKVPAADPVHKATIIPRGRALGMVMQLPEDDKLSMSKVEMTSRLAIIMGGRVAEELKFGDDNVTAGAASDIQQATRLARAMVTRWGYSDIIGPVDYGSDQGDVFLGQQLMQSSHISEDTSRKIEEEVRKLIEKGKEDARQVMTEFRKEWEAIATGLLEFETLTGEEIAGLLKGTPPSRPDISDDDAGPASAVPVIGKRKKPKDDGIGDAEPNPA

SEQ ID NO: 60635 - DNA, 1920 bp, Pseudomonas aeruginosa UCBPP-PA14
  CDS (1)..(1920): transl_table=11
atggcaaagaatctgattctgtggctgatcatcgcggcggtactggtgaccgtgatgaacaatttctcgagcccgagcgagccacagacgctgaactactcggacttcatccagcaggtcaaggatggcaaggtcgagcgagtgaccgtggatggctatgtcatcaccggcaagcgtagcgacggcgataccttcaagaccatccgcccggcgatccaggacaacggcctgatcggcgacctggtcaacaacaacgtcgtggtcgagggcaagcagcccgaacagcagagcatctggacccagttgctggtcgccagcttcccgatcctggtgatcatcgccgtcttcatgttcttcatgcgccagatgcagggcggcggcggcggtcgcggcggcccgatgagcttcggcaagagcaaggcgcgcctgctgtccgaggaccaggtcaagaccaccttcgctgacgtcgccggctgcgacgaggccaaggaggaggtcagcgagctggtcgagttccttcgcgatccgggcaagttccagcgcctgggcggccgtatcccgcgcggcgtgctgatggtcggcccgcccggcaccggcaagaccctgctggccaaggccatcgccggcgaagccaaggtgccgttcttcaccatttccggttccgacttcgtcgagatgttcgtcggcgtgggcgcctcccgtgtccgcgacatgttcgaccaggccaagaagcacgcgccgtgcatcatcttcatcgacgagatcgacgccgtcggccgccatcgcggcgccggcttgggcggcggtcacgacgagcgcgagcagaccctcaaccagttgctggtggagatggatggcttcgagatgaacgatggcatcatcgtcatcgctgccaccaaccgtccggacgttctggacccggcgctgctgcgtccgggccgcttcgaccgccaggtggtggtcggcttgccggatatccgcgggcgcgaacagatcctcaaggtgcacatgcgcaaggtgccgctgggcgaccatgtcgatcctgccgtcatcgcccgcggtacgcccggtttctccggcgccgacctggccaacctggtcaacgaggcctcgctattcgccgcgcgctccaacaagcgcatcgtcgacatgcgcgagttcgagctggccaaggacaagatcatgatgggcgccgagcgcaagaccatggtcatgtccgagaaggagaagcgcaacaccgcctaccacgaggccggccacgccatcgtcggtcgcctggtgccggagcatgacccggtctacaaggtgtccatcattccgcgcggacgtgccctgggcgtgaccatgttcctccccgaggaagatcgctacagcctgtccaagcgcgcgctggaaagccagatctgctcgctgttcggcggccgtatcgcggaagagatgaccctcggctttgaaggcgtcaccactggcgcttccaacgacatcatgcgtgctacccagttggcgcggaacatggtgaccaagtggggtctgtccgagaaactcggcccgctgatgtacgcggaggaggagggcgaggtgttcctcggccgtagcgccggcagccagcacgccaatgtgtcgggcgagaccgccaagatgatcgaccaggaagtccggcgcatcatcgacgactgctacggtaccgccaagcgactgctcgacgagaaccgcgacaagctggagatgatggccgacgcactgatgaagtacgagaccatcgactccgaccagatcgacgacatcatggccggtcgcgtgccgcgcgagccgcgtgactggcagggtggttcgggtaccggcaccccgccggccaacctggaagagtcgggccgccgcgagaacacccctcccatcggtgggccggccggcgagcactga

SEQ ID NO: 60636 - protein, 639 aa, Pseudomonas aeruginosa UCBPP-PA14
MAKNLILWLIIAAVLVTVMNNFSSPSEPQTLNYSDFIQQVKDGKVERVTVDGYVITGKRSDGDTFKTIRPAIQDNGLIGDLVNNNVVVEGKQPEQQSIWTQLLVASFPILVIIAVFMFFMRQMQGGGGGRGGPMSFGKSKARLLSEDQVKTTFADVAGCDEAKEEVSELVEFLRDPGKFQRLGGRIPRGVLMVGPPGTGKTLLAKAIAGEAKVPFFTISGSDFVEMFVGVGASRVRDMFDQAKKHAPCIIFIDEIDAVGRHRGAGLGGGHDEREQTLNQLLVEMDGFEMNDGIIVIAATNRPDVLDPALLRPGRFDRQVVVGLPDIRGREQILKVHMRKVPLGDHVDPAVIARGTPGFSGADLANLVNEASLFAARSNKRIVDMREFELAKDKIMMGAERKTMVMSEKEKRNTAYHEAGHAIVGRLVPEHDPVYKVSIIPRGRALGVTMFLPEEDRYSLSKRALESQICSLFGGRIAEEMTLGFEGVTTGASNDIMRATQLARNMVTKWGLSEKLGPLMYAEEEGEVFLGRSAGSQHANVSGETAKMIDQEVRRIIDDCYGTAKRLLDENRDKLEMMADALMKYETIDSDQIDDIMAGRVPREPRDWQGGSGTGTPPANLEESGRRENTPPIGGPAGEH

SEQ ID NO: 60637 - DNA, 1857 bp, Solibacter usitatus Ellin6076
  CDS (1)..(1857): transl_table=11
ttgatctgcgtagcggtgctgttattcgccgttgtccggacgaatcaaggacccaaggaagacgcgatcagtttcacccagttcctggataaggtaaagagcggcgaggtcaaagaagtgactattgccgaccgggatgtgcacggactttaccagaatccccagcaggggttccgtacccaggtgccggccaattatccccagttattcgacttgatgaacgataagaaagtaaacgtcaacatcaaggacacatcttcgagcagctggattgcgattttgctgaatgcgtcgccattcatcgtgttgctggcgttctggatcttcatgatgcggcaaatgcagagcggcggcaacaaggcgctgagtttcggcaagagccgggcgcgcctgcactcaacccagcagaagaaggtcacgttcaaggatgtggcgggcgtggaagaggccaaggaagaactgcaggagatcatcgagttcctgcgcgagccgcagaaatttcagaagctcggcgggcgtatccccaagggcgtgctgctgatcggacctcccggcacgggtaagacgctgctggcgcgcgcaatcgcgggcgaggcaagcgtaccgttcttctcgatctccggttcggacttcgtcgaaatgttcgtgggcgttggtgcgagccgcgtacgcgacctgttcgagcagggcaagaagaatgcgccgtgcatcatcttcatcgatgaaatcgatgcggtcggccgtcatcgcggcgccggtttgggcggcggacatgacgaacgcgaacagacgctgaaccaactgctggtggaaatggacgggttcgaatccaacgagggcgtgatcctggtggctgccaccaatcgtcccgatgtgctcgacccggcgctgctccgccccggccgtttcgaccgccgcgtagtagtggggcgtcccgacgtgcagggccgcgaagccattcttcgcgtacacaccaagaagattccgctgggcgataacgtcgatctcagcgtgctggcccgcggaacacccggcttggcaggcgccgagctcgccaacctggtgaacgaagccgcgttgaatgcggcgcgccagaaccgcaaggtcgtcatgatgctggatttcgagctcgccaaggacaagatcctgatgggcgcggaacgcaagagcatggtgatgagcgacgcggagaagcgcaacaccgcctatcatgaagctggacacgcgctggtagcagccatgctgccgaatgccgacccgctgcacaaggtcacgatcatcccgcgcggtatggcgctgggcgtgacgatgcagctgccgatcgatgacaagcactcctacaacaaggactacctgctggcgcagcttgccatcctgatggcggggcgtatcgccgaagagaagtacatgcatcacatgaccacgggcgcgggcaacgatatcgagcgcgcgaccgatctggcgcgcaagatggtgtgcgaatggggcatgagcgagctcggcccgctgagtttcggcaagaaggaagagcagatcttcctgggccgggaaatctcccagcaccgcgactactccgaagagacggctatccgaatcgatgaacaggtcaagaagctggtgcagggcgggtacgacacggcgaccggcgtgatcgatcagtacaccgaagcgctggtgaaaatcgccgagacgctgctggttcgcgagatcctggacggcaacgaagtgatgcagctgatcaagggccagacactcgcgccgccggctcccaaagattcgggcgacacgcagcaggtgctgcgcccggatagcggccggcgcgtcccgggcttgaacgagggctcggcgcccgcgtga

SEQ ID NO: 60638 - protein, 618 aa, Solibacter usitatus Ellin6076
MICVAVLLFAVVRTNQGPKEDAISFTQFLDKVKSGEVKEVTIADRDVHGLYQNPQQGFRTQVPANYPQLFDLMNDKKVNVNIKDTSSSSWIAILLNASPFIVLLAFWIFMMRQMQSGGNKALSFGKSRARLHSTQQKKVTFKDVAGVEEAKEELQEIIEFLREPQKFQKLGGRIPKGVLLIGPPGTGKTLLARAIAGEASVPFFSISGSDFVEMFVGVGASRVRDLFEQGKKNAPCIIFIDEIDAVGRHRGAGLGGGHDEREQTLNQLLVEMDGFESNEGVILVAATNRPDVLDPALLRPGRFDRRVVVGRPDVQGREAILRVHTKKIPLGDNVDLSVLARGTPGLAGAELANLVNEAALNAARQNRKVVMMLDFELAKDKILMGAERKSMVMSDAEKRNTAYHEAGHALVAAMLPNADPLHKVTIIPRGMALGVTMQLPIDDKHSYNKDYLLAQLAILMAGRIAEEKYMHHMTTGAGNDIERATDLARKMVCEWGMSELGPLSFGKKEEQIFLGREISQHRDYSEETAIRIDEQVKKLVQGGYDTATGVIDQYTEALVKIAETLLVREILDGNEVMQLIKGQTLAPPAPKDSGDTQQVLRPDSGRRVPGLNEGSAPA

SEQ ID NO: 60639 - DNA, 2022 bp, Magnetococcus sp. MC-1
  CDS (1)..(2022): transl_table=11
ttgaacgggttttttaaaaacctctccctgtggctggttatcggccttcttatggtcatgctgtttaatctgtttaacagcccccaaggaccagggcagagcatcacattttccgatttttctgaaatggtcgcccaaggcaaggtaacagcagttacccttgaagggcgtacggtacgcgggctttcgaccgatggtagccctttttcatcgcgcgtgccggataactacgatcttaccaaggatctgctggcccatggggtggatattgacgtgcgggagcccgaaggcacccccatgttgatgcaaattttaattagctggttccccatgctgctgctcattgcggtgtggatctacttcatgcggcaaatgcagtccggcggtggacgtggggcgatgtcctttggcaaatccaaagccaagctcatgtccgataaggcggcgaaagtaacctttcaggacgtggcgggcattgaagaggccaaagaggagctgcaagaagtggtgcagtttcttaaagatcctcataaattccaacggcttggtggtaaaattccaaagggtgtgctgctggtgggtcctccgggtaccggtaaaacactgctggcgcgtgccatcgctggcgaggccaacgtgcccttctttaacctctctggttccgattttgtggagatgtttgtgggggtgggtgcggcccgtgtgcgggatatgtttgagcaaggcaaaaaaaatgcgccgtgcatcatctttattgatgaaattgatgccgttggtcgccaccggggtgccgggttgggcggggggcacgatgagcgggagcagaccctcaaccagctattggtggagatggatggttttgaatcgactgagggtgtgatcatggtcgcggccaccaaccgccccgacgtgttggatcctgcactgctcaggcccggtcgttttgaccgtcaggtgacggtgcctaaccccgatattttgggccgcacccagatccttaaagtgcacatgaacaaagtacccctgtcggactcggtggatgccgaggtgatcgcccgcgcgacccccggtttctctggggccgatctggccaacttggtcaatgaagccgccctgattgccgcccagttggataaacgggtggtggagatggaggattttgagaacgccaaggataaggtcatgatgggtaaaccgcgtcgaagcgcggttatttcagaaaaagagcgcaagacaacagcctatcacgaagccgggcatgcggtggtggccatggcactggacggggcagaccccgtgcataaagtgaccatcatcccccgtggtcgcgctttgggcctgaccatgcaactaccgttggaagatcgctacacctactccaaggtgcagctagaacaaaatatcgccatcttaatgggggggcgtctggcagaagagttggtgctcaatcagctcaccaccggggcgggcaatgatatccaacgggctaccgatctggcccgtaagatgatctgctcctatggtatgagtgacaccttgggtccccttacttatggtgaaaatgaacaagagattttcctcggtcgggagatcacgcagcacaaaagcgtatcggaagagacagctcggcgcattgatgcagaggtatttgacatcgttgatcgcaattacaaaagagccaaacagatcttgaccgataaaatggaggtgctgcacaccatggcccaggcactgttggagcgcgaaaccattgatgcggatgaggtgattaagctcatggcaggcgagcctgccgagaccgctttaaagcctttgaagaaaaaggatgagcgtgcgaacaagccaaccccaacggtggcagacgatggggaacaaggggaccaaacggcaaaagatgcagtggcagggagtgtcacccaagcagaggatgatgtggaaggatccacccgtactgcaacagaggcatccacgcaggaggtggtatctaaggacacccctgaaggcgatgataaggatagatga

SEQ ID NO: 60640 - protein, 673 aa, Magnetococcus sp. MC-1
MNGFFKNLSLWLVIGLLMVMLFNLFNSPQGPGQSITFSDFSEMVAQGKVTAVTLEGRTVRGLSTDGSPFSSRVPDNYDLTKDLLAHGVDIDVREPEGTPMLMQILISWFPMLLLIAVWIYFMRQMQSGGGRGAMSFGKSKAKLMSDKAAKVTFQDVAGIEEAKEELQEVVQFLKDPHKFQRLGGKIPKGVLLVGPPGTGKTLLARAIAGEANVPFFNLSGSDFVEMFVGVGAARVRDMFEQGKKNAPCIIFIDEIDAVGRHRGAGLGGGHDEREQTLNQLLVEMDGFESTEGVIMVAATNRPDVLDPALLRPGRFDRQVTVPNPDILGRTQILKVHMNKVPLSDSVDAEVIARATPGFSGADLANLVNEAALIAAQLDKRVVEMEDFENAKDKVMMGKPRRSAVISEKERKTTAYHEAGHAVVAMALDGADPVHKVTIIPRGRALGLTMQLPLEDRYTYSKVQLEQNIAILMGGRLAEELVLNQLTTGAGNDIQRATDLARKMICSYGMSDTLGPLTYGENEQEIFLGREITQHKSVSEETARRIDAEVFDIVDRNYKRAKQILTDKMEVLHTMAQALLERETIDADEVIKLMAGEPAETALKPLKKKDERANKPTPTVADDGEQGDQTAKDAVAGSVTQAEDDVEGSTRTATEASTQEVVSKDTPEGDDKDR

SEQ ID NO: 60641 - DNA, 1875 bp, Phaeodactylum tricornutum
  CDS (1)..(1875): transl_table=11
atggaacgaaatacaatacaaaaaattcttattggattatttctcttggcatgtattttcattggcttaagaacctttaatgtaattggctttgaagaagtacagtcaaaacctgaagttagtgccaatgtaagtagttcaagaatgacttatggtcgatttttagaatatttagaaatgggatgggtaaaacaagttgacttatatgataatagtcgaaatgcaattgttcaagcttcgagcccagaacttggaaatcgtccgcaatcgattagagtcgaaattccagttggaacatctcaattaatacaaaaattaaaagaatatgaaatcaattttgatgctcatccagcacccaaaaaaagtatttttattacattagcaagtaatttattattaccattaatctttattggaagtttaattttcttttttcaaaattcggacaatctatctggaaattctaattcatcgccaatgaatttaggtaaatcaccagcgcgatttgatcaacgtccagatacaggtatctcatttgatgatattgcaggtattgatgaagcaaaggcagaatttgaagagatagtatcatttttaaaagaacctgagcgatatactttagttggagcaaaaataccaaaaggggtattattagtaggacctccaggaacgggtaagacattattagcaaaagcaattgctaatgaagctaatgtaccattctatagtgttgctggatcagagtttgtagaaatgtttattggtattggtgcatcacgaatacgtgatttatttaaaaaggcgtcagaaaatactccatgtattgtctttatcgatgaaattgatgctgtaggtcgtgaacgaggtgccggagttggtggtggaaacgatgagcgagaacaaactttaaatcaattattaacagaaatggatggatttaaagaaaataaaggggtcattgttgttggtgcaaccaatcgagtggatattttagatgctgcattattacgtccaggccgatttgatcgccaaattactgttggtctaccagatcgtttaggtagaattggtattctgaaagttcacgctaagaataagccatttgccgaagatgtatccctagttcaattagctaatcgtacaccaggattttcgggcgcagatttggctaatttattaaacgaagcagctattttagcgacacgttataaaaaagtaacgatcacaaaaaatgaagttaatgaagcagctgatagaattattggtggtatcgctggtagtacaatggaagatactaaaaataaaaaattaattgcttatcatgaagttggtcatgcaattgtcggatcggtattagaaaatcatgatgaagttgaaaagattactttagttccacgcggcggggcaaaaggtcttacatggtttgcaccagaagaagatcaaatgttactttcgcgatcagctttattggctcgaattattacaacgttagcaggtcgggctgcagaacaagtcgtttttggtgatccagaaattacgactggtgcaagtaatgatctacaacaagttacaaatattgcccgccagatggtaactcgttacggtatgtcaaatattggaccaattgccttagaagatgataataatcaacaaatgttcatgggtggcgaatataacgaagcaatcgctgatagaattgattctgaggtttgtaaaattattaatcattgtgaaaagatagcaatagaaataattcgagataatcgtgtggtgattgatctagtcgtagaaaaattattagacgcagaaacaatagatggattagaattccgtaaattaattaatcaatacactgttttgccagtcaaaaattaa

SEQ ID NO: 60642 - protein, 624 aa, Phaeodactylum tricornutum
MERNTIQKILIGLFLLACIFIGLRTFNVIGFEEVQSKPEVSANVSSSRMTYGRFLEYLEMGWVKQVDLYDNSRNAIVQASSPELGNRPQSIRVEIPVGTSQLIQKLKEYEINFDAHPAPKKSIFITLASNLLLPLIFIGSLIFFFQNSDNLSGNSNSSPMNLGKSPARFDQRPDTGISFDDIAGIDEAKAEFEEIVSFLKEPERYTLVGAKIPKGVLLVGPPGTGKTLLAKAIANEANVPFYSVAGSEFVEMFIGIGASRIRDLFKKASENTPCIVFIDEIDAVGRERGAGVGGGNDEREQTLNQLLTEMDGFKENKGVIVVGATNRVDILDAALLRPGRFDRQITVGLPDRLGRIGILKVHAKNKPFAEDVSLVQLANRTPGFSGADLANLLNEAAILATRYKKVTITKNEVNEAADRIIGGIAGSTMEDTKNKKLIAYHEVGHAIVGSVLENHDEVEKITLVPRGGAKGLTWFAPEEDQMLLSRSALLARIITTLAGRAAEQVVFGDPEITTGASNDLQQVTNIARQMVTRYGMSNIGPIALEDDNNQQMFMGGEYNEAIADRIDSEVCKIINHCEKIAIEIIRDNRVVIDLVVEKLLDAETIDGLEFRKLINQYTVLPVKN

SEQ ID NO: 60643 - DNA, 1908 bp, Acidovorax sp. JS42
  CDS (1)..(1908): transl_table=11
atggcaatggacaagaagcagaccttttcgctttggtacgtgttggccgcactgatcggactgatgctggtgcaggagtttgcgcagacacgacacacgcagactttgagctacagcgaattcaaacaggcattgctagccggcaagctcgaggatgtggtgatcgcagagggcatggccaccggcaagctgcgcgcagatggcctggatcagattcttcccaaggagaaaattgaagagctgaagaaggccagtggcgagcatgggttcacaacagtgctggtcgatgacccgaaccttgtcgcacagctcgacgcagccaaggtacgctacggatcggtgcgccagagcaagtggctgggcgcgctgatttcatggatcgcaccggcattgatattcttcggcatctggtggttgttgatgaagcgcatgggtggcggcatgggccacggcggtatgctggaaatcggcaagagcaaggccaaggtttacatgcagaccgaaaccggcgtgaccttcaaggacgtcgccggcatcgacgaagcgcgcgaggaactgatggaggtggtcgagttcctgaagaaccccgatagatacaagcggttgggcggaaagattcccaaaggggtgctgatcgtcggtgcacccggaaccggcaagacgctgctggccaaggccgtggcgggcgaggcgggcgtgccgttcctgtccctcagcggatccgagttcgtcgaaatgttcgtgggcgtcggcgccgcgcgcgtgcgtgacctgttcgagcaggcggccgccaaggcgccctgcatcgtcttcatcgacgaactcgacgcgctgggcaaggcgcgcggtgccggtctgaccggcgggcatgaggaacacgagcagacactgaaccagctgcttgtcgagatggatggcttcgacaccaaccgcggcgtaatcatcatggcggcgacgaaccggcccgagatcctcgacccggcgttgttgcgtccaggacgtttcgaccgccatgtggcgatcgaccgccctgacctgaatgggcggcggcagattctcgaggtgcacgtcaagcacgtgacgctagggccggacgtggaccttgccgcgctcgccgcccgcacgccgggctttgccggcgccgacctcgccaacctggtcaatgaggcgacgttgcgcgctgccaagcgcgacaagccggcggtcgagatgaaggacttcgatgaggcgctcgaccgcattgtcgccgggctggagaagaagaaccgcgtgatgaacccgatggagcgcaagttcgtcgccttccacgaagcaggccatgcggtggttgccgagatgcgccgaaataccgaccgggtgtcgaaggtgtccatcatcccgcgcggcatcgccgccctcggctacacgcagcagtcgcccaccgaggaccgctacctgatgcgcaaaagcgaactgctcgaccgcatcgacgtgctgctgggcgggcgcgtggccgagaagctggtcttcgacgacgtgtcgacaggtgccgagaacgatctgcagcgggccaccgacatggcgcgccacatggtgacccactatggcatgagtgatacgctgggcctggcgaccttcgactcgcgccctacgccgctgtttctcagtgggccggtgctgccggggccgcgcgagttcagcgagcgcacggccgaggcgatcgacgtcgaggtgcggcgcatcctcgatgagtcgcgtgagcgggtcacgcagacgctcacgacgcacagagcgtcgcttgatgcgttggcgcggctgttgctcgagaaggaggtcgtcgatcgcgcgatgctggacgaggtcatggcaggcgccaccacgacgccggatcagttgcagactgcggccttgccgctgcagtcgtcgtga

SEQ ID NO: 60644 - protein, 635 aa, Acidovorax sp. JS42
MAMDKKQTFSLWYVLAALIGLMLVQEFAQTRHTQTLSYSEFKQALLAGKLEDVVIAEGMATGKLRADGLDQILPKEKIEELKKASGEHGFTTVLVDDPNLVAQLDAAKVRYGSVRQSKWLGALISWIAPALIFFGIWWLLMKRMGGGMGHGGMLEIGKSKAKVYMQTETGVTFKDVAGIDEAREELMEVVEFLKNPDRYKRLGGKIPKGVLIVGAPGTGKTLLAKAVAGEAGVPFLSLSGSEFVEMFVGVGAARVRDLFEQAAAKAPCIVFIDELDALGKARGAGLTGGHEEHEQTLNQLLVEMDGFDTNRGVIIMAATNRPEILDPALLRPGRFDRHVAIDRPDLNGRRQILEVHVKHVTLGPDVDLAALAARTPGFAGADLANLVNEATLRAAKRDKPAVEMKDFDEALDRIVAGLEKKNRVMNPMERKFVAFHEAGHAVVAEMRRNTDRVSKVSIIPRGIAALGYTQQSPTEDRYLMRKSELLDRIDVLLGGRVAEKLVFDDVSTGAENDLQRATDMARHMVTHYGMSDTLGLATFDSRPTPLFLSGPVLPGPREFSERTAEAIDVEVRRILDESRERVTQTLTTHRASLDALARLLLEKEVVDRAMLDEVMAGATTTPDQLQTAALPLQSS

SEQ ID NO: 60645 - DNA, 1920 bp, Acidovorax sp. JS42
  CDS (1)..(1920): transl_table=11
ttgaataatcagtggttttcaaaagtcgccgtctggctggtcattgccatggtgctctttacggtgttcaaacaatttgacacccgagcgggcgcgggcgccggaaccatcggctattcggaattcctggaagaggtgcgcagcaaccgcatcaagagcgcgaccatccaggaagggcagggcggcaccgagatcgtggcggtcaccaatgatgaccgccgcatccgcaccacggccacctacctcgaccgcggcctcgtgggcgacctgatcaacaacaacgtcaagttcgacgtcaagccgcgcgaagaaggctcgctgctcatgaccctgctggtcagctggggccccatgctgctgctgatcggcgtgtgggtgtacttcatgcgccagatgcagggcggcggcaagggtggtgccttcagcttcggaaaatcgaaggcgcgcatgctggacgaaaacaacaacaccgtcaccttcgcggacgtggcgggctgcgacgaggccaaggaagaggtgaaggaagtggtcgacttcctgaaagacccgcagaaattccagaagctcggtggccgcatcccgcgtggcctgttgctggtcggccctccgggcaccggcaagacgctgttggccaagtccattgctggcgaagccaaggtgccgttcttcagcatctcgggctccgacttcgtggaaatgttcgttggcgtgggcgcggcccgcgtgcgcgacatgttcgagaacgccaagaagaacgccccctgcatcatcttcatcgatgagatcgatgccgtgggccgccagcgtggcgctggcctgggcggtggcaatgacgagcgcgagcagacactgaaccagatgctggtcgagatggatggcttcgagaccaacctgggcgtgatcgtcgtggctgcgaccaaccgtcccgacatcctggacgccgccttgctgcgccccggccgtttcgaccgccaggtctatgtgacgctgcctgatattcgtgggcgcgagcagatcctgggtgtgcacatgcgcaagattccggtagggcaggacgtgaaccccgccatcattgcgcgcggaacgcccggcatgtccggcgcagacttggccaacctgtgcaacgaagcagcgttgatggctgcacggcgcaatgcgcgcaccgtggagatgcaggacttcgagaaggccaaggacaagatcatcatgggccccgagcgcaagaccatggtcatgcccgaggaagagcgccgcaacacggcctaccacgaagcaggccatgcgctgatcggcaagttgttgccgaagtgcgacccggtgcataaggtcaccatcattccgcgcggccgcgcgctgggcgtgaccatgagcctgcccgagaaggaccgctactcctacgacaaggagtacatgctgaaccagatcgccatgctgttcggcgggcgcattgccgaagaagtgttcatgaaccagatgaccacgggagccagcaatgacttcgaacgcgccacgtccatcgcgcgcgacatggtgatgcgctacggcatgagcgaggccctggggcccatggtgtacgcggagaacgaaggcgaagtgttcctgggccgttcggtgaccaagaccaccaatatctccgaagaaaccatgcagaaggtggatgctgaggtgcgtcgcatcatcgacgagcagtacggattggcacgccgcctgatcgaagagaaccaggacaagatgcacgccatggcgaaggccatgctggagtgggaaaccatcgatgccgaacagctggacgacatcatggccggccgggcgcctcgcccgcccaaggactggacgccgcgcacccctccttcgggtggtgatggttccagcggcggcactccggccgtcaagccggacccggcgccctccgccgcctga

SEQ ID NO: 60646 - protein, 639 aa, Acidovorax sp. JS42
MNNQWFSKVAVWLVIAMVLFTVFKQFDTRAGAGAGTIGYSEFLEEVRSNRIKSATIQEGQGGTEIVAVTNDDRRIRTTATYLDRGLVGDLINNNVKFDVKPREEGSLLMTLLVSWGPMLLLIGVWVYFMRQMQGGGKGGAFSFGKSKARMLDENNNTVTFADVAGCDEAKEEVKEVVDFLKDPQKFQKLGGRIPRGLLLVGPPGTGKTLLAKSIAGEAKVPFFSISGSDFVEMFVGVGAARVRDMFENAKKNAPCIIFIDEIDAVGRQRGAGLGGGNDEREQTLNQMLVEMDGFETNLGVIVVAATNRPDILDAALLRPGRFDRQVYVTLPDIRGREQILGVHMRKIPVGQDVNPAIIARGTPGMSGADLANLCNEAALMAARRNARTVEMQDFEKAKDKIIMGPERKTMVMPEEERRNTAYHEAGHALIGKLLPKCDPVHKVTIIPRGRALGVTMSLPEKDRYSYDKEYMLNQIAMLFGGRIAEEVFMNQMTTGASNDFERATSIARDMVMRYGMSEALGPMVYAENEGEVFLGRSVTKTTNISEETMQKVDAEVRRIIDEQYGLARRLIEENQDKMHAMAKAMLEWETIDAEQLDDIMAGRAPRPPKDWTPRTPPSGGDGSSGGTPAVKPDPAPSAA

SEQ ID NO: 60647 - DNA, 1920 bp, Magnetospirillum magnetotacticum MS-1
  CDS (1)..(1920): transl_table=11
ttgaatttcagcaagaacctggcgttgtgggtcatcatcgccgtgctgctggtgatgctcttcaatctgttccaggcgtcctcgccgccgcgcggtccgggccagacatcctattccgaattcctgtccgatgtggatcgcggctccatcgccgacgtgaccattcagggcagcgtggtcaacggccatttcaccgatggccgccccttcaccacctacatgccccaggacgtgaacgtggtggacaagctgcgcgcccataatgtgcgcatcactgccgttccgccgtccgacgacgcgccgactttgtggagcgtgctggtctcgtggttccccatgctgctgttgatcggcgtctgggtattcttcatgcgccagatgcagggcggcggcggcaaggccatgggctttggcaagtcccgcgcccgcctgctgaccgagaagaccggccgcgtcaccttcgaggacgtggcgggcatcgacgaggccaagcaggagctcgaggaaatcgtcgagttcctcaaagacccgcagaaattccagcgcttagggggcaagattcccaagggctgcctgctggtcggcccgcccggcacgggcaagaccctgctggcgcgcgccatcgcgggcgaggccaatgttccgttcttcaccatttcgggctcggacttcgtggagatgttcgtgggcgtcggcgcatcccgcgtgcgcgacatgttcgaacaaggtaagaaaaatgctccgtgcatcatcttcatcgacgaaatcgacgcggtcggccgtcatcgcggcgcaggtctgggcggcggcaatgatgagcgcgagcagacgctgaaccagttgctggtggagatggacggcttcgagtccaatgagggcgtcatcctcatcgccgccaccaaccgtcccgatgtgctggaccccgctttgctgcgtcccggccgtttcgaccggcaggtgacggtgcccaatcccgatatcctgggccgcgagaagatcatcaaggtccatatgcgcaaggtgccgctgtctcccgacgtggatgcgcgcatcatcgcgcgcggcacgcccggtttctcgggcgccgatctggccaatctggtcaacgaagcggctttgctggcggcgcgcgcgggcaagcgcgtggtgaccatggccgagttcgaggccgccaaggacaaggtgatgatgggggccgaacggcgctccatggtcatgagcgaggacgagaagaagcttaccgcctatcacgaggcgggccacgccctggtgatgatgcatgtgcccggtcacgagccgttgcacaaggtgaccatcattccgcgcggacgggccttgggcctgaccatgtcgctgcccgagcgcgaccgctattccctgtccttgaagcagatcaaggcgatgatcgccgcgttcttcggcggccgcgtggcggaagagatgatcttcggcctggatgcggtgaccacgggggcctccaacgacatccagcgcgccaccgatctgtcgcgcaagctggtgaccgaattcggcttctcggagaagctggggccgctgcgctacaacgacaaccaggaggaaatcttcctgggccattcggtgacccagcacaagaacgtgtcggaagccaccgccagtctgatcgattccgaggtgcggcgcttcgtcgaggaaggggaaaacaccgcccgcgacattctggccaagtaccgtgccgagttggaaatcatcgccaagggtctgctggaactggaaaccctgtcgcgcgacgatatcgacgccctgatccggggggagaccatcacccgtggcgatagcggcgactatcgccccaaggacccgccgcgccggtcctcggtgcccagttcggggcccggcggacgtcccggctatgatccggagccgcagcccggtgcctga

SEQ ID NO: 60648 - protein, 639 aa, Magnetospirillum magnetotacticum MS-1
MNFSKNLALWVIIAVLLVMLFNLFQASSPPRGPGQTSYSEFLSDVDRGSIADVTIQGSVVNGHFTDGRPFTTYMPQDVNVVDKLRAHNVRITAVPPSDDAPTLWSVLVSWFPMLLLIGVWVFFMRQMQGGGGKAMGFGKSRARLLTEKTGRVTFEDVAGIDEAKQELEEIVEFLKDPQKFQRLGGKIPKGCLLVGPPGTGKTLLARAIAGEANVPFFTISGSDFVEMFVGVGASRVRDMFEQGKKNAPCIIFIDEIDAVGRHRGAGLGGGNDEREQTLNQLLVEMDGFESNEGVILIAATNRPDVLDPALLRPGRFDRQVTVPNPDILGREKIIKVHMRKVPLSPDVDARIIARGTPGFSGADLANLVNEAALLAARAGKRVVTMAEFEAAKDKVMMGAERRSMVMSEDEKKLTAYHEAGHALVMMHVPGHEPLHKVTIIPRGRALGLTMSLPERDRYSLSLKQIKAMIAAFFGGRVAEEMIFGLDAVTTGASNDIQRATDLSRKLVTEFGFSEKLGPLRYNDNQEEIFLGHSVTQHKNVSEATASLIDSEVRRFVEEGENTARDILAKYRAELEIIAKGLLELETLSRDDIDALIRGETITRGDSGDYRPKDPPRRSSVPSSGPGGRPGYDPEPQPGA

SEQ ID NO: 60649 - DNA, 1986 bp, Crocosphaera watsonii WH 8501
  CDS (1)..(1986): transl_table=11
atgggactaaaaaataactctcgctttctacgtcttccccctctcggtagtttaatcctaatgggagttggggtcatcttttttatttatcttatctattactacaccaatcgttcaaatgacgaagttcccattgtaccctatagcgaattcctcgaaaaagttgaaaatgataaagtagccagagtcaagataggcaaccgtctgattctctatcaacttaagtctctatctctcctttccccttcccaagacttattacccctcccagaaagccccttagacgaatccaataactcaagtaaccctctccacggatcaaccgcttcaaccccctctcaaagacaaccttcgagtaatggaggaaaagttttaggcactattcccatcgatgatcccaatttacccatgttactccgagaaaaaggtgtcatgtttgaggcagccccaccccctaaaaacagttgggtgagtacccttttggcttgggttattccccctgtaatcttggtgttagccatgcaatttttactctatcgtaacgaagatcggggatcgttagcttttagtaaaagtaaagctaaagtctatgtagaaggagaagcagctagaatcacctttgcagatgtggctggggccgaagaagcaaaaaccgaattagttgaaattgtcgaattcctgaaaaaccccgatcgctttagtcgcatcggtgcaagaatacccaaaggtgtcttattagtaggtcccccaggaaccggtaaaaccctcctagctaaagcagtagcaggggaagccgatgttaccttttttagtatctccgcctcggaatttgtggaattattcgtgggaactggggccgctagagttagagatttattcgagcaggccaaaaaacaagccccctgtatcattttcatcgatgaattagatgctatcgggaaatctcgtagtggagggaacggtatcagtggtagcaacgatgaacgagaacaaaccttaaatcaactgttaaccgagatggatggctttgccgtaggggatgccaccgtcatagttttagccgctaccaaccgcccagaaagcctcgatgcagccctgttaagaccagggcgttttgaccgtcaagtattagttgatcgccccgatctgaccggaagattagctatcttagaaatatacgcccaacgggtagaaattgacccagatattaacctcaaagacatagctacccataccccagggtttgccggggccgacttagctaaccttgtcaatgaagccgccttattagcagcgagaaataaacgggaatatgtgacccaagcggactttaaagaagccatagaaagggttttggctggtttggagaagaaaagccgtgttttagccgatcaggaaaagaaaattgttgcttaccacgaagtcggccacgccttaataggggcagtcatgccggggggtggtaaagttgcgaagatttctattgtgccacgggggttatctgccttgggctataccttgaaaatgcccacggaagaccgttttttgatgagtgacagcgaatttcgtcaacaaattgctatgttattggggggaagggccgcagaagaaattgtctttggtagcgttactaatggagcctccgatgatttagaaagggctacagatatcgctgaacggatggtaacaacctatggtatgagtaaaatattaggacccttggcttacgacaaacgacaacagggtaatttcttaggtaataatggtattaacccccgtcgtttggtgagtgaagaaacagcaaaagctattgatgaagaggtgaaacaaattgttgattctggctatcaacaagctttatctattcttaatcataaccgtgatctcctagaaacaattgctcaacaattattaacaattgaagtaatagaaggagaagaattacaacaattacttaatcaagtagaggatatcactaaacagtga

SEQ ID NO: 60650 - protein, 661 aa, Crocosphaera watsonii WH 8501
MGLKNNSRFLRLPPLGSLILMGVGVIFFIYLIYYYTNRSNDEVPIVPYSEFLEKVENDKVARVKIGNRLILYQLKSLSLLSPSQDLLPLPESPLDESNNSSNPLHGSTASTPSQRQPSSNGGKVLGTIPIDDPNLPMLLREKGVMFEAAPPPKNSWVSTLLAWVIPPVILVLAMQFLLYRNEDRGSLAFSKSKAKVYVEGEAARITFADVAGAEEAKTELVEIVEFLKNPDRFSRIGARIPKGVLLVGPPGTGKTLLAKAVAGEADVTFFSISASEFVELFVGTGAARVRDLFEQAKKQAPCIIFIDELDAIGKSRSGGNGISGSNDEREQTLNQLLTEMDGFAVGDATVIVLAATNRPESLDAALLRPGRFDRQVLVDRPDLTGRLAILEIYAQRVEIDPDINLKDIATHTPGFAGADLANLVNEAALLAARNKREYVTQADFKEAIERVLAGLEKKSRVLADQEKKIVAYHEVGHALIGAVMPGGGKVAKISIVPRGLSALGYTLKMPTEDRFLMSDSEFRQQIAMLLGGRAAEEIVFGSVTNGASDDLERATDIAERMVTTYGMSKILGPLAYDKRQQGNFLGNNGINPRRLVSEETAKAIDEEVKQIVDSGYQQALSILNHNRDLLETIAQQLLTIEVIEGEELQQLLNQVEDITKQ

SEQ ID NO: 60651 - DNA, 2007 bp, Exiguobacterium sibiricum 255-15
  CDS (1)..(2007): transl_table=11
atgaaccgagcagtgaagaatacccttgtgtttggggtcatttttctagctttgatcttgtttctgcaatacttgcagagtccagtgaacaaaagcaaagaaatcaattacacacagtttgtcgagtcagttgaaaaaggtgatgtgaagacggcgacgttccaatatgagggacagacgtacaacgtcacaggtgaattacgtgaaaaagatacgacatatgaaacggtcgtaccggctgttgatacagagttgacggatttgtacacgcaattgcgcagtcaaaacgtcaagatggactttaaagcagcagaaacaaacggtggttggattgcgctattgacgacaatcgtgccattcatcatcatcttcatcctattcttcttcttgattaatcaagcacaaggtggcggcggcggcggtcgtgtcatgaacttcggtaaatcgaaggcgcgcctgtacgatacagaaaagaaaaagattacatttgacgacgtggcaggagcagacgaggagaaacaagaactcgtcgaagtcgttgaattcttgaaagatccacgcaagtttgcccgtctcggtgcccgtattccaaaaggtgtcctccttgtaggtcctccaggtacaggtaaaacgctgttggcacgtgccgcagctggtgaagccggcgtcccgttcttctcgatttcaggttctgacttcgttgagatgtttgtcggggtcggagcatcccgtgtccgtgacttgtttgaaaatgcgaagaaaaacgcaccatgtatcatcttcatcgatgaaatcgatgccgtcggtcgccaacgtggcgccggtctcggtggtggacatgatgagcgcgaacaaacattgaaccaacttctcgttgagatggatggattcagtgaaaacgaagggatcatcatgattgccgcaacgaaccgtgcggacatcctggaccctgcgttacttcgtccaggtcgttttgaccgtcaaattacggttgagcgtccggatgtcgtcggacgtgaagcggtccttaaagtacacgcacgcaacaagccgctcgatacaacggttgatttaaaagccattgcgcaacgtacaccgggattctcgggtgcggatcttgaaaacctcttgaacgaagcagcacttatcgcagcccgtacggaccgcgacaagatttcaatcgttgacttggaagaagcgatcgaccgtgtcatcgcaggacctgcgaagaagagtcggatcatttcaccaaaagagaaaaaaatcgtggcgtggcatgaagccggtcataccatcatcggtgtaacactcgatgatgcggatgaagtccataaagtaacaatcgttccccgcggaaatgctggcggttacgtcatcatgcttccaaaagaggaccgttacttcatgacaaaaccggaacttgaagacaaaatcaccggattactcggtggtcgtgtcgcggaagatatcgtcttcggtgaagtttctactggagcaagcaatgacttccagcgtgcgacaggtcttgcccgtaagatggtcatggaattcggaatgagtgaaaaactcggaccgcttcagtttggttccggtcaaggcggaaatgtcttcttaggacgtgacttccaaaacgaacagaactattcagatgcgattgcccatgaaatcgatatggaaattcaagcgatcatcaacaagtgttaccaaaaagcgaagacgatcttaacggagaaacgcgatcagcttgatttgattgcaacaacgttacttgaagtcgaaacactggatcaaaaacaaattcaccatctcttagagacaggcgaatacaaaaagcatgagcctgccgctattacagaaccaaaagcagaagagaaaacgccggaatcgacgacacctgtcatcgatcaaccgacagaatctccgacgcaacgcggctctgtcatcgatgaagggcaaaatgtcgatacggaaaatccagatcaaccacgtcgggatgatcaaatctga

SEQ ID NO: 60652 - protein, 668 aa, Exiguobacterium sibiricum 255-15
MNRAVKNTLVFGVIFLALILFLQYLQSPVNKSKEINYTQFVESVEKGDVKTATFQYEGQTYNVTGELREKDTTYETVVPAVDTELTDLYTQLRSQNVKMDFKAAETNGGWIALLTTIVPFIIIFILFFFLINQAQGGGGGGRVMNFGKSKARLYDTEKKKITFDDVAGADEEKQELVEVVEFLKDPRKFARLGARIPKGVLLVGPPGTGKTLLARAAAGEAGVPFFSISGSDFVEMFVGVGASRVRDLFENAKKNAPCIIFIDEIDAVGRQRGAGLGGGHDEREQTLNQLLVEMDGFSENEGIIMIAATNRADILDPALLRPGRFDRQITVERPDVVGREAVLKVHARNKPLDTTVDLKAIAQRTPGFSGADLENLLNEAALIAARTDRDKISIVDLEEAIDRVIAGPAKKSRIISPKEKKIVAWHEAGHTIIGVTLDDADEVHKVTIVPRGNAGGYVIMLPKEDRYFMTKPELEDKITGLLGGRVAEDIVFGEVSTGASNDFQRATGLARKMVMEFGMSEKLGPLQFGSGQGGNVFLGRDFQNEQNYSDAIAHEIDMEIQAIINKCYQKAKTILTEKRDQLDLIATTLLEVETLDQKQIHHLLETGEYKKHEPAAITEPKAEEKTPESTTPVIDQPTESPTQRGSVIDEGQNVDTENPDQPRRDDQI

SEQ ID NO: 60653 - DNA, 1917 bp, Sulfitobacter sp. EE-36
  CDS (1)..(1917): transl_table=11
ttgggtaatatgcgcaatctcgccttttgggttgtattgatgcttttggttttggcgctgttcaatctgttcagcggctcgactggcgggctgcaaagccgtgaaatcagctattccgaatttgtgacagctgtcgaagcaggggacgtgcgcaacgtcacgcttgatggtgaacaggtccgtttccgtcgtgccgatggcagtgactatgtcacgatccggcccgaagacgccgaggtcaccagcctgctgatgtccaaggacatccctgtgcgcgctgaaccccagcagcaatccggtttccagaccttcctgatgtcgctgttgcccatccttctgctgatcggtgtgtggatctatttcatgaaccgcatgcagggcggtggcaaaggcggggcgatggggttcggcaagtccaaggctaagatgctgaccgaaaaacacggtcgtgtgacgtttgacgacgtggcgggcatcgacgaggcaaaggaagagctggaagagatcgtcgaattcctgcgcaacccgcaaaagttcagccgtttgggcggcaagatccccaaaggcgcactgcttgagggccctcccggtaccggtaagaccctgctggcgcgggcgattgctggcgaggcgggtgtgccgttctttaccatttcgggctccgacttcgtcgagatgttcgtgggtgtgggtgccagccgcgtgcgcgacatgttcgaacaggccaagaaaaatgcgccctgcatcgtcttcatcgatgagatcgacgccgtgggccggtcccgtggggcgggctacggtggtggcaacgacgagcgtgaacagaccttgaaccaactgctggtcgagatggacggctttgaggcgaacgaaggcgtgatcatcatcgccgcgaccaaccgcaaagacgtgctggaccctgccttgctgcgtccgggccgctttgaccgtcaggtcaccgtgggcaatcccgacatcaagggccgcgagaaaatcctcggtgtgcatgcgcgcaagacgccgcttggccctgacgtagacctgcgcattatcgcgcgcggcacgcccggtttctcgggtgcggatctggcgaacctcgtgaacgaggccgcgctgaccgccgcacgcgtgggccgtcgctttgtcgcgatgatggatttcgaggccgcgaaagacaagatcatgatgggtgccgagcgccggtcgatggtgttgacgcaggaccagaaggaaaagaccgcctaccacgaagccggtcacgccatcgtcgggatcaagctgccgaaatgcgaccctgtctataaggccacgatcattccgcgcggcggcgccttgggtatggtgatgagcctgcccgaaatggacaaactgcagatgttcaaggacgaagccgagcaaaagatcgccatgacgatggcgggcaaagcggctgagatcttcaaatatggcgctgaaaccgtgtcgtcgggcccgatgggcgatatcatgcaggccagccagttggcgcgtggcatggtgatgcgcatgggcatgtccgacaaggtcgggaacatcgactattcggaagcggcggctggttaccaagccaacggcggcgcgggcgggttcagcgtttctgcggccacgaaagagctgatcgaatccgaagtgaaacgcatcatcgacgaaggctacgaccgcgcctataaaatgatcaccgatcacgaggaagaattcgaacgtttggcccaaggtctgctggaatacgagaccctcaccggcgaggagatcaagcgcgtcatggaaggcaaaccgccacaagacccggacggcgatgacaccagcggcatggacaaaccaagcctgaccgcgatccccaaggccaaaggcaagaagacgcctccgccaagcgggatggagcctgagccaagcgtctga

SEQ ID NO: 60654 - protein, 638 aa, Sulfitobacter sp. EE-36
MGNMRNLAFWVVLMLLVLALFNLFSGSTGGLQSREISYSEFVTAVEAGDVRNVTLDGEQVRFRRADGSDYVTIRPEDAEVTSLLMSKDIPVRAEPQQQSGFQTFLMSLLPILLLIGVWIYFMNRMQGGGKGGAMGFGKSKAKMLTEKHGRVTFDDVAGIDEAKEELEEIVEFLRNPQKFSRLGGKIPKGALLEGPPGTGKTLLARAIAGEAGVPFFTISGSDFVEMFVGVGASRVRDMFEQAKKNAPCIVFIDEIDAVGRSRGAGYGGGNDEREQTLNQLLVEMDGFEANEGVIIIAATNRKDVLDPALLRPGRFDRQVTVGNPDIKGREKILGVHARKTPLGPDVDLRIIARGTPGFSGADLANLVNEAALTAARVGRRFVAMMDFEAAKDKIMMGAERRSMVLTQDQKEKTAYHEAGHAIVGIKLPKCDPVYKATIIPRGGALGMVMSLPEMDKLQMFKDEAEQKIAMTMAGKAAEIFKYGAETVSSGPMGDIMQASQLARGMVMRMGMSDKVGNIDYSEAAAGYQANGGAGGFSVSAATKELIESEVKRIIDEGYDRAYKMITDHEEEFERLAQGLLEYETLTGEEIKRVMEGKPPQDPDGDDTSGMDKPSLTAIPKAKGKKTPPPSGMEPEPSV

SEQ ID NO: 60655 - DNA, 1920 bp, Roseovarius nubinhibens ISM
  CDS (1)..(1920): transl_table=11
ttgggcaatgcacgcacgatcgccttctggctggttctgttcctgctggtagtggcgctgttcaacctgttcagcggtaccggaagtacacttcagagcaagcctctggcctattccgagtttgtctcggcggtcaatgaaggcaccgttagcgaagtcacgctcgatggtgagaccgtgcgctttcaggataatgctggcgtcaactacatgacgatcaagccggaagatgccgaagtgaccaagcttctcatcgaaaagggcatccccgttcaggccgaaagccaggaacaatccgggttccaggccttccttctgacgcttgcccccttccttctgctgatcgcggtctgggtctatttcatgaaccggatgcagggcggcggcaaaggcggcgcgatgggctttggcaagtccaaggccaagatgctcaccgagaaacatggccgcgtgacctttgacgatgtggccgggatcgatgaggccaaggaagagctcgaagagatcgtcgagtttctccgcaatccgcagaaattcagccgtcttggcgggcaaatccccaaaggcgcgctgctggtgggccctccgggcaccggtaagacgcttctggcgcgggcgattgcgggcgaggcgggtgtgcccttcttcaccatctcgggctctgactttgtcgagatgttcgtcggtgtcggcgcgagccgtgtccgcgacatgttcgaacaggccaagaagaacgcgccttgcatcgttttcatcgatgagatcgacgccgtggggcgccatcgtggcgcgggctatggcggcggcaatgacgagcgtgaacagacgctcaaccagctgctggtcgaaatggacgggttcgaggccaatgaaggcgtgatcatcatcgcggccaccaaccgcaaggatgtgctggacccggcgctgctgcgtcccggccggtttgaccgtcaggtcaccgtgcccaatcccgacatcaagggtcgcgagaagatcctcggcgtgcatgcccgcaagacgccgctcggccccgatgtcgatctgcgcatcatcgcgcgcggcacgcccggcttctcgggcgcggatctggccaacctcgtaaacgaggcggcgctcatggcggcgcggatcgggcggcggtttgtcaccatggacgatttcgagatggccaaggacaaggtcatgatgggggccgaacggcggtcgatggttctcacgcaggaccagaaggaaaagaccgcttatcacgaggctggtcatgccatcgtcggtctgaaactgccgaaatgcgatccggtctataaggcgacgatcatcccgcgcggcggcgctctgggtatggtgatgagcctgccggagatcgacaagctgcagatgttcaaagacgagctgcatcagcgcattgctatgaccatggcgggcaaggcggccgagattttcaaatacggtgccgacagcgtgtcgtcgggcccggtgggcgatattcaacaggcgagccagctcgcccgggccatggtgctgcgctatggcatgtcggacaaggtcggcaatgtcgattatgccgaagcccatgaaggttatagcggcaacactgccggtctctcggtttcggcccataccaaggagctgatcgagcaagaggtgaagaaattcatcgatgacggctatgacattgcgttcaagatcatctcggaaaacgaggaagagttcgagcgtctggcgcagggccttctcgaatacgagacgctgaccggcgaagagatcaagcgcgtgatgcgcggggagccgccgcatctcagcgatgacgaggatgacggatcggacgaaggcaatgcgccctcggtcaccgcgatcccgaaaaccaagccgaaaaccccgcgtggcggtgacggcggtctcgagcccgagccctctgcgtga

SEQ ID NO: 60656 - protein, 639 aa, Roseovarius nubinhibens ISM
MGNARTIAFWLVLFLLVVALFNLFSGTGSTLQSKPLAYSEFVSAVNEGTVSEVTLDGETVRFQDNAGVNYMTIKPEDAEVTKLLIEKGIPVQAESQEQSGFQAFLLTLAPFLLLIAVWVYFMNRMQGGGKGGAMGFGKSKAKMLTEKHGRVTFDDVAGIDEAKEELEEIVEFLRNPQKFSRLGGQIPKGALLVGPPGTGKTLLARAIAGEAGVPFFTISGSDFVEMFVGVGASRVRDMFEQAKKNAPCIVFIDEIDAVGRHRGAGYGGGNDEREQTLNQLLVEMDGFEANEGVIIIAATNRKDVLDPALLRPGRFDRQVTVPNPDIKGREKILGVHARKTPLGPDVDLRIIARGTPGFSGADLANLVNEAALMAARIGRRFVTMDDFEMAKDKVMMGAERRSMVLTQDQKEKTAYHEAGHAIVGLKLPKCDPVYKATIIPRGGALGMVMSLPEIDKLQMFKDELHQRIAMTMAGKAAEIFKYGADSVSSGPVGDIQQASQLARAMVLRYGMSDKVGNVDYAEAHEGYSGNTAGLSVSAHTKELIEQEVKKFIDDGYDIAFKIISENEEEFERLAQGLLEYETLTGEEIKRVMRGEPPHLSDDEDDGSDEGNAPSVTAIPKTKPKTPRGGDGGLEPEPSA

SEQ ID NO: 60657 - DNA, 1920 bp, Oceanicola batsensis HTCC2597
  CDS (1)..(1920): transl_table=11
ttgggcaacgcgcgtcaattcgccttttgggtcgttctgcttctgctgatcgtggccctgttcaatctgttcagcggatcgggtggtaccctccaaagccgcgagatcgcctattccgacttcgtcaccgcagtcgaaagcggcaatgtcagttcggtcacgctcgacggtgagcaggtgcgttatcgcggcacggacggtcaggattacgtgaccatcaagcccgaggacgcgacgctgacggacacgctgatccagaacgacatccccgtgaccgcgaaaagccaggaagaatccgggttccagtccttcctcgtctcgcttctgccgatccttctgctgatcggcgtgtggatctatttcatgaaccgcatgcagggcggcggcaagggcggcgcgatgggctttggcaagtccaaggccaagatgctgaccgaaaagcacggccgcgtgacctttgacgacgttgcgggcatcgacgaagccaaggaagagctggaggagatcgtggaattcctgcgcaacccgcagaagttctcgcgccttggcggcaagatccccaagggtgcgctgctggtcggccctccgggcaccggtaagacgctgctcgcgcgcgccatcgcgggcgaggcgggcgtgccgttcttcaccatctccggctcggacttcgtcgagatgttcgtgggcgtcggcgcctcccgcgtgcgcgacatgttcgagcaggccaagaagaacgcgccctgtatcgtcttcatcgacgagatcgacgccgtcggccgtcaccgtggcgcgggttatggcggcggcaacgacgaacgcgaacagacgctgaaccagctgctggtcgagatggacggctttgaatcgaacgagggcgtcatcatcctcgccgccaccaaccgccgcgacgtgctggaccccgcgctgctgcgtccgggccggttcgaccgtcaggtcaccgtgcccaaccccgacatcaaggggcgcgagaagatccttggcgtccatgcccgcaagacccccctcggcccggacgtcgatctgcgcatcatcgcgcgcggcacgcccggtttctcgggcgccgatctcgccaacctcgtgaacgaggcggcgctgatggccgcccgtgtcggccgccgcttcgtcaccatggtcgatttcgagaacgccaaggacaaggtcatgatgggggccgaacgacgctccatggtcctgaccccagaccagaaggaaaagaccgcgtatcacgaggccggtcacgccgtggtgggcctgaccctgcccaagtgcgatccggtctacaaggcgacgatcattccgcgcggcggcgcgcttggcatggtggtttccctgcccgagatcgaccgtctgaactggcacaagtcggaatgcgaacagaagctggcgatgaccatggcgggcaaggccgccgagatcatcaagtacggcgagggcgacgtctcgaacgggcccgcgggcgacatccagcaggcctcggccctggcgcgcgccatggtcctgaggtggggcatgtccgacaaggtgggcaatgtcgattacgaacaggcgcacgaaggctacatgggcaacggcgccggcggcttctcggtctcggctcataccaaggagctgatcgaggaagaagtgaagcgcatgatcgaggacgcctacaaccacgcctacaagatcctgaccgaacggcaggaagagtgggagcggctggcccaggggcttctggaatacgagacgctgaccggcgacgagatcaagcgggtcatgaacggcgagccgccgaattccgaagacgaggacgaaggctcggacgagggcagcgcgccctcggtcaccgcgatccccaagaccaagcccaagcccaagccgggcgggtccggcgggctcgagcccgaaccgacagcctga

SEQ ID NO: 60658 - protein, 639 aa, Oceanicola batsensis HTCC2597
MGNARQFAFWVVLLLLIVALFNLFSGSGGTLQSREIAYSDFVTAVESGNVSSVTLDGEQVRYRGTDGQDYVTIKPEDATLTDTLIQNDIPVTAKSQEESGFQSFLVSLLPILLLIGVWIYFMNRMQGGGKGGAMGFGKSKAKMLTEKHGRVTFDDVAGIDEAKEELEEIVEFLRNPQKFSRLGGKIPKGALLVGPPGTGKTLLARAIAGEAGVPFFTISGSDFVEMFVGVGASRVRDMFEQAKKNAPCIVFIDEIDAVGRHRGAGYGGGNDEREQTLNQLLVEMDGFESNEGVIILAATNRRDVLDPALLRPGRFDRQVTVPNPDIKGREKILGVHARKTPLGPDVDLRIIARGTPGFSGADLANLVNEAALMAARVGRRFVTMVDFENAKDKVMMGAERRSMVLTPDQKEKTAYHEAGHAVVGLTLPKCDPVYKATIIPRGGALGMVVSLPEIDRLNWHKSECEQKLAMTMAGKAAEIIKYGEGDVSNGPAGDIQQASALARAMVLRWGMSDKVGNVDYEQAHEGYMGNGAGGFSVSAHTKELIEEEVKRMIEDAYNHAYKILTERQEEWERLAQGLLEYETLTGDEIKRVMNGEPPNSEDEDEGSDEGSAPSVTAIPKTKPKPKPGGSGGLEPEPTA

SEQ ID NO: 60659 - DNA, 1848 bp, Prochlorococcus marinus str. MIT 9211
  CDS (1)..(1848): transl_table=11
ttgaacaaacgctggagaaacatagccctctacttcctaatggtagtagtagtaatttttgttgggactgccttattagataagcccacagaaactcgtgattcaagaactttgcgatacagcgactttattgaagcaatccaagaggatcaaatcagcagagtcatgctctctccagataatggaactgcacaaatagttgagaatgacggttctcgtgctgaagtaacccttgctcctgatcaagacctgctgaaactgcttactgaacacaatgttgatatcgctgttcagccaacacgtcaagctggtccatggcagcaagctgcaagtagccttattttcccaataattcttttaggtggattattttttctgtttagacgagctcaagggggtgcaggaggcaatcctgctatgagttttggtaagagcaaggctagattacaaatggaaccatcaactcaagtaacttttagagatgttgctggtattgaaggagcgaaattagaacttgctgaagtagtcgactttttaaaaagtcccgaccgatttacagcagtgggagccaagattcctaagggtgtacttttggttggcccaccaggtacagggaaaactcttttagcaaaagcagtcgctggagaagcagccgtgcctttcttctcaatttcaggctcagagtttgtagaaatgtttgttggagtaggcgctagcagagtaagagatttatttgaacaagctaaaaaaaatgccccctgcatagtctttattgatgagattgatgctgttggacgccaaagaggtgctgggcttggtggtgggaatgatgaacgggagcaaacccttaatcaattactaactgaaatggatggatttgaaggtaatacaggaataatcatagttgcagccactaatagaccagatgttcttgactcagctcttatgagacctggtcgttttgacagacaagttgttgtcgaccgtcctgactattcaggtcgtctgcaaatactaaaagtacatgcccgagaaaaaacgctatctaaagcagtagatctcgaccaagtagcaaggaggacccctggctttactggagcagatcttgcaaatttactaaatgaagccgcaattctggctgctagaagagagctaagtgaggttagcaatgatgaagtaagtgatgctattgaacgtgttatggcaggccctgagaagaaagatcgtgtaatgagtgaccgtagaaaaaggcttgtcgcttatcacgaagcgggacatgccttagttggggcactgatgcctgactatgatccagtccagaaaatttctattattcctagaggccaagcaggaggcttgactttctttaccccaagcgaagagcgcatggagtcaggtctgtactcacggtcttatttacataatcaaatggctgtagcacttggtggaagagttgccgaggaaatagtctatggcgaagatgaagtaactactggagcctctaacgatcttaaacaggttgctcaagtggccagacaaatggttactcgatttggaatgagcgacaaactagggcctgttgcattgggacgatcccaaggaggaatgtttcttggccgtgatattgcctcggaaagagatttttctgaagatacagcagcaacgatagacgaagaagtctctcaattagttgatatggcatacaaaagagccacaaaagttcttactaataaccgacaagtgcttgatcaacttgccgaaatgcttgttgagaaagaaacagttaattcagaagatttacaggacttgttaattcaaagtcaagtagaagttgcagagtatgcataa

SEQ ID NO: 60660 - protein, 615 aa, Prochlorococcus marinus str. MIT 9211
MNKRWRNIALYFLMVVVVIFVGTALLDKPTETRDSRTLRYSDFIEAIQEDQISRVMLSPDNGTAQIVENDGSRAEVTLAPDQDLLKLLTEHNVDIAVQPTRQAGPWQQAASSLIFPIILLGGLFFLFRRAQGGAGGNPAMSFGKSKARLQMEPSTQVTFRDVAGIEGAKLELAEVVDFLKSPDRFTAVGAKIPKGVLLVGPPGTGKTLLAKAVAGEAAVPFFSISGSEFVEMFVGVGASRVRDLFEQAKKNAPCIVFIDEIDAVGRQRGAGLGGGNDEREQTLNQLLTEMDGFEGNTGIIIVAATNRPDVLDSALMRPGRFDRQVVVDRPDYSGRLQILKVHAREKTLSKAVDLDQVARRTPGFTGADLANLLNEAAILAARRELSEVSNDEVSDAIERVMAGPEKKDRVMSDRRKRLVAYHEAGHALVGALMPDYDPVQKISIIPRGQAGGLTFFTPSEERMESGLYSRSYLHNQMAVALGGRVAEEIVYGEDEVTTGASNDLKQVAQVARQMVTRFGMSDKLGPVALGRSQGGMFLGRDIASERDFSEDTAATIDEEVSQLVDMAYKRATKVLTNNRQVLDQLAEMLVEKETVNSEDLQDLLIQSQVEVAEYA

SEQ ID NO: 60661 - DNA, 1845 bp, Synechococcus sp. WH 5701
  CDS (1)..(1845): transl_table=11
ttgaaaaaacgctggcgcaacgcggggctctatgtgctcctggcgatcgtggtgattgcggtgggctccgctttcctgggacgccctgatcaggccaatgcccccagaagcctccgctacagcgatttcgtcgaggcggttcaggagaatcaggtgtcgcgggtgctgatctcccccgaccgcggtaccgcccaggtcgttgagaacgacggcaaccgggccgtggtcaacctcgcccccgacaaggacctgctcaagctgctcaccgagcacaacgtcgacatcgcggttcagcccaaccgtgagccggccgcctggcagcaggccgtgggcagtctgctcttcccgctgttgctcctcggaggcctgttcttcctgttgcgacgcgcccaggggggcggcggcaaccccgccatgagcttcggcaagagcaaggcccgccttcagatggaaccccagacccaggtcacctttggtgatgtggccggcatcgagggcgccaagctcgagctcactgaagtggtcgacttcctcaagaatcccgatcgtttcacggccgtaggcgccaagattcccaaaggcgtgctgctggtgggccctcccggcaccggcaagacccttctggccaaggcggtggccggcgaagctggtgtgcccttcttctccatctccggctcggagttcgtggagatgttcgtgggcgtgggcgccagccgcgtgcgtgatctgttcgagcaggccaagaagagtgctccctgcatcgtcttcatcgatgagatcgatgctgtcggccggcagcggggtgcaggccttggaggcggtaacgacgagcgcgagcagaccctcaaccagctgctcaccgagatggacggcttcgagggcaacaccggcatcatcatcgtggcggccaccaaccgtccggatgtgctggattcggccctgctgcggccgggccgcttcgatcgccaggtggtggtcgaccgtcctgactacgccggccgtctgcagatcctcggggtccacgcccgcggcaagaccctcgccaaagatgtcgatctcgacaaggtggcgcgccgtacccccggcttcaccggcgccgatctggccaacctgctcaatgaagcggcgatcctggcggcccgccgtcagctcaccgaaatttcgatggatgaggtcaatgacgccatcgagcgcgtcatggccggtcctgagaagaaggaccgcgtgatgagcgagaagcgcaagcggctcgtggcgtatcacgaatcgggccatgccctggtgggtgccctgatgcccgactacgacccggtgcagaagatcagcatcattccccgcggccaggccggcggcctcaccttcttcacccccagtgaagagcggatggagtcgggcctctattcccgcgcctatctgcagaaccagatggccgtggccctcggtggccgcgtcgctgaggagatcgtctacggcgaagacgaagtcaccaccggagcctccaacgacctccagcaggtggcccgtgtcgcccgccagatggtcacccgcttcggcatgagcgacaagctgggccccgtggctctcggccgtgcccagggagggatgttcctcggccgcgacatcgccgctgagcgcgatttctccgaagacaccgccgccaccatcgacgaggaagtgggtctgctggtggctgaggcctaccgccgtgccaagcgtgtgctgatcgaaaaccgctcggttctcgatgaactggccgagatgctggtggagaaggaaaccgtcgacgccgaggagcttcaggagctcctgatccgcagcgatgtgcgggtcgctgaatacgtctga

SEQ ID NO: 60662 - protein, 614 aa, Synechococcus sp. WH 5701
MKKRWRNAGLYVLLAIVVIAVGSAFLGRPDQANAPRSLRYSDFVEAVQENQVSRVLISPDRGTAQVVENDGNRAVVNLAPDKDLLKLLTEHNVDIAVQPNREPAAWQQAVGSLLFPLLLLGGLFFLLRRAQGGGGNPAMSFGKSKARLQMEPQTQVTFGDVAGIEGAKLELTEVVDFLKNPDRFTAVGAKIPKGVLLVGPPGTGKTLLAKAVAGEAGVPFFSISGSEFVEMFVGVGASRVRDLFEQAKKSAPCIVFIDEIDAVGRQRGAGLGGGNDEREQTLNQLLTEMDGFEGNTGIIIVAATNRPDVLDSALLRPGRFDRQVVVDRPDYAGRLQILGVHARGKTLAKDVDLDKVARRTPGFTGADLANLLNEAAILAARRQLTEISMDEVNDAIERVMAGPEKKDRVMSEKRKRLVAYHESGHALVGALMPDYDPVQKISIIPRGQAGGLTFFTPSEERMESGLYSRAYLQNQMAVALGGRVAEEIVYGEDEVTTGASNDLQQVARVARQMVTRFGMSDKLGPVALGRAQGGMFLGRDIAAERDFSEDTAATIDEEVGLLVAEAYRRAKRVLIENRSVLDELAEMLVEKETVDAEELQELLIRSDVRVAEYV

SEQ ID NO: 60663 - DNA, 1851 bp, Synechococcus sp. WH 7805
  CDS (1)..(1851): transl_table=11
ttgaacaagcgatggcgcaacgtagggctttatgtcctgttagtagtcgtggtgatcgtggtcggaacggctttccttgaccgtccagatcccgcggcgacggctcaaaacctccgttacagcgatttcgttgagcaggttcaggaggatcaggtcagtcgagttctgctctctcccgatcgcggaacagcacaggttgtggcaactgatggccgtcgatctgaagtgaatctggctccagacaaggatctgctcaagatgctcacggatcacaacgtggacatcgctgttcagccgtccaggcaaccgggagcctggcaacaggctgcttcgagcttgatctttccggttcttctgcttggaggtcttttctttctcttccgccgcgctcaatccggtggtggcggtgggaacccggccatgaatttcggcaaaagcaaggcccgagttcaaatggaaccctccactcagatcacgtttggagatgtggctggaatcgagggagccaagcttgaattgactgaggtggtggatttcctcaagaaccctgatcgctttactgcggttggcgccaagattccgaagggtgtcctgctcgttggccctcccggaactggcaaaacgctgctcgccaaggctgtggctggtgaagctggcgttccgttcttctccatctccggttcggagtttgtggaaatgtttgtgggtgtcggtgccagccgcgttcgtgatctgttcgagcaggccaagaaaaatgccccttgcatcgtcttcattgatgaaatcgatgcggttggccgccagcgtggcgctggtctcggtggaggtaacgatgagcgcgaacagacgctgaatcagctgctcaccgaaatggatggtttcgagggcaacacggggatcatcatcgtcgctgccacgaaccgtcccgatgtgctggacgcagcactgatgcgtccaggccgtttcgaccggcaggttgtcgtggaccgtcctgactacgccggtcgtctgcagattctcaacgtgcatgcccgaggtaagaccctctcgaaggacgtcgatctcgacaaagtggcgcgccgcacccctggctacaccggtgctgatctttccaatcttctgaatgaggctgcaattcttgcggcccgccgcgatctcagtgaggtgagtaacgatgaaatcagcgatgccattgaacgggtgatggccggtcctgagaaaaaagaccgtgtaatgagcgaacgtcgcaagcgtctggtggcttaccacgaagctggtcacgccctggttggagcgctgatgcccgattacgaccctgttcagaagatttcgatcattccccgaggcaatgctggtggactgacgttcttcacccccagcgaggaaaggatggagtcaggtctgtattcacgcacctacctccaaaatcagatggccgtggcactcggtggtcgggtggccgaggaaatcgtctatggggaggacgaggtcacaactggagcctccaacgacctccagcaggtggctcaggttgcccgccaaatggtgacccgtttcggcatgagtgacaaactcggtccggtcgctctgggccgatcccagggtgggatgttcctgggtcgggacatcgccgctgagcgtgatttttctgaggacactgctgccacgatcgatgaagaggtgtctgatctggtcgatgtcgcttacaagcgcgcgaccaaggtgctcgtcagcaatcggagtgttctcgacgagatcgcagagatgcttgtggagcaggaaactgttgatgcagaagaattgcaagagcttctgatccgcagtgacgtccgggttgccgaatacgtctga

SEQ ID NO: 60664 - protein, 616 aa, Synechococcus sp. WH 7805
MNKRWRNVGLYVLLVVVVIVVGTAFLDRPDPAATAQNLRYSDFVEQVQEDQVSRVLLSPDRGTAQVVATDGRRSEVNLAPDKDLLKMLTDHNVDIAVQPSRQPGAWQQAASSLIFPVLLLGGLFFLFRRAQSGGGGGNPAMNFGKSKARVQMEPSTQITFGDVAGIEGAKLELTEVVDFLKNPDRFTAVGAKIPKGVLLVGPPGTGKTLLAKAVAGEAGVPFFSISGSEFVEMFVGVGASRVRDLFEQAKKNAPCIVFIDEIDAVGRQRGAGLGGGNDEREQTLNQLLTEMDGFEGNTGIIIVAATNRPDVLDAALMRPGRFDRQVVVDRPDYAGRLQILNVHARGKTLSKDVDLDKVARRTPGYTGADLSNLLNEAAILAARRDLSEVSNDEISDAIERVMAGPEKKDRVMSERRKRLVAYHEAGHALVGALMPDYDPVQKISIIPRGNAGGLTFFTPSEERMESGLYSRTYLQNQMAVALGGRVAEEIVYGEDEVTTGASNDLQQVAQVARQMVTRFGMSDKLGPVALGRSQGGMFLGRDIAAERDFSEDTAATIDEEVSDLVDVAYKRATKVLVSNRSVLDEIAEMLVEQETVDAEELQELLIRSDVRVAEYV

SEQ ID NO: 60665 - DNA, 1896 bp, Pseudoalteromonas tunicata D2
  CDS (1)..(1896): transl_table=11
atgtcggtattccagagctttaatccaagcgatcatgcagatcgtaatacaagttactcgcaatttattaacgatgtgcgtagcggcgcagtccgtgaagttagaatggaccaaggttcaggtgcggttaacggcattaaaaatagcggtgagcgtttcacaacagtcatgccaatgtacgatggcgacttaatgaatgacttattaaaaaatggtgttaatgttgttggtcaaccaccagaagaacaatccatcttagcaacaattttcatctcttggttcccaatgttattgcttatcggtgtgtggatattcttcatgcgtcaaatgcaaggcggcggcggtaagggcgcaatgtcatttggcaagagtaaagcgcgcttgatgggtgaagaccaagtcaaaacaacctttgcagatgttgccggttgtgatgaagccaaagaagacgtaactgaattagtcgattttttacgtgacccgtctaaattccaaaagttaggtggtagtattccgaagggcgtactaatggtaggcccaccgggtacaggtaaaacattacttgcaaaagctgttgctggtgaagcaaaagtacctttctttactatttctggttctgatttcgtagaaatgtttgttggtgtgggtgcatcacgtgttcgtgacatgtttgagcaggctaaaaaagctgcgccttgtatcatctttatcgatgaaattgatgccgtaggtcgccaacgtggtgctggtatgggcggtggtcatgatgagcgtgagcaaacattaaaccaaatgctagttgaaatggatggttttgaaggtaatgagggcataattgttattgccgcaaccaacagacctgatgttttagaccctgcgctacttcgtccaggtcgttttgaccgtcaagttgttgttggtttacctgatatccgtggtcgtgagcaaattcttaaagtgcacatgcgtaaagtaccattgtctgacgatgttaaagcatctgttattgcccgtggtacacctggtttctcaggtgctgatttagcaaacttagttaatgaagctgcactttatgctgctcgtggtaacaaacgtgttgtcagcatggccgagtttgacgcagcaaaagataaaattatgatgggcgctgaacgtaagtccatggtaatgagtgaacaagagaaagaaatgactgcttatcatgaagcgggccatgcaattgtaggtcgccttgtacctgaacatgatccggtttataaagtgtcaattattcctcgtggtcgtgcgttaggtgtgacaatgtacttgcctgagcaagacagagttagtcattcaaagcagcatttagaatcaatgatttcaagcctttatggcggacgaattgctgaacaactgatttatggctttgaaaaagtaacgacaggtgcgagcaacgatattgaacgcgctactgaaatctctcgtaaaatggttacgcaatggggtttaagtgaaaagttaggtccactgctttatgctgaagaagaaggtgaaattttcatgggacgcagttcagcccgtgcgaaaagtatgtcgaatgaaacagcaaaagtgattgatgcagaagtacgagacctatctgatcgtaactatcagcgcgctgagcagatattaaaagataatattgatattttgcatagcatgaaagatgcgctgatgaagtacgaaaccattgatgcaaaacaaattgatgatttaatggctcgtcgtgatgttcgtccaccaacggatgcgcacgataaccactacaagcaaaaagatgaagtaaagtctgaagataaacctgaaaaagaggttgaaacgccagacgttgttgagcaaaagccaacatcaaagcttgatgatcaagagcaataa

SEQ ID NO: 60666 - protein, 631 aa, Pseudoalteromonas tunicata D2
MSVFQSFNPSDHADRNTSYSQFINDVRSGAVREVRMDQGSGAVNGIKNSGERFTTVMPMYDGDLMNDLLKNGVNVVGQPPEEQSILATIFISWFPMLLLIGVWIFFMRQMQGGGGKGAMSFGKSKARLMGEDQVKTTFADVAGCDEAKEDVTELVDFLRDPSKFQKLGGSIPKGVLMVGPPGTGKTLLAKAVAGEAKVPFFTISGSDFVEMFVGVGASRVRDMFEQAKKAAPCIIFIDEIDAVGRQRGAGMGGGHDEREQTLNQMLVEMDGFEGNEGIIVIAATNRPDVLDPALLRPGRFDRQVVVGLPDIRGREQILKVHMRKVPLSDDVKASVIARGTPGFSGADLANLVNEAALYAARGNKRVVSMAEFDAAKDKIMMGAERKSMVMSEQEKEMTAYHEAGHAIVGRLVPEHDPVYKVSIIPRGRALGVTMYLPEQDRVSHSKQHLESMISSLYGGRIAEQLIYGFEKVTTGASNDIERATEISRKMVTQWGLSEKLGPLLYAEEEGEIFMGRSSARAKSMSNETAKVIDAEVRDLSDRNYQRAEQILKDNIDILHSMKDALMKYETIDAKQIDDLMARRDVRPPTDAHDNHYKQKDEVKSEDKPEKEVETPDVVEQKPTSKLDDQEQ

SEQ ID NO: 60667 - DNA, 1956 bp, Photobacterium sp. SKA34
  CDS (1)..(1956): transl_table=11
atggcaaaaaacttgattttatggttagtcattgccgttgttcttatgtctgtattccaaagttttggaactaacagtagtaaagcaagtggtcaagtagactatacaacatttgtccgtcaaatcggtcaggatcagataaaggaagtgcgattcaatgatcgtgaaatcactgtaaccaaacgtgataatgcgagctatgtaacatacttacctgtcgctaatgatcctaagctgttagacgatttaattaacgctaacgtagctgttgcaggtacaccacctgaagagcctagcctactggcttcaatcttcatttcgtggttcccaatgcttctattaattggtgtttggatattctttatgcgtcagatgcagggcggtggtggcaaaggcgccatgtcgttcggtaaatctaaagcgcgtatgatgagcgaagaccaaatcaaaacaacgttcgccgatgtggctggttgtgatgaagcgaaagaagacgttaaagaactggttgattacttacgtgatccaagccgtttccaaaagctaggtggtaaaatcccaacaggtgtgttgatggttggtcctcctggtacaggtaaaacgttacttgcaaaagcgattgcaggtgaagcgaaagtaccgttctttactatttctggttctgactttgttgagatgtttgttggtgttggtgcatctcgtgtgcgtgacatgtttgagcaagcaaaaaaggctgcaccttgtatcatctttatcgatgaaatcgatgcggtaggtcgtcaacgtggtgctggtgttggtggtggtcacgatgagcgtgagcaaacacttaaccagatgctcgttgagatggatggctttgaaggcaatgagggtattatcgttattgctgcaacgaaccgtcctgatgtactagatccagcattacttcgtcctggtcgttttgaccgtcaagtagtggtaggtcttcctgatgtacgtggccgtgagcagatccttaaagttcacatgcgtaaagtaccactagatggtgatgtaaatccgtcattgattgcacgtggtacaccaggtttctctggtgctgatttagcaaaccttgttaacgaagcggcattatttgctgcccgtggtaataagcgcactgtttcgatggttgagttcgaattagcgaaagataagatcatgatgggcgcagagcgtaaatcaatggttatgtctgaagagcaaaaggaatcaacagcgtatcacgaagcaggtcacgcaattattggtcgtttagtaccggatcatgatcctgtttataaagtatcaattattccacgtggtcgtgcgctaggtgtaacgatgtacttacccgagcaagatcgtgtaagtcactctcgtgagttcttggagtcaatgatttcaagtctttacggtggtcgtttagctgaagaattgatttacggcgtagataaagtatcaacgggtgcatcaaatgacatcgaacgcgcaactgatattgcacgtaagatggtgactcagtggggcttctctgagaagttaggtccattactttatgctgaagatgaaggtgaagtattccttggtcgttcagttacacaaagtaagcatatgtctgatgacacagcaaagctgattgatactgaagttcgcactttaattgaccgtaactatcaacgtgctcgtcaaattctagctgataatatggatatcatgcatgcaatgaaagatgcattgatgaaatatgaaactattgatgctggtcagattgatgacttgatggaacgtaaatcagaaatccgtgcaccgaaaggctggtcggataatgacgatacaatgaaaccatcgagcaaagaagcacctgaaactgaattagcacctgatgagccaattggcgatggtattgatgcgttgacgaaagaagacgataccgatacaaaacctcaggcttaa

SEQ ID NO: 60668 - protein, 651 aa, Photobacterium sp. SKA34
MAKNLILWLVIAVVLMSVFQSFGTNSSKASGQVDYTTFVRQIGQDQIKEVRFNDREITVTKRDNASYVTYLPVANDPKLLDDLINANVAVAGTPPEEPSLLASIFISWFPMLLLIGVWIFFMRQMQGGGGKGAMSFGKSKARMMSEDQIKTTFADVAGCDEAKEDVKELVDYLRDPSRFQKLGGKIPTGVLMVGPPGTGKTLLAKAIAGEAKVPFFTISGSDFVEMFVGVGASRVRDMFEQAKKAAPCIIFIDEIDAVGRQRGAGVGGGHDEREQTLNQMLVEMDGFEGNEGIIVIAATNRPDVLDPALLRPGRFDRQVVVGLPDVRGREQILKVHMRKVPLDGDVNPSLIARGTPGFSGADLANLVNEAALFAARGNKRTVSMVEFELAKDKIMMGAERKSMVMSEEQKESTAYHEAGHAIIGRLVPDHDPVYKVSIIPRGRALGVTMYLPEQDRVSHSREFLESMISSLYGGRLAEELIYGVDKVSTGASNDIERATDIARKMVTQWGFSEKLGPLLYAEDEGEVFLGRSVTQSKHMSDDTAKLIDTEVRTLIDRNYQRARQILADNMDIMHAMKDALMKYETIDAGQIDDLMERKSEIRAPKGWSDNDDTMKPSSKEAPETELAPDEPIGDGIDALTKEDDTDTKPQA

SEQ ID NO: 60669 - DNA, 1971 bp, Oceanospirillum sp. MED92
  CDS (1)..(1971): transl_table=11
atggcgaaaaatctagttctatggctggtgatcgcagcggtattgctgacagtttttaataatttcaatgaaagtgccgagtcgcacagacttagttattccgactttgtgtccgaagtgaaatcgggtcgggtagaaaaagtaatcattgatggatatacaattcagggccagcgccagaatggcgaaatgtttgaaacgacacgtcctgcgttatctgatccgaaattagttgatgacctgttcgaaaataacgttgttattgaaggtaagcagccagagcagcaaagcatctggactcagttgctggtcgcatcgttcccaattctggtcatcattgctgtattcatgttcttcatgcgccagatgcaaggcggtggcggcaaaggcgggccaatgtcttttggtaagtccaaagcccgtatgatgagcgaagaccagattaagacaacctttgacgatgttgctggcgttgaagaagcaaaagaagatgtacgtgagttagtagactttcttcgtgatccaggcaaattccagcgtctgggtggtcatattccgcgtggcgttttgatggcaggtagccctggtacgggtaagactttgttagctaaagcgattgccggcgaagcaaaagtacctttctttagtatctcaggttccgattttgtcgagatgtttgtcggtgtgggtgcgtctcgtgtacgtgacatgttcgatcaggcgaaaaagaatgcaccatgtatcatctttatcgatgagattgatgcggttggtcgtcatcgtggtgttggcatgggcggcggtaatgatgaacgtgagcaaacgctaaaccaattgctggttgagatggacggctttgaaggtagcgaaggcattattgtcattgctgcgactaaccgtcctgatgttttggacccggcactgctgcgtccaggccgctttgatcgtcaagtccatgtgggtctcccggatattcggggccgcgaaaagatccttaaggttcacatgcgtaaagtgcctttaggtgaagatgttaaaccagaattgattgcacgtggtacgcctggattctcgggtgctgatttggcgaacttagtcaatgaagctgcgctttttgctgcgcgtgccagcaaacgtaccgttggtatggatcaattcgagaaggccaaagacaagatcatgatgggtgccgaacgcaagtccatggtgatgtctgagaaagagcgccttaataccgcttatcatgaagcagggcatgcaatcgttgggcgtttaatgcctgaacatgatccggtatataaagtgtcgattatccctcgtggccgtgccttaggtgtgacaatgtttcttcctgaagaagaccgttacagccatagtcgtcagtcaatcatgtcgaatatttgctcgctatacggcggtcgaattgccgaagagatgaccttgggtaaagagggtgtcaccactggcgcatcaaatgacattcagcgcgcgacttcatttgcacgtaatatggttgccaaatggggtctgacggatgagttaggtcctctgctttacgacgaagaagaatctgatccgtttaaccgtggctatggtcagggtgctaagcctttggcagaagaaacgcagcgccgtattgatgcagaaacgcgtaaaattattgatcagtgttacagtaaagctgagcagattctggaagagaatagagatatcctggaatcaatgtgtcaggctttgatgaagtatgagacgatcgatagtaaacagatcgatcagttgatgaatcgtgagtctgtaactgcacctggaggctgggttgaagagagtgataaaggcgatgatacgggtgctaaagcagaatccgcagagccttctgttgatactgatgagccttccgatcagtctgacagctctggcgatcagggggtagacccggatgtgccaaactcacctgataacaatcttcactaa

SEQ ID NO: 60670 - protein, 656 aa, Oceanospirillum sp. MED92
MAKNLVLWLVIAAVLLTVFNNFNESAESHRLSYSDFVSEVKSGRVEKVIIDGYTIQGQRQNGEMFETTRPALSDPKLVDDLFENNVVIEGKQPEQQSIWTQLLVASFPILVIIAVFMFFMRQMQGGGGKGGPMSFGKSKARMMSEDQIKTTFDDVAGVEEAKEDVRELVDFLRDPGKFQRLGGHIPRGVLMAGSPGTGKTLLAKAIAGEAKVPFFSISGSDFVEMFVGVGASRVRDMFDQAKKNAPCIIFIDEIDAVGRHRGVGMGGGNDEREQTLNQLLVEMDGFEGSEGIIVIAATNRPDVLDPALLRPGRFDRQVHVGLPDIRGREKILKVHMRKVPLGEDVKPELIARGTPGFSGADLANLVNEAALFAARASKRTVGMDQFEKAKDKIMMGAERKSMVMSEKERLNTAYHEAGHAIVGRLMPEHDPVYKVSIIPRGRALGVTMFLPEEDRYSHSRQSIMSNICSLYGGRIAEEMTLGKEGVTTGASNDIQRATSFARNMVAKWGLTDELGPLLYDEEESDPFNRGYGQGAKPLAEETQRRIDAETRKIIDQCYSKAEQILEENRDILESMCQALMKYETIDSKQIDQLMNRESVTAPGGWVEESDKGDDTGAKAESAEPSVDTDEPSDQSDSSGDQGVDPDVPNSPDNNLH

SEQ ID NO: 60671 - DNA, 2022 bp, Flavobacteria bacterium BBFL7
  CDS (1)..(2022): transl_table=11
atgtctgaacaaaataaatcaaatcaaagacctggtaacggtaaacctattttaccaggtggcggaaaacctaaatttaacgtatggtggatagcagtacctatagtacttgcttttttagcctattctctaataagtgatgctgttaactctcctaaagaaactaataaatctgaattctttagttatctagaagatggagatgttaaagaggtgattgtatggaacggacggtatgctgaagtttttcttactaaagaagcactaagcaatgaaactaagcacaaagatgcgctaaaacctagcgcgatgaatcaaggtaaggtacctcaatataaatttgaatttggtgatcttgaaatttttcaacctcaattagaagaggcggttgagaataacaacttagaaacgacagttgtttttaaaactcaggataatacttttatgaacgcgatatggagcttcctacctattattcttttaataggagtatggatattcatcatgcgacgtatgagtggtggcggcgctggtggcggtggtggccagatctttaatattggaaaatctaaagcaaaactctttgaccagaaaacagatgtaaaaacgacgtttaaagatgttgctggactagaaggcgcaaaagaagaaattcaagaaattgttgatttcttaaaaaatccagaaaaatacacttccctaggtggtaagatccctaaaggagcgctattaataggatctccaggtactggtaaaacactactagcaaaagctgttgctggtgaggcaaaggttcctttcttctcattaagtggatctgactttgtagaaatgtttgtaggtgtaggcgcaagtcgtgttagagatttatttaaacaggctaaagaaaaatctccttcaatcatatttatcgatgagattgatgctataggaagagcgagaggaaaatctaatttctctggttctaatgacgaacgtgaaaacacgttgaatcagctacttactgaaatggatggttttggaactaatacaaacgttattgtattagccgctactaaccgtgcagacatattggataaagctttaatgcgagcaggtcgttttgacagacagatttatgttgacctaccagatgtaaaagaacgtgaagagatctttgaggtacatttaagacctcttaaaaaagttgataacgaattagacacttctttccttgcaaaacaaactcctggattctctggagcagacatagctaatgtttgtaacgaagcagcgttaatagctgctaggaaaggtaaaaaagcggttgacaagcaagatttcctagatgctgtagatcgtatcgtaggtggattagaaaagaagaacaaacttattacaccttcagaaaagaaaacaatcgcttatcacgaggctggacatgcaacagtaagttggatgactgaacatgccgctccactgattaaagtaacgattgttccgcgtggtcagtcactaggtgctgcatggtacctaccagaagaaagacaaattgtacgtcctgaacaaatgcttgatgaaatgtgtgcgacgatgggtggtagggctgcagaaaaagttatttttaacaatatctctaccggagccttgagcgacctagaaaaggttaccaagcaggctagagccatggttaccatttatgggttaaatgataaggtaggtaatattacatactacgattctagtggacaacaagagtatagcatgtccaaaccatatagtgaagaaacggctgtgattatcgatcaagagatatctaaaataatagaggcccaatatcaacgagctataaaaatcttagaagagaacaaggataaactaactcaactagctgaggttcttcttgaaaaggaagtgatttttaaagatgacttagagaatatttttggaaaacgtccttttattaaagaagaagcggttgccttaaaatcttctacaagatccattgcgccaacaactaattctaaggaggaggaagaatag

SEQ ID NO: 60672 - protein, 673 aa, Flavobacteria bacterium BBFL7
MSEQNKSNQRPGNGKPILPGGGKPKFNVWWIAVPIVLAFLAYSLISDAVNSPKETNKSEFFSYLEDGDVKEVIVWNGRYAEVFLTKEALSNETKHKDALKPSAMNQGKVPQYKFEFGDLEIFQPQLEEAVENNNLETTVVFKTQDNTFMNAIWSFLPIILLIGVWIFIMRRMSGGGAGGGGGQIFNIGKSKAKLFDQKTDVKTTFKDVAGLEGAKEEIQEIVDFLKNPEKYTSLGGKIPKGALLIGSPGTGKTLLAKAVAGEAKVPFFSLSGSDFVEMFVGVGASRVRDLFKQAKEKSPSIIFIDEIDAIGRARGKSNFSGSNDERENTLNQLLTEMDGFGTNTNVIVLAATNRADILDKALMRAGRFDRQIYVDLPDVKEREEIFEVHLRPLKKVDNELDTSFLAKQTPGFSGADIANVCNEAALIAARKGKKAVDKQDFLDAVDRIVGGLEKKNKLITPSEKKTIAYHEAGHATVSWMTEHAAPLIKVTIVPRGQSLGAAWYLPEERQIVRPEQMLDEMCATMGGRAAEKVIFNNISTGALSDLEKVTKQARAMVTIYGLNDKVGNITYYDSSGQQEYSMSKPYSEETAVIIDQEISKIIEAQYQRAIKILEENKDKLTQLAEVLLEKEVIFKDDLENIFGKRPFIKEEAVALKSSTRSIAPTTNSKEEEE

SEQ ID NO: 60673 - DNA, 1944 bp, delta proteobacterium MLMS-1
  CDS (1)..(1944): transl_table=11
ttgaatatcttttatcgcaacctggccatgtggctgatcatcggcctgaccatgatcatgcttttcaacctgttcagcgccccctccgaacaggaaaccagcgaaatcagctacagcgattttctgaccaacattgatggcggtgatgtgcgtgaagtcctgattgaagacaacgtcatccaggtcacgggctccgatggccgcctcttcaaggtggtcgcccccaccgacgccgaaatgatccccaagctgcgggaggcgggtgtcaacatcaaggtcaaggagagcgaagagcccccctggtatctgaccatcctggtttcctggttccccctgttgctgctgatcgcggtctggatctttttcatgcgccagatgcagatgggcggcggcaaggccatgagttttggcaagagccgggcccgactgcttgatcccgaaaccaccaagctctcctttaaagacgtggccggcatcgatgaggccaaggaggatttgtcagagatcatcgattttctcaaagaccccggtaaattcactcgcttaggcggccggatccccaaaggagttctgctgatgggggcgccggggaccggcaagaccctgctggccaaagccatcgccggcgaggccggggtcccctttttctccatcagcggctccgattttgtcgaaatgttcgtgggggtgggcgcctcccgggtacgtgatctctttgtccagggcaagaaaagcgccccctgcatcatcttcatcgacgagatcgacgccgtgggccgccatcgcggggccggggtgggcggcggccatgatgagcgggaacagaccttaaaccaactgctggtggaaatggacggctttgaatccaacgatggcgtaatcatcgtcgccgccaccaaccggcccgacgtgctggacccggccctgttgcggcccggccgtttcgaccgccaggtggtggtgccgtccccggatgtcaagggacgggagatgattctgctggtccatggccagaaaacccaggtggccgatgatgtcaactgggcccagatcgcccgggggactcccggcttttccggggccgacctggagaatatggtcaacgaggcggccctgctggccgcccgccaggacgcagaaaaggtccagatgcaccacctggagcaggccaaggacaaggtaatgatgggcgccgagcgccgcagcatgatcatcaccgaagaggagaagaagatcaccgcctaccacgaggccggccacgccctggtggccaagctgctgcccggcaccgatccgctgcacaaggtgaccattatcccccgcggccgggccctgggcttgacccagcaattgcccctggaggagaagtacacctattcccgggcttatctgctcaacaacctgtcgatcttactgggtggccgggtggccgaggaactggtctttgacgagatcaccaccggggccggcaacgatatcgagcgggccaccgccatggcccgcaagatggtctgcgaatggggaatgagcgaggccatggggccgctctcctttggcaagaaggaagagcagatttttctgggccgggagatctcccagcatcgggattattccgaatccaccgccatccagatcgacaacgaagtccggcgaatggtgatggaggcccacgacaaggtccaggagctgctcaaagaaaacctggatgccctccaccatgtggccgccgaactgctggaaaaggaaaccctgctgctcagtgatattgaacggatcatcgccaccagcaacggcgagaccacgccgccggccggagacaccgaaccctctgccggcgatgggccaacaaccggggccaccggggaatcggccaccactgctacagcagctccggattcggccccaaccgaggaaccaccggattcaaagggcaacgcgaactga

SEQ ID NO: 60674 - protein, 647 aa, delta proteobacterium MLMS-1
MNIFYRNLAMWLIIGLTMIMLFNLFSAPSEQETSEISYSDFLTNIDGGDVREVLIEDNVIQVTGSDGRLFKVVAPTDAEMIPKLREAGVNIKVKESEEPPWYLTILVSWFPLLLLIAVWIFFMRQMQMGGGKAMSFGKSRARLLDPETTKLSFKDVAGIDEAKEDLSEIIDFLKDPGKFTRLGGRIPKGVLLMGAPGTGKTLLAKAIAGEAGVPFFSISGSDFVEMFVGVGASRVRDLFVQGKKSAPCIIFIDEIDAVGRHRGAGVGGGHDEREQTLNQLLVEMDGFESNDGVIIVAATNRPDVLDPALLRPGRFDRQVVVPSPDVKGREMILLVHGQKTQVADDVNWAQIARGTPGFSGADLENMVNEAALLAARQDAEKVQMHHLEQAKDKVMMGAERRSMIITEEEKKITAYHEAGHALVAKLLPGTDPLHKVTIIPRGRALGLTQQLPLEEKYTYSRAYLLNNLSILLGGRVAEELVFDEITTGAGNDIERATAMARKMVCEWGMSEAMGPLSFGKKEEQIFLGREISQHRDYSESTAIQIDNEVRRMVMEAHDKVQELLKENLDALHHVAAELLEKETLLLSDIERIIATSNGETTPPAGDTEPSAGDGPTTGATGESATTATAAPDSAPTEEPPDSKGNAN

SEQ ID NO: 60675 - DNA, 1920 bp, Rickettsiella grylli
  CDS (1)..(1920): transl_table=11
atgctgaaaaatctatttttatggctaattattgcggttatactgatcaccgtatttaataacctcgagcctcgtaataacgctggggaacgcctaacgtattccgaatttctacaaaatgtccaacaaggcaatgtgcaatctgtaaccattcaaagcaaccaaattataaaaggtcaattacatagtgataagacgtttaccagctatatgcccattcctgatcagtatttacttcctgaactattaaaaaaacatgtcaatgtcaagggggaaccaccacaacaggaaagtttcttgatgcggatttttatcaattggttccctatgctactgcttattggcgtatggatatttttcatgcgccaaatggggggtgctggagggaagggagcattatcctttggccgcagtcgtgctcgtttacttggagaagatcaagtcaaggttacttttgctgatgtagcgggtgctgaagaagcgaaagaagaggtcagtgaattagttgaatttttaaaagatcccgcaaaatttcaaaagctaggcggaaaaattccacgtggtgttttgttaatgggccctcctggaacaggtaaaacacttttagcacgtgctgttgcgggtgaagcaaaggttccttttttcacaatctcaggttctgattttgttgaaatgtttgtgggtgtaggagcatctcgcgtaagagatatgtttgaacaagctaaaaaacaggccccttgtatcatattcattgatgaaatcgatgccgttggccgtcaccgtggtgctggtttaggcggtgggcatgatgagcgtgagcaaacgctcaatcaattattggttgaaatggatggttttgaagggaacgaaggtgtcattgtgatggccgctacgaatcgacccgatgttttagatcctgccttattgcgacccggccgattcgatcgtcaagtgattgttggcttacctgatattcgtggtagagaacaaattctaaaagtccatcttcgaaaaattccctacggtaaagatgttaaacccggtatcatcgcaagaggcacgcccggtttttcgggcgcggatttagcgaacctcattaacgaagcggctttatttgcagcgcgtgaaaataaatccaccgttgacatgattgatctagaaaaagccaaagataaagtcatgatgggtagtgaacggcgctctatggttatgaatgaaaaagagaaaaaactcacggcttatcatgaagccgggcacgctattgtagggcgtttggtccccgatcatgatcctgtttataaagtaacgattatcccacgtggtaaagccttaggtgtcacgatgtttttacctgaagaggatcgttatagctatactaagcagcgcctagagagtcaaattgctagtttatttgggggacgtattgctgaaagtttaatttttggtccggagcaagtgacaacaggtgcttcaaacgacatccaacgggctactgagattgcacggaacatgataacgaaatggggtttatcggatcgtcttggtccattaacttacaatcaagaaaatgaagaggtatttttaggtcatcaaatcgctaaaaataataagttttcggatgatacagcccaattaatcgatgaagaaagccgtcatattattgatcgtaattacaaacttgccgaatcattattgcaggataatattgaaaaattacatattatggctgaagccttgataaaatatgaaacgattgattccgctcaaataaatgacatcatgaaaggtaaactaccgagagagccgaaaggttggaataatggaaataaaaacgatcaatcgacttcccctgaagaaaaactatcttcaaaaaaggattccaccatcattgatcatgatccagccacagatagcttgtaa

SEQ ID NO: 60676 - protein, 639 aa, Rickettsiella grylli
MLKNLFLWLIIAVILITVFNNLEPRNNAGERLTYSEFLQNVQQGNVQSVTIQSNQIIKGQLHSDKTFTSYMPIPDQYLLPELLKKHVNVKGEPPQQESFLMRIFINWFPMLLLIGVWIFFMRQMGGAGGKGALSFGRSRARLLGEDQVKVTFADVAGAEEAKEEVSELVEFLKDPAKFQKLGGKIPRGVLLMGPPGTGKTLLARAVAGEAKVPFFTISGSDFVEMFVGVGASRVRDMFEQAKKQAPCIIFIDEIDAVGRHRGAGLGGGHDEREQTLNQLLVEMDGFEGNEGVIVMAATNRPDVLDPALLRPGRFDRQVIVGLPDIRGREQILKVHLRKIPYGKDVKPGIIARGTPGFSGADLANLINEAALFAARENKSTVDMIDLEKAKDKVMMGSERRSMVMNEKEKKLTAYHEAGHAIVGRLVPDHDPVYKVTIIPRGKALGVTMFLPEEDRYSYTKQRLESQIASLFGGRIAESLIFGPEQVTTGASNDIQRATEIARNMITKWGLSDRLGPLTYNQENEEVFLGHQIAKNNKFSDDTAQLIDEESRHIIDRNYKLAESLLQDNIEKLHIMAEALIKYETIDSAQINDIMKGKLPREPKGWNNGNKNDQSTSPEEKLSSKKDSTIIDHDPATDSL

SEQ ID NO: 60677 - DNA, 1974 bp, Desulfitobacterium hafniense DCB-2
  CDS (1)..(1974): transl_table=11
ttgaaatttttcaaaaacgctgctgtttatttactgattattctcattgcgattatgctcataagatttgccaacccaccggcgactcagcccttggatatggattacaccaaattttatgaggcggtggttacgggtcaggttgaagaagttgtaatcagtaccgatgataatgtcaatacctatgaagttaaaaccaaagacggtcagcaatatgtagtgctcggtgaagcaaaggatgttgatctgtctgcgcaaatgaacgagcataaagttaacgtgcgggtcaatccgccggtcaccactccttggtgggccggtttgatcaccacggtactgcctttcctgttaatcggcggctttatcttctttatgatgcagcagagccaagggggcggcaaccgggtcatgcagttcgggaaaagccgggctaaactggtgacggatgaaaagaaaaaggtgacctttgccgatgtggcgggagccgacgaggtgaaggaagagcttgaagaagttgtggaattcctcaagttccctaagaaatttaatgagttgggagctaaaattcccaaaggagtgctgctctttggccctcccggaaccggtaagactcttttggcccgggctgtggcaggagaagcgggggttcccttcttcagtatcagcggctcggactttgtagagatgttcgtcggggtgggagcatcccgggtgcgtgatttatttgaacaagccaaaaagaatgccccttgcatcgtgtttatcgacgagatcgacgcggtaggccggcaaagaggcgccggtctggggggcggtcatgatgagcgggagcaaaccctgaaccagctgctcgttgagatggatggttttaatgggaatgaaggcatcatcattatcgcggccaccaaccgccctgatattctcgaccccgccttgttgcggccggggcgtttcgaccgccaagtagtggtggatgttcccgatgtcaaaggccgcgaggaaatcttaaaagtccatgttaaaggcaaacccatgcacaacgatgtggagctggatgtcttagcccgccgcacgccgggatttaccggagcggatctggccaaccttgtcaatgaagcggccctgctgtctgctcgccgcaatgaaaaagagattaaaatgaatgctctggaggattctgtggaacgggttatcgccggaccggagaaaaaggcccgggtcatcagtgactatgaaaagaaattggtttcttatcacgaagcaggtcatgctttagtgggagaaatgctgacccatacggatcccttgcacaaggtgtccattattccccggggacgggccggcgggtataccctgctcctgcctaaggaagatcgcaactatatgacaaagtctcatttgttggatcaggtcaccatgctcttaggggggcgggtggcagaagccctggttctccatgagatcagcaccggagcctccaatgacttggagcgggctaccggtcttgtccgcaagatgattactgaactgggaatgtccgaggagctgggaccccttacctttggacagaaggaaggtcaggtgttcctgggccgggatattgcccgggatcgcaattatagtgaagcggtggcttactccatcgataaagaagcgcgccggatgatcgatgaatgctatttgaaggcgcagaccattattcaggagaacatgcataagcttaacgcgattgcccagactttgatggagaaagaaaccatcgaagccaaggaatttgccgagctgatggcccgctttgatcaaccagtggaaaccgcacaagtctcggagccgtcggagactgaaaataatacaacggaacatgatgatcttcttcccgccacaggggagacctccgtggagggagaagacaggacggaagccgagggattgagcgggtcaaccttagaagaagaaaaaaataagattgactag

SEQ ID NO: 60678 - protein, 657 aa, Desulfitobacterium hafniense DCB-2
MKFFKNAAVYLLIILIAIMLIRFANPPATQPLDMDYTKFYEAVVTGQVEEVVISTDDNVNTYEVKTKDGQQYVVLGEAKDVDLSAQMNEHKVNVRVNPPVTTPWWAGLITTVLPFLLIGGFIFFMMQQSQGGGNRVMQFGKSRAKLVTDEKKKVTFADVAGADEVKEELEEVVEFLKFPKKFNELGAKIPKGVLLFGPPGTGKTLLARAVAGEAGVPFFSISGSDFVEMFVGVGASRVRDLFEQAKKNAPCIVFIDEIDAVGRQRGAGLGGGHDEREQTLNQLLVEMDGFNGNEGIIIIAATNRPDILDPALLRPGRFDRQVVVDVPDVKGREEILKVHVKGKPMHNDVELDVLARRTPGFTGADLANLVNEAALLSARRNEKEIKMNALEDSVERVIAGPEKKARVISDYEKKLVSYHEAGHALVGEMLTHTDPLHKVSIIPRGRAGGYTLLLPKEDRNYMTKSHLLDQVTMLLGGRVAEALVLHEISTGASNDLERATGLVRKMITELGMSEELGPLTFGQKEGQVFLGRDIARDRNYSEAVAYSIDKEARRMIDECYLKAQTIIQENMHKLNAIAQTLMEKETIEAKEFAELMARFDQPVETAQVSEPSETENNTTEHDDLLPATGETSVEGEDRTEAEGLSGSTLEEEKNKID

SEQ ID NO: 60679 - DNA, 1953 bp, Alteromonadales bacterium TW-7
  CDS (1)..(1953): transl_table=11
ttgagcgatatggcgaaaaatttaatactatggctggtcattgcagttgtgcttatgtcagtctttcagagctttaatggtggcgagcaaatcgaccgtcaaacaagttacagtcagtttgtaaaagatgcccgaaatggctcaatacaagaagtggcaatcgagagcaccagtggaacaatcacaggtactaaaaataatggtgagcgctttcaaaccattatgccaatctacgacaaagacattttaaatgacttacttaaaagtgatgtaaacgtgaaaggtgtaaagcctgaagaacaatcatttttagcaagcatatttatttcttggttcccgatgatactgcttattggtgtatggattttcttcatgcgtcaaatgcaaggcggtggcggcaaaggcgctatgtcattcggtaagagcaaagcacgcctaatgagcgaagatcaaattaaaactacgttcgctgatgttgctggttgtgatgaagcaaaagaagacgttaccgaattggtggacttcctacgcgacccgtctaaattccaaaaattaggtggtagtatacctaaaggtgtacttatggttggaccgccaggtacaggtaaaacgttgcttgctaaggctgttgccggcgaagcaaaagtaccctttttcacaatttcgggttctgactttgttgaaatgtttgttggtgtaggcgcatcgcgcgtacgtgacatgtttgaacaagccaaaaaagcagctccttgtattatcttcatcgatgaaattgatgcagtaggtcgtaaacgtggcgcaggtatgggcggcggtaacgatgagcgcgaacaaacattaaaccaaatgctggtagaaatggatggttttggtggtaacgaaggcattattgttattgctgcgactaaccgcccagacgtattagacccggcattacttcgtcctggtcgttttgaccgtcaagtagaagttggtttacctgatatacgcggtcgtgaacagattattaaagtgcacatgcgtaaagtaccattaggtgacaacgttgatgcagctgttattgctcgtggtacacccggtttttcgggtgctgatttagctaacttagtcaacgaagccgcactttacgccgcacgtggtaacaaacgtgttgtaaatatggctgagtttgatgctgctaaagacaaaatcatgatgggcgcagagcgcaagaccatggtgatgagcgagcaagagaaagaaatgacggcataccacgaagccggccatgcaattgttggacgcatggtgccagagcatgaccctgtttataaggtatctatcattccacgtggccgtgcgctaggtgtgactatgtatttaccagagcaagatcgcgttagccattccaaagagctattagaatcaatgatttctagcctttatggtggccgaatcgctgaagcacttatttacggtgccgacaaagtgactaccggtgcgagtaacgatattgaacgtgcaacagacatagcacgtaaaatggttacacattgggggttaagtgaaaaacttggaccactactttacgccgaagatcaaaacgaaatgtacatgggtggtggcggtagtcgtgcatctaacatgtcggatgatacagctaaagtaattgatgcagaggttcgtttattttcagatagaaactacgagcgtgccgaaaaaatattgaaagagaatattgatattcttcattcaatgaaagacgcgttaatgaaatacgaaacgattgacgctaagcaaattgacgacttaatggcgcgccagccagtgcgagagccacgcgatgctcatgaccgtcatgagcctaaagcaccacaaacagattctgtaaaggaatctgttagtgatgaaagtcaatcaacaacagaatcatctaaaaaagatgaaacaaatgttgatgacaaagctgaataa

SEQ ID NO: 60680 - protein, 650 aa, Alteromonadales bacterium TW-7
MSDMAKNLILWLVIAVVLMSVFQSFNGGEQIDRQTSYSQFVKDARNGSIQEVAIESTSGTITGTKNNGERFQTIMPIYDKDILNDLLKSDVNVKGVKPEEQSFLASIFISWFPMILLIGVWIFFMRQMQGGGGKGAMSFGKSKARLMSEDQIKTTFADVAGCDEAKEDVTELVDFLRDPSKFQKLGGSIPKGVLMVGPPGTGKTLLAKAVAGEAKVPFFTISGSDFVEMFVGVGASRVRDMFEQAKKAAPCIIFIDEIDAVGRKRGAGMGGGNDEREQTLNQMLVEMDGFGGNEGIIVIAATNRPDVLDPALLRPGRFDRQVEVGLPDIRGREQIIKVHMRKVPLGDNVDAAVIARGTPGFSGADLANLVNEAALYAARGNKRVVNMAEFDAAKDKIMMGAERKTMVMSEQEKEMTAYHEAGHAIVGRMVPEHDPVYKVSIIPRGRALGVTMYLPEQDRVSHSKELLESMISSLYGGRIAEALIYGADKVTTGASNDIERATDIARKMVTHWGLSEKLGPLLYAEDQNEMYMGGGGSRASNMSDDTAKVIDAEVRLFSDRNYERAEKILKENIDILHSMKDALMKYETIDAKQIDDLMARQPVREPRDAHDRHEPKAPQTDSVKESVSDESQSTTESSKKDETNVDDKAE

SEQ ID NO: 60681 - DNA, 1917 bp, marine gamma proteobacterium HTCC2143
  CDS (1)..(1917): transl_table=11
atggcgaaaaatttattactatgggtggttattgcagcggttttgctgacggtattcaacaactttaccgtaaagccgacaactgagcagttgaattactcgcaatttattgaagaagtgcaacaagatcgtgttagtggggtgatgatagatggcttaatcattaccggtactcggtttgacagcagcacttttgaagcggttcgcccgatgttggatgatcccaagttgatagatgacttgttggaacatgatgttcaggtggagggccgtaagccggagcaacagagcatttggacgcagctgttggtagcctctttcccgattcttattatcattgctgtgttcatgtttttcatgcggcagatgcaaggtggcggcggtggtcgcggtggtcctatggcgtttggcaaaagtaaagccaagctgctgggggaagatcagattaaaacaacctttgccgatgtcgcaggtgttgacgaagccaaagaagatgttcatgagctggtagagtttctgcgcgaccctggcaaatttcagcgtctcggtggtcgtatacctcgcggagtactgatggtcgggcagccaggtaccggtaagacattgctggcgaaagcgatcgccggtgaagccaaggtgccgttcttttccatctcaggttctgattttgtcgaaatgtttgttggggtgggtgcatctcgagtccgcgacatgtttgaacaggccaaaaaacaagctccctgtatcatttttatcgatgagatagatgcggtgggtcgtcatcgtggagccggcgtagggggtggtcacgacgagcgagagcagacgttaaaccagttactggttgagatggacggttttgaaggcaacgacggagttatcgtgattgcggcgactaaccggcctgatgtgctggatcctgcgttgttgcgtcccggtcgatttgaccgtcaagttgttgttggtcttcctgatattcgcggtcgggcacaaattttaaaagtacacatgcgtaaggttcctttaggcgatgcagttgatccgtccgtcatcgcgagaggcactcccgggttctcgggtgctgatttggccaatctggttaatgaagctgccttgtttgctgctcggtctaatatgcggactgtagggatggagcagtttgagttggccaaagacaaaattatgatgggcgcagagcgcaagtcgatggtgatgtcagattccgaaaagttaaacaccgcttatcacgaggccggccacgccattgttgggcgtgtggtaccggagcatgatcccgtttataaagtgagtattattcctcgggggcgggcgcttggtgtcactatgtttttacccgaagaggaccgttacagcttgagtcgccgtcatattatcagccagatttgttctctgtatggaggcagaatagctgaagaaatgacgctaggcgtggatggggtcacaactggagcgtcgaacgatattcagcgtgccagtgagattgcgcggaatatggttaccaagtgggggctgtcagaaaaaatgggtccattgatgtacgacgagggccaggaggaagttttcttaggtcgctcagcgggcgctcaaacaaaaagccagtcgggcgtcactgccagagaaattgacgaagaggttcgcaatatcatcgatgggtgctacgcgaccgcgacggagattctcaaggaaaaccgcgacaaattggacatgatggccgacgctttgatgacctatgaaaccatcgatgctgcccaaattgatgaaatcatggaaggtcgcaagcccagtgaaccatcaagctggcgtgatgatgacaagcctggcggtggtgagtcgaccgatgaggtcgatgatcagccggcagacgatagtatcggcggtccagccggcgagcattag

SEQ ID NO: 60682 - protein, 638 aa, marine gamma proteobacterium HTCC2143
MAKNLLLWVVIAAVLLTVFNNFTVKPTTEQLNYSQFIEEVQQDRVSGVMIDGLIITGTRFDSSTFEAVRPMLDDPKLIDDLLEHDVQVEGRKPEQQSIWTQLLVASFPILIIIAVFMFFMRQMQGGGGGRGGPMAFGKSKAKLLGEDQIKTTFADVAGVDEAKEDVHELVEFLRDPGKFQRLGGRIPRGVLMVGQPGTGKTLLAKAIAGEAKVPFFSISGSDFVEMFVGVGASRVRDMFEQAKKQAPCIIFIDEIDAVGRHRGAGVGGGHDEREQTLNQLLVEMDGFEGNDGVIVIAATNRPDVLDPALLRPGRFDRQVVVGLPDIRGRAQILKVHMRKVPLGDAVDPSVIARGTPGFSGADLANLVNEAALFAARSNMRTVGMEQFELAKDKIMMGAERKSMVMSDSEKLNTAYHEAGHAIVGRVVPEHDPVYKVSIIPRGRALGVTMFLPEEDRYSLSRRHIISQICSLYGGRIAEEMTLGVDGVTTGASNDIQRASEIARNMVTKWGLSEKMGPLMYDEGQEEVFLGRSAGAQTKSQSGVTAREIDEEVRNIIDGCYATATEILKENRDKLDMMADALMTYETIDAAQIDEIMEGRKPSEPSSWRDDDKPGGGESTDEVDDQPADDSIGGPAGEH

SEQ ID NO: 60683 - DNA, 1941 bp, Candidatus Desulfococcus oleovorans Hxd3
  CDS (1)..(1941): transl_table=11
atgttggaggattctccattgaatcagttttcgaaaaacatggcgctgtggctggtcatcattctggtgatggtcatgctttacaacatgttcaatcagcagcagaacctggagcgcaccatcggctacagtgattttctctacatggtggacaacggcaaggtcaaggatgtgctgattcagggccagaccctgcgggccaccagtgacaccggtgagcggttcagtgtttacatgccggaagatcaggacctgatccccaccctgcgggccaagggcatcgccattgaggccaagcccccggccgaagccccgtggtttatcacggccctgatctcctggctgcccatgatcctgctgatcggcatatggatctatttcatgcgacagatgcagtccggcggcggcaaggccctctccttcggcaaaagccgggcccggctcctctccgaaggggccaacaaggtcacctttgccgacgtggccggcatcgacgaagtcaaagaagaagtgggcgaaatcatcgagtttctgcgggacccccagaagttcacccggctggggggccgtattcccaagggcgtgctgctggtgggcgcgccgggcacgggcaagaccctgctggcaagggccattgccggcgaggccggagtcccctttttcagcatcagcggctcggattttgtcgagatgttcgtgggcgtgggtgcctcccgggtccgggacctgtttcttcagggcaaaaagaacgcgccctgcatcatctatattgatgaaatcgatgccgtgggtcgccaccgcggggccggcctgggcggcgggcacgacgagcgggagcagaccttgaaccagctgctggtggagatggacgggtttgagtccaacgagggcgtgatcctgatctcggccaccaaccgtccggacgtgctggacccggccctgctgcggccgggccgcttcgaccggcaggtggtggtgcccctgcccgacattcggggccgccgggccatcctggacgtctatatcaaaaaaattcccgcggccgacgacgtcaaggtcaacaacctggccaagggaacccccggtttttccggcgccgacctggagaacctggtcaacgaggcggccctgtttgccgccaagcgcaacaaggaaaaggttgaaatggtggactttgaagacgccaaggacaaggtgtacatgggccttgagcgcaagtccaaggtgatcaaggaagaagacaagaagatgaccgcctaccacgaagggggccatgccatcgtggcccggctccttcccgacaccgacacggtcaacaagatcaccatcattccaagggggcgggccgccggcgtcacatggtttctgcccgaagagcgggactttcggttcaaggaccagctggaaagcgagctggccatctctttcggcggccgcatcgccgaggagatcatcttcaaccggatcagcacgggcgcggccaacgacatcaagcaggccacggccctggcccagaagatggtgcgggagtggggcatgagcgaaaatctgggcctgctctcctactcggccaacgaggagcagatatttctgggccgggagatatcccagcaccgggactactcggaagacacggcccggcgcatcgacgcggaggtggagcggatcatcaagtccgcctatgacacggcccggcgcctgctgaaagcgaatgtggatatcctgcacgcgctggcagacctgctgatcgaaaaagagaccgtgctggggccggaactggatgagctgatccggtccctgcggccggacatcgagctttccgtgccgtcggacgacgacatgccggaggaaaagccggcgaagccgtccgaaccggcggagaaggccccggaggctaccggcaccgaaccagaagaaccggaagaagaggacaaaacataa

SEQ ID NO: 60684 - protein, 646 aa, Candidatus Desulfococcus oleovorans Hxd3
MLEDSPLNQFSKNMALWLVIILVMVMLYNMFNQQQNLERTIGYSDFLYMVDNGKVKDVLIQGQTLRATSDTGERFSVYMPEDQDLIPTLRAKGIAIEAKPPAEAPWFITALISWLPMILLIGIWIYFMRQMQSGGGKALSFGKSRARLLSEGANKVTFADVAGIDEVKEEVGEIIEFLRDPQKFTRLGGRIPKGVLLVGAPGTGKTLLARAIAGEAGVPFFSISGSDFVEMFVGVGASRVRDLFLQGKKNAPCIIYIDEIDAVGRHRGAGLGGGHDEREQTLNQLLVEMDGFESNEGVILISATNRPDVLDPALLRPGRFDRQVVVPLPDIRGRRAILDVYIKKIPAADDVKVNNLAKGTPGFSGADLENLVNEAALFAAKRNKEKVEMVDFEDAKDKVYMGLERKSKVIKEEDKKMTAYHEGGHAIVARLLPDTDTVNKITIIPRGRAAGVTWFLPEERDFRFKDQLESELAISFGGRIAEEIIFNRISTGAANDIKQATALAQKMVREWGMSENLGLLSYSANEEQIFLGREISQHRDYSEDTARRIDAEVERIIKSAYDTARRLLKANVDILHALADLLIEKETVLGPELDELIRSLRPDIELSVPSDDDMPEEKPAKPSEPAEKAPEATGTEPEEPEEEDKT

SEQ ID NO: 60685 - DNA, 1905 bp, Pseudomonas putida GB-1
  CDS (1)..(1905): transl_table=11
atggcaaagaatctgatcctgtggttgatcatcgcagctgtcctggtgacagtgatgaacaacttctccagccctaacgagccgcagaccctcaactactccgacttcatccagcaggtcaaggatggcaaggtcgagcgtgtgaccgtagacggctacatcattaccggcaagcgcgccgacggcgacagcttcaagaccgtgcgtccggccattaccgacaatggcctgatcggcgacctggtcgacaaccatgtggttgtcgaaggcaagcagcctgagcagcagagcatctggacgcagctgttggtggcgagcttcccgatcctggtgatcattgccgtgttcatgttcttcatgcgccagatgcaaggcggcgcaggcggaaagggcgggccgatgagctttggcaagagcaaggcgcgcctgctgtccgaagaccaggtcaagaccacgctggccgacgttgccggctgcgacgaagccaaggaagaggttggcgagctggtcgagttcctgcgcgatccaggcaagttccagcgcctgggtggccgcattccacgtggtgtgctgatggttggcccgcccggtaccggtaagaccttgctggccaaggccattgctggcgaagcgaaagtgccgttcttcaccatttccggttcggacttcgtggagatgttcgtcggtgtcggtgccagccgtgtgcgcgacatgttcgagcaggccaagaagcacgccccgtgcatcatcttcatcgacgagatcgacgccgttggtcgccaccgtggcgccggcatgggcggcggtcacgacgagcgtgagcaaaccctcaaccagttgctggtggagatggacggcttcgagatgaacgatggcatcatcgttatcgctgctaccaaccgtccggacgtactcgaccctgcgctgctgcgtccgggtcgcttcgaccgccaggtggtggtcggcctgccggatatccgtggtcgcgaacagatcctcaaggtgcacatgcgcaaagtaccggttggcgagaacgtcaacccggcggtcattgcccgtggtaccccaggcttctccggtgccgacctggccaacctggtcaacgaggcttcgctgtttgccgcacgctccaacaagcgcctggtcgaaatgaaagagttcgaactggccaaggacaagatcatgatgggcgccgagcgcaagaccatggtcatgtccgagaaagaaaaacgtaacactgcctaccacgaggctggccatgccatcgttggtcgcctggtgccagagcacgacccggtctacaaggtttcgatcattccgcgcggtcgtgccttgggcgtgaccatgttcctgccggaagaagaccgttacagcctgtccaagcgcgcgctcatcagccagatctgttcgctgtacggtggtcgtatcgccgaagaaatgaccctgggcttcgatggcgtgactaccggtgcgtccaacgacatcatgcgtgccagccagatcgcccgaaacatggtgaccaagtggggcttgtcggaaaaactcggcccgctgatgtacgcagaagaagagggtgaggtattcctcggtcgtagcgccggcagccagcacgccagtgtgtccggcgagactgccaagctgatcgactccgaagtgcgcagcatcatcgatcagtgctacgccactgccaagcagctgctgatcgagaatcgagacaagcttgaagcgatgaccgaagcgttgatgaagtacgaaaccatcgatgccgatcagatcgacgacatcatggctgggcgtacgccacgcgagccgcgtgactgggacgatgacaaggactcgggtacgcctgcggcccagaatgatcgtccggaatcgccaatcggcggcccagcagctcaacactaa

SEQ ID NO: 60686 - protein, 634 aa, Pseudomonas putida GB-1
MAKNLILWLIIAAVLVTVMNNFSSPNEPQTLNYSDFIQQVKDGKVERVTVDGYIITGKRADGDSFKTVRPAITDNGLIGDLVDNHVVVEGKQPEQQSIWTQLLVASFPILVIIAVFMFFMRQMQGGAGGKGGPMSFGKSKARLLSEDQVKTTLADVAGCDEAKEEVGELVEFLRDPGKFQRLGGRIPRGVLMVGPPGTGKTLLAKAIAGEAKVPFFTISGSDFVEMFVGVGASRVRDMFEQAKKHAPCIIFIDEIDAVGRHRGAGMGGGHDEREQTLNQLLVEMDGFEMNDGIIVIAATNRPDVLDPALLRPGRFDRQVVVGLPDIRGREQILKVHMRKVPVGENVNPAVIARGTPGFSGADLANLVNEASLFAARSNKRLVEMKEFELAKDKIMMGAERKTMVMSEKEKRNTAYHEAGHAIVGRLVPEHDPVYKVSIIPRGRALGVTMFLPEEDRYSLSKRALISQICSLYGGRIAEEMTLGFDGVTTGASNDIMRASQIARNMVTKWGLSEKLGPLMYAEEEGEVFLGRSAGSQHASVSGETAKLIDSEVRSIIDQCYATAKQLLIENRDKLEAMTEALMKYETIDADQIDDIMAGRTPREPRDWDDDKDSGTPAAQNDRPESPIGGPAAQH

SEQ ID NO: 60687 - DNA, 1956 bp, Marinobacter sp. ELB17
  CDS (1)..(1956): transl_table=11
atggcaaaaaatctggttttatggctggtaatagccgcagtgctactgatggtgtttcagaacttcactcctaccaccagtggccaacaagtcaactactcccagtttgtggagatggttcaacagggccgtgtaaaccaggtcacgattgacggtctgaagattgagggtacacgccccgacggttcacagttccagaccgtccgcccgcaagtggctgacaacaaactgatggatgacttgctggccaacagcgttgaggtgatcggtaaagagcccgagcgccagagcctgtggacccaattgctggtcgccgcattcccgattttgattattattgcgcttttcgtattctttatgcggcaaatgcagggtggtgccggtggtaagggcggcccaatgtcgtttggtaagagcaaagctcgcctgatgagcgaagaccagattaaaaacacctttgcggatgttgcaggtgtagacgaagccaaagaagacgtaaaagaactggtggatttcttacgtgatcccagtcgattccagcgcctgggcggccggattccccgtggcgttctgatgatcggtcctccgggcacgggcaaaaccttgctggcaaaagccatcgccggtgaggccaaggtgccattcttctcgatctccggttcagattttgtcgaaatgttcgtcggcgtgggtgcatcccgtgtacgcgacatgttcgagcaggccaagaagcaaagcccgtgtatcatttttattgacgagattgatgcggtcggtcgccaccgtggcgccggcatgggcggcgggcacgacgagcgtgagcaaacgctgaaccagttactggttgaaatggacgggtttgagggtaacgaaggcgttatcgtgattgccgccaccaaccgcccggacgttctagaccctgcgttgctgcgccctggccgttttgaccgtcaggtgatggtgagcctgccagacattctgggccgcgagcagatcttgaaagtacacatgaagaaagtaccgctggatgacgacatcaatcctgccgttattgctcgtggtacgcctggcttctccggtgccgacctggctaacttggtgaacgaggcagcgctcttcgcagcccgtcgcaacaagcgtttggtgtctatggaagagctggaactggcgaaagacaaaatcatgatgggcgcggaacgcaagtccatggtgatgaacgaaaaagagaaactgaacaccgcgtatcatgaatctggtcacgccattgtcgggcgcctgatgccagagcacgatcccgtgtataaagtgagtatcatccctcgcggccgtgctttgggtgtgactatgttcttgccggaggaagacaggtacagccattccaagcgtttcctccatagccagatcagcagtttgtttggtggccgcatcgccgaagagctgacattgggcgcagacggtgtcaccaccggtgcctccaatgacattgagcgggcgaccagtctggctcgcaacatggtgacccgctgggggctgtcggaaaagctgggtccgctgcagtacggtagtgagaatgacgaaccgttcctggggcgtaccgctgggcaacatcaaaccgtgtactcgccggaaaccgcgcagcgtatcgatgaagaagtgcgtaacatcattgatacctgttacgagaccgcccgcaacgtattggtcgagaatcgcgataagctggacttgatggccgaagctctgatgaagtacgagactattgatcggctccagatcgacgatatcatggaaggccgtgatgcccgtacgccaaaaggctgggacgatcggggtggttcttcgggtggcgaggctacttcaatcgacaaagaagatacttccaccgaaggcaaagttaatggcaaagcgagcgacgattctcatggtggcgttggccgcccggcgggagagcactga

SEQ ID NO: 60688 - protein, 651 aa, Marinobacter sp. ELB17
MAKNLVLWLVIAAVLLMVFQNFTPTTSGQQVNYSQFVEMVQQGRVNQVTIDGLKIEGTRPDGSQFQTVRPQVADNKLMDDLLANSVEVIGKEPERQSLWTQLLVAAFPILIIIALFVFFMRQMQGGAGGKGGPMSFGKSKARLMSEDQIKNTFADVAGVDEAKEDVKELVDFLRDPSRFQRLGGRIPRGVLMIGPPGTGKTLLAKAIAGEAKVPFFSISGSDFVEMFVGVGASRVRDMFEQAKKQSPCIIFIDEIDAVGRHRGAGMGGGHDEREQTLNQLLVEMDGFEGNEGVIVIAATNRPDVLDPALLRPGRFDRQVMVSLPDILGREQILKVHMKKVPLDDDINPAVIARGTPGFSGADLANLVNEAALFAARRNKRLVSMEELELAKDKIMMGAERKSMVMNEKEKLNTAYHESGHAIVGRLMPEHDPVYKVSIIPRGRALGVTMFLPEEDRYSHSKRFLHSQISSLFGGRIAEELTLGADGVTTGASNDIERATSLARNMVTRWGLSEKLGPLQYGSENDEPFLGRTAGQHQTVYSPETAQRIDEEVRNIIDTCYETARNVLVENRDKLDLMAEALMKYETIDRLQIDDIMEGRDARTPKGWDDRGGSSGGEATSIDKEDTSTEGKVNGKASDDSHGGVGRPAGEH

SEQ ID NO: 60689 - DNA, 1827 bp, Bacillus sp. SG-1
  CDS (1)..(1827): transl_table=11
gtggtgagttactttaacaacagcaacgaaccaacagaaaacattaaatataacgaattcatcactcacttagaagatggtgaggtagagtcgttttccatccagcctgaacgaggtgtctatcaggtaaagggtaaactgactggatatactgaggaacaatatttcctgaccaatgtactagggaatgatgcgggagtattggaacgaatcaatgcagctgcagcagaaaccggcattgaagtcgatgtcttaatggcaaaagaaacaagcggctgggtatcattctttactacaatcataccgtttgtcattatctttattcttttcttcttcctgctgaaccaagcacagggcggcggaagccgggtaatgaacttcggtaagagtaaagccaagctgtacagtgaagagaagaaaaaagtccgtttcaaagatgttgccggagcggatgaagagaaaaacgaactggtcgaagtagtagaattccttaaagacccgagaaaattctcagaggtcggcgcgcgaattcctaaaggagttcttcttgtaggacctcctggtactggtaaaacattacttgcccgtgccgttgccggagaagccggagtaccattcttctccatcagtggttccgatttcgtcgaaatgtttgtcggtgtcggtgcttcacgtgttcgtgacttgtttgaaaacgcaaagaaaaatgctccatgtatcatcttcattgatgagattgatgctgtgggtcgccagcgtggtgctggtcttggtggaggtcacgatgaacgtgaacaaacattgaaccagttactagtcgaaatggatggattcggagcaaacgaaggaatcatcatcgtagctgcgacaaaccgtcctgacatcctggatccagccttattgcgtcctggacgtttcgaccgtcaaattacagtggaccgccctgatgtcaaaggccgtgaagctgtacttaaagtacacgcgagaaacaagccgcttgatgagtccgtggacttacaagcaattgcagccagaactcctggattctccggggcagacttggagaacctgttgaacgaagcagctcttgttgctgcccgtgaggataaaaagaaaattgacatgcgtgatattgatgaagcgactgaccgtgtcattgccggtcctgctaaaaagagcaaggttgttttcaagaaagagcgtaatattgtggccttccatgaagccggtcataccgttatcggtcttgtcctggatgaggcggatatggttcacaaagttacaatcgtgccacgcggccaggctggcggttatgcggtaatgcttccaaaagaagaccgttacttcatgacaaaacctgaattgttggataaaattactggattacttggtggacgtgtagccgaagaaattatctttggtgaagtttctacaggtgcccataatgacttccagcgtgcgacaggcattgcccgcagaatggttaccgaatttggtatgagtgagaaactcggccctcttcaattcggttcagcttcaggaggacaggtgttccttggaagggacatcaacaatgagcagaactactcagatgcgattgcttatgaaatcgatcttgagatccagcgcttcattaaagaatcttatgaaagagcgagaaagattcttacagagaaccgtgaaaaactggagcttattgcaaataccctgttagatgtggaaacattggatgccggacaaattaagcatttgatggaccatggaaaacttcctgaaagagcgtatggtgaacctgacaaacacctgagaaagaagatgtcaaagtaa

SEQ ID NO: 60690 - protein, 608 aa, Bacillus sp. SG-1
MVSYFNNSNEPTENIKYNEFITHLEDGEVESFSIQPERGVYQVKGKLTGYTEEQYFLTNVLGNDAGVLERINAAAAETGIEVDVLMAKETSGWVSFFTTIIPFVIIFILFFFLLNQAQGGGSRVMNFGKSKAKLYSEEKKKVRFKDVAGADEEKNELVEVVEFLKDPRKFSEVGARIPKGVLLVGPPGTGKTLLARAVAGEAGVPFFSISGSDFVEMFVGVGASRVRDLFENAKKNAPCIIFIDEIDAVGRQRGAGLGGGHDEREQTLNQLLVEMDGFGANEGIIIVAATNRPDILDPALLRPGRFDRQITVDRPDVKGREAVLKVHARNKPLDESVDLQAIAARTPGFSGADLENLLNEAALVAAREDKKKIDMRDIDEATDRVIAGPAKKSKVVFKKERNIVAFHEAGHTVIGLVLDEADMVHKVTIVPRGQAGGYAVMLPKEDRYFMTKPELLDKITGLLGGRVAEEIIFGEVSTGAHNDFQRATGIARRMVTEFGMSEKLGPLQFGSASGGQVFLGRDINNEQNYSDAIAYEIDLEIQRFIKESYERARKILTENREKLELIANTLLDVETLDAGQIKHLMDHGKLPERAYGEPDKHLRKKMSK

SEQ ID NO: 60691 - DNA, 1971 bp, Erythrobacter sp. SD-21
  CDS (1)..(1971): transl_table=11
atgcgcgacaataaccagaaccagcctcccgaacccgaaggcaacggtcccaatccgtggatcaagagcctcatggtgtggggcggcgtattcctcggcctgttgctggtggtctccatgctcggcggtggcggtcagggcgcgggcacttcgctgctctattccgacttcaaggaaaaggtcgccgaaggcacgatcaaatcggtcgagatcgccgatgatcgaattaccggcgtgacgaacgacaacgagacgttcaacaccatcccggtaaaaaacgacccgggtctgactccgctgctcgaagagaacggtgtcgaatactcgggtaaggaagccgataacggcagcctgttggtctatgcgctgatcaatatcctgcctttcctgctgatcctcggcatcgccttcttcgccctgcgccaggtgcagaagggcggcggcgccggcggggcgatgggcttcggcaagtccaaggccaagatgctcaccgaaaagcagggccgcgtcaccttcgaggacgtggccggcatcgacgaagcgcgcgaggaactggaagagatcgtcgagttcctgaaggacccgagccgcttctccaagctgggcggccagattcccaagggcgcgctgctggtcggctcgcccggtacgggcaagacgctgctcgcccgcgccatcgccggcgaggcagaggtgcccttcttcaccatttcgggctcggacttcgtcgagatgttcgtcggtgtcggcgcaagccgcgtgcgcgacatgttcgaacaggccaagaagaacgcgccctgcatcgtcttcatcgacgaaatcgacgcggtcggtcgcagccgtggccatggcctcggcaattcgaacgacgagcgcgagcagacgctgaaccagttgctggtcgaaatggacggcttcgaggccaacgaaggcatcatcatcatcgcggcgacgaaccgtcccgatgtgctcgaccctgcgctgctgcgtccgggccgtttcgaccgccaggtcgtggtgcccgttcccgatatcgacgggcgcgagaagatccttgccgtgcacatgcgcaagctcccgctcgctcccgatgtgaacccgcgcactatcgcgcgcggcacgccgggcttctccggcgcggaccttgcaaacctttgtaacgaagccgccctgctggccgcgcgccgcaacaagcgcctcgtcgcgatgcaggaattcgaggacgccaaggacaaggtgatgatgggcgcggagcgccgctccatggtcatgaccgaggacgagaagaagatgaccgcctatcacgaggccggccacgcactggtcagcctcaacgagccggcatcggacccgatccacaaggccaccatcattccgcgcggccgcgcgcttggcatggtcatgcgcctgccggaacgcgacaattactcctaccaccgcgacaagatgcacgcgaaccttgccgtcgccatgggcggccgcgtggcggaagagatcatcttcggccacgagaaagtctcgagcggcgcaagcggtgacatccagtacgccaccgacctggcgcgcaacatggtcaccaaatggggtatgagcgacaagctcgggccgctgcagtacgagcagagccaggaaggctatctcggcatgggccagaccgcgcgtaccatgtcgggcgcggagaccaacaagctcatcgacgaggagatcaagcgcctggtcgaggacggcctcaagcgcgccaccgacgtgttgaccgagcaggaggacaagctccacttgctcgcccaggcgatgctcgaatacgagacgctgaccggcgacgagatcgaccaactcatgaaggacggcaagatcgaccggcccgacgagcccaagggtccggtctcggtcagccagccgggcagcagcactgttcctaaggccggcaagaagttcggcggatcgggcgagggcgctcccgccggggcctga

SEQ ID NO: 60692 - protein, 656 aa, Erythrobacter sp. SD-21
MRDNNQNQPPEPEGNGPNPWIKSLMVWGGVFLGLLLVVSMLGGGGQGAGTSLLYSDFKEKVAEGTIKSVEIADDRITGVTNDNETFNTIPVKNDPGLTPLLEENGVEYSGKEADNGSLLVYALINILPFLLILGIAFFALRQVQKGGGAGGAMGFGKSKAKMLTEKQGRVTFEDVAGIDEAREELEEIVEFLKDPSRFSKLGGQIPKGALLVGSPGTGKTLLARAIAGEAEVPFFTISGSDFVEMFVGVGASRVRDMFEQAKKNAPCIVFIDEIDAVGRSRGHGLGNSNDEREQTLNQLLVEMDGFEANEGIIIIAATNRPDVLDPALLRPGRFDRQVVVPVPDIDGREKILAVHMRKLPLAPDVNPRTIARGTPGFSGADLANLCNEAALLAARRNKRLVAMQEFEDAKDKVMMGAERRSMVMTEDEKKMTAYHEAGHALVSLNEPASDPIHKATIIPRGRALGMVMRLPERDNYSYHRDKMHANLAVAMGGRVAEEIIFGHEKVSSGASGDIQYATDLARNMVTKWGMSDKLGPLQYEQSQEGYLGMGQTARTMSGAETNKLIDEEIKRLVEDGLKRATDVLTEQEDKLHLLAQAMLEYETLTGDEIDQLMKDGKIDRPDEPKGPVSVSQPGSSTVPKAGKKFGGSGEGAPAGA

SEQ ID NO: 60693 - DNA, 1965 bp, unidentified eubacterium SCB49
  CDS (1)..(1965): transl_table=11
atggcagataaaaataaagattctaaaaaagacaataaaaagcctgaaatcaagaagcctaagtttagtccttattggattacagctgcagtacttgttgcactaatcgcttttaatttattaggaggtgatgctttaacccaaccacaaaaaatagatcaatctcagtttgaaacttatcttagtgaaggtgatatagcaaaagttgtacttattaatgggcgaattgctagagtttttcttactacagaagcaaaatcacaacctgagcataacaccaacaaaggcaaaggaattttagcgccagggcctaatgatcctgactatcaatttgaaataggtgatcgccaaaattttgaaaacgacttcaaagagatagaagaagcaaataatataacaactcctttaagtcacgattctgaaacaaatttacttgcagaatttctaccttcaataatcttctttgctgtaattattggtatttggatttttattatgagacgtatgtctggtggtgctggaggcggtgctggaggacaaatttttaacattggaaaatctaaagcaaagctttttgatgaaaaagttgatgttaaaacttcttttaaagatgtagctggattagaaggagctaaagaagaagtacaagagattgtagactttttaaagaaccctgaaaaatacacatctttaggagggaagatacctaaaggagccttattagtaggacctccaggaacaggaaaaacattactagctagagctgttgccggtgaagcaaaagtgccattcttctcattatcaggatcagattttgttgagatgtttgtaggtgtaggagcttcaagagttagagacttatttaaacaagcaaaagaaaaatcaccatcaatcatctttattgatgaaatagatgccataggacgtgctagaggaaaaagcaatatgtctggatctaatgatgaacgagaaaacacattaaaccaactattaacagaaatggacggttttggtacaggtactaacgttattgttatcgccgcaactaacagagcagatgttttagacaaagctttaatgcgtgcaggtcgttttgacagacaaatttatgtagaccttcctgatgtaagagaacgtaaagaaatttttgaagttcaccttcgccctattaaaaaagaagaaggtctagacacagacttcttatcaaagcaaacacctggattctctggagcagacatagctaatgtttgtaacgaagcagccttaattgctgcacgaaaagagaagaaagctgttagcaaacaagacttcttagacgccgtagacagaattgtaggaggattagaaaagaaaaacaaaatcgttactcctagtgagaaaaaagcaattgcttaccatgaagctggacatgcaactgtaagctggatgctagaacatgccgcaccattagtaaaagtaactattgtaccaagaggtcaatctctaggtgctgcttggtatctaccagaagaacgtcttattgttagaccggagcagatgctagacgaaatgtgtgcaactatgggtggaagagctgctgaaaaagtaattttcaacaaaatttctactggagcattaagcgatctcgaaaaagtaacaaagcaagctagagctatggtaactatctatgggcttaatgaaaaagttgggaacgttacttactacgattcatctggacaatctgaatacggattctcaaagccttacagtgaagccacagccgaattaatagacaaagagatatctaatattattgaagaacaataccaaagagctataaagctcttagaagacaataaagacaaactagctttattggctgaagaattacttgaaaaagaagttatatttaaagaaagtcttgaaaatatatttggagaaagacctttcacaaaggaagtaattcctgaaaaaacgatctcttaa

SEQ ID NO: 60694 - protein, 654 aa, unidentified eubacterium SCB49
MADKNKDSKKDNKKPEIKKPKFSPYWITAAVLVALIAFNLLGGDALTQPQKIDQSQFETYLSEGDIAKVVLINGRIARVFLTTEAKSQPEHNTNKGKGILAPGPNDPDYQFEIGDRQNFENDFKEIEEANNITTPLSHDSETNLLAEFLPSIIFFAVIIGIWIFIMRRMSGGAGGGAGGQIFNIGKSKAKLFDEKVDVKTSFKDVAGLEGAKEEVQEIVDFLKNPEKYTSLGGKIPKGALLVGPPGTGKTLLARAVAGEAKVPFFSLSGSDFVEMFVGVGASRVRDLFKQAKEKSPSIIFIDEIDAIGRARGKSNMSGSNDERENTLNQLLTEMDGFGTGTNVIVIAATNRADVLDKALMRAGRFDRQIYVDLPDVRERKEIFEVHLRPIKKEEGLDTDFLSKQTPGFSGADIANVCNEAALIAARKEKKAVSKQDFLDAVDRIVGGLEKKNKIVTPSEKKAIAYHEAGHATVSWMLEHAAPLVKVTIVPRGQSLGAAWYLPEERLIVRPEQMLDEMCATMGGRAAEKVIFNKISTGALSDLEKVTKQARAMVTIYGLNEKVGNVTYYDSSGQSEYGFSKPYSEATAELIDKEISNIIEEQYQRAIKLLEDNKDKLALLAEELLEKEVIFKESLENIFGERPFTKEVIPEKTIS

SEQ ID NO: 60695 - DNA, 1938 bp, Moritella sp. PE36
  CDS (1)..(1938): transl_table=11
atggcaaaaaatctgattttatggctggttattgcagtcgtattaatgtcagtatttcagagtttcggaccaaatgagagttcaagtaatcagttagattacagttcatttgtgcaacaagttagaaataaacaggttaacgaggttaagatcaacggacgtactatccgtggtgttacccaaggtggacagaagttcgttactttcttaccagcggaagatccacagctattaaatgacttgttaaacaataacgttaaagtatttggtgagcctgaagaagaagcaagtttattgacttctatcttcatctcttggttcccaatgctattactgatcggtgtttgggtattctttatgcgtcaaatgcaaggtggcggcggtaaaggcgctatgtcattcggcaaaagtaaagcacgcttaatgagtgaagaccaaattaaaacgacgtttgcagatgttgctggttgtgatgaagcaaaagaagaagttgctgaattagtggattacttaaaagatccaagtcgcttccagaaactcggcggtaaaataccaacaggtatcttattagttggttctccgggtacaggtaaaaccttacttgctaaagcgattgccggtgaagcaaaagtaccatttttcactatttcaggttctgatttcgttgaaatgtttgtgggtgtcggtgcatctcgtgtgcgtgacatgttcgaacaagcgaaaaaatcatcaccttgtatcatctttatcgatgaaatcgatgctgtaggccgcaaacgtggctctggcatgggtggcggtcatgatgaacgtgagcaaacgctaaaccaaatgctggttgaaatggatggttttgaaggtaatgagggtgtcattgttattgcggcgactaaccgtccagacgtacttgatcctgcattattacgtcctggtcgttttgaccgtcaagtaactgttggtctaccggatatccgtggtcgtgaacagatcttgaaagtccatatgcgtaaagtgccaatcagcgatgatgttgaaactgtacttattgcgcgtggtacaccgggtttctctggtgcagaactggctaacttagtgaatgaagctgcattatttgctgcacgtcataataaacgtactgtatctatggctgaattcgaaaaagccaaagataagatcctcatgggtgccgagcgtaagagcatggtaatgagcgaagaagagaaaacgatgacggcttaccatgaagcgggtcacgctattgttggtcgcttagtaccggatcatgatcctgtttataaagtgagtatcattccacgtggtcgtgcgttaggtgtgactatgtacttacctgaacaagatcgtcttagtcactcgaaacgtcatttagaaagcatgatctcaagcctttacggtggccgtattgctgaagagattatctttggtaaagacagcgtatcaacaggcgcatcaaatgatattgaacgtgccacggatatttctcgtaaaatggtcacgcaatggggtctatctgaaaaattaggtccaatgaaatttgctgacgagcaaggcgaaattttccttggtggtggtggtagtcagcaggcaagtatgtctgatgatacagctaaaatgattgatgatgaaattcgttatttagttgaaagcaactataaacgtgcgcatcaactattatcggacaatatggatgttcttcattcaatgaaagatgcattgatgaagtatgaaactattgatgccaagcaaattgatgatctaatggcgcgtgttgaagtgcgagcgcctgcagattggggtgaaggctatggtactcttgatagtactaaagatagcgacactgccaaagacgtgaaaaaagaaactaacgttgataatgaagatgatagcaaaaaagaaagtgataaaaaagatacagaataa

SEQ ID NO: 60696 - protein, 645 aa, Moritella sp. PE36
MAKNLILWLVIAVVLMSVFQSFGPNESSSNQLDYSSFVQQVRNKQVNEVKINGRTIRGVTQGGQKFVTFLPAEDPQLLNDLLNNNVKVFGEPEEEASLLTSIFISWFPMLLLIGVWVFFMRQMQGGGGKGAMSFGKSKARLMSEDQIKTTFADVAGCDEAKEEVAELVDYLKDPSRFQKLGGKIPTGILLVGSPGTGKTLLAKAIAGEAKVPFFTISGSDFVEMFVGVGASRVRDMFEQAKKSSPCIIFIDEIDAVGRKRGSGMGGGHDEREQTLNQMLVEMDGFEGNEGVIVIAATNRPDVLDPALLRPGRFDRQVTVGLPDIRGREQILKVHMRKVPISDDVETVLIARGTPGFSGAELANLVNEAALFAARHNKRTVSMAEFEKAKDKILMGAERKSMVMSEEEKTMTAYHEAGHAIVGRLVPDHDPVYKVSIIPRGRALGVTMYLPEQDRLSHSKRHLESMISSLYGGRIAEEIIFGKDSVSTGASNDIERATDISRKMVTQWGLSEKLGPMKFADEQGEIFLGGGGSQQASMSDDTAKMIDDEIRYLVESNYKRAHQLLSDNMDVLHSMKDALMKYETIDAKQIDDLMARVEVRAPADWGEGYGTLDSTKDSDTAKDVKKETNVDNEDDSKKESDKKDTE

SEQ ID NO: 60697 - DNA, 2127 bp, Solanum lycopersicum
  CDS (1)..(2127)
atggccaatgctgtactctcttccaatttcttgggttcccaaatctttgtttctcctcccacacctaaaacctcaaggtatttccatcttcactccagaagaaagtatatagttcctcaatcaattctcagcaaaaaatccaattcagataatttcaagaatgttccatctaaagctgctatagctgctttactcttctcttcaatcaccccacaagcttttgctcttgataatacaaccccagcagcaccaccacaagtgattgaagctgaagcaccaaaacctagtgcctcaaactcattaccctttgctcaaaatatcattttgaatgctccaaagactcaagcgcagcctgcttctgaccttcctgaaggtactcaatggaggtacagtgagttcttgaatgctgtgaagaaggggaaagttgaaagggttagatttagtaaagacggaagtacccttcagcttacagctgtagatgggcgtagagctaatgtaattgtgcctaatgacccggatttaatcgatattctggcgatgaatggtgttgatatatcagtttctgaaggtgaagggggtaatgggttgtttagtgttattgggaacttgttgttccctattattgcttttgctgggttgtttttccttttcaggcggtctcagggcggcccaggtgggcctggaggacttggcgggccgatggatttcggccggtctaagtccaagtttcaggaggtgcctgaaactggagtgacttttgctgatgttgctggtgctgatcaagctaaattggagttacaggaagtggttgatttcttgaaaaatcctgataagtatactgctttaggtgctaagataccaaaagggtgtcttttagttgatccaccaggtactggaaagacccttttagctagagcagtagctggtgaggctggtgtgccatttttctcttgtgcagcgtcagagtttgttgagttgtttgtgggtgtgggagcttctagagttagggatttgtttgagaaggcgaagtctaaagcaccttgtattgtgtttattgatgagattgatgctgtgggaaggcaaagaggtgcaggtcttggaggtggaaatgatgagagggagcagactattaatcagcttttgactgaaatggatgggttttctggaaattcgggtgtcattgtttcggctgcaactaacaggcctgatgttcttgattctgccttgttgagacctggaaggtttgatcgacaagtgactgtggataggcctgatgttgctggtagagtcaggattcttcaggtgcattctagaggaaaggcccttgccgaggatgtggactttgataagattgccaggagaacaccaggtttcaccggtgcagatttgcaaaacttgatgaatgaagcagccatccttgcagctaggcgtgacctaaaggaaataagtaaagatgagatatccgatgctctagagaggataattgctggcccggagaagaaaaatgctgttgtctcagatgagaagaagaagctggtagcttatcatgaggctggccatgccttggttggtgcacttatgcccgagtatgatcctgttgccaagatatctataattcctcgaggccaagccggtggtctcaccttctttgcccccagcgaagaaagacttgagtcgggcctgtacagcaggagctatctagagaatcaaatggcagttgcacttggtggaagagttgctgaggaggttatttttggacaagacaacgtaacaactggagcatctaacgatttcatgcaagtctcacgagtggcaaggcagatggttgagagattaggattcagcaaaaagataggccaagttgccattggaggaggtggtggaaacccgttcctaggccaacagatgtcaacccagaaagactactccatggcaacagccgatgtggtcgatgctgaagtaagggaattggttgaaaaggcgtacgaaagagctacacaaatcatcacaactcacatcgacatcctacacaagcttgctcagctgttgatagagaaagaaactgttgatggtgaagagttcatgagccttttcattgatggcaaggctgagctatacatttcttga

SEQ ID NO: 60698 - protein, 708 aa, Solanum lycopersicum
MANAVLSSNFLGSQIFVSPPTPKTSRYFHLHSRRKYIVPQSILSKKSNSDNFKNVPSKAAIAALLFSSITPQAFALDNTTPAAPPQVIEAEAPKPSASNSLPFAQNIILNAPKTQAQPASDLPEGTQWRYSEFLNAVKKGKVERVRFSKDGSTLQLTAVDGRRANVIVPNDPDLIDILAMNGVDISVSEGEGGNGLFSVIGNLLFPIIAFAGLFFLFRRSQGGPGGPGGLGGPMDFGRSKSKFQEVPETGVTFADVAGADQAKLELQEVVDFLKNPDKYTALGAKIPKGCLLVDPPGTGKTLLARAVAGEAGVPFFSCAASEFVELFVGVGASRVRDLFEKAKSKAPCIVFIDEIDAVGRQRGAGLGGGNDEREQTINQLLTEMDGFSGNSGVIVSAATNRPDVLDSALLRPGRFDRQVTVDRPDVAGRVRILQVHSRGKALAEDVDFDKIARRTPGFTGADLQNLMNEAAILAARRDLKEISKDEISDALERIIAGPEKKNAVVSDEKKKLVAYHEAGHALVGALMPEYDPVAKISIIPRGQAGGLTFFAPSEERLESGLYSRSYLENQMAVALGGRVAEEVIFGQDNVTTGASNDFMQVSRVARQMVERLGFSKKIGQVAIGGGGGNPFLGQQMSTQKDYSMATADVVDAEVRELVEKAYERATQIITTHIDILHKLAQLLIEKETVDGEEFMSLFIDGKAELYIS

SEQ ID NO: 60699 - DNA, 1929 bp, Magnetospirillum gryphiswaldense
  CDS (1)..(1929): transl_table=11
ttgaccttgaatttcagcaagaacctggcgctgtggatcatcatcgccctgcttctggtgatgcttttcaacctgtttcaaacctcggcgccgcagcgcggcatggggcaggtggcgttctcggatttcatggccgaagtggatggcgggcgcgtcgccgacgtgaccattcagggctatacggtgaccggacattattccgacaaccgtccgttctcgacctatatgccgcccgaagccaatatcgtgcccaagttgcgcgaatcgggcgtgcggatttccgccgttccccccgccgacgaccagccgaccctgtggggtatcctggtgtcatggttccccatgctgctgttgatcggcgtctgggtgttcttcatgcgccagatgcaatcgggcggcggcaaggccatgggcttcggcaagtccaaggctcgcctgctgacggaaaagcagggccgcatcactttcgaggacgtggccggcatcgacgaagccaagcaggagcttgaggaaatcgtcgaattcctgaaagacccgcagaagttccagcgcctgggcggcaagatccccaagggctgcctgctggtcggcccgcccggtaccggtaagaccctgctggcccgcgccatcgccggtgaagccaacgtgccgttcttcaccatctcgggctccgacttcgtcgagatgttcgtgggtgtcggcgcaagccgcgtgcgcgacatgttcgagcagggcaagaagaatgccccttgcatcatcttcatcgacgaaatcgacgccgtcggtcgccatcgcggcgccggcttgggcggcggcaacgatgagcgcgagcagacgttgaaccagatgctggtggagatggacggcttcgaatccaacgaaggcgtcatcctgatcgccgccaccaaccgccccgacgtgctagacccggcgctgctgcgtcccggtcgcttcgaccgtcagatcgtggtgcccaaccccgatatcctgggccgcgagaagattttgaaggttcacatgcgcaaggtgccgctggcccccgacgttgaaccccgcatcatcgcgcgaggcacccccggtttttccggcgccgatctggccaatctggtcaacgaggcggcgcttttggcggcccgtgccggcaagcgcgtggtcaccatgatggaattcgaatcggccaaggacaaggtgatgatgggggccgagcgccggtccatggtgatgagcgaggcggaaaaggaagccaccgcctatcacgaggccggtcatgcggtggtcaacctgcacatgccccattccgatccgctgcacaaggtcaccatcatcccgcgcggtcgcgccttgggggtgaccatgtcgctgccggaacgtgaccgcctgtcttattccaagaagttcttcgaggcccgcatcgccgtgtgcttcggcggtcgtgtggccgagcagttgatctatggcgaggatcacctgaattcgggcgcctccaacgacatcatgcaggccaccggtatggcccgcaagatggtcaccgagttcggcttctccgataaattggggccgttgcgctataacgaaaaccaggaagaggtgttcctgggccattcggtcacccagcacaagagcatgtccgacaacaccgccatgctgatcgatgccgaggtgcgcaactttgtcgaggaaggcgagcgcaaggcccgccagattctgaccgagcatcgcgacgagctcgaggccatcacccgtggcctgctggaatacgagaccttgtccaaggacgagatcgacatactgatccggggcgagccgcttattcgcgacggtggctatgtgcggcccaaggacaatggcggcgggccgcgtcgcggctcggtgccgagttcgggtattcccaccgccggcctcgatcccgaaccccagcccgggccgtga

SEQ ID NO: 60700 - protein, 642 aa, Magnetospirillum gryphiswaldense
MTLNFSKNLALWIIIALLLVMLFNLFQTSAPQRGMGQVAFSDFMAEVDGGRVADVTIQGYTVTGHYSDNRPFSTYMPPEANIVPKLRESGVRISAVPPADDQPTLWGILVSWFPMLLLIGVWVFFMRQMQSGGGKAMGFGKSKARLLTEKQGRITFEDVAGIDEAKQELEEIVEFLKDPQKFQRLGGKIPKGCLLVGPPGTGKTLLARAIAGEANVPFFTISGSDFVEMFVGVGASRVRDMFEQGKKNAPCIIFIDEIDAVGRHRGAGLGGGNDEREQTLNQMLVEMDGFESNEGVILIAATNRPDVLDPALLRPGRFDRQIVVPNPDILGREKILKVHMRKVPLAPDVEPRIIARGTPGFSGADLANLVNEAALLAARAGKRVVTMMEFESAKDKVMMGAERRSMVMSEAEKEATAYHEAGHAVVNLHMPHSDPLHKVTIIPRGRALGVTMSLPERDRLSYSKKFFEARIAVCFGGRVAEQLIYGEDHLNSGASNDIMQATGMARKMVTEFGFSDKLGPLRYNENQEEVFLGHSVTQHKSMSDNTAMLIDAEVRNFVEEGERKARQILTEHRDELEAITRGLLEYETLSKDEIDILIRGEPLIRDGGYVRPKDNGGGPRRGSVPSSGIPTAGLDPEPQPGP

SEQ ID NO: 60701 - DNA, 2085 bp, Vitis vinifera
  CDS (1)..(2085)
  misc_feature (215)..(215): y is t or c
  misc_feature (243)..(243): y is t or c
  misc_feature (381)..(381): y is t or c
  misc_feature (1014)..(1014): y is t or c
  misc_feature (1773)..(1773): y is t or c
  misc_feature (1968)..(1968): y is t or c
atggcagcatcatcagcttgccttgtgggaaatggtctatccacctgcattactaaaccaggtttgagcaaggaattccatggtaggcatcttttgccatcctcaagctttccatcattgggtaaagtgtccaaagcagtttttgtaaaagcatctttggaccagagacagcatgagggaaggagaggctttctcaagtttttgcttggaaatgyggggcttggggtacctgccttacttggyaatggaaaagcttatgcggaggagcaaggggtttcctcatcaaggatgtcatattctagatttttggagtatctggacaaggatagggtaaaaaaagtagatttgtttgagaatggaaccatagctattgttgaagcygtttctcctgagttgggtaaccgggtgcagcgagttcgtgtgcaactcccaggactcagccaggagctccttcagaaattcagagaaaagaacattgactttgctgcacacaatgctcaagaggactcaggttctctgttattcaacttgattggcaaccttgctttcccactaatcttaattggaggccttttccttctctcaaggcgttcatctggaggaatgggtggccctggtgggcctggcttcccccttgcctttggtcaatcaaaagccaagttccaaatggagccaaacacaggtgtaacttttgatgatgttgctggggtagatgaagcaaaacaagatttcatggaagtagtggagtttctgaaaaagcccgagagattcactgcagttggagctcgcatccctaaaggtgttcttcttgttggcccgccaggaactgggaagactctgctagcgaaggcaattgctggtgaagcaggtgttccatttttctctatctcaggttctgagtttgttgagatgtttgttggtgttggtgcatctagagtgcgtgatcttttcaagaaggccaaggagaatgctccctgcattgtatttgttgatgaaattgatgctgttgggcgycaaagaggaactggaattggaggaggaaatgatgaaagggaacaaacacttaaccagcttttgactgaaatggatggttttgaaggaaacactggtataattgttattgcagccactaacagggcagacattcttgactctgccttattgaggcctggacgatttgacagacaggtaactgttgatgttcctgatatacggggaaggacagagatcttaaaggttcatgctggtaataagaagtttgatggagatgtgtctcttgatgtaatagccatgagaactccaggttttagtggagcagatcttgcaaacctcctaaatgaagcagctatattggctggtcgtcgtgggaagacagcaatcacatctaaagagattgatgattcaattgataggattgtggctggaatggaaggaacagttatgacagatggaaagagcaagagtctggtggcttaccatgaagttggtcatgccatatgtggaactttgaccccaggacacgatgccgttcagaaagtcaccctgatccctcgtggtcaagcacggggtcttacatggttcattccttctgatgaccctaccctgatctcaaagcagcaactctttgcaagaattgttggcggactcggtggcagagctgctgaagaagtgatctttggtgagcctgaggtgacaacaggtgctgctggtgatttgcagcagatcactggtttggccaaacagatggtgaccacatttgggatgtctgacatyggcccatggtcgcttatggacacctcggctcagagtgctgatgtcatcatgagaatgatggcaaggaattcaatgtctgaaaagcttgcagaagacattgatactgctgtgaagaggatttcagatgatgcatatgagattgcattgacccacataagaaacaaccgtgaggccattgacaagattgttgaagtyctccttgagaaagaaacaatgactggggatgagttccgggcaatcctctcagagtttgttgagattcctgcagaaaatcgtgtccctgcttcagtaccatctccagtcactgtataa

SEQ ID NO: 60702 - protein, 694 aa, Vitis vinifera
  misc_feature (72)..(72): The Xaa at location 72 stands for Ala, or Val.
MAASSACLVGNGLSTCITKPGLSKEFHGRHLLPSSSFPSLGKVSKAVFVKASLDQRQHEGRRGFLKFLLGNXGLGVPALLGNGKAYAEEQGVSSSRMSYSRFLEYLDKDRVKKVDLFENGTIAIVEAVSPELGNRVQRVRVQLPGLSQELLQKFREKNIDFAAHNAQEDSGSLLFNLIGNLAFPLILIGGLFLLSRRSSGGMGGPGGPGFPLAFGQSKAKFQMEPNTGVTFDDVAGVDEAKQDFMEVVEFLKKPERFTAVGARIPKGVLLVGPPGTGKTLLAKAIAGEAGVPFFSISGSEFVEMFVGVGASRVRDLFKKAKENAPCIVFVDEIDAVGRQRGTGIGGGNDEREQTLNQLLTEMDGFEGNTGIIVIAATNRADILDSALLRPGRFDRQVTVDVPDIRGRTEILKVHAGNKKFDGDVSLDVIAMRTPGFSGADLANLLNEAAILAGRRGKTAITSKEIDDSIDRIVAGMEGTVMTDGKSKSLVAYHEVGHAICGTLTPGHDAVQKVTLIPRGQARGLTWFIPSDDPTLISKQQLFARIVGGLGGRAAEEVIFGEPEVTTGAAGDLQQITGLAKQMVTTFGMSDIGPWSLMDTSAQSADVIMRMMARNSMSEKLAEDIDTAVKRISDDAYEIALTHIRNNREAIDKIVEVLLEKETMTGDEFRAILSEFVEIPAENRVPASVPSPVTV

SEQ ID NO: 60703 - DNA, 2031 bp, Vitis vinifera
  CDS (1)..(2031)
  misc_feature (67)..(67): r is g or a
  misc_feature (76)..(76): y is t or c
  misc_feature (457)..(457): r is g or a
  misc_feature (1038)..(1038): w is a or t
atgtcacctgctctatctctttctgtgtcccacctccctatctgcaaataccaggacatttcaaagracacccacytccccaaaagcaccaatagagaaaacccatgtttaaaaacaccgtcaaaaatcaaagtcaataggagaaagctgctgagttccaccgcttcaggactcgtaggaggagggctgtctgtttctcagcctgcaagagccgagccagagagcccagttgaatccacctcaagtagaatgtcatactcaagatttttacagtacttggatgaaggtgctgttaagaaggtagacctgtttgagaacggaactgttgcgattgccgagatcttcaatcctgcactggaaaggatccagagggtgaaaatacagctacctggattaccacaagaattgctgaggaaacttaaagacaagaacgtagattttgctgctcatcccatgraaatcaacatgacagccgcagttcttgacttgttggggaatttagctcttccattgcttctgcttgggagtttattgttgagaacatcatcaacaaatactccaggaggccccaacttgccgtttggacttggaaagagcaaagccaaattccagatagaacccaacactggagtaacattcaacgatgtggctggagttgatgaagcaaagcaggattttcaagagattgtggagttcttaaaaaccccggaaaagtttgctgcagttggtgcaagaattcccaaaggagttctcctagtagggccaccagggactgggaagacattgctggctaaggcaattgcaggagaagcaggggtccctttcttttctctgtcagggtcagaattcattgagatgtttgttgggataggggcttcaagagtgagggacctgttcaacaaggcaaaagaaaactccccatgtttagtctttattgatgagatagacgctgttggaaggcagagaggaactggcattggtggggggaatgatgagagggagcaaacgctgaaccagttgcttacagaaatggatggwtttagtgggaacagtggagtgattgtcattgctgccaccaatcgacctgaaattcttgattcagctttgctgaggccaggaaggtttgacagacaggttactgttggactaccagatataagagggagggaggaaatattaaaggtgcatagcaacaacaagaagcttgacaaggatgtctctcttagcattatagccatgagaactccaggattcagtggtgcagacctggctaaccttatgaatgaagctgccattcttgctggtcggaggggcaaggacaagatcacactgaaagaaattgatgactcaattgatcgaatcgtggcaggaatggagggaactaagatgacagatggaaagagcaaaattctagtcgcttaccatgaaattggccatgctgtttgcgcgacattgactccaggccatgacccagtacagaaagtcactctaatccccaggggccaagcccggggccttacatggttcatacctggagaagatcctactctcatttccaagcagcaactgtttgccagaatagttggaggccttggaggccgggcagcagaggaattgatctttggggaatcagaaatcaccactggtgcagcaggggacttgcaacaggttactcaaatagcaagacagatggtaacaatgtttggcatgtcggagattgggccatgggcattgactgatccagcagtgcagagtggtgatgtagtactgaggatgctagcaagaaactccatgtcggaaaaacttgctgaagacatcgatacatcagtaagaaatatcattgaaagtgcatatgaagttgctaaaactcatataaggaataatagggaggcaattgataaactagtggaggtgctattagagaaggagaccctcacaggagatgaattcagagccatcctatcagaatttacagacatttcttcagataaaatgaacgtaaaacctgtccgtgagatgattaaagcctga

SEQ ID NO: 60704 - protein, 676 aa, Vitis vinifera
  misc_feature (26)..(26): The Xaa at location 26 stands for Leu, or Phe.
  misc_feature (153)..(153): The Xaa at location 153 stands for Glu, or Lys.
MSPALSLSVSHLPICKYQDISKBTHXPKSTNRENPCLKTPSKIKVNRRKLLSSTASGLVGGGLSVSQPARAEPESPVESTSSRMSYSRFLQYLDEGAVKKVDLFENGTVAIAEIFNPALERIQRVKIQLPGLPQELLRKLKDKNVDFAAHPMXINMTAAVLDLLGNLALPLLLLGSLLLRTSSTNTPGGPNLPFGLGKSKAKFQIEPNTGVTFNDVAGVDEAKQDFQEIVEFLKTPEKFAAVGARIPKGVLLVGPPGTGKTLLAKAIAGEAGVPFFSLSGSEFIEMFVGIGASRVRDLFNKAKENSPCLVFIDEIDAVGRQRGTGIGGGNDEREQTLNQLLTEMDGFSGNSGVIVIAATNRPEILDSALLRPGRFDRQVTVGLPDIRGREEILKVHSNNKKLDKDVSLSIIAMRTPGFSGADLANLMNEAAILAGRRGKDKITLKEIDDSIDRIVAGMEGTKMTDGKSKILVAYHEIGHAVCATLTPGHDPVQKVTLIPRGQARGLTWFIPGEDPTLISKQQLFARIVGGLGGRAAEELIFGESEITTGAAGDLQQVTQIARQMVTMFGMSEIGPWALTDPAVQSGDVVLRMLARNSMSEKLAEDIDTSVRNIIESAYEVAKTHIRNNREAIDKLVEVLLEKETLTGDEFRAILSEFTDISSDKMNVKPVREMIKA

SEQ ID NO: 60705 - DNA, 1992 bp, Vitis vinifera
  CDS (1)..(1992)
atggcttcttcttctaccacaaaccccttactctcttcaaccctgtttggcaataggatttcaacgcccaagacaaccaaatcctcaattcctctgcagtttttttcaagaagaaggtttgaggtgactcgatcgattctcaatggaaaacccagatcagaattgccatctaaggccgctctggctgccataatcgcctcttctctcgccccacaagccctcgcagtagacaacgctacaccacctgttccgccccctgtaatcgaagcccaacccactaaacccagcccctcaaactcctcaccctttgctcagaatcttcttctcacagccccaaaaccccaaacgcagtctgacctcccagaaggtagtcaatggcggtacagcgagttcttgaatgcggtgaagaaggggaaagtggagcgagttcggttcagcaaagatggctcggccctccaactcaccgccgtcgatggtcgtcgggccaccgttatcgtccccaatgaccccgacctcatcgacattttagccatgaacggcgtcgatatatcggtttcagagggcgattccggcaatggcctcttcaattttatcggcaatttgctgttcccgttcctcgccttcgctggacttttctttctctttcgtcgtgcccaaggaggtcctggcggccccggcggactgggcgggccaatggattttggacggtccaaatccaagttccaggaggttccagagaccggcgttacattcgcagatgtcgccggagccgatcaggcaaaactggagttgcaggagtacaccgccctgggagccaaaattcccaagggttgtcttttggttggaccacccggaaccggcaagaccctactggccagagcagtggccggagaagcaggtgtgccattcttctcgtgcgcagcctctgaattcgttgaattgtttgtaggagtgggagcatccagagtccgggacttgtttgagaaggcaaaatcaaaggcaccctgcattgtatggatggattctccggaaattccaggtgtcattgtattggctgccactaatagaccagacgttcttgattctgcattgttaaggcctgggaggttcgatcgacaggttactgtggataggcctgatgttgctggtagagttaagatccttcaggtgcactcaagagggaaggcactagccaaggatgtagactttgaaaagattgcgagaaggaccccaggcttcacaggggctgacttgcagaacctgatgaatgaggcagccatcctcgcagctaggcgcgacctcaaggagataagcaaggatgagatatctgatgccctggagaggataattgctgggccagagaagaaaaatgctgtggtctcagacgagaagaagaaattagttgcctatcatgaggctgggcatgcattggttggtgcacttatgcctgaatatgaccctgtggccaagatatccatcattccccgtggccaagccggtggtcttaccttttttgctccaagtgaagagagactcgagtctggactgtacagtagaagttacctggagaatcagatggctgttgcactgggtggaagggttgcagaagaggtaatatttggagaggataatgtaacaacaggggcatccaatgactttatgcaagtttcacgggtggccaggcagatggtggagagatttgggttcagcaaaaagattggacaagttgccattggtggacctggtggaaatccattcttaggtcaacagatgtcatcgcagaaagactattccatggcaactgcagatatagtggatgcggaagtgagggagttggtggagaaggcatattcaagggccaagcagatcatgacaactcacattgacatcctccacaagcttgcacaactcctcatcgagaaggaaaccgtggatggagaagagttcatgagtctctttattgatggcaaggctgaattattcgttgcttaa

SEQ ID NO: 60706 - protein, 663 aa, Vitis vinifera
MASSSTTNPLLSSTLFGNRISTPKTTKSSIPLQFFSRRRFEVTRSILNGKPRSELPSKAALAAIIASSLAPQALAVDNATPPVPPPVIEAQPTKPSPSNSSPFAQNLLLTAPKPQTQSDLPEGSQWRYSEFLNAVKKGKVERVRFSKDGSALQLTAVDGRRATVIVPNDPDLIDILAMNGVDISVSEGDSGNGLFNFIGNLLFPFLAFAGLFFLFRRAQGGPGGPGGLGGPMDFGRSKSKFQEVPETGVTFADVAGADQAKLELQEYTALGAKIPKGCLLVGPPGTGKTLLARAVAGEAGVPFFSCAASEFVELFVGVGASRVRDLFEKAKSKAPCIVWMDSPEIPGVIVLAATNRPDVLDSALLRPGRFDRQVTVDRPDVAGRVKILQVHSRGKALAKDVDFEKIARRTPGFTGADLQNLMNEAAILAARRDLKEISKDEISDALERIIAGPEKKNAVVSDEKKKLVAYHEAGHALVGALMPEYDPVAKISIIPRGQAGGLTFFAPSEERLESGLYSRSYLENQMAVALGGRVAEEVIFGEDNVTTGASNDFMQVSRVARQMVERFGFSKKIGQVAIGGPGGNPFLGQQMSSQKDYSMATADIVDAEVRELVEKAYSRAKQIMTTHIDILHKLAQLLIEKETVDGEEFMSLFIDGKAELFVA

SEQ ID NO: 60707 - DNA, 2460 bp, Drosophila melanogaster
  CDS (1)..(2460)
atgttgaagggcctgcggcatgtgcggaatgcgctgcagcgcggtggatctcagctgatccagctccgcagtgccacaggacaacccccaaggattgggcgggaactgtcgctccttcagctcagccggcggcaggtgatgcagctgcaggcggagtacaaggcaattgtgggcctaatagcgcgctccctgcagctgacccccaaggaggttagactgatgcacctgcgcagcctgagcagcaccgcaaaacctccaaccgcatcggatggcaagacggaaaagcatgaacagccagagaagggcagtgccaaggctaaagatgattcgtcgaaggagaaaaagtcagctgtcgcggcggaggatggcgataagagcagcagagcggcaggagacgaggccgccagtactcctacttcaagcagtaccattggtgagcccggcgaagatcccaacaaaaacagcaacgagaatgacgaaaagatgcgttctgtactgaccaaggccgtactgtggctctttaccatctacatgtttgtggccttcttttccctgctaattactccgcgctccgagagaccagagggttccacgcgctatgtgtcgtggaacgagttcgtgcaccacatgctggccgtgggcgaagtcaaggagctgatcatcagacccgacatggaaatggtgaccatcattctgcacgagggagccgtcatcaagggtcggaaggtgtcttccaccatctttcacatggcggtggccgatgccaacaagtttgaggagaagctgcgtgatgtggagaagcgtttgggcatcaaggatggtgtgccggtgacctacgaccggcagacggacaccaccggacgtattctcatgctgcttctcgtctgcgccctgcttatgtcgattgccacccgcatgaagagcatcaagagtccgctcagcatggattcatttaaccaaatgggccgtgccaagttcacgctagttgatcctttcgatggcggtcgcggtgtgcttttccgggacgtggccggtctcagtgaggcgaaacaggaggtgaaggaatttgtagattacctcaagtcgccggagaagtaccagcggctgggcgccaaggtgccgcgaggagccctactcctgggtccaccaggatgcggcaagacgctactggccaaggcggtcgccaccgaggcccaggtgccgtttctcagcatgaacggctccgagttcatcgagatgattggcggtctgggggccgcgcgagtgcgtgatctgtttaaggaaggcaaaaaacgggcgccatgcatcatttacatcgatgagatagacgccatcggtcggcaacgttcgggaactgaaagcatgggacagggcagctctggcgaatcggagcagacgcttaatcagctgctggtcgagatggacggtatggccaccaaggagggcgtgctgatgttggccagtacgaatcgagctgatatcctagacaaggcgctgctgcgacccggtcgctttgatcgccacattctcatcgatttgcccacgctggcggagcgcaaggagatctttgagaagcacttgtcatcggtgaaactggagtcgccgcccacgaccttctcacaacgcttggcccgcctgacaccgggtttttcgggtgctgacatcgccaacgtatgcaatgaggccgccctgcatgcggcgcgcaacacacagatggaggtcagcagcaagaatcttgagtacgccgttgagcgtctagttggcggaactgagaaacgttcgcatgccctatcgctggcggagcgcaaggtgatcgcttaccacgaatcgggacacgcgctggtgggctggatgttgcccaactcggacatcctgcttaaggtgaccattgtgccgcgcacaagtctggcgctcggcttcgcccaatatacgcccagcgaacagcatttgtacagcaaggaggaactgttcgacaagatgtgcatggcgctcggcgggcgcgctgccgagaatctagtctttaaccgcataacgacgggagctcaaaacgatctggaaaaggtgacgaagatcgcgtactcgcagatcaagaagttcggcatgaacgacaccctcggtcccatctacgtacgcgacgcggatgagaccgagggcggcggtgcgatgggcagcggtggcaaaaagcccttctcgcgggccatggagagcatgattgacaacgaggcgcggcatgtggtggcgagtgcctatcaaaccaccgagggcatactcactacgcatcgcgataagctggagaagctggccgaagctctgctggagaaggaaacgctggactacgaccaggtggtgcagctaatcggacccccgccatacgatctgggcaagcggcaggtggagagcgtggagtttgagcagtcactgaagaacctaagcaccgacacggatgccacaaaagcctga

SEQ ID NO: 60708 - protein, 819 aa, Drosophila melanogaster
MLKGLRHVRNALQRGGSQLIQLRSATGQPPRIGRELSLLQLSRRQVMQLQAEYKAIVGLIARSLQLTPKEVRLMHLRSLSSTAKPPTASDGKTEKHEQPEKGSAKAKDDSSKEKKSAVAAEDGDKSSRAAGDEAASTPTSSSTIGEPGEDPNKNSNENDEKMRSVLTKAVLWLFTIYMFVAFFSLLITPRSERPEGSTRYVSWNEFVHHMLAVGEVKELIIRPDMEMVTIILHEGAVIKGRKVSSTIFHMAVADANKFEEKLRDVEKRLGIKDGVPVTYDRQTDTTGRILMLLLVCALLMSIATRMKSIKSPLSMDSFNQMGRAKFTLVDPFDGGRGVLFRDVAGLSEAKQEVKEFVDYLKSPEKYQRLGAKVPRGALLLGPPGCGKTLLAKAVATEAQVPFLSMNGSEFIEMIGGLGAARVRDLFKEGKKRAPCIIYIDEIDAIGRQRSGTESMGQGSSGESEQTLNQLLVEMDGMATKEGVLMLASTNRADILDKALLRPGRFDRHILIDLPTLAERKEIFEKHLSSVKLESPPTTFSQRLARLTPGFSGADIANVCNEAALHAARNTQMEVSSKNLEYAVERLVGGTEKRSHALSLAERKVIAYHESGHALVGWMLPNSDILLKVTIVPRTSLALGFAQYTPSEQHLYSKEELFDKMCMALGGRAAENLVFNRITTGAQNDLEKVTKIAYSQIKKFGMNDTLGPIYVRDADETEGGGAMGSGGKKPFSRAMESMIDNEARHVVASAYQTTEGILTTHRDKLEKLAEALLEKETLDYDQVVQLIGPPPYDLGKRQVESVEFEQSLKNLSTDTDATKA

SEQ ID NO: 60709 - DNA, 2424 bp, Arabidopsis thaliana
  CDS (1)..(2424)
atgatcttcttctctaagcttaatcgctccatttctcgttcaaagggatttttgtacggtggtggtgttagatcggcggcaaggctacttacttcgccgggacttgaggcggcgtctgtgaatgaagtggaaggtggattagggtttataagaagacactttgcttctttagcttcacggaagggtttagtcaataatgatttgattggtgtttttgctaatccaagacttcgtagattcttctctgatgaagctcctaagaagaagaattatgagaactattttcctaaagataagcaagaacccaagagtgatcagaaatcagagcataaagagggttcagaaaagaatgaaaatgagaatgtgggagatatgttcatgaaccgattccaaaatttgctaattcctctactagctcttgctgtattcttttctactttctcgtttggctctggggaacaacaacagataagtttccaggagttcaaaaacaagctactcgagcctggtttagttgaccacatagatgtttcaaacaaatcagtagcaaaagtctacgtgaggagcacaccgaaagaccaacaaacaactgacgttgtccatggtaatggtaacggtattcctgctaaaagaactggtggtcagtataagtactacttcaatatcggtagtgttgattcttttgaggagaaactcgaagaagctcaagaagcgttaggtgttgatcgtcatgaatatgttcctgtcacatacgtctctgaaatggtctggtatcaagagttcatgaggtttgcaccgactttgttgctcttgggtactctgatctatggtgcgagacggatgcaaggtggattgggtgtaggaggaactggcggtaagaatggtcgtggaattttcaatataggcaaagctacaataacgagagctgataaacattccaagaataagatttatttcaaggatgttgctggatgtgacgaggctaaacaagaaattatggagtttgtacatttccttaagaacccaaagaagtatgaagatttgggtgctaaaattccgaaaggtgcacttttagtcggtccgcctggaaccggaaagacccttttagcaaaagccacagcaggagaatctggtgtgccatttctgtctatttctggctcagatttcatggagatgtttgttggtgttgggccttcgagggtgagacatttgttccaagaggcgagacaagctgcaccgagcattatatttatcgatgagattgatgctattggtcgggcaagaggtcgtggaggtttaggcggaaatgatgagcgtgaaagcactctgaatcagttgctagttgaaatggatggttttggtacaaccgctggtgttgtggttcttgctggaaccaacagaccggatattttggataaagctttgttaaggcctggacgttttgatcgccagataactattgataaacctgatatcaaagggcgtgatcagattttcaagatttacttgaagaagatcaaacttgatcatgagccatcatattactctcaaaggcttgctgctctcactcccgggtttgcaggagctgacattgcgaatgtctgtaacgaagcagctcttattgctgctagacacgaaggagcaacggttactatggcacactttgaatctgcgattgatcgtgttattggtggtcttgagaagaaaaaccgggtgataagcaagttggagcgacgtacagttgcatatcatgaatctggtcacgcagttgtagggtggttccttgaacatgcagagccgttactgaaagtgactattgtaccacgtggcacagcggctctcggatttgcacaatacgttccaaacgaaaaccttctcatgaccaaagagcaactctttgacatgacttgcatgactctcggaggccgtgcagctgagcaggtattgataggtaaaatctcaacgggtgcgcagaacgatctagagaaggtgacgaagatgacttacgcgcaagtagctgtgtatggtttcagtgacaaggttgggctactctcgtttccaccaagggatgatggctacgacttctctaaaccatacagcaacaaaaccggtgctatcatagacgaagaagttagggactgggtggccaaagcttatgagcggaccgtagagctggttgaggaacacaaagtgaaagtggctgagatcgccgagcttttactagagaaagaggtgttgcatcaggatgatctcttaaaaattttaggtgaacgtccgtttaagtcagctgaggtcactaattatgaccggttcaagtctgggtttgaagagactgagaaggactcagccgccacccctacagtggagcctgtggtggatgatggagctcccccgccgtttgaaccccaggttgttccgacgtaa

SEQ ID NO: 60710 - protein, 807 aa, Arabidopsis thaliana
MIFFSKLNRSISRSKGFLYGGGVRSAARLLTSPGLEAASVNEVEGGLGFIRRHFASLASRKGLVNNDLIGVFANPRLRRFFSDEAPKKKNYENYFPKDKQEPKSDQKSEHKEGSEKNENENVGDMFMNRFQNLLIPLLALAVFFSTFSFGSGEQQQISFQEFKNKLLEPGLVDHIDVSNKSVAKVYVRSTPKDQQTTDVVHGNGNGIPAKRTGGQYKYYFNIGSVDSFEEKLEEAQEALGVDRHEYVPVTYVSEMVWYQEFMRFAPTLLLLGTLIYGARRMQGGLGVGGTGGKNGRGIFNIGKATITRADKHSKNKIYFKDVAGCDEAKQEIMEFVHFLKNPKKYEDLGAKIPKGALLVGPPGTGKTLLAKATAGESGVPFLSISGSDFMEMFVGVGPSRVRHLFQEARQAAPSIIFIDEIDAIGRARGRGGLGGNDERESTLNQLLVEMDGFGTTAGVVVLAGTNRPDILDKALLRPGRFDRQITIDKPDIKGRDQIFKIYLKKIKLDHEPSYYSQRLAALTPGFAGADIANVCNEAALIAARHEGATVTMAHFESAIDRVIGGLEKKNRVISKLERRTVAYHESGHAVVGWFLEHAEPLLKVTIVPRGTAALGFAQYVPNENLLMTKEQLFDMTCMTLGGRAAEQVLIGKISTGAQNDLEKVTKMTYAQVAVYGFSDKVGLLSFPPRDDGYDFSKPYSNKTGAIIDEEVRDWVAKAYERTVELVEEHKVKVAEIAELLLEKEVLHQDDLLKILGERPFKSAEVTNYDRFKSGFEETEKDSAATPTVEPVVDDGAPPPFEPQVVPT

SEQ ID NO: 60711 - DNA, 2082 bp, Capsicum annuum
  CDS (1)..(2082)
atggctacttcatcagtatgcatagcaggaaatggtttgtctacacataaaacacagaaagtctttaagaaggatgtttatggaaggaaaattttatattcctcaaatcttccatcgtctggtaaaacatcaagagtagttgtaaaagcatctcttcagcaaaggccggatgaaggaagaagaggctttcttaaattattgcttggaaatgttgggcttggagcgcctgctttgttaggtaatggaaaagcctatgctgatgagcaaggtgtttctaactcaaggatgtcttattctatattttcggaatatctggacaaggatagggtgcaaaaagtagatttgtttgaaaacggaaccatagctattgttgaggctgtatctccagaattaggaaaccgggtgcaaagagttagggtacaactacccgggctcagccaggaacttcttcaaaagttccgggaaaaaaacatcgattttgctgctcacaatgctcaagaggactcaggttctctcatattcaacttgattggaaatctggcattcccgcttattttgattggtggtcttttcctgctatcaaggcggtctaacggaggaatgggaggtcctggtgggcctggtaacccactagcatttggtcaatcaaaagctaagttccaaatggaaccaaacactggtgtgacatttgatgatgttgctggtgtagatgaagcaaaacaagattttatggaggttgtagaatttttgaagaaacctgagaggttcactgcagtgggggctcgtattccaaaaggtgttcttcttgttggtcctcctggtacggggaagaccctgctagcaaaggcaattgctggtgaagcgggtgttccatttttctcaatttcaggttcagaattcgtcgagatgtttgttggtgttggagcctctcgagtccgtgatcttttcaagaaggccaaggaaaatgctccctgcattgtatttgttgatgaaattgatgctgttgggcgacaaagagggactggaatcggaggagggaatgatgaaagagaacagaccctgaaccaactattgacggaaatggatggttttgaaggaaatactggtataatagttgttgcagcaaccaatcgtgcagatattctcgattcggctttgctgagaccaggacggtttgatagacaagtatctgtggatgttccagacatcaagggaagaacagagatcttaaaggttcatgccggcaacaagaagttcgattcagatgtgtctcttgaagttattgccatgaggacacctggcttcagtggagcagatcttgctaacctcttgagtgaagcagccattcttgcaggtcggcgtggtaaaacagcaatcgcatccaaagagattgatgattcaattgacaggatagtggctggaatggaaggaacagtaatgactgatggcaagagcaagagtcttgtggcatatcacgaagttggacatgccatctgtggaactctcactccagggcatgatcctgttcaaaaggtcactctaatcccacgtggtcaggcaaaaggtttgacctggttcattcctgcagatgatccaaccttaatatccaagcagcaactcttcgctagaattgtcggtggacttggtggaagagctgcagaggaagtgatctttggtgcacctgaagtgacaactggtgctgctggtgatttgcagcagatcaccagtttggcaaaacagatggttgtcacttttgggatgtctgaacttggcccctggtcactcatggatgcttcagcccaaagtggtgatgtaatcatgagaatgatggccaggaactcaatgtcagaaaagctagctgaagacatcgatgctgctgtgaagaggctttcagacagtgcatatgagattgcgttgagccaaatccgcagcaaccgtgaagccattgataagattgtggaagtcctccttgaacaggagacgatgacaggagatgaattccgtgctattctctcagaatttgtggaaattcctgctgaaaaccgtgtccctgctgctgtacctacccccgcagccgtataa

SEQ ID NO: 60712 - protein, 693 aa, Capsicum annuum
MATSSVCIAGNGLSTHKTQKVFKKDVYGRKILYSSNLPSSGKTSRVVVKASLQQRPDEGRRGFLKLLLGNVGLGAPALLGNGKAYADEQGVSNSRMSYSIFSEYLDKDRVQKVDLFENGTIAIVEAVSPELGNRVQRVRVQLPGLSQELLQKFREKNIDFAAHNAQEDSGSLIFNLIGNLAFPLILIGGLFLLSRRSNGGMGGPGGPGNPLAFGQSKAKFQMEPNTGVTFDDVAGVDEAKQDFMEVVEFLKKPERFTAVGARIPKGVLLVGPPGTGKTLLAKAIAGEAGVPFFSISGSEFVEMFVGVGASRVRDLFKKAKENAPCIVFVDEIDAVGRQRGTGIGGGNDEREQTLNQLLTEMDGFEGNTGIIVVAATNRADILDSALLRPGRFDRQVSVDVPDIKGRTEILKVHAGNKKFDSDVSLEVIAMRTPGFSGADLANLLSEAAILAGRRGKTAIASKEIDDSIDRIVAGMEGTVMTDGKSKSLVAYHEVGHAICGTLTPGHDPVQKVTLIPRGQAKGLTWFIPADDPTLISKQQLFARIVGGLGGRAAEEVIFGAPEVTTGAAGDLQQITSLAKQMVVTFGMSELGPWSLMDASAQSGDVIMRMMARNSMSEKLAEDIDAAVKRLSDSAYEIALSQIRSNREAIDKIVEVLLEQETMTGDEFRAILSEFVEIPAENRVPAAVPTPAAV

SEQ ID NO: 60713 - DNA, 1833 bp, Ostreococcus tauri
  CDS (1)..(1833)
atgacgtccacgagcgcatcctcgagcggtgaatccttccgcgagctcaacgcgcggggtgaacacgcgagagtgatcgcgatgtacgagtcgagaagcgtcgaggcgagcgagcgagacaccgcggagtacctcaaggcgctcgtgcacgcgaatcgagtgcacgagagcgcgctcgcggcggcggtgcacaggggcgcgacggggacggagagcgcacggagcgcgttgaacacaggaatcatcaactcgctgggatcgatcttcacgcaacgcggcgtcgggggaggtgaagcgggcgccgccgccgccgcggcgagcgcggtgctcgggagcgagaagaatccgctgtacacgcaacagctcgagccgaccttcaaggcgcagctgtggcgaaccgtgcgaacgctcggcaccgcgttcatcgttctgagtggaatcggcgcgctgttagaagaccgtggggggatgagcaaagcgattttaggaggcgagagcgcgaaaccgcagcaaaccgcgccgttgacgcgtttcgacgacgtcaagggcgtcgacgaagcaaaggctgagctcgtcgagatcgtcgaatacctcaaggagccggagagatttacaaaactaggcgggaagctaccgaagggattgcttctggtcggacccccggggacgggtaagacgatgctcgccaaagccgtcgccggggaggctggtgtgccgttcttctacacgagcgggagcgagtttgaggaaatgttcgtcggcgttggcgcgaggcgcgtgcgcgatttgttcaaagctgccaagcaaaacgcaccgtgcatcatttttatcgacgaaatcgacgccgtcggcgccgcgaggaatccgaaggatcagcaaaacacgcgcatgacgttgaatcagctcttgacggagctagacgggttcaaggcgagcgagggggtcatcgtcctcgccgctacgaacacgccaggaatgctggacaaagctctgatacgcccgggacggttcgaccgaacggtatccgttcctaatccagacgtcggtggccgacgcgacatcttacgagtacacgcgcggggcgtcaagtttgatgaaaacgtcgatttcgatgtcgtcgctcgaggaacgccaggctttagcggcgccgacttggcgaacctcatcaacatagccgcgcttaaggcggcgctcgacggggtggcgagcgttggggcgaagcatctcgacttcgcgaaagaccgcattctcatgggcgctgagcggacgtcagccattctcacgccggagaaccgcaagcttacggcttatcacgaaggaggccacgcgttggtcgcgcttcgcacgaagggcgcgcgcccggtgcacaaggcgacgatcgtgcctcgaggccaagcgctcggtatggtgatgcagttacccgagaaggacgagctccaaatgacgcgaagacagctattggcgatgctcgacgtcaccatgggcggtcgcgtcgcggaagagttgatctttggctcggacgaaatcaccactggggcgtcgagcgatctccagcaagcgacgaggttggcgcgcgaaatggtgacgcgatacggcatgagcgataccgtgggcctcgcgtcccaggactacgcgtccgatgaactgtcgagcgaaaccaggcagttaattgagatcgaagtgaaagcgatgctcgacgcggcgtacaagcgtgcgaaggatctactgacaaaacacgaaggcgaccttcacgcgattgctcgtcggctcttggactccgaaagcttgtccggaaacgaactgaaggagttgtgcggtatcgcgagcgcgtag

SEQ ID NO: 60714 - protein, 610 aa, Ostreococcus tauri
MTSTSASSSGESFRELNARGEHARVIAMYESRSVEASERDTAEYLKALVHANRVHESALAAAVHRGATGTESARSALNTGIINSLGSIFTQRGVGGGEAGAAAAAASAVLGSEKNPLYTQQLEPTFKAQLWRTVRTLGTAFIVLSGIGALLEDRGGMSKAILGGESAKPQQTAPLTRFDDVKGVDEAKAELVEIVEYLKEPERFTKLGGKLPKGLLLVGPPGTGKTMLAKAVAGEAGVPFFYTSGSEFEEMFVGVGARRVRDLFKAAKQNAPCIIFIDEIDAVGAARNPKDQQNTRMTLNQLLTELDGFKASEGVIVLAATNTPGMLDKALIRPGRFDRTVSVPNPDVGGRRDILRVHARGVKFDENVDFDVVARGTPGFSGADLANLINIAALKAALDGVASVGAKHLDFAKDRILMGAERTSAILTPENRKLTAYHEGGHALVALRTKGARPVHKATIVPRGQALGMVMQLPEKDELQMTRRQLLAMLDVTMGGRVAEELIFGSDEITTGASSDLQQATRLAREMVTRYGMSDTVGLASQDYASDELSSETRQLIEIEVKAMLDAAYKRAKDLLTKHEGDLHAIARRLLDSESLSGNELKELCGIASA

SEQ ID NO: 60715 - DNA, 2430 bp, Ostreococcus tauri
  CDS (1)..(2430)
atgcgtcgccgcgtcgccgacgtcctgacgcgcacggtcgcggcgtcatgctcgccgctcccatcgtcgcgaacgtccatcagagagctcgcgcacggcgcgcgtcgcgtgacgacgcgtgagaatctgaagaatttccaacgaaaccgtgaaatcgtcacccgagcgctccgcgcaccgcgattcacgcacttcaggacgttcgcgaacgcgagcggaaagggtggaacccagggcaagttcacgtcgatgcgcccgcgggcgaagaaggatgcgggcggatcgaacgggaagaaagggagcgagggtcaaggagaaaatagcggaaccgaggcgccgaaaaccttgggggagctcatgcgcggaccaggggggcagcagatcgcgagtttaatgctcctagcgcttgggatgagtttactgagctcgatgcggcaggacgcgcgggagatttcgtttcaggagtttaagacaaaactcttggagcccggtttggtggagcggatcgaggtgtcgaataagagccaagccaaggtgtatatcaaggcaccgggggcgatgatcaagagtcgacacggtgccggggagtcgtacgactcgagcgaaatcggggccccacccggggcgaagacgcaaggtgggtacaagttttatttcaacattggaagcctggactctttcgaacgcaaactggaggaggcacaagagttgattgggctcgaatcgaaggatttcgtttcggtgacttacgtgaacgaaatattctggcagacggagctcatgcgattgcttccgactcttctcttgatcgggggatggttgtatttcacccgacgaagtgccgggatggggggcatgggcatgggcggaggcggcgggccgggaggtattttcaacgtcggcaaggccacggtgagcacgctggataagaacgcgaagaacaagatcatgttcaaagacgttgccgggtgcaacgaggccaagcgagagatcatggagttcgtggactttttgaagaatccaaaaaaatacgaagccctgggggcaaagattccgcatggcgccctcctcgtcgggccgcccgggacgggtaagacacttctcgcgaaggccacggctggggaagcgggcgtgcctttcttgtcaatctccggctctgatttcatggagatgttcgtcggcgttggtccctctcgcgtgcgagacttgtttgcgcaggcacgcgcacagaaaccgtccatcatcttcatcgacgaaatcgatgcaatcggtcgccagcgtggacggggtggttttgccgggggtaacgacgagcgtgagaacacgttgaatcagcttctcgttgagatggatgggttcggcaccaaggaaggcgtcatcgtattggcgggcacaaaccgaccggatattctggacaaggcgctcctgcgtccgggacgcttcgatcgtcaaatctccgtcgaccgacccgatatcacggggcgcgagcaaattttccgcgtgcatctcgcgtcgattgccctcgacggacctgtggatcactacagcgagcgtctcgccgcgttgacacctggttttgctggagcggacatcgccaacatgtgtaacgaggccgcactcgcggctgcacgtgaaaacgtcaactcggtgtcacttaagcacttcgagtacgccgctgatcgcgtcatcgccggtttggaaaagaaatcaaaagtggtgaacaagacagagcgccgaactgtggcgtaccacgaagccggtcacgccgttgttggatggtttttggagcatgccgagccgttgctcaaggtctccatcgtccctcgtggctccgccgcgcttggctttgcgcagtacctgccgaacgaaaacctcctcgccaccacgcagcagcttgtggacatgatgtgcatgacgcttggcggccgcgccgcggagcaagttatgctcggcaaaatctccacgggggcacaaaatgatctcgaaaaggtgacacaaatggcgtacaacactgtcgcagtgtatggcatgaatgaaaagatcggcctcttgtcgttcccgaaggatgaacaaagcctcaagtcgccctactcggaggacacggctcgaatgatcgacgaagaggttcgcctgctcgtagacaaggcgtaccaacgcaccgtggcgctagtcgaggagaaaaagcacttagtggaagcgatggcgcgcgggttgctcgacaaagaggtgttgcagcgacacgatctcgtccaacttctcggcgagcgcccgttcgtatcggagaacccgcaaaacatcgacatcctcaacgaaggcttcaaattccactaccccaaggatgccgaggaaccggacgccgaggaaccggatgctgaggaaccggaggattccgcgggcgaacccagtcccgcgttcccgctcgcgacatga

SEQ ID NO: 60716 - protein, 809 aa, Ostreococcus tauri
MRRRVADVLTRTVAASCSPLPSSRTSIRELAHGARRVTTRENLKNFQRNREIVTRALRAPRFTHFRTFANASGKGGTQGKFTSMRPRAKKDAGGSNGKKGSEGQGENSGTEAPKTLGELMRGPGGQQIASLMLLALGMSLLSSMRQDAREISFQEFKTKLLEPGLVERIEVSNKSQAKVYIKAPGAMIKSRHGAGESYDSSEIGAPPGAKTQGGYKFYFNIGSLDSFERKLEEAQELIGLESKDFVSVTYVNEIFWQTELMRLLPTLLLIGGWLYFTRRSAGMGGMGMGGGGGPGGIFNVGKATVSTLDKNAKNKIMFKDVAGCNEAKREIMEFVDFLKNPKKYEALGAKIPHGALLVGPPGTGKTLLAKATAGEAGVPFLSISGSDFMEMFVGVGPSRVRDLFAQARAQKPSIIFIDEIDAIGRQRGRGGFAGGNDERENTLNQLLVEMDGFGTKEGVIVLAGTNRPDILDKALLRPGRFDRQISVDRPDITGREQIFRVHLASIALDGPVDHYSERLAALTPGFAGADIANMCNEAALAAARENVNSVSLKHFEYAADRVIAGLEKKSKVVNKTERRTVAYHEAGHAVVGWFLEHAEPLLKVSIVPRGSAALGFAQYLPNENLLATTQQLVDMMCMTLGGRAAEQVMLGKISTGAQNDLEKVTQMAYNTVAVYGMNEKIGLLSFPKDEQSLKSPYSEDTARMIDEEVRLLVDKAYQRTVALVEEKKHLVEAMARGLLDKEVLQRHDLVQLLGERPFVSENPQNIDILNEGFKFHYPKDAEEPDAEEPDAEEPEDSAGEPSPAFPLAT

SEQ ID NO: 60717 - DNA, 2388 bp, Ostreococcus tauri
  CDS (1)..(2388)
atgggcggtcgacggtgtgtattgatcgcgcgcggggcgtcggagagggacgaggggggcgagggcgcggaggcggaggcggagggacgcccggggggagcgacgacggagacgaaggacggcgacgcgacgaagggcgaggatggtgcggaagggtcgaaggtgaagatgcgacagagagttgtggattgggcgacgaacgcgctgccgttcgtgaagacgaagaagaagtgggagaagatgttcgcggaggcggacgcggcgccgctggatcacggcaagcaagacgccctcatgagagagctgttgcagtacgataggaatgatgatttgatctcgcgattcgagacgagaaagtacgcgagcggaccggtgtcggtattggcgtacatgacggcgctggtgcggacgaaccgtttggagaattacgccgtgagtggagacgcgggggttgggaagccgccgcccgtcgccgacccggcggctctggacaagcttccggatttactcggtgatctgagtgaacgcgccaagggaacgggagagttggtagagttggagacgggaaagagcgcgcaggcgccactgcacatcaacatcgtcggaagcgccgggctcggtctccagcccccgagcgcggcgaagcgtttgctaaactggttcttcggcgttttcttcttcattgccggcttgagctttttaagctcgttcctcctacgccgcgtcgccgtgcgcgttatcgagtccggtccgtcatcctcgcacatgtcgggtagtcactcgctcccggggacaccgtccggttcggatccgatgtccgccgccggactcgggccgaacgggcagccgtcgtacgacccgaaacagttcaacaaggacaaccttccggagaaatccctgaagaagtttaaggacgtgaaggggtgcgacgaggcgaaggaggagctccaggaaatcgtggagtacctgcgtaatccggacaagttcacccgtttaggtggcaagctcccaaagggcgtgttattgactggaccgccggggacgggtaagacgctcctcgcgcgcgccgtcgcgggcgaggccgacgtgcccttcttttaccgatccgggagtgaatttgaggaaatgttcgtcggcgtcggctcgaagcgcgtgcggcagctcttcgccgcggcgaagcgcaagacgccttgcatcgtgttcatcgacgaaatcgactccatcggcacgtcgcgtaaatccgtcgagaatcagcaccgaaagacgttgaaccagctcctgaccgagatggacgggtttgaacaaaacgagggaatcattgttctcgcggcgacgaacattcctgaggcgctcgatccggcgctcacgcgtccaggacgctttgacagaatggtgcacgtgccaaacccggacatagggggcaggcgagagatcttggatcactacctccacgacaagccgacgactagtgacgtcgacgtggacaagatcgcacgcggtaccgccggattcagcggcgctgagctgtataacctggtgaatatggcggcggtgcaagcggcgatggcagacgcgcccgcgatcacggcggctgacctcgactgggctcgcgaccgcgtcttgatgggtgccgagcgcaaatccgcggtactcagcgaagagaaccgtcgtctcacggcgtaccacgaggccggccacgccctcgtcgcgctgaagacggacgcgacgcttcccattcacaaggcgaccatcatgccgagaggatcggcgctcggaatggtgatgcagctcccagacaaggacgagacgagcgtgaaccgcaagcagctcatggctcgcttggacgtgtgcatgggcgggcgtttggcggaggagctcatcttcggtccggatgaagtcaccacgggcgcgtcgggggatttgcagcaggcgacgcgactggcgttttacatgattagcgacgtcgggatgaacagcaacctcggcccagtgcacctttcgagcattcgcggcggcggtgccgccggtcgaggtgcatccggttcgacggaatctgccgtcgacgctgaggtcatcaagcttctcaaggagtctcaaactcgcgtgcagaagctcttaaagtcaaacgctcgcgatttgcacaccatcgccaaggcgctgatggagaaggagacgctcaccgggaacgagattcgcgagctcatcggaatgccaccggtgaaggaaccggcgcctatcaaggcccgcgcgagggcgaagaaacccgaaccgacggtgaaggaaccagaggtgaaggagacggagggtgagaagccagaggaagacgaggacgacgagcgaaccatcataatcgtgatccaatcagacgaggatgaatccccaaaatga

SEQ ID NO: 60718 - protein, 795 aa, Ostreococcus tauri
MGGRRCVLIARGASERDEGGEGAEAEAEGRPGGATTETKDGDATKGEDGAEGSKVKMRQRVVDWATNALPFVKTKKKWEKMFAEADAAPLDHGKQDALMRELLQYDRNDDLISRFETRKYASGPVSVLAYMTALVRTNRLENYAVSGDAGVGKPPPVADPAALDKLPDLLGDLSERAKGTGELVELETGKSAQAPLHINIVGSAGLGLQPPSAAKRLLNWFFGVFFFIAGLSFLSSFLLRRVAVRVIESGPSSSHMSGSHSLPGTPSGSDPMSAAGLGPNGQPSYDPKQFNKDNLPEKSLKKFKDVKGCDEAKEELQEIVEYLRNPDKFTRLGGKLPKGVLLTGPPGTGKTLLARAVAGEADVPFFYRSGSEFEEMFVGVGSKRVRQLFAAAKRKTPCIVFIDEIDSIGTSRKSVENQHRKTLNQLLTEMDGFEQNEGIIVLAATNIPEALDPALTRPGRFDRMVHVPNPDIGGRREILDHYLHDKPTTSDVDVDKIARGTAGFSGAELYNLVNMAAVQAAMADAPAITAADLDWARDRVLMGAERKSAVLSEENRRLTAYHEAGHALVALKTDATLPIHKATIMPRGSALGMVMQLPDKDETSVNRKQLMARLDVCMGGRLAEELIFGPDEVTTGASGDLQQATRLAFYMISDVGMNSNLGPVHLSSIRGGGAAGRGASGSTESAVDAEVIKLLKESQTRVQKLLKSNARDLHTIAKALMEKETLTGNEIRELIGMPPVKEPAPIKARARAKKPEPTVKEPEVKETEGEKPEEDEDDERTIIIVIQSDEDESPK

SEQ ID NO: 60719 - DNA, 2250 bp, Ostreococcus tauri
  CDS (1)..(2250)
atggcgaggattacgacgcgtgacgtgcgcacgcgcgcgggggatgagtcggggcggagcggatcggacgagggcgaccggctggagacgtcgggggggtcggcggatgggggtcggcggagcgaggcggcgacgaacgcgaacgtgtcgacgaacggagataacggacgaggaagggagccgacgccgcagcgagggacggcgtggtgggtggtgaacgtactgcaaccgctggagctgttgaagcttctggggaagggatttttgttttacgcggcgttcagcgtgactacgttcgcgctgaccgcgcaaacgtctgcgcaaacgcaaccggtgtcggcgaggtacgacgtgttcgtggaggcggcgaataggaacaacattcgagcggtgcatgtggatgggaatcagctcacgtgggtttcacggtcgaagaagattgtgcctccgccgccgggttcagagggaacgccgttcaacgaaccgagggaggtggaggtggtgtatcacacaacgcgaccgaaggatgcgccgatgccgtacgatgccatcatgaagaatagtgtggatatgacagctccagatccgagacaagctccgaattacgcgccgtggctcgcgctgctcatgttcgttttgttggtgaacgtcttccgcaaccagggtcaagggagctttggcggtccgggagttcgcggctccccgggagggatctccatgcccggagtgcagcgtggaggtcgagccagagacgccatcgcaccgcctacgacgacgttcgccgacgtcgcgggcgtggacgaagccaaggaggagctgcaagagatcgtggacatactgaagagacctgaaaagtatgcgcgacttggcgcccgaccaccgagcggcgtcatgcttgtcggggctccaggtaccggcaagactttactcgctcgtgccgtcgctggagaggccggggtaccattcatatccatctccgcgtccgaattcgtcgagcttagtcggtatgggtctgctcgagtgcgcgaggtgttcgccagggcaaaggcgcagtctccgtcgatagtgttcatcgacgaaatcgacgccgtggcgaagagtcgcggagacggaaagatgcgcggtatgggaaacgatgaacgcgaacaaactctcaatcaacttcttaccgagctcgatggattcgagacggagtcgatggtgatttgcattgccgccacaaaccgcgcagatacccttgacgcagctctgcgtcgaccaggacgcttcgatcgaacggtttcggtggatcgtccagataaacagggacgtcgagaaattctcgccgtacacacgggtcgacgacatcttcccctcgccgaggacgctggactcgatgtcattgcgcagatgacggcgggtttcaccggcgcagacttggaaaacttggtgaacgaggccgcgctcctcgccggtcgctcgggcaagagcacggtgggttatgcggactttgaagccgccgtgcttcgaacaatcgccggcatcgagaagaagagaaacctgttgtcaatcagcgagaagacgacagtgtcagttcacgaagtcggccacgctctcgtctcgacggcagtaggacggctcattccggacactgaacgtccggagacgttgagcatcgtcagtcgcagtgggggtgcgctcggatttacgtacacgccgccaacggaggaccgttggctgatgtacaaggacgaactcttgggcaaggtgacgacattcatgggcgggcgagctgcggagatggtggtgtgcaagcgcatcagctccggtgcgagcgatgacattcagcgtgcaacaaacttagcgtataagagcattgctgagctcggtttcagcgcgaacgttggcccgatgagtctctcaactctctcgtctggggccagcgaggacgttctgttcggctcggacagggcaagcgaaaccgactctatcgtcgaaaaagaggtcaagcatatactcacaacttctcttcttgtcgcgtgcgacgtgatgcgggccaacgccgacgtcatggccgacctaagcaaagctcttgccgaggaagagaaaatatacggacccaatcttcaacagtatctcgatcgagtcgtcgcgccgccgtcgctcgaactgtttttgaaaggcgaagcaccacccgtgaccgcggctgacatcgaacttatgtcgaactttccactgccggccgtcacggctcaaactaccagtagatga

SEQ ID NO: 60720 - protein, 749 aa, Ostreococcus tauri
MARITTRDVRTRAGDESGRSGSDEGDRLETSGGSADGGRRSEAATNANVSTNGDNGRGREPTPQRGTAWWVVNVLQPLELLKLLGKGFLFYAAFSVTTFALTAQTSAQTQPVSARYDVFVEAANRNNIRAVHVDGNQLTWVSRSKKIVPPPPGSEGTPFNEPREVEVVYHTTRPKDAPMPYDAIMKNSVDMTAPDPRQAPNYAPWLALLMFVLLVNVFRNQGQGSFGGPGVRGSPGGISMPGVQRGGRARDAIAPPTTTFADVAGVDEAKEELQEIVDILKRPEKYARLGARPPSGVMLVGAPGTGKTLLARAVAGEAGVPFISISASEFVELSRYGSARVREVFARAKAQSPSIVFIDEIDAVAKSRGDGKMRGMGNDEREQTLNQLLTELDGFETESMVICIAATNRADTLDAALRRPGRFDRTVSVDRPDKQGRREILAVHTGRRHLPLAEDAGLDVIAQMTAGFTGADLENLVNEAALLAGRSGKSTVGYADFEAAVLRTIAGIEKKRNLLSISEKTTVSVHEVGHALVSTAVGRLIPDTERPETLSIVSRSGGALGFTYTPPTEDRWLMYKDELLGKVTTFMGGRAAEMVVCKRISSGASDDIQRATNLAYKSIAELGFSANVGPMSLSTLSSGASEDVLFGSDRASETDSIVEKEVKHILTTSLLVACDVMRANADVMADLSKALAEEEKIYGPNLQQYLDRVVAPPSLELFLKGEAPPVTAADIELMSNFPLPAVTAQTTSR

SEQ ID NO: 60721 - DNA, 2424 bp, Medicago truncatula
  CDS (1)..(2424)
atgattttttcaagaattgggcgttctctatcgcgttcttctcgcgttaaaaatttgttgcacggtgaaacaagattgggaacgctttatggagtttcgagaacgaatgtttttgtcgatgacgttgaaaagggattagggtttgtaaggggttatgtatcttctgccatagctcgcaataatgggtttggttcaaatttgtatgattttaaatcaattgctgcaaaccgtatgcttcatcgcatgttttcgagcgaatccccaaagaaaaagaattatgaaaagttttatcccaaggaaaaaaaggaagtgccaaagggagaggagaaaaaatctgagtctaaagatgagtcaaagtcaaacacagaggatggaggtagttttcacgaagcttttataaaacagtttcaaaactatctcaccccactgttggtggtgggactatttctttcatccctttctcttggtcctcgcgatcagcagcagattagtttccaggagtttaaaaataagcttttggaaccaggattagtagaccatattgttgtctccaacaaatcagttgccaaaatatatgtgaggaactctccccttaatcaagcagacagcgaagtccaaggaacccttcctgcaaagggatctggtggccaatataaatatataatcaatattggaagtgtcgagtcttttgaggagaagttagaggaagcgcaagaagcactaggcgttgactctcacaattttgtacctgttacatattcttctgaaatggtttggtaccaggagttaatgagatttgcgccaaccctgttgcttttgggaactctctggtttatgggaaggaaaatgcaaggtggatttggtgttggtggtggctccactggtaagggtagtcgtggaatatttaacattggaaaagcacatgttactaaagtagacaaaaataccaaaaacaaggtttattttaaagatgttgctgggtgtgaggaggcaaagcaagaaattatggagtttgtgcactttctcaagaatcctaagaaatacgaagagcttggtgccaaaattccaaaaggtgctcttctggtgggtcccccaggcacaggaaaaactcttttagcaaaagcaactgcaggcgagtctggtgtgccatttctttccatatctggttctgatttcatggaaatgtttgtcggtgttggaccatccagggtgagaaacttgtttcaggaagcaaggcagtgtgctcccagtatagtatttattgatgagattgatgcaattggtcggaaaaggggtcgtggaggtttctctggttcaaatgatgagcgtgaaagtactttaaatcaattgttggtggaaatggatggttttggaaccactgctggagttgttgtgcttgcaggtacaaatagagctgatatattagacaacgccttacttaggcctgggcgttttgaccgcacgatatcaattgatgtacccgacattaaaggtcgtgaccagatatttcagatttatttgaaaaaaatcaaacttgaccacgagccttcatattattctcagaggcttgcagcccttactccaggatttgctggagcagacattgctaatgtttgcaatgaagctgctctgattgctgcaaggactgatgaatcgcaagtcacaatggatcatttcgaggcagctatcgataggatcattggtggtttggagaagaagaacagggtaataagtaagcgggaaaggcgtactgttgcttaccatgaagcaggccatgctgttgcaggttggttcttggaacattgtgagccattgttgaaagtaaccattgttcctcgcggcacagcagcacttgggtttgcccaatatgttccaagtgagaaccttctcaggacaaaggagcagcttttggatatgacttgtatgacccttggtggtcgggctgccgagcaggttctcattggagcaatctccactggagcacaaaatgacttggagaaagtaaccaagatgacatatgcccaagtagccatctatggtttcagtgaaaaagtgggtctcctctctttccctcaaaatgaggatcagtttgggaaaccatacagtggcgatactggtaacatcattgatcaggaagtgcgagattgggtgaaccatgcatatgaacgtaccgtacagcttatagaagaacacaaggagaaactagctcaaattgcagagttacttctcgaaaaagaagtacttcaccaagaggacttggttcgaatcttgggtgagcgacccttcaagagtgcagaacccacaaattacgatagatttaagctagggtttcaagatgaggagaaagctgcagaaaccaccgtcgatgaagccgaagagggtagtgggtcttcacctctagaacctgaggttgttcccacatag

SEQ ID NO: 60722 - protein, 807 aa, Medicago truncatula
MIFSRIGRSLSRSSRVKNLLHGETRLGTLYGVSRTNVFVDDVEKGLGFVRGYVSSAIARNNGFGSNLYDFKSIAANRMLHRMFSSESPKKKNYEKFYPKEKKEVPKGEEKKSESKDESKSNTEDGGSFHEAFIKQFQNYLTPLLVVGLFLSSLSLGPRDQQQISFQEFKNKLLEPGLVDHIVVSNKSVAKIYVRNSPLNQADSEVQGTLPAKGSGGQYKYIINIGSVESFEEKLEEAQEALGVDSHNFVPVTYSSEMVWYQELMRFAPTLLLLGTLWFMGRKMQGGFGVGGGSTGKGSRGIFNIGKAHVTKVDKNTKNKVYFKDVAGCEEAKQEIMEFVHFLKNPKKYEELGAKIPKGALLVGPPGTGKTLLAKATAGESGVPFLSISGSDFMEMFVGVGPSRVRNLFQEARQCAPSIVFIDEIDAIGRKRGRGGFSGSNDERESTLNQLLVEMDGFGTTAGVVVLAGTNRADILDNALLRPGRFDRTISIDVPDIKGRDQIFQIYLKKIKLDHEPSYYSQRLAALTPGFAGADIANVCNEAALIAARTDESQVTMDHFEAAIDRIIGGLEKKNRVISKRERRTVAYHEAGHAVAGWFLEHCEPLLKVTIVPRGTAALGFAQYVPSENLLRTKEQLLDMTCMTLGGRAAEQVLIGAISTGAQNDLEKVTKMTYAQVAIYGFSEKVGLLSFPQNEDQFGKPYSGDTGNIIDQEVRDWVNHAYERTVQLIEEHKEKLAQIAELLLEKEVLHQEDLVRILGERPFKSAEPTNYDRFKLGFQDEEKAAETTVDEAEEGSGSSPLEPEVVPT

SEQ ID NO: 60723 - DNA, 2124 bp, Medicago truncatula
  CDS (1)..(2124)
atggcttggaggcgtttgattacgcaggttgaacggcatcaatcagaatttggaaaagtcaaaggattattgactagaagctatttatctcctaataagtttcaaggctatacaaggaataggcttctcttctcccaggagagatgccaatccagctatctaggaaacctggcccgacgactacgtgattcatctgaagctgaggaggaagtctcttatctcaaagaactttaccgtcgaaatgatccggaagctgtgattagagcatttgaaagtcagccatctctgcatacaaattctgcggcactttctgaatatgttaaagcattggtgaaagttgataggctggatgaaagtgaattactccagacattgagaagaggtatttctaattcagtgagagaagaagaaagtggtatcggtggccttgctgttcttagaaatgtgggaaaatctacaaaagatggaattcttggaactgctggtgctcctattcatatggttgctgcatcagaaggtggaagtttcaaagagcaaatatggcgtacaattaggtctgttgcagtggccttcctcgtgatttcgggtgtaggagctctcattgaggataaaggaattagtaaaggacttggtatgaatgaagaagtgcagcccagtgtagagaccagtactaaatttagtgatgtgaaaggtgtagatgaggcaaaggcggaacttgaagaaattgttcattacctaagagatcctaagcgctttactcgtcttggtggcaaactcccaaaaggtgttttgcttgttggcccgcctggcactggtaaaacaatgttggcaagagctattgctggagaggctggggttcctttcttctcatgcagtggaagtgaatttgaagagatgtttgttggtgttggtgcacgaagggtgagagatctttttgctgctgcaaaaaagcggtcgccttgtataatctttattgacgagattgatgctattggtggaaaacgaaatgcaaaggatcaaatgtacatgaagatgactttaaatcaaatgcttgttgagttagatggtttcaaacaaaacgatggcataattgtgattggtgctactaattttcctgagtcactagataaggctttggttagacctgggcgatttgatcgccatgttgttgttcccaatccagatgtagaaggacgccgacagattttggaatctcacatgtcaaagattctgaaggcggacgatgttgacctgatgatcactgctcggtgtacacctggtttctctggtgctgaccttgcaaacttggttaatgtggctgccctcaaggctgcaatggacggttccaaagccgtgagcatgcatgatttagagtttgcacgggacaagattttgatgggaagtgaacgcaagtcagctgttatatctgaggaaacaagaaagatgactgctttccatgagggtggccatgccttggtagcaattcattctgatggtgcgctacctgttcacaaggcaactatagttcctcgtgggatggctcttggcatggtttctcaactgcctgacaaggatcagaccagtcattcccgtaaacagatgcttgccgagcttgatgtttgcatgggaggtcgggttgctgaagagttaatttttggagaaagtgaagttacttctggtgcatcctcagatctttcaaaggcaactaagctggccaggcaaatggttactaaatatggtatgagtactgaagttggacctgtcactcacaattactacgatgatgggagaagtatgagctcagaaaccagattgcttattgagaaagaagtgaagaacttactggagagagcttacaacaatgctaaaactattctaaccacccatgaaaaggagcttcatgcgcttgcaaatgctcttctggagcatgagacacttacaggaagtcaaataaaggatttagttgcaaaggttagatcccagcagccccaagcgcagtcaagtgtagtcgaatctcagggaaattctcggcccaatccagctgctgctgcggctgccgcggctgctgcagcggcagcttctgctgctgcaaaggctcaaggagttgcaccggtaggatcttaa

SEQ ID NO: 60724 - protein, 707 aa, Medicago truncatula
MAWRRLITQVERHQSEFGKVKGLLTRSYLSPNKFQGYTRNRLLFSQERCQSSYLGNLARRLRDSSEAEEEVSYLKELYRRNDPEAVIRAFESQPSLHTNSAALSEYVKALVKVDRLDESELLQTLRRGISNSVREEESGIGGLAVLRNVGKSTKDGILGTAGAPIHMVAASEGGSFKEQIWRTIRSVAVAFLVISGVGALIEDKGISKGLGMNEEVQPSVETSTKFSDVKGVDEAKAELEEIVHYLRDPKRFTRLGGKLPKGVLLVGPPGTGKTMLARAIAGEAGVPFFSCSGSEFEEMFVGVGARRVRDLFAAAKKRSPCIIFIDEIDAIGGKRNAKDQMYMKMTLNQMLVELDGFKQNDGIIVIGATNFPESLDKALVRPGRFDRHVVVPNPDVEGRRQILESHMSKILKADDVDLMITARCTPGFSGADLANLVNVAALKAAMDGSKAVSMHDLEFARDKILMGSERKSAVISEETRKMTAFHEGGHALVAIHSDGALPVHKATIVPRGMALGMVSQLPDKDQTSHSRKQMLAELDVCMGGRVAEELIFGESEVTSGASSDLSKATKLARQMVTKYGMSTEVGPVTHNYYDDGRSMSSETRLLIEKEVKNLLERAYNNAKTILTTHEKELHALANALLEHETLTGSQIKDLVAKVRSQQPQAQSSVVESQGNSRPNPAAAAAAAAAAAAASAAAKAQGVAPVGS

SEQ ID NO: 60725 - DNA, 2238 bp, Medicago truncatula
  CDS (1)..(2238)
atggcttggaggcatttgattacaaaggttgaaagccgtcaattagaattcggaaaggtcaaagatttattgagtggaaaccatttctcacctaataagtttcaaggctttaaaaggcataggcttttcttctcccaggggagatcccagtccagctatctagaaaatttgtcccaacgaccacgtgattcatctgaagctgcggcagtctcttatctcaaagaactttaccttcgaaatgatcctgaagccgtgattagggaatttgagagtcatccatccctgcatacaaattcatcggcactttctcaatatgttaaagcattagtaaaagttgatatgctggatgaaagtgaattactagagactttgcaaagaggtatttctaattcagcgagaaaggaagaaaatattataggtggcctcacttctctgagaagtgcaggaaaacctacaaaagatggaattcttggaactgaaaaaactcctattcatatggtcgctgcatcatgtggaaatttcaaagagcagctatggcgaacaattaggactcttgcagtgggattcatcttgatttctggtgtcggagctcttattgaggataaaggaattagtaaaggacttggtatgaatgaagaagtgcggcccgttttggagacaaatactaaacttagcgatgtgaaaggtgtggatgaggcaaaagctgatcttgaagaaattgttcattacctaagagatcctaagcgctttactcgtcttggtggcaaactcccaaaaggtgttttgcttgttggcccgcctggcactggtaaaacaatgctggcaagagctattgctggagaggctggggttcctttcttctcatgcagtggaagtgaatttgaagagatgtttgttggtgttggtgcacgaagggtgcgagatctttttgctgctgcaaaaaagcggtctccttgtataatctttattgatgagattgatgctattggtggaaaacgaaacgcaaaagaccaaatgtacatgaagatgactttaaatcaaatgcttgttgagttagatggattcaaacaaaatgaaggcataattgtgcttgctgctactaacttacctcaatcactagataaggctttggtgagacctgggcgatttgatcgccatgttgttgttcccaatccagatgtagaaggacggcgacaaattttggaatctcacatgtccaaggttctgaaggcggatgatgttgatccgatgatcattgctcggggtacacctggtttctccggtgctgaccttgcaaacttggttaatgttgctgccctgaaggctgcaatggatggtgccaaagccatgaacatgcatgatttagagtttgcacgagacaagattatgatgggaagtgaacgcaagtcggctgttatatctgaggagtcaagaaagattactgctttccatgagggtggccacgccttagtggcaattcatactgatggtgcatttcctgttcacaaggcaactattgttcctcgtgggacggctcttggcatggtttctcaattgcctgacaaggatcagaacactcattcccgtaaacagatgcttgccgagcttgatgtatgcatgggaggtcgggttgctgaagagttaatttttggagaaagtgaagttacttcaggtgcatactcagatctttcaaatgctacttctttggccagggaaatggttgctgaatatggtatgagtactgaagttggacccgtcactcacaattactacgatgatgggagaagtatgagctcagaaactagactgcttattgagaaagaagtgaagaacttgcttgagagagcttacaacaatgcaaaatttattctaaccacccatgacaaggagcttcatgcacttgcaaatgctcttctggagcatgagacacttacaggaagtcagataaaggaattacttgcaaaggtcaaatcccagcagcaacagccgcaatcatgtgtagtcgaaactcagggaagttcacgctcaaaccctgcatcttctgcggctgcagtggccgctgcagctgccgcttctgctgctacaaaggctcaaggagtttccccagaggcggtggatgagctgacggtgaaggaaactagcaaggagttcgatgagtctagacttgtccgtgtgaatgtcctttccttgaagatatcatctctgaatgttgaggtgatcttccctcaaaaaaaataa

SEQ ID NO: 60726 - protein, 745 aa, Medicago truncatula
MAWRHLITKVESRQLEFGKVKDLLSGNHFSPNKFQGFKRHRLFFSQGRSQSSYLENLSQRPRDSSEAAAVSYLKELYLRNDPEAVIREFESHPSLHTNSSALSQYVKALVKVDMLDESELLETLQRGISNSARKEENIIGGLTSLRSAGKPTKDGILGTEKTPIHMVAASCGNFKEQLWRTIRTLAVGFILISGVGALIEDKGISKGLGMNEEVRPVLETNTKLSDVKGVDEAKADLEEIVHYLRDPKRFTRLGGKLPKGVLLVGPPGTGKTMLARAIAGEAGVPFFSCSGSEFEEMFVGVGARRVRDLFAAAKKRSPCIIFIDEIDAIGGKRNAKDQMYMKMTLNQMLVELDGFKQNEGIIVLAATNLPQSLDKALVRPGRFDRHVVVPNPDVEGRRQILESHMSKVLKADDVDPMIIARGTPGFSGADLANLVNVAALKAAMDGAKAMNMHDLEFARDKIMMGSERKSAVISEESRKITAFHEGGHALVAIHTDGAFPVHKATIVPRGTALGMVSQLPDKDQNTHSRKQMLAELDVCMGGRVAEELIFGESEVTSGAYSDLSNATSLAREMVAEYGMSTEVGPVTHNYYDDGRSMSSETRLLIEKEVKNLLERAYNNAKFILTTHDKELHALANALLEHETLTGSQIKELLAKVKSQQQQPQSCVVETQGSSRSNPASSAAAVAAAAAASAATKAQGVSPEAVDELTVKETSKEFDESRLVRVNVLSLKISSLNVEVIFPQKK

SEQ ID NO: 60727 - DNA, 2046 bp, Medicago truncatula
  CDS (1)..(2046)
atgggaaatcataagaagaaaaaaacgactcaaaagaagaagggtcaaagtctagcacagaggatgaagatggtgtttgtaggaagttttcaagaagcattcaagaaaaaaaagaatggaaagaagggtcaagaacgaaagcggaatcaatttgaattcggcattcgattgttgtcactgatagtttcatacctttattttcatcttttcaagaggaagaaggaggttagctttgaggagtttaggaataagcttttggaaccaggattagttgaccatattgttgtctccaacaaacaatttgccaaaatatatgtcaggaggaacaacggtgcttcaaaagcaagatatgaatattttttcaatattggaagtgttgattcttttgagaggaagttagagaaagcacaagaaggactaggcattcaacatcatgattttgtacgtgttacgtattcttccgaaactgactggttgttctcattgtttatcttattatctggaatcctgatgatttttggagctgtcagtaataatggaattggaaaacaacatgttactaaagtcgacaaagatgccgaaaacaaggtctattttaaagatgttgctggctgtgatgaggcaaagcaagaagttatggagtttgtgcacttccttaagaatccgaagaaatacgaagaacttggtgcgaaaattccaaaaggtgctcttcttgtgggtcctccaggtacaggaaaaacccttttagcaaaagcaactgctggggagtccgatgtgccgtttctttctatatctggttctgatttcttggaagtatatgtcggtgttggagcatctagggttagacagttgtttaaggaagcaaggaagcgtgctcctagtatagtatttatcgatgaaattgatgcaattggtcgggcaaggagtagtagaggcggaggtgctgcaaatgatgagcgtgaaagtactttaaatcaattgttggtggagatggatggttttggacctactgctggagttgtcgtgctcgcaggtacaaatagacctgatgtattagacaaagccttacttagaccggggcgttttgaccgccaaataacaattgataaacccgacattaagggtcgtgaccagatatttcagatttacttgaaaaggatcaaacttgaccaggagccttcatattattcacataagcttgcatcccttactccaggatttgctggagcggacattgctaacgtttgcaatgaagctgctctgatagctgcaagaactgaagaagcacatgtcacagaggatcattttgaggcagctattgataggatcattggtggtttggagaagaagaacaaggtaataagcaagaaggatagacgtaccgttgcttaccatgaagcgggccatgttgttgcgggttggttcttggaacatactgagccattgttgaaagtaactattgttcctcgtggaacagcggctcttgggtttgcccagtttgttccaaatgacgaccatctcatgacaaaggagcagcttttcgataggacttgtatgacccttggtggtcgggctgccgagcaggttctaattgggagaatctctacaggagcacaaaatgacttggagaaagtcaccaagatgacatatgctcaagtaaccgtatatggtttcagcgaaaaagttggccttctctctttcccttcaattgaggactcttttgagacgtccaaaccatacagcagcgaaactagtgcgatcattgataacgaagtgcgagattgggtgaagaaagcatacaaacataccatagagcttatagaggaatacaaggggaaagtagctgaagttgcagagttgctgctcgaaaaagaagtacttcaccaagatgaattgcttaaagtcttgggtgtgcgactacccttcaagagtgctgaacatgataattatgatcagattaagctagggattcaagatgaggcgaaagatgtagaaataattgtcgatggagccgaggcgggtgatgtttttcgctctagaacctga

SEQ ID NO: 60728 - protein, 681 aa, Medicago truncatula
MGNHKKKKTTQKKKGQSLAQRMKMVFVGSFQEAFKKKKNGKKGQERKRNQFEFGIRLLSLIVSYLYFHLFKRKKEVSFEEFRNKLLEPGLVDHIVVSNKQFAKIYVRRNNGASKARYEYFFNIGSVDSFERKLEKAQEGLGIQHHDFVRVTYSSETDWLFSLFILLSGILMIFGAVSNNGIGKQHVTKVDKDAENKVYFKDVAGCDEAKQEVMEFVHFLKNPKKYEELGAKIPKGALLVGPPGTGKTLLAKATAGESDVPFLSISGSDFLEVYVGVGASRVRQLFKEARKRAPSIVFIDEIDAIGRARSSRGGGAANDERESTLNQLLVEMDGFGPTAGVVVLAGTNRPDVLDKALLRPGRFDRQITIDKPDIKGRDQIFQIYLKRIKLDQEPSYYSHKLASLTPGFAGADIANVCNEAALIAARTEEAHVTEDHFEAAIDRIIGGLEKKNKVISKKDRRTVAYHEAGHVVAGWFLEHTEPLLKVTIVPRGTAALGFAQFVPNDDHLMTKEQLFDRTCMTLGGRAAEQVLIGRISTGAQNDLEKVTKMTYAQVTVYGFSEKVGLLSFPSIEDSFETSKPYSSETSAIIDNEVRDWVKKAYKHTIELIEEYKGKVAEVAELLLEKEVLHQDELLKVLGVRLPFKSAEHDNYDQIKLGIQDEAKDVEIIVDGAEAGDVFRSRT

SEQ ID NO: 60729 - DNA, 2109 bp, Trifolium pratense
  CDS (1)..(2109)
atgggtaccgggccccccctcggaactagttcatcagcatgtcttgttggaaatgctttatccacacatagtaatagaattagtcttggtaaggatttgaatggaagatatatattttcatcatggagattttcatccttgaacaataaggcatcaaaaccattttctataaaagcttctttagatcaaactcaacaggaaggtagaagagggattctgaaattgttgcttggaaatgttggagttggtttacctgcattattgggaaatggaaaagcttatgctgctgatgaacaaggggtttcatcgtcgagaatgtcttattcgaggtttctagagtatttggataaggatagagttactaaagttgatgtgtatgagaatggaactatagctattgttgaggctgtttctcctgaattaggaaacaggttgcagcgtgttcgagttcaacttcctggacttagccaagagcttcttcagaagttaagggaaaagaacattgactttgcagctcataatgctcaagaagattccggttcgtttttgtttaacttgattgggaatcttgctttccctcttgctgtcattggtgtattgttccttctctcgaggagatctggtgggatgggaggtcccggcggacctggatttccacttgcttttggtcaatccaaagccaagtttcaaatggaaccaaacactggagtgacatttgatgatgttgctggggtggatgaagccaagcaggattttatggaggtggttgaatttctcaagaagcctgagagattcacttccgttggtgctcgcataccgaaaggagttcttcttgttggtcctccaggaactggaaagacattgttagccaaggctattgccggtgaagccggtgttccatttttctctatatcaggttctgagtttgttgagatgtttgttggtattggtgcttctcgtgtccgtgatttgttcaagaaggctaaagagaatgctccttgcattgtctttgttgatgaaattgatgctgttggaagacaaagagggacaggaatcggtggagggaatgacgaaagagaacagaccctcaaccaacttttgacagaaatggatggatttgagggtaatactggtgtcattgttgttgcagcaactaacagagccgacattcttgattctgcattattgaggccaggccgattcgatagacaggtatcggttgatgttccagatgtaagaggaaggactgaaatcctaaaggttcatgctaacaataaaaagtttgattcggatgtttctcttgaaatagttgcaatgagaacacctggttttagcggagctgatcttgcaaatctcttgaatgaagctgctatattagctggtcggagaggaaagtcaggcatttcatctaaagagattgatgattctattgataggattgtcgctggaatggaaggaacattaatgactgatgggaagagcaaaagtttagtggcatatcatgaagtcgggcatgccatttgcggaactttgactcctggccatgatgctgtacaaaaggtaacattgattcctcgaggtcaagctcggggtcttacatggttcattccttcagatgatccaactctgatctcaaaacaacaactctttgcaagaattgttggagggttaggtggtagggctgcagaagaaattattttcggtgagcctgaggttacaactggcgcaggtggcgatttgcagcaaatcaccggtatagcaagacagatggtagtcacatttggaatgtctgatattggtccttggtcactcatggactcatcagcgcaaagtggcgatgttatcatgagaatgatggcaaggaactcaatgtcagaaaagcttgctgaagacattgatactgccgtcaagagattatcagatgaagcatatgaaattgctttggaacaaataaggaacaaccgtgaagcaattgataagatagtcgaagtccttctggagaaggagacgttgagtggagatgaattccgtgctttactatcagaatttactgaaattccagtggaaaatcgggttcctcctgcaactccattacctgtacctgtttga

SEQ ID NO: 60730 - protein, 702 aa, Trifolium pratense
MGTGPPLGTSSSACLVGNALSTHSNRISLGKDLNGRYIFSSWRFSSLNNKASKPFSIKASLDQTQQEGRRGILKLLLGNVGVGLPALLGNGKAYAADEQGVSSSRMSYSRFLEYLDKDRVTKVDVYENGTIAIVEAVSPELGNRLQRVRVQLPGLSQELLQKLREKNIDFAAHNAQEDSGSFLFNLIGNLAFPLAVIGVLFLLSRRSGGMGGPGGPGFPLAFGQSKAKFQMEPNTGVTFDDVAGVDEAKQDFMEVVEFLKKPERFTSVGARIPKGVLLVGPPGTGKTLLAKAIAGEAGVPFFSISGSEFVEMFVGIGASRVRDLFKKAKENAPCIVFVDEIDAVGRQRGTGIGGGNDEREQTLNQLLTEMDGFEGNTGVIVVAATNRADILDSALLRPGRFDRQVSVDVPDVRGRTEILKVHANNKKFDSDVSLEIVAMRTPGFSGADLANLLNEAAILAGRRGKSGISSKEIDDSIDRIVAGMEGTLMTDGKSKSLVAYHEVGHAICGTLTPGHDAVQKVTLIPRGQARGLTWFIPSDDPTLISKQQLFARIVGGLGGRAAEEIIFGEPEVTTGAGGDLQQITGIARQMVVTFGMSDIGPWSLMDSSAQSGDVIMRMMARNSMSEKLAEDIDTAVKRLSDEAYEIALEQIRNNREAIDKIVEVLLEKETLSGDEFRALLSEFTEIPVENRVPPATPLPVPV

SEQ ID NO: 60731 - DNA, 2079 bp, Trifolium pratense
  CDS (1)..(2079)
atggcagcatcattggcatgcctttttgggagtggtttatctacacagactaataaaataattcttggcaaggacgtaaatggaagacatcccgtattttctcgtagacattcgtcattgagaagggaattgaaaacaatattagtaaaagcatcgttagatcaaagggaacatgaagggagaagaggatttctgaaattgttaaatgtaacagttggcttaccggcattattaggaagcgccaaagcttatgctgatgagcaaggggtttcctcctccaaaatgtcttattctaggtttcttgagtatttggagaaggaccgggttaaaaaagttgatctgtttgacaatggaactatagctattgtagaggctgtttctcccgagttaggtaatagggtgcagcgagtgcgagttcaacttcctggacttagccaagaactccttaaaaaattcagggaaaagaacatcgactttgcagctcataatgcacaagaagagtcagattccttctttgcaaacctgattggaaatctggctttccctctaattgtgatcggaggattgttccttctgtcacgacggtcatctggagggtcggggggtcccggcgggtctggctttcctttttctgttggtcaatcaaaagccaaatttcaaatggaaccaaatactggagtgacatttgatgatgttgctggggtagatgaagccaaacaggattttatggaggtagtcgagtttctgaaaaagcctgagaggttcactactatcggggctcgcataccaaaaggagttcttcttgttggtcccccagggactggtaagacgctattagccaaggctattgcgggtgaagcaggtgtcccgtttttctcaatctcaggttctgagtttgttgagatgtttgtcggtgttggtgcttctcgagttcgtgatttattcaagaaggccaaagagaatgctccttgtattgtttttgttgatgaaattgatgctgtgggaaggcaacgaggcactggaattggtggagggaacgatgaaagggaacagacccttaaccaacttttgacagaaatggatggatttgagggtaataccggggtcattgtcattgcagcaaccaacagggccgacattcttgactctgctttattgagaccggggcggtttgatagacaggtatcagttgacgttccggacattcggggaaggactgaaatactaaaggttcatggtggtaataaaaaatttgacgctgatgtttctcttgaggtagttgcaatgagaacacctggctttagtggagctgatcttgcaaacctcttgaatgaagctgctatattagctggtcggcgtggaaaggtggaaatttcatcaaaagagattgatgattctattgataggattgtagctggaatggaaggaacagtgatgacagatggaaagagcaaaaatttagtggcatatcatgaagttgggcatgccatttgtggaactttgactcctggccatgatcctgtacaaaaggtaactctagttccacgtgggcaagctcggggtcttacttggttcattccttctgaagacccaactctaatctccaaacaacagctctttgcaagaattgttgggggactcggcggcagagcagctgaggaaattatttttggtgagcctgaggttacaactggagcagctggtgatttgcagcaaataaccagtttggctaaacagatggtagtgacattcggtatgtcagatattggtccttggtcacttatggacgggtcagctcaaaatggagatgtcataatgagaatgatggcaagaaattcaatgtccgaaaaacttgctgaagacattgattctgctatcaagaggatctcagatgaagcatatgaaattgcattgaagcatattagaaacaaccgtgaggccatcgataagatcgtggaagtcctactggagaaggagacaatcaccggagacgaattcagagttctcctttcagagtttgttgaaattccacccgaaaatgtggtctctccttcaactccctcaccagttgctgtttga

SEQ ID NO: 60732 - protein, 692 aa, Trifolium pratense
MAASLACLFGSGLSTQTNKIILGKDVNGRHPVFSRRHSSLRRELKTILVKASLDQREHEGRRGFLKLLNVTVGLPALLGSAKAYADEQGVSSSKMSYSRFLEYLEKDRVKKVDLFDNGTIAIVEAVSPELGNRVQRVRVQLPGLSQELLKKFREKNIDFAAHNAQEESDSFFANLIGNLAFPLIVIGGLFLLSRRSSGGSGGPGGSGFPFSVGQSKAKFQMEPNTGVTFDDVAGVDEAKQDFMEVVEFLKKPERFTTIGARIPKGVLLVGPPGTGKTLLAKAIAGEAGVPFFSISGSEFVEMFVGVGASRVRDLFKKAKENAPCIVFVDEIDAVGRQRGTGIGGGNDEREQTLNQLLTEMDGFEGNTGVIVIAATNRADILDSALLRPGRFDRQVSVDVPDIRGRTEILKVHGGNKKFDADVSLEVVAMRTPGFSGADLANLLNEAAILAGRRGKVEISSKEIDDSIDRIVAGMEGTVMTDGKSKNLVAYHEVGHAICGTLTPGHDPVQKVTLVPRGQARGLTWFIPSEDPTLISKQQLFARIVGGLGGRAAEEIIFGEPEVTTGAAGDLQQITSLAKQMVVTFGMSDIGPWSLMDGSAQNGDVIMRMMARNSMSEKLAEDIDSAIKRISDEAYEIALKHIRNNREAIDKIVEVLLEKETITGDEFRVLLSEFVEIPPENVVSPSTPSPVAV

SEQ ID NO: 60733 - DNA, 2625 bp, Aspergillus oryzae
  CDS (1)..(2625)
atggccaccctactccgacggccaggcaatcttgctcgatattcgaggagagccgcagactacatctatcgcgcaggaccacggtcggcgcatatctcacaatcgagactatcctcccttatcaccacgccacgcctgagaacatatgctacccagagtccgaaacccccgaacgagaacgacggtcaacaccaaccaccgaaccaacccgggaatggcagcggtaaggatggggaaggaaagaagccggaggagcctcaatcgaagctcaccaaacaagagcaggagtcagttgatcagtttatacagcacctgaagtcgaaggtgccacagtcacaacaccaaatgttggatgacatgcggtcgattatgatgagtgaaggattaccgccggaggtccgcgacttcatccaaaagcacctaaaatccggtaaacccacgtctctgatggactacgtgaacttgacgcgttatatggcgaagtacttggaaaactacgcctccaaactgaacgagttggaggagaagagaacgcgggaccaggagaaatcaggagatggacagagccagaaacaacaaggacaacaagggaagggcaagaatgaatggaaaccgccaccgaatgcgagagttttcgagttccgtttcgatcccgcctcgttcctgattacctcccttctatcctactatgtctaccgaagcttcttccctggcgaaaacagcaaggatattacatggcaagagttcagagccaacttcttcgataaaggtctagtcgaaaagctgaccgtcatcaacggcaaccgggttcgggttgaactgaaccgtgacgcggtctctcgagtctatcctgattctccggctacccagcccctattccattactacttcagcatcggatcggttgagagcttcgagcggagattagatgaagcgcagaacgaactgggtatccctggctctgaacgtattcccgtttcgtatactgaagaagtatcatggggtgccactctcttgtcctttgctcctaccttcctcctcattggttctattttctggttgtcgagacgtgctgctggcggtgccggtggccaaagtggcatctttggtattggaaagagccgtgccaagcgttttaaccacgagacagatattaagatcaagttctctgatgtggctggaatggacgaggctaaggttgaaatcatggagttcgtcagcttccttcaacatcccgaaaagttccagaaacttggtgctaagattcctcgcggtgccattctttctggtcctcccggtactggtaagacactgcttgccaaggcaacggccggtgaatctggtgttccgttttttagcgtcagtggttcagagttcgttgagatgttcgttggtgttggaccttcccgtgtccgtgatctctttgccaatgctcgtaagaacacgccttgcatcatcttcattgatgagatcgatgccataggtaaatcgagagcaaagcaaagctttggtggtggaaatgatgagcgtgagagcacgctgaaccagattcttactgaaatggatggtttcaacacctctgagcaagtggttgtcttggctggtacaaacagacccgatgttctggacaaggctctgatgcggcctggacgtttcgatcggcatatcgctatcgaccgtcccactatggatggccgtaaacagatcttccgcgtccacctgaagaagatcgttaccagcgaagatatggagtacctcaccggtagactcgctgctttgactcccggcttcgctggtgccgacattgctaactgcgtgaacgaggctgcactagtcgcggctcgtgtaaacgcggatcacgtcacgatgaagcatttcgagcaggcgatcgaacgtgtcattggtggtctggaaaagaagtcccttgtgctctcgccggaagagaagcgcacggtggcgtatcacgaagctggacacgctatttgtggctggtatttccgctgggccgacccgctactgaaggtttctatcattcctcgtggacaaggcgctctgggttacgcccagtatctcccagccggaggtgacacctacctgatgaatgtcaaccagctcatggaccgtatggctatgactctgggaggccgtgtcagtgaggagctgcacttcgataccgttaccagcggagctagcgacgatttcaataaggtcactcgtatggcaaccgccatggttacgaagttcggcatgtctcctaagctcaaatacatctactacgaggaggaccccaaccagttccacaagcctttctccgaagaaacagccaaggatatcgacacggaagtccgtcggattgtcgccgaggcataccaacaatgccgcacccttttgaccgaaaagaagaaggaagtcggcatcgtcgccgaggagcttctggccaaggaagtcctcagccgtgacgacctcatccgactccttggacccaggccctggcctgagtccggcgaattcgccaagtactttgacggtgccaaaggagccactatcgcacctcccgaacccacccagtcaagcgaagcaaccgaaggcaaagacggaagagaccaaacgccatccccaccatag

SEQ ID NO: 60734 - protein, 874 aa, Aspergillus oryzae
MATLLRRPGNLARYSRRAADYIYRAGPRSAHISQSRLSSLITTPRLRTYATQSPKPPNENDGQHQPPNQPGNGSGKDGEGKKPEEPQSKLTKQEQESVDQFIQHLKSKVPQSQHQMLDDMRSIMMSEGLPPEVRDFIQKHLKSGKPTSLMDYVNLTRYMAKYLENYASKLNELEEKRTRDQEKSGDGQSQKQQGQQGKGKNEWKPPPNARVFEFRFDPASFLITSLLSYYVYRSFFPGENSKDITWQEFRANFFDKGLVEKLTVINGNRVRVELNRDAVSRVYPDSPATQPLFHYYFSIGSVESFERRLDEAQNELGIPGSERIPVSYTEEVSWGATLLSFAPTFLLIGSIFWLSRRAAGGAGGQSGIFGIGKSRAKRFNHETDIKIKFSDVAGMDEAKVEIMEFVSFLQHPEKFQKLGAKIPRGAILSGPPGTGKTLLAKATAGESGVPFFSVSGSEFVEMFVGVGPSRVRDLFANARKNTPCIIFIDEIDAIGKSRAKQSFGGGNDERESTLNQILTEMDGFNTSEQVVVLAGTNRPDVLDKALMRPGRFDRHIAIDRPTMDGRKQIFRVHLKKIVTSEDMEYLTGRLAALTPGFAGADIANCVNEAALVAARVNADHVTMKHFEQAIERVIGGLEKKSLVLSPEEKRTVAYHEAGHAICGWYFRWADPLLKVSIIPRGQGALGYAQYLPAGGDTYLMNVNQLMDRMAMTLGGRVSEELHFDTVTSGASDDFNKVTRMATAMVTKFGMSPKLKYIYYEEDPNQFHKPFSEETAKDIDTEVRRIVAEAYQQCRTLLTEKKKEVGIVAEELLAKEVLSRDDLIRLLGPRPWPESGEFAKYFDGAKGATIAPPEPTQSSEATEGKDGRDQTPSPP

SEQ ID NO: 60735 - DNA, 2160 bp, Aspergillus oryzae
  CDS (1)..(2160)
atggcctttcaacttccgattcctaagcctgtaagcaccatctgcctccgtgctttctcccgtcagccccactcgtcgtcatttcgctcctactctacgttgacttctttggaccgtcttcgccacgcgcctagtgttatagggctttcaaggttgcagcaacagcgtttcatatttggaggaccatcccacggtttattggcgcagaaagagaaaactgcgaacagcaaccccaatagtgcaaacgcccaaaatgctttctaccaggcccttcttcgggccaatatgccagcgattgttgttgaacggtataaaagtggtcattttgctaccaatgctctttcggaagcgatttatttcaaggccttacaacgtgtcggtggaaccgatgctgctgctttgtcggccgcggcgtcggcccaagttggtaactcgaatctcaattctgaacaactccaagctatcggacaggctgttgcggctcagaaccacggtggcaatgccggtatgtcgaccaaggcaaacggcaccggtgccaaagaggctccactatatgtcgttgtggaggagtcgctaggcagcgccgtattccgatgggtcaagttcttgttgtattttggcttcttcacgtacatgtctctcgtcttggtcactatccttgtggaaactactggtgttctgaagaatatcaaaggtcctcagaacaacgaagctcagcctcagcaacagaccgtccgattcaccgatgtgcatggctgcgacgaagctaaggaagaacttcaggagctggttgaattcctgctgaacccagaacgattttcctctcttggtggcaagttgccgaagggcgtgcttcttgttggccctcctggtaccggaaagacgctgctggcccgtgccgtagcaggagaggctggtgtgcctttcttctacatgtctggttctgagttcgacgaagtgtacgttggtgtaggtgccaagcgtgtccgtgaactgttcactcaagcacgaagcaaggcacctgctatcatcttcattgatgagctggatgccataggtgcgaagaggaacgaaagggatgcggcctatgttaaacagacactgaaccagcttctcacggaacttgacggattctcgcagaccagtggagtgatcatcatcgccgcaacaaactaccctcagttgctcgacaaggcattgactcgacccggtcgatttgatcgacgggtagttgttgatcttcctgatgtgcggggccgtatggatatcctcagacaccacatgaaagatgtccaaatcagcacggatgttgatgttgctgtcattgcgcgcggtacccctggtttttcaggtgctgacctggagaatctcgttaaccaggctgccatcttcgcaagcaggaacaagcaggcaaaggttggcccgagagactttgactgggctaaggacaaaatcatgatgggcgcagaagctcgcagccgggttatccaagacaaggacaaacttcttaccgcgtaccacgaggctggtcacgccttggttgcttacttttcgccctcgtcgacgccactttacaagatcaccatcgtccctcgcgggatggctttgggtgtaactcatttcttgcctgagatggatacggtttctaggaactataccgaatacttgtctgacatcgacgtttccatgggcggcaaggcagcagaggagcttatatttgggcctgacaaggtcactagcggcatctcagcggatatccaacaagccacagagacggctttcactctggtaacccggtttgggtactccaagaaactcggaaatgttgatctttccaccaactatgacagcttgtcctctgagactaagcaggagatcgaaggcgaagttcgacgccttgtcgaggaagcccgcatgcgcgctacgaacattctgaccgaaaagcgccatgagctggaattgctgaccaaggcgttgattgaatacgaaacattgaccaaagaggagatggaaaaggtgttgaaaggcgagaagctcgagaagctggaatcaagagcatcggcgccactcaaactgcccgaggccctacaggcggccaggttgaatccgtccacctcggctgaagggccgccgacgtcgactgcgtcggatgtcaattaa

SEQ ID NO: 60736 - protein, 719 aa, Aspergillus oryzae
MAFQLPIPKPVSTICLRAFSRQPHSSSFRSYSTLTSLDRLRHAPSVIGLSRLQQQRFIFGGPSHGLLAQKEKTANSNPNSANAQNAFYQALLRANMPAIVVERYKSGHFATNALSEAIYFKALQRVGGTDAAALSAAASAQVGNSNLNSEQLQAIGQAVAAQNHGGNAGMSTKANGTGAKEAPLYVVVEESLGSAVFRWVKFLLYFGFFTYMSLVLVTILVETTGVLKNIKGPQNNEAQPQQQTVRFTDVHGCDEAKEELQELVEFLLNPERFSSLGGKLPKGVLLVGPPGTGKTLLARAVAGEAGVPFFYMSGSEFDEVYVGVGAKRVRELFTQARSKAPAIIFIDELDAIGAKRNERDAAYVKQTLNQLLTELDGFSQTSGVIIIAATNYPQLLDKALTRPGRFDRRVVVDLPDVRGRMDILRHHMKDVQISTDVDVAVIARGTPGFSGADLENLVNQAAIFASRNKQAKVGPRDFDWAKDKIMMGAEARSRVIQDKDKLLTAYHEAGHALVAYFSPSSTPLYKITIVPRGMALGVTHFLPEMDTVSRNYTEYLSDIDVSMGGKAAEELIFGPDKVTSGISADIQQATETAFTLVTRFGYSKKLGNVDLSTNYDSLSSETKQEIEGEVRRLVEEARMRATNILTEKRHELELLTKALIEYETLTKEEMEKVLKGEKLEKLESRASAPLKLPEALQAARLNPSTSAEGPPTSTASDVN

SEQ ID NO: 60737 - DNA, 2019 bp, Solanum lycopersicum
  CDS (1)..(2019)
atgtctactgctctttctttgtctgtctctcagttccccctatgcaaatcccaagacttctccaaggatgtttacaatcctaaaatctccaataaagaaaccccatgtcagaaaacacattcagacaccagaataaacaggaggaagctgttgagtactagtggtttgagccttgtagcagggactttgtctaagccagcaagagctgagactgaagcaccagttgaggtaacttcaagtagaatgtcatattcaagattcttggattacttgaatcaaggtgctgtcaagaaagttgatttctttgagaacagtgctgttgctgagatattgatcaatcctgctcttaacaaagtccagagagttaaaattcagttgccaggattgccaccagaattggtgagaaaacttaaagacaagaatgtagattttgctgctcatctacctgaaaagaatgtaattggaccacttcttgatttgcttgggaatttagcttttccattgatattgcttggttatttactgttgagaagctcttcaaatacccctggagggccaaacttgccttttggattaggaaggagcaaagccaaattccagatggaaccaaatacaggagtaacatttgatgatgtggctggagttaatgaagcaaaacaagattttcaagagattgttgagtttttgaagactccagagaagtttgctgcagttggagcaaagataccaaagggatttctcttagtagggccaccagggacagggaagacattgctggctaaggcgattgctggagaagcaggggtgccattcttttctctctctggctcagagttcattgagatgtttgttggtgtgggagcttctagagttagggacttattcaacaaggcgaaacaaaattcgccttgcataatttttattgatgaaattgatgctgttgggaggcagagaggaactggtattggtggaggaaatgatgaaagagagcagacactgaaccaacttcttactgaaatggatggttttactgggaacactggagtcattgtcattgctgctactaataggcctgaaattcttgatcaagctttgcttagacctggaaggtttgataggcaggtaactgttggactgcctgatataagaggaagagaagaaatattgaaagttcacagtaacaacaagaagcttgacaaagatgtgtctctaagtgttattgcaatgagaacaccaggattcagtggtgcagatcttgcaaacctgatgaatgaagctgccattctagctggaaggagaggaaaagataagattacctcaaaagagatagatgattccatcgatagaattgtcgctggaatggaaggaactaccatgacagatggaaagaacaagattctggtagcataccatgaggttggacatgctgtctgcgcgacattgacccctggccatgatgcagtacagaaagtcacattgatcccaagaggtcaagctcgcggtcttacatggttcattcctggtgaagatccaaccttaatctctaagaagcaactctttgctagaatagtgggaggcttaggaggtagagcagcagaggaaataatttttggtgaaccagaaatcactactggtgcagcaggagacttgcaacaaataactcaaatagcaagacagatggttacaatgtttgggatgtctgagattggaccatgggcgttaacagatccagcagcacaaagtggcgatgtggtgctgagaatgctagcgaggaatcaaatgtcagagaaactagcagaagacattgatgaatctgtaaggcacataatcgagagagcatatgaaattgcaaagaaccacatcaggaacaacagggaggcaatcgacaaattagtggatgtcctgctggaaaaggagactcttacaggagatgagtttagagctatactctcagaattcactgatatcccattcgttaacataaacagaaaaccaattagagaactaattgaggcctag

SEQ ID NO: 60738 - protein, 672 aa, Solanum lycopersicum
MSTALSLSVSQFPLCKSQDFSKDVYNPKISNKETPCQKTHSDTRINRRKLLSTSGLSLVAGTLSKPARAETEAPVEVTSSRMSYSRFLDYLNQGAVKKVDFFENSAVAEILINPALNKVQRVKIQLPGLPPELVRKLKDKNVDFAAHLPEKNVIGPLLDLLGNLAFPLILLGYLLLRSSSNTPGGPNLPFGLGRSKAKFQMEPNTGVTFDDVAGVNEAKQDFQEIVEFLKTPEKFAAVGAKIPKGFLLVGPPGTGKTLLAKAIAGEAGVPFFSLSGSEFIEMFVGVGASRVRDLFNKAKQNSPCIIFIDEIDAVGRQRGTGIGGGNDEREQTLNQLLTEMDGFTGNTGVIVIAATNRPEILDQALLRPGRFDRQVTVGLPDIRGREEILKVHSNNKKLDKDVSLSVIAMRTPGFSGADLANLMNEAAILAGRRGKDKITSKEIDDSIDRIVAGMEGTTMTDGKNKILVAYHEVGHAVCATLTPGHDAVQKVTLIPRGQARGLTWFIPGEDPTLISKKQLFARIVGGLGGRAAEEIIFGEPEITTGAAGDLQQITQIARQMVTMFGMSEIGPWALTDPAAQSGDVVLRMLARNQMSEKLAEDIDESVRHIIERAYEIAKNHIRNNREAIDKLVDVLLEKETLTGDEFRAILSEFTDIPFVNINRKPIRELIEA

SEQ ID NO: 60739 - DNA, 2061 bp, Oryza sativa subsp
  CDS (1)..(2061)
atgtcgccgacggcgatgtcgctgacgacgacgacgagccggctgccgatctgcagggcgcagggcggcggcgtcgccaaggagaagcggacgacgccgccacctgccaagatcacgccgccttcgtcgtcgtcgtcggaggccgccggactaagcaggaggaggctgctgcaatcggccggcctcgggctcggcctcggcctaacggcggcgaggccggcgcgagccgaggcgacggcgccggaggaggtgacgtcgaacaggatgtcctactcccggttcctggagtacctcgacgccggcgccgtcaagaaggtggacttcttcgagaacggcacggtggccgtcgccgaggtggacgacgcggcggcgctgtcgagggtgcaccgcgtcaaggtgcagctcccgggcctccccgccgagctcgtccggaagctccgggacaagggcgtcgacttcgcggcgcacccggtggagcccagcgccggggtgatgctgctcgacctcctcgtcaacttcggcttccctctcctcttcgtcgcctcgctcctgtggcggtcgccgaccatgaacaaccccggcggcgggcctagcctcccgttcgggctcggcaagtccaaggccaagttccagatggagcccaaaaccggcgtcacgttcgacgacgtcgccggcgtggacgaggccaagcaggacttccaggagatcgtccagttcttgaagttcccggagaagttcacggcggtcggtgcgaggacccccaagggcgtgctgctggtcggcccgccggggacggggaagacgctgctggccaaggcgatcgccggcgaggccggcgtgcccttcttctcgctgtccggctccgagttcatcgagatgttcgtcggcgtcggcgcgtcgcgggtgcgcgacctgttcgacagggccaaggcgagcgcgccgtgcctcgtcttcatcgacgagatcgacgccgtggggcggcagcgcggcgcggggatcggcggcgggaacgacgagagggagcagacgctgaaccagctgctcaccgagatggacgggttcggcggcggcgacggcggcgtcgtcgtgatcgccgccaccaaccggccggagatcctcgacgcggcgctgctccggccggggcgcttcgaccggcgggtgtccgtcggcctccccgacgtgcgcggacgggaggagatcctcctcgtgcacggcgccaacaagcggctcgaccccggcgtgtcgctcgccgtggtcgccatgcgcacgccggggttcagcggcgccgacctcgccaacctcatgaacgaggccgccatcctcgccggccgccgcggcaaggaccgcatcaccgtcagcgagatcgacgactccatcgaccgcatcgtcgccggcctcgagggcaccagcatgaccgacggcaagagcaagatgctcgtcgcctaccatgagatcggccacgccgtgtgcgcgactttgacggcggggcacgacgaggtgcagaaggtgacgctgatcccgcgggggcaggcgcgcgggctgacgtggttcctccccggcgaggaggacccggcgctggtgtcgaggcagcagatcttcgcggggatcgtgggcgggctgggcggccgcgccgccgaggaggtcgtcttcggcgagccggaggtgacgaccggcgcggcgggggacctgcagcaggtgacgcgggtggcgcggcggatggtgacggcgttcgggatgtcggagatcgggccgtgggcgctggcggagccggcggcgcagggcggcgacgtggtgctgcggatgctggcccggagctccatgtcggagaggctcgccgccgacatcgacgccgcggtgaggaccatcgtcgacgaggcgtacgaggtggccaaggcgcacgtgaggaggaaccgcgccgccatcgaccagctggtggacgtgctcatggagaaggagacgctcggcggcgacgagttcagggcgatcttgtcggagcacgtcgacatcggcaaggagcggcgggaaacggcggcgaggacacagcagctggccactgcttga

SEQ ID NO: 60740 - protein, 686 aa, Oryza sativa subsp
MSPTAMSLTTTTSRLPICRAQGGGVAKEKRTTPPPAKITPPSSSSSEAAGLSRRRLLQSAGLGLGLGLTAARPARAEATAPEEVTSNRMSYSRFLEYLDAGAVKKVDFFENGTVAVAEVDDAAALSRVHRVKVQLPGLPAELVRKLRDKGVDFAAHPVEPSAGVMLLDLLVNFGFPLLFVASLLWRSPTMNNPGGGPSLPFGLGKSKAKFQMEPKTGVTFDDVAGVDEAKQDFQEIVQFLKFPEKFTAVGARTPKGVLLVGPPGTGKTLLAKAIAGEAGVPFFSLSGSEFIEMFVGVGASRVRDLFDRAKASAPCLVFIDEIDAVGRQRGAGIGGGNDEREQTLNQLLTEMDGFGGGDGGVVVIAATNRPEILDAALLRPGRFDRRVSVGLPDVRGREEILLVHGANKRLDPGVSLAVVAMRTPGFSGADLANLMNEAAILAGRRGKDRITVSEIDDSIDRIVAGLEGTSMTDGKSKMLVAYHEIGHAVCATLTAGHDEVQKVTLIPRGQARGLTWFLPGEEDPALVSRQQIFAGIVGGLGGRAAEEVVFGEPEVTTGAAGDLQQVTRVARRMVTAFGMSEIGPWALAEPAAQGGDVVLRMLARSSMSERLAADIDAAVRTIVDEAYEVAKAHVRRNRAAIDQLVDVLMEKETLGGDEFRAILSEHVDIGKERRETAARTQQLATA

SEQ ID NO: 60741 - DNA, 2361 bp, Pisum sativum
  CDS (1)..(2361)
atggcaacacttcaaacttctcttctcttcaaactccccttcccattcctctttcccaaccactccactcataaacctcaccgccacttctccttcaaccccacgcgcctccgcccgcgcgttctaccccctcctctctgcacatttcaacccgacgcaacaactccccactctgaccctaacccaaccctacccgaaccaaaacccgattccgttgacgcggagcttataaactcgacggaaaacgacaccgttgcggggttggattcaaattcaaacgaatcacgattcgagagcgttgatggcgagaggctcgaggcctcggaaagtgaaaagaaggtttcgaaattgccgatagtggtgttcttgattggagtttgggtgagagcaagagaacgtgttgagagggcgttttcggaattttttgattggtggccgttttggcggcaggagaagcggttggcgaagttgatttctgaagccgatgtgaatcggcaggatgctgcgaagcagagtgctctgtttgttgaactcaataagcacagtcccgagtctgtgataaagatatttgaagaaagggatcgagccgtggacagcaaaggagttgcagaatatcttcgagcactagtggtcactaatgctattgcagaatatcttcctgataaggaatctggaaaaccttctggcattccttccctgctgcaagagttgaaacaacgggcatcaggtaacatagatgagacttttcttaaccctggaatatctgcgaaacagccgttgcatgtggttatggttgatcagaaagtatcatacaaatcacgttttgtatcagaggttgtctcaactattttttttactgtagctattggattggtctggtttatgtgttctgctgcacttcaaaaatacattggaggcttgggtgggattggttcttcaggtgttggttctagttcttcctataccccaaaggagttaaacaaggaagtaatgccagaaaagaatgtaaaaacttttaaggatgtgaaaggttgtgatgatgcaaagcaagaacttgaggaagttgtggagtacctaagaaatcccgctaaatttacacgccttggaggaaagttgccaaaggggattcttctgacaggggcacctggaactggaaaaacactgctagccaaggctattgctggagaagctggtgttccatttttctaccgtgcagggtcagaatttgaggagatgtttgttggagttggtgctcgacgtgtaaggtccttatttcaagcagccaaaaagaaggctccttgcattatcttcattgatgaaattgatgctgttggatcaaccaggaaacagtgggagggccacaccaagaagacattgcaccaactactcgttgaaatggatgggtttgagcagaatgagggaataatattgatggctgcaacaaacctacctgatattcttgatccagctttaacgaggcctggtagatttgatcgacatattgttgtaccgaatccagatgtacgtggccggcaagaaatattggaactctacctgcaagataaacctacagcggaaaatgttgatattaaagcaatagctcgtggtaccccaggattcaatggggcagatcttgcgaacctggtgaacattgctgccattaaagctgcggttgaaggtgcagagaaattaacagcttctcagttggagtttgcaaaagacagaataattatgggtacagagcgaaaaacaatgttcatatcagacgagtcaaaaaagcttactgcttatcatgagagcggccatgcaattgttgcccttaacaccgacggtgcacatccaattcacaaggcaacaataatgcctcgtggatctgctttaggaatggttactcagcttccctcaagtgatgaaacatcgataagtaagaagcagttgttagctcgtcttgatgtttgtatgggaggaagagttgcagaagagcttatctttggtcgtgataatgtcacaactggagcaagtagcgatcttcaatctgctaccgagcttgcccaatacatggtttcaagttgtgggatgagtgatacaatcggaccaattcatataaaggaaagaccaagttctgaaatgcagtcacgtattgatgcagaggttgttaaactccttagagatgcatatgatcgcgtgaaagctcttctgaagaagcatgagaaggcattacatgtgctggcaaatgcattattagagtgcgagacacttaattcagaagaaatcaggcgattactactcccatatcgggaaggaagactgccagaacaacaggaacaagaagaagcagaaggggatcttgtattggtctaa

SEQ ID NO: 60742 - protein, 786 aa, Pisum sativum
MATLQTSLLFKLPFPFLFPNHSTHKPHRHFSFNPTRLRPRVLPPPLCTFQPDATTPHSDPNPTLPEPKPDSVDAELINSTENDTVAGLDSNSNESRFESVDGERLEASESEKKVSKLPIVVFLIGVWVRARERVERAFSEFFDWWPFWRQEKRLAKLISEADVNRQDAAKQSALFVELNKHSPESVIKIFEERDRAVDSKGVAEYLRALVVTNAIAEYLPDKESGKPSGIPSLLQELKQRASGNIDETFLNPGISAKQPLHVVMVDQKVSYKSRFVSEVVSTIFFTVAIGLVWFMCSAALQKYIGGLGGIGSSGVGSSSSYTPKELNKEVMPEKNVKTFKDVKGCDDAKQELEEVVEYLRNPAKFTRLGGKLPKGILLTGAPGTGKTLLAKAIAGEAGVPFFYRAGSEFEEMFVGVGARRVRSLFQAAKKKAPCIIFIDEIDAVGSTRKQWEGHTKKTLHQLLVEMDGFEQNEGIILMAATNLPDILDPALTRPGRFDRHIVVPNPDVRGRQEILELYLQDKPTAENVDIKAIARGTPGFNGADLANLVNIAAIKAAVEGAEKLTASQLEFAKDRIIMGTERKTMFISDESKKLTAYHESGHAIVALNTDGAHPIHKATIMPRGSALGMVTQLPSSDETSISKKQLLARLDVCMGGRVAEELIFGRDNVTTGASSDLQSATELAQYMVSSCGMSDTIGPIHIKERPSSEMQSRIDAEVVKLLRDAYDRVKALLKKHEKALHVLANALLECETLNSEEIRRLLLPYREGRLPEQQEQEEAEGDLVLV

SEQ ID NO: 60743 - DNA, 2478 bp, Saccharomyces cerevisiae
  CDS (1)..(2478)
atgttgctactttcttggtcaagaattgctactaaggtagttagaaggcccgttcgcttccggtcctattacggcttgacccatatcaagagtttacatactcaatatcggctactcaataggctgcaagagaataagagcggtaacaagaacgaggacaataacgaagacgctaaacttaacaaagaaattcccacagacgaagaggttgaagcaataagaaaacaagtagaaaaatatatcgaacaaactaaaaataatactataccggctaactggaaagaacagaaacgcaaaattgatgaaagtattaggcgtttagaagatgctgtattgaaacaagaatctaacagaattcaagaagaaagaaaggaaaaagaggaggaaaatggtccttcaaaagccaagtcaaacagaacaaaagagcagggctactttgaaggtaacaatagcagaaatattccaccgccaccaccacctcctcccccaaaaccacctctaaatgatcctagtaatcctgtatcgaaaaatgttaacttattccagataggactaacttttttcctcctttcgtttttattgggtctcctcaacagtttggaagagcaaagtgagataacgtggcaggattttagagagaaactattggcaaaaggttatgttgcgaagttgattgttgtcaacaagtccatggtgaaagtgatgttaaatgacaacggaaaaaaccaagccgacaattacggtcgcaacttctattatttcacaattggttcaattgatagcttcgaacacaaacttcagaaagcacaggacgaactggacattgataaggatttcagaatacctgtactatatgttcaagaaggcaattgggctaaagctatgttccaaattttgccaactgttttaatgattgcaggtattatttggttgacaagaagatcggcacaagcagcgggcggtagccgtggaggcatatttggtctgagtcgttctaaggctaaaaaatttaacactgaaacagacgttaagatcaagttcaaggacgttgccggatgcgatgaggctaaggaagaaattatggagtttgttagcttcttgaaagaaccttctcgttatgaaaaaatgggagctaaaattcctagaggtgcgattctatctggtccaccaggtaccggtaaaactttgcttgcaaaggcaacagcaggtgaagccggtgttccgttttattttgtttctggttcagaatttgtagaaatgtttgttggtgttggtgcagcaagagtaagagatttgttcaaaactgcaagagaaaatgcaccctcaattgtgtttattgacgaaattgatgctataggaaaagcaagacaaaagggtaatttttcaggtgccaatgatgagagagagaacacgctaaatcaaatgttagtagaaatggatggtttcactccagctgaccacgttgttgttttagctggtaccaatagacccgatattctcgataaagcattattaaggcctggtagatttgacaggcatatcaatatcgacaagcccgaacttgagggtagaaaagccatttttgctgttcatttacatcatttgaaacttgccggggaaatttttgatttgaaaaatagattagcggctttgacgccaggcttttctggtgctgatattgccaacgtttgtaacgaggccgccttgattgctgctagaagtgatgaagatgcagtaaaattgaatcattttgaacaagctatcgaaagagtcatcggtggagtggaacgcaaatccaagctactctctcccgaagagaagaaagtagtggcttaccacgaggctggtcatgctgtatgtggatggtacttaaaatacgcagatcctcttctgaaagtcagtattattccacgtggccagggcgcccttggttatgcacagtatttgccaggtgatatcttcttactaactgaacagcaacttaaggacagaatgaccatgtctctgggtggaagagtttctgaagaattacatttcccatcagttacaagtggcgcatctgatgacttcaaaaaagttactagcatggccacggcaatggtcacagaattaggcatgagtgataaaattggctgggtcaattaccagaagagagatgatagcgatttgacaaaaccattttcggacgagacaggtgacattattgattccgaagtatacagaatcgtccaagaatgccatgacagatgtacaaagctgcttaaagaaaaagcagaagatgtagagaagattgctcaagtactactgaaaaaagaagttttgacaagagaagatatgattgatttacttggtaagcgccctttcccagaaaggaatgatgcttttgataagtacttgaacgattacgaaacggaaaaaatcaggaaggaagaagaaaaaaacgaaaaacgtaatgagcctaagccatctacaaactga

SEQ ID NO: 60744 - protein, 825 aa, Saccharomyces cerevisiae
MLLLSWSRIATKVVRRPVRFRSYYGLTHIKSLHTQYRLLNRLQENKSGNKNEDNNEDAKLNKEIPTDEEVEAIRKQVEKYIEQTKNNTIPANWKEQKRKIDESIRRLEDAVLKQESNRIQEERKEKEEENGPSKAKSNRTKEQGYFEGNNSRNIPPPPPPPPPKPPLNDPSNPVSKNVNLFQIGLTFFLLSFLLGLLNSLEEQSEITWQDFREKLLAKGYVAKLIVVNKSMVKVMLNDNGKNQADNYGRNFYYFTIGSIDSFEHKLQKAQDELDIDKDFRIPVLYVQEGNWAKAMFQILPTVLMIAGIIWLTRRSAQAAGGSRGGIFGLSRSKAKKFNTETDVKIKFKDVAGCDEAKEEIMEFVSFLKEPSRYEKMGAKIPRGAILSGPPGTGKTLLAKATAGEAGVPFYFVSGSEFVEMFVGVGAARVRDLFKTARENAPSIVFIDEIDAIGKARQKGNFSGANDERENTLNQMLVEMDGFTPADHVVVLAGTNRPDILDKALLRPGRFDRHINIDKPELEGRKAIFAVHLHHLKLAGEIFDLKNRLAALTPGFSGADIANVCNEAALIAARSDEDAVKLNHFEQAIERVIGGVERKSKLLSPEEKKVVAYHEAGHAVCGWYLKYADPLLKVSIIPRGQGALGYAQYLPGDIFLLTEQQLKDRMTMSLGGRVSEELHFPSVTSGASDDFKKVTSMATAMVTELGMSDKIGWVNYQKRDDSDLTKPFSDETGDIIDSEVYRIVQECHDRCTKLLKEKAEDVEKIAQVLLKKEVLTREDMIDLLGKRPFPERNDAFDKYLNDYETEKIRKEEEKNEKRNEPKPSTN

SEQ ID NO: 60745 - DNA, 2121 bp, Pisum sativum
  CDS (1)..(2121)
atggcttggaggcgtttgataacacaggttgataggcgtcaatcagaatttggaaaggtcaaagatatattgagtagaagctatttatctcgtaataagtttgatggatgttcaaggaatgggcttttcttctcccaggaaagatcccgatccagctatcttggaaatctggcccgacgactgcgtgattcatctgaagccgaggaagcctcttatctaaaagaactttaccgtagaaatgatcctgaatccgtgattagagcatttgaaagtcagccatctctgcatacaaattcgtcggcacttgctgaatatgttaaagcattggtaaaagttgataggctggatgaaagtgaattactcaagactttgcgaagaggtatttccaattccgtgagagaggaagaaagtagtataggtggccttgctgctcttagaaatgtgggtaaaactacaaaagatggaattcttggaactgcaactgctcctattcatatggttgctgcatcagaaggtggaaatttcaaggaacagctatggcgtacaattagatctgttgccgtggccttcctcttgatttctggtgtaggagctctcattgaggataaaggaattagtaaaggtcttggtatgaatgaagaagtgcagcccagtgtggagacaagtactaaatttagcgatgtgaaaggtgtggatgaggcaaaggctgaacttgaagaaattgttcattatctaagagatcctaagcgctttactcgtcttggtggcaaactcccaaaaggtgttttgcttgttggcccgcctggcactggaaaaacaatgttggcaagagccattgctggagaggctggggttcctttcttctcatgcagtggaagtgaatttgaagagatgtttgttggtgttggtgcacgaagggtgagagatctttttactgctgcgaaaaagaggtcgccttgtataatctttattgatgagattgatgctattggcggaagtcgaaatccaaaggaccaaatgtacatgaagatgactttaaatcaaatgcttgttgagttagatggattcaaacaaaacgaaggcataattgtaattggtgctactaattttcctgagtcactcgataaggctctggtgagacctgggcgttttgatcgccatgtcgttgttcccaatccagatgtagaaggacggcgacagattatggaatctcacatgtcaaaggttctgaaagcggatgatgttgatccgatgatcattgctcggtgtacacctggtttctctggtgctgaccttgcaaatttggttaatgttgctgccctcagggctgcaatgaatggctccaaagccgtgagcatgcatgatttagagtttgcacgggacaagatcatgatgggaagtgaacgtaagtcagctgttatatctgaggagtcaagaaagactactgcttttcatgagggtggccatgccttggtagcagttcacactgatggtgcgcttcctgttcacaaggcaactatagttcctcgcgggatggctcttggcatggtttctcaactgccggacaaggatcagactagtcactctcgtaaacagatgcttgctaggcttgatgtttgtatgggaggccgggttgccgaagagctaatatttggagaaagtgaagttacttctggtgcctcctcagatctttcacaggcaacttctttggccagggaaatggttacaaaatatggcatgagtactgaagttggtcctgtcactcacaattactatgataatgggagaagtatgagctcagaaactaggctgcttattgagaaagaagtgaagaacttactggaaagagcttacaacaatgcaaaaactatcctaaccacccacgaaaaggagcttcacgcacttgcaaatgctcttctggagcaggagacacttacaggaagtcagataaatgaattacttgcaaaggtcaaatcccagaagcaacaaccgcagtcacgcgtagttgaagctcagggaaattcacggcccaatccagcagctgctgcggctgccgcggccgctgcagctgcagcttctgctgctgcaaaggctcaaggagttgccccagtaggatcttag

SEQ ID NO: 60746 - protein, 706 aa, Pisum sativum
MAWRRLITQVDRRQSEFGKVKDILSRSYLSRNKFDGCSRNGLFFSQERSRSSYLGNLARRLRDSSEAEEASYLKELYRRNDPESVIRAFESQPSLHTNSSALAEYVKALVKVDRLDESELLKTLRRGISNSVREEESSIGGLAALRNVGKTTKDGILGTATAPIHMVAASEGGNFKEQLWRTIRSVAVAFLLISGVGALIEDKGISKGLGMNEEVQPSVETSTKFSDVKGVDEAKAELEEIVHYLRDPKRFTRLGGKLPKGVLLVGPPGTGKTMLARAIAGEAGVPFFSCSGSEFEEMFVGVGARRVRDLFTAAKKRSPCIIFIDEIDAIGGSRNPKDQMYMKMTLNQMLVELDGFKQNEGIIVIGATNFPESLDKALVRPGRFDRHVVVPNPDVEGRRQIMESHMSKVLKADDVDPMIIARCTPGFSGADLANLVNVAALRAAMNGSKAVSMHDLEFARDKIMMGSERKSAVISEESRKTTAFHEGGHALVAVHTDGALPVHKATIVPRGMALGMVSQLPDKDQTSHSRKQMLARLDVCMGGRVAEELIFGESEVTSGASSDLSQATSLAREMVTKYGMSTEVGPVTHNYYDNGRSMSSETRLLIEKEVKNLLERAYNNAKTILTTHEKELHALANALLEQETLTGSQINELLAKVKSQKQQPQSRVVEAQGNSRPNPAAAAAAAAAAAAASAAAKAQGVAPVGS

SEQ ID NO: 60747 - DNA, 2145 bp, Solanum lycopersicum
  CDS (1)..(2145)
atggctttaatgcgccttctaactcaggttgaaaggcaacaatctcaactgaggcatattagctctttgttcaatcgaacatatctttcctctggacggatcataggaagtgaagttcatggagttgcaaataccaagcaaaggtttcagtctagttatgtgggaagtctagcccgcagagtacgtgaaagagaggaaactagtaatgcttcatttcatagaagtgatccagaggcagtcataaggtcgtttgaaagccaaccttcattgcattccaatccagcggcagtgtcggagtatgttaaggcactggtaaaggctgacagacttgatgaaagtgagcttctccggactttgcagagagggattgctggttctgctaggtctcatatggaggaagagaatataggggctctgtcagctcttagaaatgttgggaaatcaacaaaggatggtgttcttggtactcgtaatactcctatacatatggtggccgtggaaggaggtaacttcaaagaacagttgtggcgtacattccggtctctggctgtggcctttctcttgatttctggagttggtgctctcattgaagatagaggaatcagcaaaggtataagaggacttggtctaaatgaggaagtgcaaccaaccatggaaaccaatacaagattttctgatgtgaagggtgttgatgaagcaaaatctgagctggaagaaattgttcactatctccgagatcctaagcgtttcactcgtcttgggggcaagctcccaaaaggagtattacttgttggcccccctggaactggtaagaccatgttggcgagggccatagctggagaagctggggttccctttttctcatgcagtggcagtgagtttgaagaaatgtttgttggtgtcggagctcgcagagtgagagacctttttgctgctgctaagaagcgatcaccatgcattatattcattgatgagattgatgccattggaggaagccgtaaccctaaggatcagcaatatatgaggatgactttaaatcaattgcttgtcgagctggatggcttcaaacaaaatgatggaatcattgtgattgctgccactaattttgctgagtcactggataaggctttggtgagacctggacgatttgatcgcaacattgttgtcccaaatcctgatgttgaagggcggaagcagattttggaatctcacatgtcaaagattctgaaggcggatgatgttgaccttatgatcattgctcgggggactcctggattttctggtgcagaccttgcaaacttggtgaatatcgctgctgtgaaggctgctatggatggtgccaaagccgtaagcttggctgatctagagcatgcgaaggacaagatcatgatgggaagtgagcgcaaatcagcttttatatcccaagagtcgagaaaactcacagcataccatgaaggtgggcatgcacttgtagctattcatacagatggggctcttccggtgcacaaagcaactattgttccacgtggaatggctcttggtatggttgctcaattgcctgaaaaggacgagactagcatctcccgtaagcagatgcttgcacgacttgatgttgccatgggtgggcgagttgctgaagagctcattttcggggaaagtgaagtaacttctggtccatctgatgatctcaagcaagcaaccaagctagccagaaccatggtcaccaagtttggtatgagcaaagaagttgggctcgttacccataactacgacgataatgggaagagcatgagcactgagactagacttctaatcgagaaggaagtaagagaattacttgaaagggcttacaacaatgcgaaaactattctcactacccataataaagaacttcatgctcttgctaatgcattgcttgagaaggaaacactaaccggaggtcagatcaaagccttgcttgcccaggtcaaatctcaacaaactcagcagaagcaacatcaatcagtatcagttgaaagtacaccacagtccaatccaagacctccacagagtccaagtgcagcagcagctgcggccgctgctgcagcagccgctgcagctacagctgctgctaaaaccaaaggcattgctccagtaggatcttag

SEQ ID NO: 60748 - protein, 714 aa, Solanum lycopersicum
MALMRLLTQVERQQSQLRHISSLFNRTYLSSGRIIGSEVHGVANTKQRFQSSYVGSLARRVREREETSNASFHRSDPEAVIRSFESQPSLHSNPAAVSEYVKALVKADRLDESELLRTLQRGIAGSARSHMEEENIGALSALRNVGKSTKDGVLGTRNTPIHMVAVEGGNFKEQLWRTFRSLAVAFLLISGVGALIEDRGISKGIRGLGLNEEVQPTMETNTRFSDVKGVDEAKSELEEIVHYLRDPKRFTRLGGKLPKGVLLVGPPGTGKTMLARAIAGEAGVPFFSCSGSEFEEMFVGVGARRVRDLFAAAKKRSPCIIFIDEIDAIGGSRNPKDQQYMRMTLNQLLVELDGFKQNDGIIVIAATNFAESLDKALVRPGRFDRNIVVPNPDVEGRKQILESHMSKILKADDVDLMIIARGTPGFSGADLANLVNIAAVKAAMDGAKAVSLADLEHAKDKIMMGSERKSAFISQESRKLTAYHEGGHALVAIHTDGALPVHKATIVPRGMALGMVAQLPEKDETSISRKQMLARLDVAMGGRVAEELIFGESEVTSGPSDDLKQATKLARTMVTKFGMSKEVGLVTHNYDDNGKSMSTETRLLIEKEVRELLERAYNNAKTILTTHNKELHALANALLEKETLTGGQIKALLAQVKSQQTQQKQHQSVSVESTPQSNPRPPQSPSAAAAAAAAAAAAAATAAAKTKGIAPVGS

SEQ ID NO: 60749 - DNA, 2583 bp, Corynebacterium glutamicum
  CDS (1)..(2583): transl_table=11
ttgagccggttgccactgcgtatgaaaaacaagaaatacctgcagttcggcggtatcgcagccgtaatcctcatcgttctgttcttggtgtccctgtttagcagtgacaccaggaacttccaggaggtcgatacctctgttgcgatggcacagcttgacgccggaaacgtcgccgaagctcaaatcgatgacagggaacagcgcgtccgactgaccttgcgtgaacccatcacggtggatgaacgcgaaggcgttgaagagatcctcgcgcagtacccagctcgtaccgcgccagcgatctttgagaaggtggaagcatccaacactgattcctataccaccaatgtgacgcaggagagcttcctgatgtccatgctgagcttcatcctgccgatggtgatcatcttcggtttgctgatgttcttcctcacccgcatgcagggtggtggcatgtttggcatcggtggatccaaggccaagcagctgaccaaggatatgcccaccaacaccttcgcggatgttgctggcgctgaagaagcagtggatgaactccatgagatcaaggacttcctggaagaccccacccgctacgaagccctcggagcgaaaatccctcgtggtgtgctgctttacggccctcccggtactggtaaaaccctgctggctcgtgccgtagctggtgaggctggcgtgccgttctactcaatttccggttctgactttgtggaaatgttcgtcggtgttggtgcctcgcgtgtgcgtgatctgtttaagcaggccaaggaaaacagtccctgcatcatcttcgtcgatgagatcgatgcggttggtcgcgcccgtggctcaggaatgggtggcggacacgatgagcgtgaacagaccctgaaccagttgctcgttgagatggatggctttggtgatcgtcaaggcgtcattctgatggctgctaccaaccgcccagatgttcttgacccagcgctgctgcgtcctggccgtttcgaccgccagatcccagtcaccaaccctgacctacgcggccgtgaacagatcctggaagttcacgccaagggtaagcctttcgcacccgatgcagatatcaaggcattggcaaagcgcaccgccggcatgtccggcgctgacctggcaaacgtgcttaacgaagccgcgctgctaaccgcccgcgtgggtggcaacgtgatcaccgccgacgctctggaagaagcaaccgaccgcgttgtcggtggaccacgtcgctccggcaaggtgatttccgagaaggaaaagaaggtcaccgcctaccacgaaggtggacacaccctgtccgcatgggcgttggaagacatcgagcgcgtctacaaggtcaccatcttggcccgcggtcgcaccggcggtcacgccatgactgcccaagaagatgacaagggcatgtacaaccgcaacgaattgttcgcccgcctggtctttgccatgggtggacgctccgcggaagaactagtcttcggcgaacccaccaccggcgcctccgccgatattgaaatggccaccaagatcgcccgatccatggtgaccgaatatggcatgtccccagctgtcggcatggtgaaatacggccaagaacagggcgacccattctccggacgcggtggcggtggaaacttggaccactcccaagaagtcgcagcaaccatcgacaccgaagtccagttcctcctggacaaagcccatgaagtgtcctactccatcctggctgaataccgcgaccacctggaccgcctcgcggaaaaactcctggaaaaggaaaccctgcgacgcccagacctcgaagcgcttttcgacgacatcgtcccacgcaaggtcgccgaagtcttccccgacgagtccacacgattccctcgccaagaaaaccgcgaaccagtaaaaaccccagtggagctcgcactggaacgtggcgaagaaccaccaaagaagttctccattcttgaggcctcccgcgcaacccgcgaacgccgtcgcaaggaattggaagctcagggtaagttgccggtgcagcctgcgtcttctgccggcgtggcacctgcggccggagcagctgccggatcctatggcaccccacctccagctgattggagcgtgcccggttccgctggaaagcaccgctcacgtgcagaagaacagccagctgagcagggcttcccggctcagaccccggcacaagctcctgagcagtcccctgattcaagtggcggccgccccaacccttacgcgactccaaccgcatccggtgagcaccctggtatgaaggcctatggcttcggcgattccgaactcatggaccaatcaacaggtgcggaacataccccaggtaacgtttcacaggaatccccaaccgaaatgatcgggttccgtttgccggatcatgaacgttcggactacccagaaaaggcgcaaaaagagtcggtgctggatgcttctgaaaccacagaaatgcctgtcgttccagatcagcccatcgatggtgattccgggaagtccgctgagggcacacaggagaatccggaaaatgaaggagacaaccgtggataa

SEQ ID NO: 60750 - protein, 860 aa, Corynebacterium glutamicum
MSRLPLRMKNKKYLQFGGIAAVILIVLFLVSLFSSDTRNFQEVDTSVAMAQLDAGNVAEAQIDDREQRVRLTLREPITVDEREGVEEILAQYPARTAPAIFEKVEASNTDSYTTNVTQESFLMSMLSFILPMVIIFGLLMFFLTRMQGGGMFGIGGSKAKQLTKDMPTNTFADVAGAEEAVDELHEIKDFLEDPTRYEALGAKIPRGVLLYGPPGTGKTLLARAVAGEAGVPFYSISGSDFVEMFVGVGASRVRDLFKQAKENSPCIIFVDEIDAVGRARGSGMGGGHDEREQTLNQLLVEMDGFGDRQGVILMAATNRPDVLDPALLRPGRFDRQIPVTNPDLRGREQILEVHAKGKPFAPDADIKALAKRTAGMSGADLANVLNEAALLTARVGGNVITADALEEATDRVVGGPRRSGKVISEKEKKVTAYHEGGHTLSAWALEDIERVYKVTILARGRTGGHAMTAQEDDKGMYNRNELFARLVFAMGGRSAEELVFGEPTTGASADIEMATKIARSMVTEYGMSPAVGMVKYGQEQGDPFSGRGGGGNLDHSQEVAATIDTEVQFLLDKAHEVSYSILAEYRDHLDRLAEKLLEKETLRRPDLEALFDDIVPRKVAEVFPDESTRFPRQENREPVKTPVELALERGEEPPKKFSILEASRATRERRRKELEAQGKLPVQPASSAGVAPAAGAAAGSYGTPPPADWSVPGSAGKHRSRAEEQPAEQGFPAQTPAQAPEQSPDSSGGRPNPYATPTASGEHPGMKAYGFGDSELMDQSTGAEHTPGNVSQESPTEMIGFRLPDHERSDYPEKAQKESVLDASETTEMPVVPDQPIDGDSGKSAEGTQENPENEGDNRG

SEQ ID NO: 60751 - DNA, 2430 bp, Arabidopsis thaliana
  CDS (1)..(2430)
atgacaatgatcttcttctctaagcttaatcgctccatttctcgttcaaagggatttttgtacggtggtggtgttagatcggcggcaaggctacttacttcgccgggacttgaggcggcgtctgtgaatgaagtggaaggtggattagggtttataagaagacactttgcttctttagcttcacggaagggtttagtcaataatgatttgattggtgtttttgctaatccaagacttcgtagattcttctctgatgaagctcctaagaagaagaattatgagaactattttcctaaagataagcaagaacccaagagtgatcagaaatcagagcataaagagggttcagaaaagaatgaaaatgagaatgtgggagatatgttcatgaaccgattccaaaatttgctaattcctctactagctcttgctgtattcttttctactttctcgtttggctctggggaccaacaacagataagtttccaggagttcaaaaacaagctactcgagcctggtttagttgaccacatagatgtttcaaacaaatcagtagcaaaagtctacgtgaggagcacaccgaaagaccaacaaacaactgacgttgtccatggtaatggtaacggtattcctgctaaaagaactggtggtcagtataagtactacttcaatatcggtagtgttgattcttttgaggagaaactcgaagaagctcaagaagcgttaggtgttgatcgtcatgaatatgttcctgtcacatacgtctctgaaatggtctggtatcaagagttcatgaggtttgcaccgactttgttgctcttgggtactctgatctatggtgcgagacggatgcaaggtggattgggtgtaggaggaactggcggtaagaatggtcgtggaattttcaatataggcaaagctacaataacgagagctgataaacattccaagaataagatttatttcaaggatgttgctggatgtgacgaggctaaacaagaaattatggagtttgtacatttccttaagaacccaaagaagtatgaagatttgggtgctaaaattccgaaaggtgcacttttagtcggtccgcctggaaccggaaagacccttttagcaaaagccacagcaggagaatctggtgtgccatttctgtctatttctggctcagatttcatggagatgtttgttggtgttgggccttcgagggtgagacatttgttccaagaggcgagacaagctgcaccgagcattatatttatcgatgagattgatgctattggtcgggcaagaggtcgtggaggtttaggcggaaatgatgagcgtgaaagcactctgaatcagttgctagttgaaatggatggttttggtacaaccgctggtgttgtggttcttgctggaaccaacagaccggatattttggataaagctttgttaaggcctggacgttttgatcgccagataactattgataaacctgatatcaaagggcgtgatcagattttcaagatttacttgaagaagatcaaacttgatcatgagccatcatattactctcaaaggcttgctgctctcactcccgggtttgcaggagctgacattgcgaatgtctgtaacgaagcagctcttattgctgctagacacgaaggagcaacggttactatggcacactttgaatctgcgattgatcgtgttattggtggtcttgagaagaaaaaccgggtgataagcaagttggagcgacgtacagttgcatatcatgaatctggtcacgcagttgtagggtggttccttgaacatgcagagccgttactgaaagtgactattgtaccacgtggcacagcggctctcggatttgcacaatacgttccaaacgaaaaccttctcatgaccaaagagcaactctttgacatgacttgcatgactctcggaggccgtgcacctgagcaggtattgataggtaaaatctcaacgggtgcgcagaacgatctagagaaggtgacgaagatgacttacgcgcaagtagctgtgtatggtttcagtgacaaggttgggctactctcgtttccaccaagggatgatggctacgacttctctaaaccatacagcaacaaaaccggtgctatcatagacgaagaagttagggactgggtggccaaagcttatgagcggaccgtagagctggttgaggaacacaaagtgaaagtggctgagatcgccgagcttttactagagaaagaggtgttgcatcaggatgatctcttaaaaattttaggtgaacgtccgtttaagtcagctgaggtcactaattatgaccggttcaagtctgggtttgaagagactgagaaggactcagccgccacccctacagtggagcctgtggtggatgatggagctcccccgccgtttgaaccccaggttgttccgacgtaa

SEQ ID NO: 60752 - protein, 809 aa, Arabidopsis thaliana
MTMIFFSKLNRSISRSKGFLYGGGVRSAARLLTSPGLEAASVNEVEGGLGFIRRHFASLASRKGLVNNDLIGVFANPRLRRFFSDEAPKKKNYENYFPKDKQEPKSDQKSEHKEGSEKNENENVGDMFMNRFQNLLIPLLALAVFFSTFSFGSGDQQQISFQEFKNKLLEPGLVDHIDVSNKSVAKVYVRSTPKDQQTTDVVHGNGNGIPAKRTGGQYKYYFNIGSVDSFEEKLEEAQEALGVDRHEYVPVTYVSEMVWYQEFMRFAPTLLLLGTLIYGARRMQGGLGVGGTGGKNGRGIFNIGKATITRADKHSKNKIYFKDVAGCDEAKQEIMEFVHFLKNPKKYEDLGAKIPKGALLVGPPGTGKTLLAKATAGESGVPFLSISGSDFMEMFVGVGPSRVRHLFQEARQAAPSIIFIDEIDAIGRARGRGGLGGNDERESTLNQLLVEMDGFGTTAGVVVLAGTNRPDILDKALLRPGRFDRQITIDKPDIKGRDQIFKIYLKKIKLDHEPSYYSQRLAALTPGFAGADIANVCNEAALIAARHEGATVTMAHFESAIDRVIGGLEKKNRVISKLERRTVAYHESGHAVVGWFLEHAEPLLKVTIVPRGTAALGFAQYVPNENLLMTKEQLFDMTCMTLGGRAPEQVLIGKISTGAQNDLEKVTKMTYAQVAVYGFSDKVGLLSFPPRDDGYDFSKPYSNKTGAIIDEEVRDWVAKAYERTVELVEEHKVKVAEIAELLLEKEVLHQDDLLKILGERPFKSAEVTNYDRFKSGFEETEKDSAATPTVEPVVDDGAPPPFEPQVVPT

SEQ ID NO: 60753 - DNA, 2433 bp, Pisum sativum
  CDS (1)..(2433)
atgattttctcaaggattgggcgcgctctgtcgcgttcttctcgcgttaaaaatttgttgcacggtgattcgagattgggggcgctttctggagttccgcgaatagatgtctattctgagggtgttgaaggggggttagggtttttcaggggttacgtatcttcttcagtagctcgcaataatggttttgtttctaatttgtctggttttaaatctgttgctggaaaccctaggtttcttcgcttgttttccagcgaagccccaaagaagaagaattatgagaacttttatcccaagggacagaaggaagtacctaaggggggtgacaaaaagaatgagtctaaagaggattccaagtcaaacacagaggatcaaggtggttttcaagaagccttcatgaagcaatttcaaagttttctcaccccattgttggtgatggggctatttctgtcatccttttcttttggtcctcgtgagcagcagcagattagctttcaggagtttaaaaataagcttttggaaccagggttagtagaccatattgttgtctccaacaaatcagttgccaaaatatatgtgagaaactctccccgtgatcaagctgacagcgaagtactacaaggaaaccttcctgcaaaggggtctagtggccattataaatattatttcaatattggaagtgtcgagtcttttgaggagaagttagaggaagtgcaagaaacactaggtgttgaccctcacgataatgtacctgttacatattcttctgaactggtttggtaccaggagttgatgaggtttgctccaaccctgttacttttgggaactctcttgtatatgggaaggagaatgcaaggtggatttggtgttggcggcggcggcggtggtaagggtgctcgtggaatatttaacattggaaaagcacatgttactaaagtagacaaaaatgccaaaaacaaggtctattttaaagatgttgctggctgtgatgaggcaaaacaagaaattatggagtttgtgcacttcctcaagaatcctaagaagtacgaagagcttggtgccaaaattccaaaaggtgctcttctggtcggtcccccaggcacaggaaaaacccttttagcaaaagcaactgcaggggagtctggtgtgccatttctttctatatctggttccgatttcatggaaatgtttgtcggtgttggaccgtcaagggtgagaaacttgtttcaggaagcaaggcagtgtgctcccagtataatatttattgatgagattgatgcaattggtcggaaaaggggccgtggaggtttctctggttcaaatgatgagcgtgaaagtactttaaatcaattgttggtggagatggatggttttggaaccactgctggagttgttgtgctagcaggtacaaatagacccgatatattagacaatgccctacttaggcctgggcgttttgaccgccagataacaattgatgtacccgacattaaaggccgtgaccagatttttcagatttacttgaaaacgatcaaacttgaccacgagccctcatattattctcaaaggcttgcagcccttactccaggttttgctggagcagacattgctaatgtttgcaatgaagctgcgctgattgctgcaagaactgatgaagcacaagtcacaatggatcatttcgaggcagctattgatagaatcattggtggtttggagaagaagaacaaggtaataagtaagctggaaaggcgtactgttgcttaccatgaagcaggtcatgctgttacaggttggttcttggaacatactgatccattgttgaaagtaactattgttcctcgcggaacagcagctcttgggtttgcgcagtatgttcctaatgagaatctcctcaagactaaggagcagcttttcgatatgacttgtatgacccttggtggccgggctgccgagaaggttctcattgggacaatctctaccggagcacaaaatgatttagagaaagtgaccaagatgacttatgcccaagtagccgtctatggtttcagcgaaaaagtgggcctcctctctttccctcaaagggaggactcaatggagatgaccaaaccatacagcagcaaaactggtgcaataattgatactgaagtccgagaatgggtgaacaaagcatatgaacgtaccatacagcttatagaggaacacaaggcgaaagtagccgaaattgcagagttgttgcttgaaaaagaagtacttcaccaagaagacttgcttcgagtcttgggtgagcggcccttccaaagtgctgagcccactcattatgatagatttaagctagggtttcaagatgaggagaaagttgttgaaaccacagtaaatgaagccaaggatgatggtgggtcttcacctctagagccagaggttgttcccacatag

SEQ ID NO: 60754 - protein, 810 aa, Pisum sativum
MIFSRIGRALSRSSRVKNLLHGDSRLGALSGVPRIDVYSEGVEGGLGFFRGYVSSSVARNNGFVSNLSGFKSVAGNPRFLRLFSSEAPKKKNYENFYPKGQKEVPKGGDKKNESKEDSKSNTEDQGGFQEAFMKQFQSFLTPLLVMGLFLSSFSFGPREQQQISFQEFKNKLLEPGLVDHIVVSNKSVAKIYVRNSPRDQADSEVLQGNLPAKGSSGHYKYYFNIGSVESFEEKLEEVQETLGVDPHDNVPVTYSSELVWYQELMRFAPTLLLLGTLLYMGRRMQGGFGVGGGGGGKGARGIFNIGKAHVTKVDKNAKNKVYFKDVAGCDEAKQEIMEFVHFLKNPKKYEELGAKIPKGALLVGPPGTGKTLLAKATAGESGVPFLSISGSDFMEMFVGVGPSRVRNLFQEARQCAPSIIFIDEIDAIGRKRGRGGFSGSNDERESTLNQLLVEMDGFGTTAGVVVLAGTNRPDILDNALLRPGRFDRQITIDVPDIKGRDQIFQIYLKTIKLDHEPSYYSQRLAALTPGFAGADIANVCNEAALIAARTDEAQVTMDHFEAAIDRIIGGLEKKNKVISKLERRTVAYHEAGHAVTGWFLEHTDPLLKVTIVPRGTAALGFAQYVPNENLLKTKEQLFDMTCMTLGGRAAEKVLIGTISTGAQNDLEKVTKMTYAQVAVYGFSEKVGLLSFPQREDSMEMTKPYSSKTGAIIDTEVREWVNKAYERTIQLIEEHKAKVAEIAELLLEKEVLHQEDLLRVLGERPFQSAEPTHYDRFKLGFQDEEKVVETTVNEAKDDGGSSPLEPEVVPT

SEQ ID NO: 60755 - DNA, 2787 bp, Neurospora crassa
  CDS (1)..(2787)
atggcggtcagatttcgccaatcgtcgcagcagcttgcgctttgcgccaggcaggccctccggattaccacccggcccgcataccgtgcatcccgcctcccccgggcctccctctcgtccgctcgccagctacctacctctcggctctactcgacacaatcgaccgagaagcccgaacccaagaaagatgacgacaacaagtcgcccaagcccgaggaggacgaggaagatttcgagcccaaacgccccctgcccccaggatgggtgcgcatggagaagcaggatctcaaggatttcgatgctttcattaaaaaggccgcactgaagacgggaatcaagattgagggccaggatgttatcctccaaggcatcaagcactacggctgcccaaaggagacgcgagagcttctgaaaaagtggatcagtggcaacatcaccatctttgagcagctcaggtgcatgaagtctctggttatgctggccaaggatctcggtgaacatgaggtcgaatacatgaggaagaacccaaatgcaaagtctatcgccagtggcttcaatgacaacactttcacttcgaacatgtcagattccgacaggaaagcgcagacgtcggaggagcagaataagcaaagcgaaggcaaggaagccggccaacagcagtccgacggccaacaaggaaagcaaagtggtgagcagcaaggccagcaagggcccaagaggcctggtgctcagggccaaggtggtcaagagcctccccagggctttgacggcggcctcatgaactatgttattggtaccgctgttctgttctggacctacaaggtgctgttccccggcaacgactctcgcgagatcacctggcaggaactgcgcaagaactttctggaaaagggcctggtcgagaagctcacggtcgtcaaggatcgtgttatcgtggatctcaacaaggaggctgtcaggcaaatgtatcccgactcgcccgccgcttctcccggcttccactactacttcaccattggctctatcgatgctttcgagaggaggttagacgaggcccaggctgagcttgggattccgccagctgagaggatccctgtcagctatgccaacgaattcagctggggcaacatcatccttgccttcggccctaccctggtgcttgtgggtttgcttgcctacatttccaggagaggtcctggcggcgctggcggccccggtggcatgttcggcatcggcaagagcaaggccaagatgtttaatcacgatactgcggtcaaggtcaagttctccgatgtcgcgggtatggatgaggccaaggtcgagattatggagtttgtccagttcctcaaggagcccgagcgcttccagaagctcggtgccaagatccctcgtggtgctatcctgtctggtccccccggtaccggtaagactctgcttgccaaggcgactgccggtgaatcgcaggttcccttcttcagtgtcagcggttccgaattcgtcgagatgtttgtcggtgtcggtgcgtcccgtgtccgtgatctctttgccacggcgcggaagaacgctccctgcatcatcttcatcgatgaaatcgatgccattggtcggtctcgttccgacggcggcttcaggggtggaggaaacgacgagcgcgaggctaccctcaaccagattcttacagagatggatggattcaatacaactgagcaggtagtcgtcctcgccggtaccaaccgacccgacatccttgacaaggctcttatgcgtcccggtcgcttcgatagacacatcaacattgataggcctacgatgaagggtcgtcaggacatcttcaaggtccatctggccaaaattgtgaccaaggaggatatcgagttcctcactggccgtctcgctgccttgactcctggcttcgctggtgctgacattgccaacgtcgtcaacgaggctgctcttgtcgctgccagagcgaatgcggagacggtcgagatgatccacttcgagcaggctatcgagcgtgtcattggcggtctggagcgcaagtccctggttctcagccccgaggagaagaggacagttgcctaccacgaggccggccatgccatttgcggctggttcttccagtgggccgaccctcttctcaaagtctccatcattcctcgtggccagggcgcactcggctacgctcagtacctgccatctggtgacgcctacctcatgaacaccaagcagctgatggaccgcatggccatgactcttggtggccgcgtgtccgaggagcttcacttccccgtcgtgacaacgggtgccagcgacgacttcaagaaggtcactcgcatggcgcgcgctatggtgacggagtggggcatgtccgaaaaggtgggcatgctgcactttgacgacagcgcggagcggttccagaaaccgtttgccgagtcgacggcgcaggccatcgatagcgaggtgagacgcatcgtcgacgaggcctacaagcagtgcaaggacctctggacggccaagaagaaggaggttggcttggtggccgaggagctcctcaggaaggaggttctgtcgcgtgacgacctcgtccgcctcctcggcccccgccagtggcccgacaaggaggagttctccaagtacttccacggcgagcgcaagagcgccccaccaccattccctaccgagaacaccgatactcccgaggagcggggtccgcagccggctatgagggaagagaaagctgacgctacgggcaacaaggagggtgagagcaaggagcaaaggtga

SEQ ID NO: 60756 - protein, 928 aa, Neurospora crassa
MAVRFRQSSQQLALCARQALRITTRPAYRASRLPRASLSSARQLPTSRLYSTQSTEKPEPKKDDDNKSPKPEEDEEDFEPKRPLPPGWVRMEKQDLKDFDAFIKKAALKTGIKIEGQDVILQGIKHYGCPKETRELLKKWISGNITIFEQLRCMKSLVMLAKDLGEHEVEYMRKNPNAKSIASGFNDNTFTSNMSDSDRKAQTSEEQNKQSEGKEAGQQQSDGQQGKQSGEQQGQQGPKRPGAQGQGGQEPPQGFDGGLMNYVIGTAVLFWTYKVLFPGNDSREITWQELRKNFLEKGLVEKLTVVKDRVIVDLNKEAVRQMYPDSPAASPGFHYYFTIGSIDAFERRLDEAQAELGIPPAERIPVSYANEFSWGNIILAFGPTLVLVGLLAYISRRGPGGAGGPGGMFGIGKSKAKMFNHDTAVKVKFSDVAGMDEAKVEIMEFVQFLKEPERFQKLGAKIPRGAILSGPPGTGKTLLAKATAGESQVPFFSVSGSEFVEMFVGVGASRVRDLFATARKNAPCIIFIDEIDAIGRSRSDGGFRGGGNDEREATLNQILTEMDGFNTTEQVVVLAGTNRPDILDKALMRPGRFDRHINIDRPTMKGRQDIFKVHLAKIVTKEDIEFLTGRLAALTPGFAGADIANVVNEAALVAARANAETVEMIHFEQAIERVIGGLERKSLVLSPEEKRTVAYHEAGHAICGWFFQWADPLLKVSIIPRGQGALGYAQYLPSGDAYLMNTKQLMDRMAMTLGGRVSEELHFPVVTTGASDDFKKVTRMARAMVTEWGMSEKVGMLHFDDSAERFQKPFAESTAQAIDSEVRRIVDEAYKQCKDLWTAKKKEVGLVAEELLRKEVLSRDDLVRLLGPRQWPDKEEFSKYFHGERKSAPPPFPTENTDTPEERGPQPAMREEKADATGNKEGESKEQR

SEQ ID NO: 60757 - DNA, 1875 bp, Thermus thermophilus
  CDS (1)..(1875): transl_table=11
atgcctcgagccccctttagccttctcgccctggtcctgggcctcgccttcctggcctggccttcagcctcgcggggcaccgtgggcgccccaagcgggacggtgaactacacgaccttcctggaggacctcaaggcgggccgggtcaaggaggtggtggtgcgcgccggggacacccggatccagggggtcctggaggacggctccgccttcaccacctacgcggcgagccctccggacaacgccaccctcgagggctggatggcccggggggtgagcgtccgggtggagcccccccagggccaaaacgccctcggcttcctctggcccctcctcctcgtgggcctcctcatcggcgccctctactacttctcccgcaacggccgggccgggccttcggactccgccttcagcttcaccaaaagccgggcccgggtcctcaccgaggcccccaaggtcaccttcaaggacgtggccggggcggaggaggccaaggaggaactcaaggagatcgtggagttcctcaaaaaccccagccgcttccacgagatgggcgcccgcatccccaagggtgtcctcctggtggggcccccgggggtgggcaagacccacctggcccgggccgtggccggggaggcccgggtgcccttcatcaccgcctcgggctccgacttcgtggagatgttcgtgggggtaggggcggcgagggtccgggacctctttgagaccgccaagcgccacgccccctgcatcgtcttcattgacgagattgacgccgtggggaggaagcggggaagcggggtggggggcgggaacgacgagcgggagcagaccctgaaccagctcctcgtggagatggacggctttgagaaggacacggccatcgtggtcatggccgccaccaaccgccccgacatcctggaccccgccctgctccgccccgggcgctttgaccggcagatcgccatagacgcccccgacgtcaagggccgggagcagatcctcaggatccacgcccggggcaagcccctggcggaggacgtggacctggccctcctcgccaagcgcaccccgggcttcgtgggggcggacctggagaacctcctgaacgaagccgccctcctcgccgcccgggaggggcggaggaagatcaccatgaaggacctggaggaggccgccgaccgggtgatgatgggcccggccaagaaaagcctcgtcctctccccccgcgaccgcaggatcaccgcctaccacgaggcggggcacgccctggcggcccacttcctggagcacgccgacggggtgcacaaggtgaccatcgtgccccggggaagggccttgggcttcatgatgcccaggcgggaggacatgctccactggtccagaaagcgccttttggaccagatcgccgtggccctggcggggcgggcggcggaggagatcgtctttgacgacgtgaccacgggggcggagaacgacttccgccaggccacggagctcgcccgccgcatgatcaccgagtgggggatgcaccccgagttcggccccgtggcctacgcggtgcgggaggacacctacctgggcggctacgacgtgcgccagtactcggaggagaccgccaagcgcattgacgaggcggtgcgccgcctcattgaggagcagtaccagagggtgaaggcccttctcctggaaaagcgggaggtcctggagcgggtggcggagaccctcctggagcgggagaccctcaccgccgaggagttccaacgggtggtggaggggctccccttggaggcccccgaggaggcccgggaggagcgggagcccccccgggtggtgcccaaggtgaagccggggggcgccctgggcggggcctga

SEQ ID NO: 60758 - protein, 624 aa, Thermus thermophilus
MPRAPFSLLALVLGLAFLAWPSASRGTVGAPSGTVNYTTFLEDLKAGRVKEVVVRAGDTRIQGVLEDGSAFTTYAASPPDNATLEGWMARGVSVRVEPPQGQNALGFLWPLLLVGLLIGALYYFSRNGRAGPSDSAFSFTKSRARVLTEAPKVTFKDVAGAEEAKEELKEIVEFLKNPSRFHEMGARIPKGVLLVGPPGVGKTHLARAVAGEARVPFITASGSDFVEMFVGVGAARVRDLFETAKRHAPCIVFIDEIDAVGRKRGSGVGGGNDEREQTLNQLLVEMDGFEKDTAIVVMAATNRPDILDPALLRPGRFDRQIAIDAPDVKGREQILRIHARGKPLAEDVDLALLAKRTPGFVGADLENLLNEAALLAAREGRRKITMKDLEEAADRVMMGPAKKSLVLSPRDRRITAYHEAGHALAAHFLEHADGVHKVTIVPRGRALGFMMPRREDMLHWSRKRLLDQIAVALAGRAAEEIVFDDVTTGAENDFRQATELARRMITEWGMHPEFGPVAYAVREDTYLGGYDVRQYSEETAKRIDEAVRRLIEEQYQRVKALLLEKREVLERVAETLLERETLTAEEFQRVVEGLPLEAPEEAREEREPPRVVPKVKPGGALGGA

SEQ ID NO: 60759 - DNA, 2064 bp, Arabidopsis thaliana
  CDS (1)..(2064)
atgaaaatggcatcatcatcatcagctttgtctttccctctctccaacatcccaacctgtagtaagaagtctcaacaatttcaaaaaccggcttctttatccaaatccagtcacacacataaacctagtctcaaaacccaaattttacaccacaaattcactaagagaaatttactgagtttgacgactgccttgggatttacgtcagcgctaggaactgttcttgctcaccccgcaaaagctgaaccagaagctcccatcgaagccacttccaatagaatgtcgtattcgagattcctgcagcatctgaaagagaatgaagtgaagaaagttgacttgatcgagaacggaacggttgcgatcgtagagatctctaatccagtagtaggaaagatccagagggttagggttaaccttcccggtttaccagtcgatctggtgagggagatgaaggagaagaacgtcgatttcgctgctcatcccatgaatgtgaactggggagctttcttgctcaacttcttggggaatttagggtttcctttgatcttgcttgtctctctgcttttaacatcttcttcaagaagaaaccctgctggacctaacttgccttttggtcttggaagcaaagctaagtttcagatggagcctaacacagggataacgttcgaggatgtagcaggagtagacgaagccaagcaagactttgaagagatcgttgaatttttgaaaaccccagagaaattctcagctttgggggctaaaatcccaaaaggcgtcttgttgaccggaccgccaggaaccggaaagacactcttggccaaggctatagccggagaagccggtgttccttttttttcattgtctggttcggagttcatagagatgtttgttggtgtaggagcatctagagctagagacttgtttaacaaggcaaaggctaattcaccttgtatagtgttcattgatgagattgatgctgttgggagaatgagaggaaccggtataggaggaggaaacgacgaacgtgagcagacgctaaaccagatattaaccgaaatggatgggtttgcggggaataccggagtaattgtgatcgctgcaacgaaccggccagagattctagactctgctttgctccgaccaggaagattcgataggcaggtttctgttggtttaccggatataagaggaagagaggagatattaaaagttcacagcagaagcaagaaactcgacaaagatgtatctttgagcgtaattgccatgagaactccaggttttagtggagctgacttggccaatcttatgaacgaagcagcgattctcgccggaagaagaggaaaagacaagattacccttacagagatcgacgactctatcgatcggatagtcgccggaatggaagggacaaagatgatcgacggtaaaagtaaagcgattgtagcgtaccatgaagtaggacatgcaatttgtgcgactttgacggagggtcatgatccggttcagaaagttacgttggttcctagaggtcaagcacgtggtctcacgtggttcttaccgggagaagatccgacattggtgtctaaacagcaattgttcgctagaatcgtcggaggactcggaggcagagccgccgaagatgtaatttttggagaaccggagataaccaccggcgctgccggtgatctccagcaagtcactgagatagcaagacagatggtgacgatgtttggtatgtcggaaatcggtccatgggcactaaccgacccagcggttaagcaaaacgatgtggttctacggatgctagcgaggaactcaatgtccgagaaacttgcggaggatattgattcttgcgtgaagaaaataatcggtgacgcttacgaggttgcgaaaaagcacgtgaggaataatagagaagctatagacaagcttgttgatgttttgttggagaaagaaaccttaacgggagacgagtttcgagcaattctgtctgagtatactgatcaaccgttaaataccgatggcgatgtaagaattcgaatcaatgacttgattagtgtctaa

SEQ ID NO: 60760 - protein, 687 aa, Arabidopsis thaliana
MKMASSSSALSFPLSNIPTCSKKSQQFQKPASLSKSSHTHKPSLKTQILHHKFTKRNLLSLTTALGFTSALGTVLAHPAKAEPEAPIEATSNRMSYSRFLQHLKENEVKKVDLIENGTVAIVEISNPVVGKIQRVRVNLPGLPVDLVREMKEKNVDFAAHPMNVNWGAFLLNFLGNLGFPLILLVSLLLTSSSRRNPAGPNLPFGLGSKAKFQMEPNTGITFEDVAGVDEAKQDFEEIVEFLKTPEKFSALGAKIPKGVLLTGPPGTGKTLLAKAIAGEAGVPFFSLSGSEFIEMFVGVGASRARDLFNKAKANSPCIVFIDEIDAVGRMRGTGIGGGNDEREQTLNQILTEMDGFAGNTGVIVIAATNRPEILDSALLRPGRFDRQVSVGLPDIRGREEILKVHSRSKKLDKDVSLSVIAMRTPGFSGADLANLMNEAAILAGRRGKDKITLTEIDDSIDRIVAGMEGTKMIDGKSKAIVAYHEVGHAICATLTEGHDPVQKVTLVPRGQARGLTWFLPGEDPTLVSKQQLFARIVGGLGGRAAEDVIFGEPEITTGAAGDLQQVTEIARQMVTMFGMSEIGPWALTDPAVKQNDVVLRMLARNSMSEKLAEDIDSCVKKIIGDAYEVAKKHVRNNREAIDKLVDVLLEKETLTGDEFRAILSEYTDQPLNTDGDVRIRINDLISV

SEQ ID NO: 60761 - DNA, 1806 bp, Heliobacillus mobilis
  CDS (1)..(1806): transl_table=11
gtgagccggattgtcaaaaacctggcaatatatatcctcatcgttctcttggccatctccgtattacgggtgaccaagacaccggaacctgcgcaggaacccatctcgtacactcagttttatcagttgctggtgacggatcagattaaagaactgaacgcaatcagcgaacgggaccgcacagagattaccggcgtgaaaaaagacggaaatcgatttaccaccattggacctgttgatatcaaacgcatcaccgatattgtgctggacaaacagattccctttacccaaaagcctgctcctgagccaccttggtggaccggattattctcgacactgctccccatcctggtactcgtcggacttttcttcttcatgatgcagcagacccagggcggcggctcgcgggtgatgcagttcggtaaaagccgggcgaaactgcatacggatgataagaaaaaggtcaccttcgaagacgtggctggtgcggacgaagtgaaggaagagcttcaggaagtcgttgactttctgaaacacccgaaaaaatttgtggagttgggagcgaagatccccaaaggggtattgctctttgggcctcccggaaccgggaaaaccttgctggctcgcgccgtcgctggtgaagccggagttcccttcttcagcatctccggttctgactttgtggaaatgttcgtcggtgttggcgcatcacgggttcgcgatctcttcgaacaagcgaagaagaactccccctgtatcgtctttatcgatgaaatcgacgctgtcggtcgtcaacggggcgccggcttaggcggcggtcacgatgaacgcgaacagaccctaaaccaactgctcgttgaaatggatggcttctccgccaatgagggcatcatcatcatcgcagctaccaaccgcccggacatcctcgatccagcgctgttgcgtcccggtcgatttgaccggcagatcgttgtcgatcgtccggacattcgtggacggaaagagatcctcggagttcacgtcaaaggcaagcccctcgatgaaacgatcgaccttgacgtattggcccgccggacccccggctttacaggtgctgacctggccaacatggtgaatgaagcagcactgctggccgctcgccgaggcacgaaaaaagtaggcatgcacgagatggaagatgccattgaacgggtcatcgccggacctgagaaaaaggcaagggtaatcagcgaattcgagaaaaaactggtcagttatcacgaagctggccacgctctggtaggcggtttgttggaacataccgatccggttcacaaaatctcgatcattcctcgaggttgggccggcggatataccttgttgcttcccgaggaagatcgtcattacatgaccaagtcccacctgctcgatcaggtcaccatgcttttaggcggccgtgtggcagaagcgattgtgctgaaagagatctctaccggcgcctcgaacgacctggaacgggcgaccgatctggtccgtaagatgatcaccgaatacggcatgtctgaagaactcggtcccttgaccttcggacacaagcaagaacaagtcttcttaggtcgggatttggcccgtgatcggaactactccgaagcggtcgccttctctatcgacaaagaagctcgccggatcatcgaagaatgctacggcaaagccaaaaagattctcgaatccaatgcagataaactgcacctcatcgctcagacgctgatggacaaagaaaccatcgaagcatcggagtttacggaactcatgaaaaaggtatcctag

SEQ ID NO: 60762 - protein, 601 aa, Heliobacillus mobilis
MSRIVKNLAIYILIVLLAISVLRVTKTPEPAQEPISYTQFYQLLVTDQIKELNAISERDRTEITGVKKDGNRFTTIGPVDIKRITDIVLDKQIPFTQKPAPEPPWWTGLFSTLLPILVLVGLFFFMMQQTQGGGSRVMQFGKSRAKLHTDDKKKVTFEDVAGADEVKEELQEVVDFLKHPKKFVELGAKIPKGVLLFGPPGTGKTLLARAVAGEAGVPFFSISGSDFVEMFVGVGASRVRDLFEQAKKNSPCIVFIDEIDAVGRQRGAGLGGGHDEREQTLNQLLVEMDGFSANEGIIIIAATNRPDILDPALLRPGRFDRQIVVDRPDIRGRKEILGVHVKGKPLDETIDLDVLARRTPGFTGADLANMVNEAALLAARRGTKKVGMHEMEDAIERVIAGPEKKARVISEFEKKLVSYHEAGHALVGGLLEHTDPVHKISIIPRGWAGGYTLLLPEEDRHYMTKSHLLDQVTMLLGGRVAEAIVLKEISTGASNDLERATDLVRKMITEYGMSEELGPLTFGHKQEQVFLGRDLARDRNYSEAVAFSIDKEARRIIEECYGKAKKILESNADKLHLIAQTLMDKETIEASEFTELMKKVS

SEQ ID NO: 60763 - DNA, 2082 bp, Nicotiana tabacum
  CDS (1)..(2082)
atggctacttcatcagtatgcatagcaggaaatagtttgtctactcatagaaggcagaaagttttcaggaaggacatttatggcaggaaaattttattttcctcaaatcttccatcgtctagtaaaacatcgagaatagctgtaaaagcatcccttcagcaaaggccagatgaaggaagaagaggttttctcaaattattgcttggaaatgttgggcttggagtaccggctttgttaggtgatggaaaagcctacgctgatgagcaaggtgtgtctaactcaaggatgtcgtattctagatttttggagtatttggataaggatagggtgcaaaaagtagatttgtttgaaaacggaaccatagctattgttgaggctatatctccagaattaggaaaccgggttcagagggttcgggtacaactacctgggctcagccaggaactccttcagaagttgcgagaaaagaacattgactttgctgctcacaatgcccaagaggactcgggttctttcctattcaacttgattgggaatctggcattcccgcttattttgattggtggtcttttcctgctatcaaggcggtctcccggaggaatgggaggtcctggtgggcctggtaacccattagcatttggtcaatcaaaggctaaattccaaatggagccaaacactggtgtaacatttgatgatgttgctggtgtagatgaagcaaaacaagattttatggaggtcgtagaatttttgaagaagcccgagaggtttaccgcagtgggggctcgtattccaaaaggtgttcttcttgttggtcctcctggtactgggaagaccctgctagcaaaggcaattgctggtgaagcgggtgttccatttttctcaatttcaggttcagaatttgttgagatgtttgttggtgtaggagcctctcgagtccgtgatcttttcaagaaggccaaggaaaatgctccctgcattgtatttgttgatgaaattgatgctgttgggcggcaaagagggactggaattggaggagggaatgatgaaagggaacagaccctgaaccaactattgacagaaatggacggtttcgaaggaaatactggtataatagttgttgcggcaaccaatcgtgcagatattcttgactctgctttgctgagaccagggcgatttgatagacaagtaagtgtggatgttccagatatcaagggaagaacagagatcttaaaggttcacgcgggcaacaagaagttcgattctgatgtttctcttgaagttatagccatgaggacacccggttttagtggtgcagatcttgctaacctcttaaatgaagcagccattcttgctggtcggcgtggtaagacagcaatcgcatccaaagagattgatgattcaattgataggatagtggctggaatggaaggaacagtcatgactgatggcaagagcaagagtctggtggcataccacgaagttggacatgccatctgtggaactctcactccagggcatgatgctgttcaaaaggtcacattaatcccacgtggtcaggcaaaaggtttgacctggttcattcctgcagatgatccaaccttaatatccaagcagcaactctttgctagaattgtcggaggacttgggggaagagctgcagaggaagttatctttggtgaacctgaggtgaccactggtgctgcaggcgatttgcagcagatcaccggtttggcaaaacagatggttgtcacttttgggatgtctgaacttggcccatggtcactcatggattcttctgcccaaagtggtgatgtaatcatgagaatgatggctaggaattctatgtcagaaaagctagctgaagacattgatggtgctgtgaagaggctttcagacagcgcatatgagattgcattgacccatatccgcaacaaccgtgaagcaattgataagattgtggaagtcctccttgaaaaggagacgatgaccggagatgaattccgcgctattctctcagaatttgttgaaattcctgctgaaaaccgagttgctcctgttgtacctaccccagcaactgtataa

SEQ ID NO: 60764 - protein, 693 aa, Nicotiana tabacum
MATSSVCIAGNSLSTHRRQKVFRKDIYGRKILFSSNLPSSSKTSRIAVKASLQQRPDEGRRGFLKLLLGNVGLGVPALLGDGKAYADEQGVSNSRMSYSRFLEYLDKDRVQKVDLFENGTIAIVEAISPELGNRVQRVRVQLPGLSQELLQKLREKNIDFAAHNAQEDSGSFLFNLIGNLAFPLILIGGLFLLSRRSPGGMGGPGGPGNPLAFGQSKAKFQMEPNTGVTFDDVAGVDEAKQDFMEVVEFLKKPERFTAVGARIPKGVLLVGPPGTGKTLLAKAIAGEAGVPFFSISGSEFVEMFVGVGASRVRDLFKKAKENAPCIVFVDEIDAVGRQRGTGIGGGNDEREQTLNQLLTEMDGFEGNTGIIVVAATNRADILDSALLRPGRFDRQVSVDVPDIKGRTEILKVHAGNKKFDSDVSLEVIAMRTPGFSGADLANLLNEAAILAGRRGKTAIASKEIDDSIDRIVAGMEGTVMTDGKSKSLVAYHEVGHAICGTLTPGHDAVQKVTLIPRGQAKGLTWFIPADDPTLISKQQLFARIVGGLGGRAAEEVIFGEPEVTTGAAGDLQQITGLAKQMVVTFGMSELGPWSLMDSSAQSGDVIMRMMARNSMSEKLAEDIDGAVKRLSDSAYEIALTHIRNNREAIDKIVEVLLEKETMTGDEFRAILSEFVEIPAENRVAPVVPTPATV

SEQ ID NO: 60765 - DNA, 2286 bp, Saccharomyces cerevisiae
  CDS (1)..(2286)
atgatgatgtggcaacgatatgcaaggggtgcgccacgctcattgacatcactctcatttggtaaagctagccgcatatcaacagtgaagccagtgcttcgctcgcgcatgccagttcaccagcgtttgcagacgttatctggtctggcaaccagaaacacaatacaccgttctacccaaatacgttccttccatatctcatggacaaggttaaatgaaaataggccaaacaaagagggtgagggcaagaacaatggtaataaagataataatagcaataaagaagatggcaaagacaaaagaaatgagtttggttcattatcagaatacttcagatctaaggaatttgctaatacgatgtttttgaccatcggattcacaattatatttactttgctcacaccttccagtaacaactcaggagacgactctaaccgcgtcttgactttccaggatttcaaaacaaaatacctggagaagggtcttgtgtccaagatttacgtcgttaataagtttctcgtagaggccgaattagtcaatacaaagcaagttgtatcgttcaccattggttcagtagatatttttgaggaacagatggaccagatccaggacctcttgaacattcctcctcgggatcgtatccccatcaaatacattgagagatcttctcccttcacatttttgttccccttcctgcccaccatcattctgcttggtggcctttacttcataaccagaaaaataaatagttcaccaccaaatgccaatggtggtggtggaggaggcctcggcggcatgtttaatgttggaaaatccagagcaaagctcttcaataaggaaacagacattaaaatttcatttaaaaatgttgccggttgtgatgaagctaaacaggaaatcatggaatttgttcactttttgaagaacccaggtaagtacactaaattgggtgccaagattccacgaggcgctattctttctggacccccaggtaccggtaagactctcttggccaaggccaccgcaggtgaggcgaacgtgcccttcttgtcagtatcaggttctgagttcgtcgaaatgttcgttggggtgggtgcttcacgtgtaagagacttgtttactcaagcaaggtctatggccccctcgattatctttatagatgaaattgacgctatcggtaaagaaagaggcaaaggcggcgctctcggtggcgctaacgatgaaagagaagctacgctgaatcaattattggtggaaatggacggattcactacttccgaccaagtcgtagtccttgcgggtacaaataggcccgatgtgttggataatgctttgatgagaccgggaaggttcgatagacatatccaaattgattctcctgatgtcaatggtaggcagcaaatatacctggttcacttgaaaagactgaatctggatccccttcttacagatgatatgaataatctttctgggaaattggctacgcttactccaggttttactggtgcagatatcgctaatgcttgtaatgaggctgcattaatcgctgccagacataatgacccatatatcactatccatcactttgagcaagccattgaaagagtcattgcgggactagagaagaaaacaagagtcctttctaaggaagaaaaaaggtcagtggcctatcatgaggcaggacatgccgtttgtggttggtttctaaaatatgcggatccacttctgaaagtaagcatcatcccgcgtggacaaggtgctttaggctatgcccagtacctaccaccggatcaatatttgatatctgaggagcaattcagacatagaatgatcatggctcttggtggccgtgtttctgaggagctacattttccatcggtgactagcggtgctcatgatgatttcaaaaaggttacacagatggcaaatgccatggttacatccctaggaatgtcacccaagattggctacctgtcgtttgatcagaatgatggaaacttcaaagttaacaaacccttcagtaataaaacggcaagaaccattgatttagaagttaaatctatagtagatgatgcacaccgagcttgtacagaattgctaaccaaaaatttggacaaagtcgatcttgtcgcaaaagaattgctacgtaaggaagcaattactagagaagacatgattagattattgggtccaaggccattcaaggaaaggaacgaggcttttgaaaaatatttggatccaaagagcaataccgaaccgcctgaggcacctgcagcaacaaattaa

SEQ ID NO: 60766 - protein, 761 aa, Saccharomyces cerevisiae
MMMWQRYARGAPRSLTSLSFGKASRISTVKPVLRSRMPVHQRLQTLSGLATRNTIHRSTQIRSFHISWTRLNENRPNKEGEGKNNGNKDNNSNKEDGKDKRNEFGSLSEYFRSKEFANTMFLTIGFTIIFTLLTPSSNNSGDDSNRVLTFQDFKTKYLEKGLVSKIYVVNKFLVEAELVNTKQVVSFTIGSVDIFEEQMDQIQDLLNIPPRDRIPIKYIERSSPFTFLFPFLPTIILLGGLYFITRKINSSPPNANGGGGGGLGGMFNVGKSRAKLFNKETDIKISFKNVAGCDEAKQEIMEFVHFLKNPGKYTKLGAKIPRGAILSGPPGTGKTLLAKATAGEANVPFLSVSGSEFVEMFVGVGASRVRDLFTQARSMAPSIIFIDEIDAIGKERGKGGALGGANDEREATLNQLLVEMDGFTTSDQVVVLAGTNRPDVLDNALMRPGRFDRHIQIDSPDVNGRQQIYLVHLKRLNLDPLLTDDMNNLSGKLATLTPGFTGADIANACNEAALIAARHNDPYITIHHFEQAIERVIAGLEKKTRVLSKEEKRSVAYHEAGHAVCGWFLKYADPLLKVSIIPRGQGALGYAQYLPPDQYLISEEQFRHRMIMALGGRVSEELHFPSVTSGAHDDFKKVTQMANAMVTSLGMSPKIGYLSFDQNDGNFKVNKPFSNKTARTIDLEVKSIVDDAHRACTELLTKNLDKVDLVAKELLRKEAITREDMIRLLGPRPFKERNEAFEKYLDPKSNTEPPEAPAATN

SEQ ID NO: 60767 - DNA, 2151 bp, Arabidopsis thaliana
  CDS (1)..(2151)
atggcttctaactcattactacgttcttcttcaaatttcttcttaggatcccatatcataatctcatctcccacccctaaaaccaccagaaaaccctctttccctttctccttcgtctcccgtgctaaataccaaatcactcgatcgtctcaagacgaaaattcgccaaatggtaaacccaattcgccattctcgtcgcaagtagccttagcagctattctactatcttcaatttcatcttcgccgctagctttagctgtagtggacgaaccagcttctccgtctgtcgttatagaatctcaagctgtgaagccatcgacgccatcgccattgttcattcagaacgagatacttaaggctcctagtcctaaatcatcggatctcccagaaggatcacagtggcgatacagcgagtttcttaacgctgtgaagaaagggaaagtcgagagagttagattcagcaaagatggttctgttgttcagcttactgccgtcgacaatcgccgtgcttcagtcatcgtccctaacgaccctgaccttattgatatcttggctatgaacggagttgatatatccgtctctgaaggagaatcctcaggcaatgacttgttcactgtcattggaaacttgattttcccgcttttggcctttggtggactcttcttgcttttcaggcgagctcagggaggccctggtggtggtcctggtggcttgggtggtcctatggatttcggacgttctaaatccaagttccaggaagtgcctgagactggtgtatcatttgcagatgttgctggggctgatcaagctaagttggagttacaggaagttgtggatttcttgaagaatcctgataagtacacagccttgggtgctaagattcctaaagggtgtttgcttgttggaccgcctggtacgggtaagacactcctggctagggcggtggctggggaagctggagtgccgttcttctcttgcgcggcctcggagttcgtagagctttttgtgggtgtgggtgcatcgagagttagggatttgttcgagaaggctaagtctaaagccccttgtattgtattcattgatgagattgacgctgtgggtaggcagagaggagctgggatgggaggaggaaatgatgagagagaacagactattaatcagctgttgacagagatggatggattttctggcaactctggtgtgatagttttggcagctacgaataggccggacgttcttgattcggctttgttgaggcctggaaggtttgatcgacaggtcacggtggataggcctgatgtggctggcagagtcaagattcttcaggttcattctagggggaaggcactcggtaaagatgtggactttgacaaggttgccagaaggacccctggtttcacgggtgctgacttacaaaacctgatgaatgaagcggcgattcttgcggctaggcgtgagcttaaggaaataagcaaggatgaaatctctgatgctcttgagaggatcattgctggacctgagaagaagaatgcagttgtctctgaagagaagaagagacttgttgcataccatgaggctggtcatgctctagtgggtgctcttatgccagaatatgatccggttgcaaagatttctatcattcctcgtggccaagctggtgggctcactttttttgctccaagcgaagaaagacttgagtctggattgtacagtaggagctaccttgagaatcaaatggctgttgcacttggcggaagggttgcagaggaggtgatctttggggatgagaatgtgacgactggagcatcaaatgatttcatgcaggtgtctcgtgtggcacgtcaaatgattgagagatttgggttcagcaaaaagattggacaagttgctgttggtggccctggtggaaatcccttcatgggtcaacaaatgtcatcacagaaagattactcaatggcaactgcggatattgtagatgctgaggtgcgagagttagttgagaaggcatacaagagagcaacggagatcataacaactcatattgatatcctacacaagcttgcacagctcctgatcgagaaagaaactgttgacggtgaagagttcatgagtctctttattgacggccaagctgagttgtatatttcttga

SEQ ID NO: 60768 - protein, 716 aa, Arabidopsis thaliana
MASNSLLRSSSNFFLGSHIIISSPTPKTTRKPSFPFSFVSRAKYQITRSSQDENSPNGKPNSPFSSQVALAAILLSSISSSPLALAVVDEPASPSVVIESQAVKPSTPSPLFIQNEILKAPSPKSSDLPEGSQWRYSEFLNAVKKGKVERVRFSKDGSVVQLTAVDNRRASVIVPNDPDLIDILAMNGVDISVSEGESSGNDLFTVIGNLIFPLLAFGGLFLLFRRAQGGPGGGPGGLGGPMDFGRSKSKFQEVPETGVSFADVAGADQAKLELQEVVDFLKNPDKYTALGAKIPKGCLLVGPPGTGKTLLARAVAGEAGVPFFSCAASEFVELFVGVGASRVRDLFEKAKSKAPCIVFIDEIDAVGRQRGAGMGGGNDEREQTINQLLTEMDGFSGNSGVIVLAATNRPDVLDSALLRPGRFDRQVTVDRPDVAGRVKILQVHSRGKALGKDVDFDKVARRTPGFTGADLQNLMNEAAILAARRELKEISKDEISDALERIIAGPEKKNAVVSEEKKRLVAYHEAGHALVGALMPEYDPVAKISIIPRGQAGGLTFFAPSEERLESGLYSRSYLENQMAVALGGRVAEEVIFGDENVTTGASNDFMQVSRVARQMIERFGFSKKIGQVAVGGPGGNPFMGQQMSSQKDYSMATADIVDAEVRELVEKAYKRATEIITTHIDILHKLAQLLIEKETVDGEEFMSLFIDGQAELYIS

SEQ ID NO: 60769 - DNA, 1908 bp, Haemophilus influenzae
  CDS (1)..(1908): transl_table=11
atggtcaaaaatctagtgctttgggtggtagtggcagtcattatgatgacagcataccaaagtttcaattcatcttcggtagaaaattctactgattatacaacctttgtttacgatgtaagcaacggacaagtgacagcggcacgttttgatgccaatgaaattacggtaacgaaaaccgatggttctaaatattcaaccgtaatgccaccacttgaagacaaaaaattgcttgatgatttattaagcaaaaaagtcaaagtggaaggcacgccatttgaaagacgtggttttttatcccaaattttaatttcttggttcccaatgttattccttgttggtgtatgggtattctttatgcgtcaaatgcaaggcggtggcggcaaagcgatgagctttggtaaaagccgagccaaaatgttgaatcaagatcagattaaggtgacttttgcggatgtggctggttgcgatgaagcaaaagaagaagtgggggaaatcgttgatttcttgcgtgatccgaataaattccaaaatttgggcggtaaaattccaaaaggtattttgatggtagggcctccaggtactggtaaaactttacttgctcgtgcgattgcgggagaggcaaaagttccattcttcactatttctggctctgatttcgtagaaatgtttgtaggtgttggcgcatcacgtgtacgtgatatgtttgaacaggctaagaaaaatgcaccttgcttaatcttcattgatgaaatcgatgcagtgggtcgccaacgtggtgcgggcttaggtggcggacacgatgagcgtgaacaaaccttaaaccaaatgctagttgaaatggatggctttagcggtaatgacggtgtaattgttattgcagcaactaaccgtccagatgtgcttgatccagctttaacccgtccaggccgttttgaccggcaagtagttgttggcttacctgatgtgaaaggtcgtgagcaaatcttaaaagtgcatatgcgtaaagtgtctgttgcgcaagatgttgatgcaatgacgttagcgcgtggtacgccgggctattctggtgcagatttagcaaatttagtcaatgaggcggctttgtttgctgctcgagtgaataaacgtacggtaaccatgcttgagtttgaaaaagcgaaagataaaatcaatatggggccagagcgtcgcactatgattatgacggataagcaaaaagaatccactgcttatcatgaagctggtcatgcgattgtggggtatttagtgcctgaacacgatcctgttcacaaagtgaccattattcctcgaggacgtgccttgggtgtgacattcttcttacctgagggcgatcaaattagtattagccaaaaacaattagaaagtaagctttctaccttgtatgcgggtcgtttagcggaagatttgatttacggcgaagaaaatatctcaacaggtgcatcaaatgatattaaagtcgcaactaatattgcgcgtaatatggtaacgcaatggggattctctgaaaagttaggtccgattctttatacggaagatgagggcgaggttttcttaggtcgttcaatggcgaaagcgaaacatatgtcagatgaaactgcgcattcgattgatgaagaagtgcgtgcaattgtaaatcgtaactatgcgagagcaagagagattttgatcgacaatatggatattcttcatgcgatgaaagatgcattagtcaaatatgaaactattgaagaagaacaaattaaacaattgatgaatcgcgaacctgtcacaccgccatcaggttggggagagccgaaaactcagcaggctgcttatgcaaattcaacaacgaatgatacaaagcccgaaagtgcggtagaaaataccgatgattttaatgtttaa

SEQ ID NO: 60770 - protein, 635 aa, Haemophilus influenzae
MVKNLVLWVVVAVIMMTAYQSFNSSSVENSTDYTTFVYDVSNGQVTAARFDANEITVTKTDGSKYSTVMPPLEDKKLLDDLLSKKVKVEGTPFERRGFLSQILISWFPMLFLVGVWVFFMRQMQGGGGKAMSFGKSRAKMLNQDQIKVTFADVAGCDEAKEEVGEIVDFLRDPNKFQNLGGKIPKGILMVGPPGTGKTLLARAIAGEAKVPFFTISGSDFVEMFVGVGASRVRDMFEQAKKNAPCLIFIDEIDAVGRQRGAGLGGGHDEREQTLNQMLVEMDGFSGNDGVIVIAATNRPDVLDPALTRPGRFDRQVVVGLPDVKGREQILKVHMRKVSVAQDVDAMTLARGTPGYSGADLANLVNEAALFAARVNKRTVTMLEFEKAKDKINMGPERRTMIMTDKQKESTAYHEAGHAIVGYLVPEHDPVHKVTIIPRGRALGVTFFLPEGDQISISQKQLESKLSTLYAGRLAEDLIYGEENISTGASNDIKVATNIARNMVTQWGFSEKLGPILYTEDEGEVFLGRSMAKAKHMSDETAHSIDEEVRAIVNRNYARAREILIDNMDILHAMKDALVKYETIEEEQIKQLMNREPVTPPSGWGEPKTQQAAYANSTTNDTKPESAVENTDDFNV

SEQ ID NO: 60771 - DNA, 2115 bp, Arabidopsis thaliana
  CDS (1)..(2115)
atggcgaccacatcatcaaacccattactactttcttcaaatttcctcggttctcaaattataatctcagctccaacaccaaaaaccaccacaaagtctcttcctttctcagtaatctctcgaaaaagataccaaatttctcaatcggagaagctaatgaaatcgttaccatcacaagctgcgttagcagctctgttgttctcatcttcatctccacaagctttagcagttaacgaaccagttcaaccaccagcaccaaccattactgctgaagctcaatcaccaaatctgtcgacttttggtcaaaacgttttgatgacagcaccgaatccacaagctcaatcatcagatcttcctgatggaacacaatggcgatacagtgagtttctaaatgctgtgaagaaaggtaaagttgagagagtgaagtttagtaaagatggttctgttcttcagttaacagctgttgataatcgtcgtgctactgttattgttcctaatgatcctgatttgattgatatcttggcgatgaatggtgttgatatatctgtttctgaaggagaaggtggaaatgggttgtttgatttcattggtaatttgctttttcctttgttggcttttggagggttgttttatctctttagaggaggtcaaggaggtgctggtggtcctggaggtttaggaggtcctatggatttcggaagatcgaaatcgaagtttcaggaagtgcctgaaaccggtgtgacatttggtgatgttgctggagctgatcaagctaagcttgagttacaagaagttgttgatttcttgaagaatcctgataagtatactgcgttaggtgctaagattcctaaaggttgtttgttggttggtccaccgggtacggggaagacgcttttggctagagctgtggctggagaagctggagtgccgttcttttcgtgtgctgcttcggagtttgttgagctttttgttggtgtgggtgcttctagagttagggatttatttgagaaggcgaaatcgaaagctccttgtattgtgtttattgatgagattgatgctgttggtagacaaagaggagctgggatgggtggtggaaatgatgagagggaacagactattaatcagcttttgactgagatggatgggttttctggtaactctggtgtcattgtgttggctgccactaatagaccggatgttcttgactccgcgttgctgagacctggtagatttgaccggcaagtcacagtggataggcctgatgtagccggaagagttcagatccttaaggtgcattctagaggaaaagctattgggaaggatgttgattacgaaaaagttgcgaggagaactccgggtttcactggtgctgatttgcagaacctgatgaatgaagctgcgattcttgctgctagacgtgagcttaaggagataagcaaggatgaaatatctgatgctcttgagaggatcattgctggacctgaaaagaagaacgctgttgtctctgaggagaagaaaagacttgttgcttaccatgaggctgggcatgctttagttggtgcacttatgccggagtatgatccagtggccaagatatcgattattccacgtggccaagctggtgggctcacctttttcgctcctagcgaagagaggctagagtccggattgtatagcagaagctaccttgagaaccaaatggctgttgcacttggtggaagggttgcagaagaggtgatctttggagacgagaatgtgacaaccggagcatcaaatgatttcatgcaagtgtcgcgggtggctcgccaaatggttgagagattcgggttcagcaaaaagattggacaagttgcagttggtggagcaggaggaaaccctttcttgggtcaaagtatgtcatcgcagaaggattactcgatggcaacagcggatgtggttgatgcggaagtgagagagctcgttgagaaggcgtacgtgagagcgaaagagatcataacaacacaaattgatatcctacacaagcttgcacagctccttattgagaaagaaactgtggatggagaagagttcatgagtcttttcattgacggacaagccgagttatatgtttcttaa

SEQ ID NO: 60772 - protein, 704 aa, Arabidopsis thaliana
MATTSSNPLLLSSNFLGSQIIISAPTPKTTTKSLPFSVISRKRYQISQSEKLMKSLPSQAALAALLFSSSSPQALAVNEPVQPPAPTITAEAQSPNLSTFGQNVLMTAPNPQAQSSDLPDGTQWRYSEFLNAVKKGKVERVKFSKDGSVLQLTAVDNRRATVIVPNDPDLIDILAMNGVDISVSEGEGGNGLFDFIGNLLFPLLAFGGLFYLFRGGQGGAGGPGGLGGPMDFGRSKSKFQEVPETGVTFGDVAGADQAKLELQEVVDFLKNPDKYTALGAKIPKGCLLVGPPGTGKTLLARAVAGEAGVPFFSCAASEFVELFVGVGASRVRDLFEKAKSKAPCIVFIDEIDAVGRQRGAGMGGGNDEREQTINQLLTEMDGFSGNSGVIVLAATNRPDVLDSALLRPGRFDRQVTVDRPDVAGRVQILKVHSRGKAIGKDVDYEKVARRTPGFTGADLQNLMNEAAILAARRELKEISKDEISDALERIIAGPEKKNAVVSEEKKRLVAYHEAGHALVGALMPEYDPVAKISIIPRGQAGGLTFFAPSEERLESGLYSRSYLENQMAVALGGRVAEEVIFGDENVTTGASNDFMQVSRVARQMVERFGFSKKIGQVAVGGAGGNPFLGQSMSSQKDYSMATADVVDAEVRELVEKAYVRAKEIITTQIDILHKLAQLLIEKETVDGEEFMSLFIDGQAELYVS

SEQ ID NO: 60773 - DNA, 1851 bp, Synechocystis sp
  CDS (1)..(1851): transl_table=11
gtgagcaaaaataataaaaaatggcgtaacgcgggcctatatgccttgttgttaattgtcgttttagcgttggcatcggcctttttcgaccgaccgacccaaactagggaaaccctcagctacagcgattttgtcaatcgggtagaagccaatcagatcgaacgggtcaacctcagtgccgaccgcacccaagcccaagtacccaatcccagcggtggtcctccctacttagtcaatctgcccaacgaccccgacttgatcaatattctcacccaacacaacgtggatattgctgtccaaccccagagcgacgaaggtttctggttccgcatcgccagcaccctatttttgcccatcttgctcttggtgggaatttttttcctcttccgtcgggcccagagtggccctggttcccaagccatgaactttggtaaatccaaagcacgggtgcaaatggaaccccaaacccaagttaccttcggggacgtggccggtattgagcaagccaaactagaactcaccgaagtggtggacttcctgaaaaatgcagaccgcttcaccgaattgggagccaaaattcccaagggtgttttgttggtaggcccccccggaaccggtaaaaccctgttggccaaagccgtggctggggaagcgggtgtaccgttcttttccatctccggttcggaatttgtggaaatgtttgtcggtgttggtgcttctcgggtacgggatttgtttgagcaggctaaagccaatgctccctgtatcgtcttcatcgatgaaattgatgccgttggtcgtcaacggggcgctggccttggtggtggtaatgatgagcgggaacagaccctcaaccagttgctaacggaaatggacggttttgaaggcaacaccggcattattatcgtcgccgccactaaccgtcccgatgtattggattctgccttgatgcgtcccggtcgtttcgatcgccaagtggtagtagaccgtcctgattatgctggccgtcgagaaatcctcaatgtccatgcccggggtaaaaccctttcccaggatgtggatttggataaaattgcccgtcgtacccctggatttaccggtgctgacctgtccaacctgttgaacgaagccgctattttggctgcccgtcgcaacttgaccgaaatttccatggacgaagtcaacgacgccattgaccgggtgttggctggtcctgagaagaaaaatcgggtgatgagcgaaaaacgcaaaaccctagtggcttaccatgaagctggccacgccttggtgggtgctttgatgcctgattatgatccagtacaaaaaattagcattattccccgcggccgggccggtggtttaacctggttcacccccagtgaagaccgtatggaatccggtttatactcccgttcctatctgcaaaatcagatggccgttgccctgggaggccgtattgctgaggaaattattttcggcgaagaggaagtcaccaccggtgcttccaacgacctccaacaggtagcccgggtcgcccgccaaatggtaacccgtttcggcatgagcgatcgcctgggcccggtagctttgggtcgtcagggtggtggggtattccttggtcgggacattgcctctgaccgggacttttccgatgaaaccgctgcggcgatcgatgaggaagtaagtcaattggtagaccaagcctatcaacgggccaaacaggtcttggtggaaaaccgtggcattttagatcaactggcagaaatcttggtagaaaaggaaactgttgattctgaagagctgcaaactctcctggctaacaacaatgccaaattggcacttctagtttaa

SEQ ID NO: 60774 - protein, 616 aa, Synechocystis sp
MSKNNKKWRNAGLYALLLIVVLALASAFFDRPTQTRETLSYSDFVNRVEANQIERVNLSADRTQAQVPNPSGGPPYLVNLPNDPDLINILTQHNVDIAVQPQSDEGFWFRIASTLFLPILLLVGIFFLFRRAQSGPGSQAMNFGKSKARVQMEPQTQVTFGDVAGIEQAKLELTEVVDFLKNADRFTELGAKIPKGVLLVGPPGTGKTLLAKAVAGEAGVPFFSISGSEFVEMFVGVGASRVRDLFEQAKANAPCIVFIDEIDAVGRQRGAGLGGGNDEREQTLNQLLTEMDGFEGNTGIIIVAATNRPDVLDSALMRPGRFDRQVVVDRPDYAGRREILNVHARGKTLSQDVDLDKIARRTPGFTGADLSNLLNEAAILAARRNLTEISMDEVNDAIDRVLAGPEKKNRVMSEKRKTLVAYHEAGHALVGALMPDYDPVQKISIIPRGRAGGLTWFTPSEDRMESGLYSRSYLQNQMAVALGGRIAEEIIFGEEEVTTGASNDLQQVARVARQMVTRFGMSDRLGPVALGRQGGGVFLGRDIASDRDFSDETAAAIDEEVSQLVDQAYQRAKQVLVENRGILDQLAEILVEKETVDSEELQTLLANNNAKLALLV

SEQ ID NO: 60775 - DNA, 1905 bp, Aquifex aeolicus
  CDS (1)..(1905): transl_table=11
atgaacgcgttgaaaaacttctttatatgggcaatcattatcggagctgcgatagtagcctttaacctatttgaaggaaaaagagaatttaccacgaaggtttccttaaacgaagtagttaagctcgttgaggaaggtaaggtaagttacgcggaggtaaggggaaacacggcgataattcaaactaaagacggacaaaaactggaggtgactctcccacctaacacgaacttagttgacaaaatggttgagaaaggtgtaagggttgaagttgcaaacccagaaccgcccggagggtggctcgtaaacgtattcctctcatggcttccaatactcttctttatcggtatatggatattcctcctcaggcagatgtcggggggtggaaacgtaaacagggcctttaacttcggaaagagcagggcgaaggtttacatagaggaaaaaccgaaggtaactttcaaggacgttgcaggaatagaagaagtaaaggaagaagtaaaggaaattattgaatacctgaaagaccccgttaagttccagaagctcggcggaagacctcccaagggagttctcctttacggtgagccaggtgtgggtaaaacgctccttgcgaaagctatcgcgggcgaggctcacgttcccttcatctcggtctctggttctgacttcgttgagatgttcgtcggtgtaggagccgcacgggtaagggacctttttgaaaccgcaaagaagcacgctccctgcataatctttatagacgagattgacgcggtaggaagggcaaggggagctattcccgtaggcggtggacacgatgagagagaacaaaccttaaaccagcttctcgttgaaatggacggctttgacacctcagacggtattatcgtaatcgccgcaaccaacagaccagacatcttagacccggctcttttaaggcccggacgttttgacaggcagatatttatacccaaacctgacgtaagaggtaggtacgaaatactcaaagttcatgcgaggaacaagaaactcgctaaggacgttgaccttgagtttgtggcgagggcaaccccgggctttacgggagcggaccttgaaaacctcctaaacgaagcggcattactcgcggcaaggaaaggtaaagaagagataactatggaagaaatagaagaagccctagacaggattactatgggactagaaagaaagggaatgaccatatcgccaaaagaaaaggagaagatagctatacacgaagccggacacgccctcatgggactcgtctccgatgacgatgacaaggttcacaagatatccataatcccgaggggtatggctctgggagtaacgcaacaacttcccatagaagacaagcatatatacgacaaaaaggatctctacaacaagatactggtgcttctgggcggaagggctgcggaagaggtattcttcggaaaagatggaatcactacgggagcagaaaatgaccttcagagagcaacggacctcgcttacagaatggtttccatgtggggtatgagcgataaggtcggtccgatagctataaggagggtggcaaatcccttcctcggaggaatgaccacagcggtagacacaagccctgaccttttaagggaaatagacgaagaggtaaagaggattattacggaacagtatgaaaaggctaaagctatagtggaggaatacaaagaacccttgaaagccgtggtcaagaagctacttgagaaggaaacgataacctgcgaggagttcgtagaagtgttcaagctctacggtatagagcttaaagacaagtgtaagaaagaggaactctttgacaaagacaggaaatctgaggaaaataaagaacttaaatctgaagaagttaaggaggaggtagtctga

SEQ ID NO: 60776 - protein, 634 aa, Aquifex aeolicus
MNALKNFFIWAIIIGAAIVAFNLFEGKREFTTKVSLNEVVKLVEEGKVSYAEVRGNTAIIQTKDGQKLEVTLPPNTNLVDKMVEKGVRVEVANPEPPGGWLVNVFLSWLPILFFIGIWIFLLRQMSGGGNVNRAFNFGKSRAKVYIEEKPKVTFKDVAGIEEVKEEVKEIIEYLKDPVKFQKLGGRPPKGVLLYGEPGVGKTLLAKAIAGEAHVPFISVSGSDFVEMFVGVGAARVRDLFETAKKHAPCIIFIDEIDAVGRARGAIPVGGGHDEREQTLNQLLVEMDGFDTSDGIIVIAATNRPDILDPALLRPGRFDRQIFIPKPDVRGRYEILKVHARNKKLAKDVDLEFVARATPGFTGADLENLLNEAALLAARKGKEEITMEEIEEALDRITMGLERKGMTISPKEKEKIAIHEAGHALMGLVSDDDDKVHKISIIPRGMALGVTQQLPIEDKHIYDKKDLYNKILVLLGGRAAEEVFFGKDGITTGAENDLQRATDLAYRMVSMWGMSDKVGPIAIRRVANPFLGGMTTAVDTSPDLLREIDEEVKRIITEQYEKAKAIVEEYKEPLKAVVKKLLEKETITCEEFVEVFKLYGIELKDKCKKEELFDKDRKSEENKELKSEEVKEEVV

SEQ ID NO: 60777 - DNA, 1914 bp, Bacillus subtilis
  CDS (1)..(1914): transl_table=11
atgaatcgggtcttccgtaataccattttttatttacttattttattagtagtaatcggggttgtgagctacttccagacctcaaatccgaaaacagaaaatatgtcgtacagtacgttcatcaaaaacctggatgacgggaaagttgatagcgtatcggttcagcctgtcagaggtgtttatgaggtaaaagggcagctgaaaaactacgacaaagatcaatactttttgactcatgttcctgaaggaaagggagcagaccagatatttaacgctttgaaaaagacagacgtaaaggttgagcccgcgcaagaaacaagcggatgggtgacgttcctgacgaccatcatcccatttgtcattatctttattctgtttttcttcctgctcaatcaggctcaaggcggcggcagccgtgtcatgaactttggcaagagtaaagcgaagctgtatacagaggaaaagaaacgcgtcaaatttaaagacgttgcaggggctgacgaagaaaagcaagaacttgttgaagttgttgagtttctgaaagatccccgcaagtttgccgagctcggcgccagaataccgaaaggcgtgcttttagtcggacctccgggtaccggtaaaacattgcttgccaaggcttgtgcaggagaagccggcgtacctttcttcagcatcagcggatctgatttcgttgaaatgtttgtaggggtcggtgcttcccgtgtgcgtgacttgtttgaaaatgcgaaaaagaatgcgccttgtttgatcttcattgatgaaattgacgcagtcggacgccagcgtggcgctggtctcggcggtggacacgatgaacgtgaacagacgctaaaccaattgcttgttgaaatggacggattcagcgctaatgaaggaattatcatcattgctgcgacgaaccgtgcggacatcttggacccagccttacttcgtccgggacgttttgaccgtcaaatcacagtggaccgcccagatgtcattggccgtgaagctgtattgaaagtccatgcgagaaacaaaccgctggatgaaacggttaacctaaaatcaattgccatgagaacaccaggcttctcaggcgctgacttagaaaacctcttgaatgaagctgcgcttgtagcggctcgtcaaaacaagaaaaaaatcgatgcgcgtgatattgacgaagcgacggaccgtgtaattgccggacccgctaagaagagccgcgttatctccaagaaagaacgcaatatcgtggcttatcacgaaggcggacacaccgttatcggtctcgttttagatgaggcagatatggttcataaagtaacgattgttcctcggggccaggctggcggttatgctgttatgctgccaagagaagaccgttatttccaaacaaagccggagctgcttgataaaattgtcggcctcttgggcggacgtgttgctgaagagattatcttcggtgaagtcagcacaggggcgcacaatgacttccagcgtgcgacgaatattgcaagacgaatggttacagaattcggtatgtcagaaaaactgggaccgttgcaatttggacagtctcagggcggtcaggtattcttaggccgtgatttcaacaacgaacagaactacagtgatcaaatcgcttacgaaattgatcaggaaattcagcgcatcatcaaagaatgttatgagcgtgcgaaacaaatcctgactgaaaatcgtgacaagcttgaattgattgcccaaacgcttctgaaagttgaaacgcttgacgctgaacaaatcaaacaccttatcgatcatggaacattacctgagcgtaatttctcagatgatgaaaagaacgatgatgtgaaagtaaacattctgacaaaaacagaagaaaagaaagacgatacgaaagagtaa

SEQ ID NO: 60778 - protein, 637 aa, Bacillus subtilis
MNRVFRNTIFYLLILLVVIGVVSYFQTSNPKTENMSYSTFIKNLDDGKVDSVSVQPVRGVYEVKGQLKNYDKDQYFLTHVPEGKGADQIFNALKKTDVKVEPAQETSGWVTFLTTIIPFVIIFILFFFLLNQAQGGGSRVMNFGKSKAKLYTEEKKRVKFKDVAGADEEKQELVEVVEFLKDPRKFAELGARIPKGVLLVGPPGTGKTLLAKACAGEAGVPFFSISGSDFVEMFVGVGASRVRDLFENAKKNAPCLIFIDEIDAVGRQRGAGLGGGHDEREQTLNQLLVEMDGFSANEGIIIIAATNRADILDPALLRPGRFDRQITVDRPDVIGREAVLKVHARNKPLDETVNLKSIAMRTPGFSGADLENLLNEAALVAARQNKKKIDARDIDEATDRVIAGPAKKSRVISKKERNIVAYHEGGHTVIGLVLDEADMVHKVTIVPRGQAGGYAVMLPREDRYFQTKPELLDKIVGLLGGRVAEEIIFGEVSTGAHNDFQRATNIARRMVTEFGMSEKLGPLQFGQSQGGQVFLGRDFNNEQNYSDQIAYEIDQEIQRIIKECYERAKQILTENRDKLELIAQTLLKVETLDAEQIKHLIDHGTLPERNFSDDEKNDDVKVNILTKTEEKKDDTKE

SEQ ID NO: 60779 - DNA, 1935 bp, Escherichia coli O157
  CDS (1)..(1935): transl_table=11
atggcgaaaaacctaatactctggctggtcattgccgttgtgctgatgtcagtattccagagctttgggcccagcgagtctaatggccgtaaggtggattactctaccttcctacaagaggtcaataacgaccaggttcgtgaagcgcgtatcaacggacgtgaaatcaacgttaccaagaaagatagtaaccgttataccacttacattccggttcaggatccgaaattactggataacctgttgaccaagaacgtcaaggttgtcggtgaaccgcctgaagaacccagcctgctggcttctatcttcatctcctggttcccgatgctgttgctgattggtgtctggatcttcttcatgcgtcaaatgcagggcggcggtggcaaaggtgccatgtcgtttggtaagagtaaagcgcgcatgctgacggaagatcagatcaaaacgacctttgctgacgttgcgggctgcgacgaagcaaaagaagaagttgctgaactggttgagtatctgcgcgagccgagccgcttccagaaactcggcggtaagatcccgaaaggcgtcctgatggtcggtcctccgggtaccggtaaaacgctgctggcgaaagcgattgcaggcgaagcgaaagttccgttctttactatctccggttctgacttcgtagaaatgttcgtcggtgtgggtgcatcccgtgttcgtgacatgttcgaacaggcgaagaaagcggcaccgtgcatcatctttatcgatgaaatcgacgccgtaggccgccagcgtggcgcaggtctgggcggtggtcacgatgaacgtgaacagactctgaaccagatgctggttgagatggatggcttcgaaggtaacgaaggtatcatcgttatcgccgcgactaaccgtccggacgttctcgacccagcgctgctgcgtcctggccgtttcgaccgtcaggttgtggttggcttgccagatgttcgcggtcgtgagcagatcctgaaggttcacatgcgtcgcgtaccattggcacccgatatcgacgcggcaatcattgcccgtggtactcctggtttctccggtgctgacctggcgaacctggtgaacgaagcggcactgttcgctgctcgtggcaacaaacgcgttgtgtcgatggttgagttcgagaaagcgaaagacaaaatcatgatgggtgcggaacgtcgctccatggtgatgacggaagcgcagaaagaatcgacggcttaccacgaagcgggtcatgcgattatcggtcgcctggtgccggagcacgatccggtgcacaaagtgacgattatcccacgcggtcgtgcgctgggtgtgactttcttcttgcctgagggcgacgcaatcagcgccagccgtcagaaactggaaagccagatttctacgctgtacggtggtcgtctggcagaagagatcatctacgggccggaacatgtttctaccggtgcgtccaacgatattaaagttgcgaccaacctggcacgtaacatggtgactcagtggggcttctctgagaaattgggtccactgctgtacgcggaagaagaaggtgaagtgttcctcggccgtagcgtagcgaaagcgaaacatatgtccgatgaaactgcacgtatcatcgaccaggaagtgaaagcactgattgagcgtaactataatcgtgcgcgtcagcttctgaccgacaatatggatattctgcatgcgatgaaagatgctctcatgaaatatgagactatcgacgcaccgcagattgatgacctgatggcacgtcgcgatgtacgtccgccagcgggctgggaagaaccaggcgcttctaacaatgctggcgacaatggtagtccaaaggctcctcgtccggttgatgaaccgcgtacgccgaacccgggtaacaccatgtcagagcagttaggcgacaagtaa

SEQ ID NO: 60780 - protein, 644 aa, Escherichia coli O157
MAKNLILWLVIAVVLMSVFQSFGPSESNGRKVDYSTFLQEVNNDQVREARINGREINVTKKDSNRYTTYIPVQDPKLLDNLLTKNVKVVGEPPEEPSLLASIFISWFPMLLLIGVWIFFMRQMQGGGGKGAMSFGKSKARMLTEDQIKTTFADVAGCDEAKEEVAELVEYLREPSRFQKLGGKIPKGVLMVGPPGTGKTLLAKAIAGEAKVPFFTISGSDFVEMFVGVGASRVRDMFEQAKKAAPCIIFIDEIDAVGRQRGAGLGGGHDEREQTLNQMLVEMDGFEGNEGIIVIAATNRPDVLDPALLRPGRFDRQVVVGLPDVRGREQILKVHMRRVPLAPDIDAAIIARGTPGFSGADLANLVNEAALFAARGNKRVVSMVEFEKAKDKIMMGAERRSMVMTEAQKESTAYHEAGHAIIGRLVPEHDPVHKVTIIPRGRALGVTFFLPEGDAISASRQKLESQISTLYGGRLAEEIIYGPEHVSTGASNDIKVATNLARNMVTQWGFSEKLGPLLYAEEEGEVFLGRSVAKAKHMSDETARIIDQEVKALIERNYNRARQLLTDNMDILHAMKDALMKYETIDAPQIDDLMARRDVRPPAGWEEPGASNNAGDNGSPKAPRPVDEPRTPNPGNTMSEQLGDK

SEQ ID NO: 60781 - DNA, 1935 bp, Escherichia coli
  CDS (1)..(1935): transl_table=11
atggcgaaaaacctaatactctggctggtcattgccgttgtgctgatgtcagtattccagagctttgggcccagcgagtctaatggccgtaaggtggattactctaccttcctacaagaggtcaataacgaccaggttcgtgaagcgcgtatcaacggacgtgaaatcaacgttaccaagaaagatagtaaccgttataccacttacattccggttcaggatccgaaattactggataacctgttgaccaagaacgtcaaggttgtcggtgaaccgcctgaagaaccaagcctgctggcttctatcttcatctcctggttcccgatgctgttgctgattggtgtctggatcttcttcatgcgtcaaatgcagggcggcggtggcaaaggtgccatgtcgtttggtaagagcaaagcgcgcatgctgacggaagatcagatcaaaacgacctttgctgacgttgcgggctgcgacgaagcaaaagaagaagttgctgaactggttgagtatctgcgcgagccgagccgcttccagaaactcggcggtaagatcccgaaaggcgtcttgatggtcggtcctccgggtaccggtaaaacgctgctggcgaaagcgattgcaggcgaagcgaaagttccgttctttactatctccggttctgacttcgtagaaatgttcgtcggtgtgggtgcatcccgtgttcgtgacatgttcgaacaggcgaagaaagcggcaccgtgcatcatctttatcgatgaaatcgacgccgtaggccgccagcgtggcgctggtctgggcggtggtcacgatgaacgtgaacagactctgaaccagatgctggttgagatggatggcttcgaaggtaacgaaggtatcatcgttatcgccgcgactaaccgtccggacgttctcgacccggccctgctgcgtcctggccgtttcgaccgtcaggttgtggtcggcttgccagatgttcgcggtcgtgagcagatcctgaaagttcacatgcgtcgcgtaccattggcacccgatatcgacgcggcaatcattgcccgtggtactcctggtttctccggtgctgacctggcgaacctggtgaacgaagcggcactgttcgctgctcgtggcaacaaacgcgttgtgtcgatggttgagttcgagaaagcgaaagacaaaatcatgatgggtgcggaacgtcgctccatggtgatgacggaagcgcagaaagaatcgacggcttaccacgaagcgggtcatgcgattatcggtcgcctggtgccggaacacgatccggtgcacaaagtgacgattatcccacgcggtcgtgcgctgggtgtgactttcttcttgcctgagggcgacgcaatcagcgccagccgtcagaaactggaaagccagatttctacgctgtacggtggtcgtctggcagaagagatcatctacgggccggaacatgtatctaccggtgcgtccaacgatattaaagttgcgaccaacctggcacgtaacatggtgactcagtggggcttctctgagaaattgggtccactgctgtacgcggaagaagaaggtgaagtgttcctcggccgtagcgtagcgaaagcgaaacatatgtccgatgaaactgcacgtatcatcgaccaggaagtgaaagcactgattgagcgtaactataatcgtgcgcgtcagcttctgaccgacaatatggatattctgcatgcgatgaaagatgctctcatgaaatatgagactatcgacgcaccgcagattgatgacctgatggcacgtcgcgatgtacgtccgccagcgggctgggaagaaccaggcgcttctaacaattctggcgacaatggtagtccaaaggctcctcgtccggttgatgaaccgcgtacgccgaacccgggtaacaccatgtcagagcagttaggcgacaagtaa

SEQ ID NO: 60782 - protein, 644 aa, Escherichia coli
MAKNLILWLVIAVVLMSVFQSFGPSESNGRKVDYSTFLQEVNNDQVREARINGREINVTKKDSNRYTTYIPVQDPKLLDNLLTKNVKVVGEPPEEPSLLASIFISWFPMLLLIGVWIFFMRQMQGGGGKGAMSFGKSKARMLTEDQIKTTFADVAGCDEAKEEVAELVEYLREPSRFQKLGGKIPKGVLMVGPPGTGKTLLAKAIAGEAKVPFFTISGSDFVEMFVGVGASRVRDMFEQAKKAAPCIIFIDEIDAVGRQRGAGLGGGHDEREQTLNQMLVEMDGFEGNEGIIVIAATNRPDVLDPALLRPGRFDRQVVVGLPDVRGREQILKVHMRRVPLAPDIDAAIIARGTPGFSGADLANLVNEAALFAARGNKRVVSMVEFEKAKDKIMMGAERRSMVMTEAQKESTAYHEAGHAIIGRLVPEHDPVHKVTIIPRGRALGVTFFLPEGDAISASRQKLESQISTLYGGRLAEEIIYGPEHVSTGASNDIKVATNLARNMVTQWGFSEKLGPLLYAEEEGEVFLGRSVAKAKHMSDETARIIDQEVKALIERNYNRARQLLTDNMDILHAMKDALMKYETIDAPQIDDLMARRDVRPPAGWEEPGASNNSGDNGSPKAPRPVDEPRTPNPGNTMSEQLGDK

SEQ ID NO: 60783 - DNA, 1917 bp, Helicobacter felis
  CDS (1)..(1917): transl_table=11
atggacaataatcacaagggtccaaacgaccccaattctaaaaagcctcttttgcaaaatcctctactcctgattgctatttttgggattattatttttgttgcgatgcgggtgatgaactcagatgagggttttggtgatcgctttctctctacgagcaccaagaacattagttatcacgagatgaaagaactcattgagaaaaaagaagtagatagcgtgagcattgggcaaacccttattaaggctatcagtaaggagggcaataataaaactatttatgtagctaaacgcgtgcccgatctttccttagtgcccctcttggatagccaaaagatcaactattcaggctttagcgagtccaatttctttgccgatattttgggctggctcttgcccgttttggtgattttgggcttatggatgttcatggcaagccggatgcaaaaaaacatgggtggggggatttttggcatgggtagttctaaaaagctcatcaatgctgaaaagcccaaagtgcgcttcaatgacatggcaggcaatgaagaggctaaagaagaagttgtagagattgtggattttctcaaataccccgaccgctatgcctctttgggggcaaaaattcctaagggcgtgcttttggtgggacctcccgggaccggtaaaaccttgctagccaaagccgtagccggcgaggcgagcgtgcctttcttttctatgggcgggagtagttttattgaaatgtttgtaggtctaggggctagtcgcgtgcgcgatctctttgacattgccaaaaaagaagctcctagcattattttcatcgatgaaatcgatgccattggcaagagtcgcgcggctggggggatgattagtgggaatgacgagcgcgaacaaaccctaaaccagcttttagctgaaatggatggctttggttcagaaaacgcccccgtgattgtgctagccgctaccaaccgccctgagattttagaccctgcattgcttagaccggggcgttttgatcgccaagttttggttgataagcccgattttaaggggcgggtagaaattttaaaggtgcatatcaagcccgtgaaattggctaatgatgtggatttacaagaaatcgccaaactcaccgccgggctagccggggcggatttagctaatatcatcaatgaggctgcgttactagcggggcgcaataatcaaaaagaagtcaaacaacagcatttaaaagaagcggtcgagcggggcattgcgggcttggagaaaaagagtcggcgcatttctcccaaagagaaaaagattgtcgcttaccatgagagcgggcatgcggtcatctctgagatgactaagggctcggcacgggtcaataaagtttctatcattcctagagggatggcagcactaggttatactctcaacacccccgaagagaacaaatacctcatgcaaaaacacgaactcatcgctgaaatcgatgttttattgggcggacgcgcagcagaagatgtctttttgcaagagatctctacgggagcgagcaatgatttggagcgcgctacagacattatcaagggcatggtgagctactatggcatgagcgatgtgagtgggttgatggtgctagaaaaacaacgcaattcgtttttgggcgggggctttggaagcggacgcgagtttagcgaaaaaatggctgaagagatggactcgtttattaaaaatctcttagaagaacgctatgtccatgtcaagcagaccttgagcgactataaggacgcgatcgaggtgatggtgaacgaactctttgaaaaagaggtgatcacgggcgagcgcgtgcgtgagatcatcagcgaatatgaagttagtcataatttgcaaacgcgcttagtgcccctggaagagcacgctagctag

SEQ ID NO: 60784 - protein, 638 aa, Helicobacter felis
MDNNHKGPNDPNSKKPLLQNPLLLIAIFGIIIFVAMRVMNSDEGFGDRFLSTSTKNISYHEMKELIEKKEVDSVSIGQTLIKAISKEGNNKTIYVAKRVPDLSLVPLLDSQKINYSGFSESNFFADILGWLLPVLVILGLWMFMASRMQKNMGGGIFGMGSSKKLINAEKPKVRFNDMAGNEEAKEEVVEIVDFLKYPDRYASLGAKIPKGVLLVGPPGTGKTLLAKAVAGEASVPFFSMGGSSFIEMFVGLGASRVRDLFDIAKKEAPSIIFIDEIDAIGKSRAAGGMISGNDEREQTLNQLLAEMDGFGSENAPVIVLAATNRPEILDPALLRPGRFDRQVLVDKPDFKGRVEILKVHIKPVKLANDVDLQEIAKLTAGLAGADLANIINEAALLAGRNNQKEVKQQHLKEAVERGIAGLEKKSRRISPKEKKIVAYHESGHAVISEMTKGSARVNKVSIIPRGMAALGYTLNTPEENKYLMQKHELIAEIDVLLGGRAAEDVFLQEISTGASNDLERATDIIKGMVSYYGMSDVSGLMVLEKQRNSFLGGGFGSGREFSEKMAEEMDSFIKNLLEERYVHVKQTLSDYKDAIEVMVNELFEKEVITGERVREIISEYEVSHNLQTRLVPLEEHAS

SEQ ID NO: 60785 - DNA, 1899 bp, Helicobacter pylori J99
  CDS (1)..(1899): transl_table=11
atgaaaccaacgaacgaacctaaaaaacctttttttcaaagtcccattgttcttgcggttcttggagggattttactcatttttttcctacgctctttcaattctgatggcagtttttcggacaatttcttagcttctagcactaaaaatgtgagctaccatgaaatcaaacagctcatcagcaataatgaagtggaaaatgtgagtatcggtcaaactttgatcaaagccagccataaagagggcaataatcgtgtgatttatatcgctaaacgagtgcctgatctaaccttagtgcctttgttagacgagaaaaaaatcaattattctggttttagcgaatctaacttttttaccgacatgttagggtggctcatgcctattttagtgattttagggctatggatgtttatggcaaaccgcatgcaaaaaaatatgggtgggggtatttttggcatggggagcgcgaaaaaactcattaacgctgaaaaacccaatgtgcgttttaatgacatggcgggcaatgaagaagccaaagaagaagtagtagaaatcgtggatttcttaaaataccccgaacgatacgccaatttaggggctaaaatccctaaaggtgtgctgttagtagggcctccaggaaccggtaaaacccttttagcaaaggcggtggctggcgaagcgcatgtgccgtttttctctatgggagggagcagtttcattgaaatgtttgtgggcttaggggcaagcagggttagggatttgtttgaaaccgctaaaaaacaagcccctagcatcatttttattgatgaaattgatgccataggcaagagcagagcggctggaggcatgataagtgggaatgatgagagagagcaaaccctaaaccagctcttagccgaaatggatggttttgggagcgaaaacgcacctgtcattgttttagccgcaacgaaccgccctgaaatcttggatccggctttaatgcgtccagggcgctttgacaggcaggttttagtggataagcctgattttaatggcagggtggaaatcttaaaagtgcatattaaaggcgtgaaactcgctaatgatgtgaatttgcaagaagtcgccaaactcaccgcagggcttgcaggggcggatttggcgaatatcatcaatgaagccgcgcttttagcgggacgaaacaaccaaaaagaagtcaaacaacagcatttaaaagaagcggttgaaagagggattgctgggctagaaaagaaaagcaggcgtatcagtcctaaagaaaagaaaatcgtcgcctaccatgaaagcgggcatgccgtgatttctgaaatgactaaagggagcactagggtgaataaagtctctatcattccaaggggcatggcggctttaggctacacccttaacacgcctgaagaaaacaaatacttgatgcaaaaacacgaactcatcgctgaaattgatgtgcttttaggcgggagggcggctgaagaagtctttttagaagaaatttctaccggtgcgagcaacgatttagaaagagcgactgatattattaaaggcatggtgagttactacggcatgagcagtgtcagcgggcttatggtgttagaaaagcaacggaacgcctttttaggaggcggttatgggagcagtagggaatttagcgaaaaaaccgcagaagaaatggatcttttcattaaaaacctactagaagagcgctatcagcatgtcaaacaaaccttaagcgactatagagaggcgattgaaatcatggtcaaagaattgtttgacaaagaagtcattacaggcgaaagggtgcgtgaaatcatcagcgaatacgaagccgccaacaatttagaaagccgtttgatccctttagaagagcaagcgagttaa

SEQ ID NO: 60786 - protein, 632 aa, Helicobacter pylori J99
MKPTNEPKKPFFQSPIVLAVLGGILLIFFLRSFNSDGSFSDNFLASSTKNVSYHEIKQLISNNEVENVSIGQTLIKASHKEGNNRVIYIAKRVPDLTLVPLLDEKKINYSGFSESNFFTDMLGWLMPILVILGLWMFMANRMQKNMGGGIFGMGSAKKLINAEKPNVRFNDMAGNEEAKEEVVEIVDFLKYPERYANLGAKIPKGVLLVGPPGTGKTLLAKAVAGEAHVPFFSMGGSSFIEMFVGLGASRVRDLFETAKKQAPSIIFIDEIDAIGKSRAAGGMISGNDEREQTLNQLLAEMDGFGSENAPVIVLAATNRPEILDPALMRPGRFDRQVLVDKPDFNGRVEILKVHIKGVKLANDVNLQEVAKLTAGLAGADLANIINEAALLAGRNNQKEVKQQHLKEAVERGIAGLEKKSRRISPKEKKIVAYHESGHAVISEMTKGSTRVNKVSIIPRGMAALGYTLNTPEENKYLMQKHELIAEIDVLLGGRAAEEVFLEEISTGASNDLERATDIIKGMVSYYGMSSVSGLMVLEKQRNAFLGGGYGSSREFSEKTAEEMDLFIKNLLEERYQHVKQTLSDYREAIEIMVKELFDKEVITGERVREIISEYEAANNLESRLIPLEEQAS

SEQ ID NO: 60787 - DNA, 1899 bp, Helicobacter pylori
  CDS (1)..(1899): transl_table=11
atgaaaccaacgaacgaacctaaaaaacctttttttcaaagtcccattatccttgcggttcttggagggattttactcatcttttttctacgctctttcaattctgatggcagtttttcggacaatttcttagcttctagcactaaaaatgtgagctaccatgaaatcaaacagctcatcagcaataatgaagtggaaaatgtgagtatcggtcaaactttgatcaaagccagccataaagagggcaacaatcgtgtgatctatatcgctaaacgggtgcctgatttgaccttagtgcctttgttagacgagaaaaaaatcaattattctggttttagcgagtctaacttttttacggacatgctagggtggctcatgcctattttagtgattttagggctatggatgtttatggcgaaccgcatgcaaaaaaatatgggtgggggtatttttggcatggggagcgcgaaaaaactcattaacgctgaaaaacccaatgtgcgttttaatgacatggcaggcaatgaagaagccaaagaagaagtggtagaaatcgtagatttcttaaaataccctgaacgatacgccaatttaggggctaaaatccctaaaggcgtgttattagtagggcctccaggaaccggtaaaacccttttagccaaagcggtagccggcgaagcgcatgtgccgtttttctctatgggagggagcagtttcattgaaatgtttgtgggcttaggggcaagcagggttagggatttatttgaaaccgctaaaaaacaagcccctagcatcatttttattgatgaaattgatgccataggtaagagccgagcggctggaggcgtggtgagcgggaacgatgaaagagagcaaaccttaaaccagctcttagccgaaatggatggttttgggagcgaaaatgcgcctgtaattgtcttagccgcaacgaaccgccccgaaatcttagatccggcgttaatgcgtccagggcgctttgacaggcaggttttagtggataagcctgattttaatggtagggtagaaatcttaaaagtgcatattaaaggcgtgaaacttgctaatgatgtgaatttgcaagaagtcgccaaactcactgcagggcttgcaggagcggatttggcgaatattatcaatgaagccgcacttttagcaggaagaaacaaccaaaaagaagtcaggcagcaacatttaaaagaagcggttgaaagagggattgcagggttagaaaagaaaagcaggcgcatcagtcctaaagaaaagaaaatcgtcgcctaccatgaaagcgggcatgccgtgatttctgaaatgactaaagggagtgctagggtgaataaagtctctatcattccaaggggcatggcggctttgggctacacccttaacacgcctgaagaaaacaaatacttgatgcaaaagcacgaactcatcgctgaaattgatgtgcttttaggcgggagagcggctgaagatgtctttttggaagaaatttctaccggtgcgagcaacgatttagaaagggcgactgatattattaaaggcatggtgagttactacggcatgagtagtgtcagtgggcttatggtattagaaaaacaacggaacgcctttttaggaggcggttatggaagcagtagggaatttagcgaaaagaccgcagaagaaatggatcttttcattaaaaacctgttagaagaacgctataagcatgtcaaacaaaccttaagcgactatagagaagcgattgaaatcatggtcaaagaattgtttgacaaagaagtcattacaggcgaaagggtgcgtgaaatcatcagcgaatacgaagtcgccaacaatttagaaagccgtttgatccctttagaagagcaagcgagttaa

SEQ ID NO: 60788 - protein, 632 aa, Helicobacter pylori
MKPTNEPKKPFFQSPIILAVLGGILLIFFLRSFNSDGSFSDNFLASSTKNVSYHEIKQLISNNEVENVSIGQTLIKASHKEGNNRVIYIAKRVPDLTLVPLLDEKKINYSGFSESNFFTDMLGWLMPILVILGLWMFMANRMQKNMGGGIFGMGSAKKLINAEKPNVRFNDMAGNEEAKEEVVEIVDFLKYPERYANLGAKIPKGVLLVGPPGTGKTLLAKAVAGEAHVPFFSMGGSSFIEMFVGLGASRVRDLFETAKKQAPSIIFIDEIDAIGKSRAAGGVVSGNDEREQTLNQLLAEMDGFGSENAPVIVLAATNRPEILDPALMRPGRFDRQVLVDKPDFNGRVEILKVHIKGVKLANDVNLQEVAKLTAGLAGADLANIINEAALLAGRNNQKEVRQQHLKEAVERGIAGLEKKSRRISPKEKKIVAYHESGHAVISEMTKGSARVNKVSIIPRGMAALGYTLNTPEENKYLMQKHELIAEIDVLLGGRAAEDVFLEEISTGASNDLERATDIIKGMVSYYGMSSVSGLMVLEKQRNAFLGGGYGSSREFSEKTAEEMDLFIKNLLEERYKHVKQTLSDYREAIEIMVKELFDKEVITGERVREIISEYEVANNLESRLIPLEEQAS

SEQ ID NO: 60789 - DNA, 2121 bp, Medicago sativa
  CDS (1)..(2121): transl_table=11
atggccttctccacctcttctttactttctacaaacttcttaggagcaagaaacattccaacccccaaaacaaccaaaccttctatttcactaccattattcttcaaaactaaattcttcaactctcaaaatgacaacaacaacaataattcagaacctattaaatcagctgctgtatcagctcttatcttatcatctatgtttactccggcggcactcgccgccgacaacctcccaccaccaccaccacctgtactcgaagctcaaccaaaccaactaaaccccgcaaattcaacttcacctttctctcaaaacatttcactcacagcaccaaaaccacaagcacaatcctccactgatcttcccgatggtagccagtggcgttacagtgagtttttaaacgcagtaaaaaagggtaaagttgaacgagttaggttcagtaaagacggttctgtccttcaactaaccgccgttgatggccggagagccaacgttatcgttcccaacgaccctgaccttatcgatattctagcaatgaacggcgttgatatttccgtttccgaaggtgaacaaggtaacggtttgttcagtttcgttggtagtttattgttaccgttccttgcatttgcggggttgttcttgattttccgtagaggtcaaggaggacccggtgggcctggtgggcttggtgggcctatggatttcggtagatcgaaatcgaaattccaggaagtaccggagactggagtaacttttgcagatgtggccggtgctgatcaagcgaaattggagctacaagaagttgttgatttcttgaagaatcctgataagtacactgctttaggtgctaagattcctaaaggatgtcttttagtggggccacctggaactggaaagacattgttggcaagggcggtggctggtgaagccggtacaccgttcttttcgtgtgcagcttcggagtttgtggaactgtttgtgggagttggtgcttctagggttagggatttgtttgagaaggcgaagtcaaaggcgccttgcattgtgtttattgatgagattgatgctgttgggagacagagaggagctggtcttggtggtgggaatgatgagagggaacagactattaatcagcttttgaccgagatggatggattttcgggtaattctggtgttattgttttggctgctactaatagacctgatgttcttgattctgctttgcttagacctggaaggtttgatagacaagttactgttgatagacctgatgttgccggtagagttaaaatccttcaggtgcattctagaggaaaagcacttgcaaaggatgttgactttgacaaaattgccaggagaaccccagggttcacaggagttgatctgcagaatctgatgaacgaagcagctattcttgctgccaggcgtgacctcaaagaaataagtaaagatgagatagctgatgcgcttgaaaggatcattgctggaccagaaaagaaaaatgccgttgtctcagaagagaagaagaaattagtagcctatcatgaggctggccatgctttagtgggtgctttgatgcctgaatatgaccctgtagccaagatatctattatacctcgtggccaagctggtggtctcaccttttttgctcctagcgaagagaggcttgagtctggattgtacagtagaagctacttggagaatcagatggcggttgcacttggaggaagggttgccgaagaggtttttggccaggataatgtcaccactggggcgtcaaatgacttcatgcaagtttcacgagtggcaagacagatggttgagagatttgggttcagcaaaaaaattggacaggttgccatcggcgggggtggtggaaatccattcttgggacaacagatgtcttcacaaaaggattattccatggcaactgctgatatagtggataaggaagttagagaactggtagacaaagcatatgagagggcaacacaaattatcaacactcacattgacatccttcacaagcttgctcaacttctcatagagaaagaaacagttgatggtgaagagttcatgagtctattcattgatggaaaagctgaattgtatgtttcataa

SEQ ID NO: 60790 - protein, 706 aa, Medicago sativa
MAFSTSSLLSTNFLGARNIPTPKTTKPSISLPLFFKTKFFNSQNDNNNNNSEPIKSAAVSALILSSMFTPAALAADNLPPPPPPVLEAQPNQLNPANSTSPFSQNISLTAPKPQAQSSTDLPDGSQWRYSEFLNAVKKGKVERVRFSKDGSVLQLTAVDGRRANVIVPNDPDLIDILAMNGVDISVSEGEQGNGLFSFVGSLLLPFLAFAGLFLIFRRGQGGPGGPGGLGGPMDFGRSKSKFQEVPETGVTFADVAGADQAKLELQEVVDFLKNPDKYTALGAKIPKGCLLVGPPGTGKTLLARAVAGEAGTPFFSCAASEFVELFVGVGASRVRDLFEKAKSKAPCIVFIDEIDAVGRQRGAGLGGGNDEREQTINQLLTEMDGFSGNSGVIVLAATNRPDVLDSALLRPGRFDRQVTVDRPDVAGRVKILQVHSRGKALAKDVDFDKIARRTPGFTGVDLQNLMNEAAILAARRDLKEISKDEIADALERIIAGPEKKNAVVSEEKKKLVAYHEAGHALVGALMPEYDPVAKISIIPRGQAGGLTFFAPSEERLESGLYSRSYLENQMAVALGGRVAEEVFGQDNVTTGASNDFMQVSRVARQMVERFGFSKKIGQVAIGGGGGNPFLGQQMSSQKDYSMATADIVDKEVRELVDKAYERATQIINTHIDILHKLAQLLIEKETVDGEEFMSLFIDGKAELYVS

SEQ ID NO: 60791 - DNA, 2109 bp, Mycoplasma genitalium
  CDS (1)..(2109): transl_table=4
atgaaaaaaagaaataagggtttagtagaacaaacaactactgaaaaaaataatttttcacgtaaaactgcttgaaaagtcttttgatgagtcatcattttagctgttgttattggtgttttagcttatattttcagtccaagagctgctactgcagtagttgaaagctgaaaattaaatggaggtagtaacagcactttaacagcaaaagtaagcggttttagtaatgaactgacatttaaacaaataaatggttcaacttatgttactgataccattctccaagtttccattacctttgatggtttaaatagtccattaactgttactgctcacaaaactgttaatagtaatggcaatgttatctttaatattgctaacttatcaattaaccaaagtaatggtcagattaccgttaatagtaatggaaccatgatgaatggtggttctagtaataacacaaagagtattgcaggttttgaaacccttggtactttcattgctcctgatactagagctagagatgtattaaatggtttgtttggcttgctaccaattattatctttgtagttttctttttactcttttgaagaagtgctaggggtatatctgcagggggcagagaagaagataatattttttctattggcaaaacccaagctaagttggctaagtcaactgtgaaatttaccaatattgctggacttcaagaggaaaagcatgagttgcttgagatagttgattatttaaaaaatccattgaaatatgcccagatgggagcaagatccccacgtggggtaattttatacggtccacctgggacaggtaaaacattattagctaaagcagtagctggtgaagctggtgttcctttctttcaatcaacgggttctggatttgaagatatgcttgttggtgttggtgctaaacgagttagagatcttttcaataaagctaaaaaggctgctccttgtattatttttattgatgaaattgattcagttggttctaaacggggtagagttgaactctcttcttattctgttgttgagcaaaccttaaaccaattgttagctgaaatggatggatttacaagcagaacaggtgttgttgtaatggcagctacaaataggttagatgtattagatgatgcattattaagacctggaagatttgatagacatattcaaatcaatctccctgatattaaagaaagggaagggattttaaaagttcatgctgaaaataaaaatctctcttctaagataagtcttttagatgttgctaagagaactcctgggttttcaggtgctcaattagaaaatgttatcaatgaagctacattgttagcagttagagacaaccgtaccacaattaacattaatgacattgatgaagcaattgatagagtaatagctggtcctgctaaaaagtcacgtgtaattagtgatgaagatagaaaactagttgcttatcatgaggctggtcatgccttggttggtttacatgtccacagtaatgatgaagtacaaaagattaccattattcctcgtggtcaagcagggggttacacactttcaacacctaagagtggtgatcttaacctaaaaagaaaatctgatttacttgcaatgatagcaactgctatgggcggtagagctgctgaagaggaaatctatggtaatttagaaattactactggcgcttctagcgatttttataaagcaactaatattgcaagagcaatggtaacccagcttgggatgtctaaattaggtcaagtgcaatatgtaccaagtcaagggacactcccttctaatgtaaaactttattcagaacaaactgctaaagatattgacaatgagattaatttcattattgaagaacagtataagaaagcaaaaacaatcattaagagtaaccgtaaggaactagaattgcttgtagaagcacttttaattgctgaaactattttgaaaagtgatattgacttcatccataaaaacactaaactaccaccagaaatcttattgcaaaagcaagaacaacaagcaaagcaaaaactaaataaatctgaagtaaaaccagaaagtgaaacaaacagttag

SEQ ID NO: 60792 - protein, 702 aa, Mycoplasma genitalium
MKKRNKGLVEQTTTEKNNFSRKTAWKVFWWVIILAVVIGVLAYIFSPRAATAVVESWKLNGGSNSTLTAKVSGFSNELTFKQINGSTYVTDTILQVSITFDGLNSPLTVTAHKTVNSNGNVIFNIANLSINQSNGQITVNSNGTMMNGGSSNNTKSIAGFETLGTFIAPDTRARDVLNGLFGLLPIIIFVVFFLLFWRSARGISAGGREEDNIFSIGKTQAKLAKSTVKFTNIAGLQEEKHELLEIVDYLKNPLKYAQMGARSPRGVILYGPPGTGKTLLAKAVAGEAGVPFFQSTGSGFEDMLVGVGAKRVRDLFNKAKKAAPCIIFIDEIDSVGSKRGRVELSSYSVVEQTLNQLLAEMDGFTSRTGVVVMAATNRLDVLDDALLRPGRFDRHIQINLPDIKEREGILKVHAENKNLSSKISLLDVAKRTPGFSGAQLENVINEATLLAVRDNRTTININDIDEAIDRVIAGPAKKSRVISDEDRKLVAYHEAGHALVGLHVHSNDEVQKITIIPRGQAGGYTLSTPKSGDLNLKRKSDLLAMIATAMGGRAAEEEIYGNLEITTGASSDFYKATNIARAMVTQLGMSKLGQVQYVPSQGTLPSNVKLYSEQTAKDIDNEINFIIEEQYKKAKTIIKSNRKELELLVEALLIAETILKSDIDFIHKNTKLPPEILLQKQEQQAKQKLNKSEVKPESETNS

SEQ ID NO: 60793 - DNA, 1914 bp, Rickettsia prowazekii
  CDS (1)..(1914): transl_table=11
atgaataatcaaggtagaagtattttagcttgggcagcactttttatttttgtaatattactttttaatgtttttcaatctgatggtttacttggtgtaagaaataatatcactttctcagattttttgacacgagttgacgaaaagaccattaattcagtaaaaattcaaggtagagtaattgaaggtactgcaaatgacggctctacttttagtacgtattctcctgattatcctgatttagtaaatcgtcttactagcaatgacgttaatattgaagtagtgccgcttgaaacaagaatgaatacctttttaggatttttaatttcttggtttccgatgcttttattaataggtgtttgggttttctttatgcgtcaaatgcacggtggcgggaaagccatggggtttggcaaatctaaagctagattgttatcagataaaggaccaaaaattacctttaaagatgttgcgggtattgatgaagcaaaagaagaattaactgaaatagtcgattttttaagagatccaagtaaatttcaaaagcttggcggtaaaataccgaaaggttgcttacttatcggccctcctggtacaggtaagacacttcttgcgaaagcaattgcaggtgaggctaatgtacctttttttagtatatctggttctgattttgttgaaatgtttgtaggtgttggcgcaagccgcgtgcgcgatatgtttgaacaggggaaacgtaatgccccttgtattatctttattgatgagatcgatgctgtagggcgacatagaggtattggtatgggaggtggcaatgatgagcgtgagcaaaccttaaaccaaatgttagtcgaaatggatgggtttgaggcaaacgagggtgtggtaattattgcagctacaaaccgtccagacgttcttgatcgtgcattactgcgtcctggtagatttgatcgtcaaattgctgttgcaaaccctgatataaatggtcgtgagcaaattctaaaagtacatttaaaaaaaattaaatataatagtacggtactagcacgaattattgctcgtggaactcctggtttctccggtgctgaacttgctaatttagttaatgaagctgcgcttattgctgcgaggcttggtaaaaaagaagtagatatgcacgatatggaagaagcaaaagataaggttttgatgggtgttgtgcgtcgctctattgcaatgtcagagaaggagaaaagattaactgcgtatcatgaaggaggacacgcattagtcgggctttattgtcctgcagcctcgcctattcataaagctacgattataccacgtggtaatgctcttggtatggtacaaagacttcctgaaactgatgaatattctcagaatcgtgaacagatggaatcatctatagcagtttatatggcaggaagagtagcagaagaaattatttttggtagaaataaagtaacatcaggagcttcatcagatataaaaggtgcaactaatattgcaagggcgatggttacaaaagcaggtttaagtgatttaataggaccaatattccacggttcaaacagtgatgatatgtatggtagacaatcaagtaatgaaatttcggaagctactgcagagttaattgatgctgaagtgaaaagaattattacgcaaggttatgaattcgcaaaagatattttaacaaaacatatagatcaacttcatacattagcgaatgctttaattgaatatgaaacattgtctggtcagcaaattaaaaatttacttagtggaagagctttagattcagaagaggaaaacaaatttccttttaatgattcacatactataaaaatagataaagaaaatttgcatgagaaagtaaaatcaactaaagataaaaaagaaaatattatttcatag

SEQ ID NO: 60794 - protein, 637 aa, Rickettsia prowazekii
MNNQGRSILAWAALFIFVILLFNVFQSDGLLGVRNNITFSDFLTRVDEKTINSVKIQGRVIEGTANDGSTFSTYSPDYPDLVNRLTSNDVNIEVVPLETRMNTFLGFLISWFPMLLLIGVWVFFMRQMHGGGKAMGFGKSKARLLSDKGPKITFKDVAGIDEAKEELTEIVDFLRDPSKFQKLGGKIPKGCLLIGPPGTGKTLLAKAIAGEANVPFFSISGSDFVEMFVGVGASRVRDMFEQGKRNAPCIIFIDEIDAVGRHRGIGMGGGNDEREQTLNQMLVEMDGFEANEGVVIIAATNRPDVLDRALLRPGRFDRQIAVANPDINGREQILKVHLKKIKYNSTVLARIIARGTPGFSGAELANLVNEAALIAARLGKKEVDMHDMEEAKDKVLMGVVRRSIAMSEKEKRLTAYHEGGHALVGLYCPAASPIHKATIIPRGNALGMVQRLPETDEYSQNREQMESSIAVYMAGRVAEEIIFGRNKVTSGASSDIKGATNIARAMVTKAGLSDLIGPIFHGSNSDDMYGRQSSNEISEATAELIDAEVKRIITQGYEFAKDILTKHIDQLHTLANALIEYETLSGQQIKNLLSGRALDSEEENKFPFNDSHTIKIDKENLHEKVKSTKDKKENIIS

SEQ ID NO: 60795 - DNA, 1935 bp, Salmonella typhi
  CDS (1)..(1935): transl_table=11
atggcgaaaaacctaatactctggctggtcattgccgttgtgctgatgtcagtattccagagctttgggcccagcgagtctaatggccgtaaggtggattactctaccttcctgcaagaggtcaatcaggaccaggttcgcgaagcgcgtatcaacggacgtgagatcaacgttaccaagaaagatagtaaccgttacacgacttacattccgattaatgatccgaagctgcttgataacctgctgactaaaaacgtcaaggttgttggcgaaccacctgaagagccaagcctgctggcttctatcttcatctcctggttcccgatgctgttgctgatcggcgtctggatcttcttcatgcgtcagatgcagggcggcggtggcaaaggcgccatgtcgttcggtaagagcaaggcgcgtatgctgacggaagatcagatcaaaaccacgtttgctgacgttgcgggttgtgacgaagcgaaagaagaagtggcggaactggttgaatacctgcgtgaaccgagccgtttccagaagctgggcggtaaaattccgaaaggcgtcctgatggtcggcccgccgggtaccggtaaaaccctgctggcaaaagccattgcgggtgaagcgaaggtgccattctttacgatttccggttctgactttgtggaaatgttcgtgggtgtcggcgcatctcgtgtgcgtgacatgttcgaacaagccaagaaagcggcaccgtgcattatcttcatcgatgaaatcgacgccgtaggtcgccagcgtggcgctggtctgggcggtggtcacgatgaacgtgagcagacgttgaaccagatgctggttgagatggacggcttcgaaggtaacgaaggtatcatcgttatcgccgcaactaaccgtccggacgtccttgacccggcgctgctgcgtcctggccgttttgaccgtcaggtggtggtaggcctgccggatgttcgcggtcgtgagcagattctgaaggtgcatatgcgtcgcgtaccgttagcgacggacattgatgcggcgatcattgcgcgcggtacgccgggcttctccggtgcggacctggcgaacctggtcaacgaagcggcgctgtttgccgcacgcggcaacaagcgcgtagtgtcgatggttgagttcgagaaagcgaaagacaaaatcatgatgggcgccgaacgtcgctccatggtgatgacggaagcgcagaaagagtcgaccgcgtaccacgaagcgggccacgcgattatcggtcgcctggtgccggaacacgatccggtgcacaaagtgacgattatcccgcgtggtcgtgcgctgggcgtgaccttcttcttgcctgaaggcgacgcgatcagcgccagccgtcagaagctggaaagccaaatcagcacgctgtacggcggccgtctggcggaagagattatctacggcgttgagcatgtttctaccggcgcgtcgaacgacattaaagtcgcgactaacctggcgcgtaacatggtcacccagtggggcttctcggagaaactcggtccgttgctgtacgcggaagaagagggcgaagtgttcctcggccgtagcgtcgcaaaagcgaaacatatgtctgatgaaactgcgcgtatcatcgaccaggaagtgaaagcgctgattgaacgtaactacaatcgcgctcgtcagatcctgactgacaatatggatattctgcacgcgatgaaagatgcgctgatgaaatatgaaaccatcgatgcgccgcagattgatgacctgatggcgcgtcgtgaagtgcgtccgcctgcgggctgggaagatccaaacggcaccaataactctgacagcaatggtacgcctcaggcgccgcgtccggttgatgaaccacgcacgccgaacccgggcaacacgatgtcagagcagctgggcgacaaataa

SEQ ID NO: 60796 - protein, 644 aa, Salmonella typhi
MAKNLILWLVIAVVLMSVFQSFGPSESNGRKVDYSTFLQEVNQDQVREARINGREINVTKKDSNRYTTYIPINDPKLLDNLLTKNVKVVGEPPEEPSLLASIFISWFPMLLLIGVWIFFMRQMQGGGGKGAMSFGKSKARMLTEDQIKTTFADVAGCDEAKEEVAELVEYLREPSRFQKLGGKIPKGVLMVGPPGTGKTLLAKAIAGEAKVPFFTISGSDFVEMFVGVGASRVRDMFEQAKKAAPCIIFIDEIDAVGRQRGAGLGGGHDEREQTLNQMLVEMDGFEGNEGIIVIAATNRPDVLDPALLRPGRFDRQVVVGLPDVRGREQILKVHMRRVPLATDIDAAIIARGTPGFSGADLANLVNEAALFAARGNKRVVSMVEFEKAKDKIMMGAERRSMVMTEAQKESTAYHEAGHAIIGRLVPEHDPVHKVTIIPRGRALGVTFFLPEGDAISASRQKLESQISTLYGGRLAEEIIYGVEHVSTGASNDIKVATNLARNMVTQWGFSEKLGPLLYAEEEGEVFLGRSVAKAKHMSDETARIIDQEVKALIERNYNRARQILTDNMDILHAMKDALMKYETIDAPQIDDLMARREVRPPAGWEDPNGTNNSDSNGTPQAPRPVDEPRTPNPGNTMSEQLGDK

SEQ ID NO: 60797 - DNA, 2145 bp, Nicotiana tabacum
  CDS (1)..(2145)
atggccaattctctcctctcttccaacttcatgggttctcaaatctttgtctctcctcccacccctaaaacaacaaagtatttccattttcactccaaaagaaagtctttaatccctcaatcaattctcaacaaaaaacccaattcagataattcaaagaatattccttcaaaagctgctttagctgctttactcttttcttcaatcactccacatgcctatgctcttgataatactacccctacagtgccaacccctcgagtgattcaagctgaagcagccaatcccaccacttcaaatccattctctcaaaatataatcttgaatgctccaaagcctcaagcacagaccaatcctgaacttccagaagtttctcaatggagatacagtgaattcttgaatgctgtgaaaaagggtaaagttgaaagggtccgattcagtaaagacggatctgccctccagcttactgctgttgatggccgtagagctactgtaactgtgcctaatgacccggatttaattgacattttggctatgaatggtgttgatatatcagtttctgaaggtgattctgctggtaatgggttgtttaatttaattggaaatttattcccttttattgcttttgctggattgttctatcttttccagagatctcaaggtgggcctggtgggccaggtgggcttggtggccccatggattttggtaggtcaaagtcaaagtttcaagaagttcctgaaactggagtgacttttgctgatgttgctggtgctgatcaagctaaattggagttacaagaagtggttgattttttaaagaatcctgataagtatactgctttaggtgctaaaataccaaaagggtgtcttttggtgggaccacctggtacaggaaagacacttttggctagagcagttgctggtgaagctggtgtaccatttttctcatgtgcagcatcagagtttgttgagttgtttgttggtgttggagcttctagagtgagggatttgttcgagaaggcgaagtcgaaagcgccttgcattgtgtttattgatgagattgatgctgtggggaggcagagaggtgcaggaatgggaggtgggaatgatgagagagagcagactattaatcaactcttgactgaaatggatgggttttctggaaatagtggagtcattgttttggctgcaactaataggcctgatgttcttgattctgcattgttgagacctgggaggttcgatcgacaagtgactgtcgataggcctgatgttgctggtagaatcaagattcttcaggtgcattctagaggaaaggcccttacaaaggatgtggactttgagaagattgccaggagaacaccgggttacactggtgcagatttgcaaaacttgatgaacgaagcagcaatccttgcagctaggcgtgaactaaaggaaataagtaaagatgagatatctgatgctctggagaggataattgccggcccagagaagaaaaatgctgttgtctcagatgagaagaagaagctggtagcttatcatgaggccggccatgccttggttggtgcacttatgcccgagtatgatcctgttgccaagatatctataattcctcgaggccaagctggtggtcttaccttctttgcccccagcgaagaaagacttgagtcgggcttgtacagcaggagctacctagagaatcaaatggcagttgcacttggtgaaagggttgctgaggaggttatttttggacaagataacgtaacaactggggcatctaacgatttcatgcaagtttcacgagtggcaaggcagatggttgagagattagggttcagcaaaaagattggacaagttgccattggaggaggtggaggaaatcctttcctaggtcaacagatgtcaacccagaaagactactccatggctacagccgatgtggttgatgctgaagtaagggaattggttgaaagagcatatgaaagggcaacagagattatcacaacacacattgacatcctacacaagcttgctcagctgttgatagagaaagaaactgttgatggtgaagagttcatgagccttttcatcgatggcaaggccgagctatacatttcttgggtctctaaggaggaggattag

SEQ ID NO: 60798 - protein, 714 aa, Nicotiana tabacum
MANSLLSSNFMGSQIFVSPPTPKTTKYFHFHSKRKSLIPQSILNKKPNSDNSKNIPSKAALAALLFSSITPHAYALDNTTPTVPTPRVIQAEAANPTTSNPFSQNIILNAPKPQAQTNPELPEVSQWRYSEFLNAVKKGKVERVRFSKDGSALQLTAVDGRRATVTVPNDPDLIDILAMNGVDISVSEGDSAGNGLFNLIGNLFPFIAFAGLFYLFQRSQGGPGGPGGLGGPMDFGRSKSKFQEVPETGVTFADVAGADQAKLELQEVVDFLKNPDKYTALGAKIPKGCLLVGPPGTGKTLLARAVAGEAGVPFFSCAASEFVELFVGVGASRVRDLFEKAKSKAPCIVFIDEIDAVGRQRGAGMGGGNDEREQTINQLLTEMDGFSGNSGVIVLAATNRPDVLDSALLRPGRFDRQVTVDRPDVAGRIKILQVHSRGKALTKDVDFEKIARRTPGYTGADLQNLMNEAAILAARRELKEISKDEISDALERIIAGPEKKNAVVSDEKKKLVAYHEAGHALVGALMPEYDPVAKISIIPRGQAGGLTFFAPSEERLESGLYSRSYLENQMAVALGERVAEEVIFGQDNVTTGASNDFMQVSRVARQMVERLGFSKKIGQVAIGGGGGNPFLGQQMSTQKDYSMATADVVDAEVRELVERAYERATEIITTHIDILHKLAQLLIEKETVDGEEFMSLFIDGKAELYISWVSKEED

SEQ ID NO: 60799 - DNA, 2478 bp, Saccharomyces cerevisiae
  CDS (1)..(2478)
atgttgctactttcttggtcaagaattgctactaaggtagttagaaggcccgttcgcttccggtcctattacggcttgacccatatcaagagtttacatactcaatatcggctactcaataggctgcaagagaataagagcggtaacaagaacgaggacaataacgaagacgctaaacttaacaaagaaattcccacagacgaagaggttgaagcaataagaaaacaagtagaaaaatatatcgaacaaactaaaaataatactataccggctaactggaaagaacagaaacgcaaaattgatgaaagtattaggcgtttagaagatgctgtattgaaacaagaatctaacagaattcaagaagaaagaaaggaaaaagaggaggaaaatggtccttcaaaagccaagtcaaacagaacaaaagagcagggctactttgaaggtaacaatagcagaaatattccaccgccaccaccacctcctcccccaaaaccacctctaaatgatcctagtaatcctgtatcgaaaaatgttaacttattccagataggactaacttttttcctcctttcgtttttattggatctcctcaacagtttggaagagcaaagtgagataacgtggcaggattttagagagaaactattggcaaaaggttatgttgcgaagttgattgttgtcaacaagtccatggtgaaagtgatgttaaatgacaacggaaaaaaccaagccgacaattacggtcgcaacttctattatttcacaattggttcaattgatagcttcgaacacaaacttcagaaagcacaggacgaactggacattgataaggatttcagaatacctgtactatatgttcaagaaggcaattgggctaaagctatgttccaaattttgccaactgttttaatgattgcaggtattatttggttgacaagaagatcggcacaagcagcgggcggtagccgtggaggcatatttggtctgagtcgttctaaggctaaaaaatttaacactgaaacagacgttaagatcaagttcaaggacgttgccggatgcgatgaggctaaggaagaaattatggagtttgttagcttcttgaaagaaccttctcgttatgaaaaaatgggagctaaaattcctagaggtgcgattctatctggtccaccaggtaccggtaaaactttgcttgcaaaggcaacagcaggtgaagccggtgttccgttttattttgtttctggttcagaatttgtagaaatgtttgttggtgttggtgcagcaagagtaagagatttgttcaaaactgcaagagaaaatgcaccctcaattgtgtttattgacgaaattgatgctataggaaaagcaagacaaaagggtaatttttcaggtgccaatgatgagagagagaacacgctaaatcaaatgttagtagaaatggatggtttcactccagctgaccacgttgttgttttagctggtaccaatagacccgatattctcgataaagcattattaaggcctggtagatttgacaggcatatcaatatcgacaagcccgaacttgagggtagaaaagccatttttgctgttcatttacatcatttgaaacttgccggggaaatttttgatttgaaaaatagattagcggctttgacgccaggcttttctggtgctgatattgccaacgtttgtaacgaggccgccttgattgctgctagaagtgatgaagatgcagtaaaattgaatcattttgaacaagctatcgaaagagtcatcggtggagtggaacgcaaatccaagctactctctcccgaagagaagaaagtagtggcttaccacgaggctggtcatgctgtatgtggatggtacttaaaatacgcagatcctcttctgaaagtcagtattattccacgtggccagggcgcccttggttatgcacagtatttgccaggtgatatcttcttactaactgaacagcaacttaaggacagaatgaccatgtctctgggtggaagagtttctgaagaattacatttcccatcagttacaagtggcgcatctgatgacttcaaaaaagttactagcatggccacggcaatggtcacagaattaggcatgagtgataaaattggctgggtcaattaccagaagagagatgatagcgatttgacaaaaccattttcggacgagacaggtgacattattgattccgaagtatacagaatcgtccaagaatgccatgacagatgtacaaagctgcttaaagaaaaagcagaagatgtagagaagattgctcaagtactactgaaaaaagaagttttgacaagagaagatatgattgatttacttggtaagcgccctttcccagaaaggaatgatgcttttgataagtacttgaacgattacgaaacggaaaaaatcaggaaggaagaagaaaaaaacgaaaaacgtaatgagcctaagccatctacaaactga

SEQ ID NO: 60800 - protein, 825 aa, Saccharomyces cerevisiae
MLLLSWSRIATKVVRRPVRFRSYYGLTHIKSLHTQYRLLNRLQENKSGNKNEDNNEDAKLNKEIPTDEEVEAIRKQVEKYIEQTKNNTIPANWKEQKRKIDESIRRLEDAVLKQESNRIQEERKEKEEENGPSKAKSNRTKEQGYFEGNNSRNIPPPPPPPPPKPPLNDPSNPVSKNVNLFQIGLTFFLLSFLLDLLNSLEEQSEITWQDFREKLLAKGYVAKLIVVNKSMVKVMLNDNGKNQADNYGRNFYYFTIGSIDSFEHKLQKAQDELDIDKDFRIPVLYVQEGNWAKAMFQILPTVLMIAGIIWLTRRSAQAAGGSRGGIFGLSRSKAKKFNTETDVKIKFKDVAGCDEAKEEIMEFVSFLKEPSRYEKMGAKIPRGAILSGPPGTGKTLLAKATAGEAGVPFYFVSGSEFVEMFVGVGAARVRDLFKTARENAPSIVFIDEIDAIGKARQKGNFSGANDERENTLNQMLVEMDGFTPADHVVVLAGTNRPDILDKALLRPGRFDRHINIDKPELEGRKAIFAVHLHHLKLAGEIFDLKNRLAALTPGFSGADIANVCNEAALIAARSDEDAVKLNHFEQAIERVIGGVERKSKLLSPEEKKVVAYHEAGHAVCGWYLKYADPLLKVSIIPRGQGALGYAQYLPGDIFLLTEQQLKDRMTMSLGGRVSEELHFPSVTSGASDDFKKVTSMATAMVTELGMSDKIGWVNYQKRDDSDLTKPFSDETGDIIDSEVYRIVQECHDRCTKLLKEKAEDVEKIAQVLLKKEVLTREDMIDLLGKRPFPERNDAFDKYLNDYETEKIRKEEEKNEKRNEPKPSTN

SEQ ID NO: 60801 - DNA, 2244 bp, Saccharomyces cerevisiae
  CDS (1)..(2244)
atgaacgtttcaaaaatacttgtgtcgcccacggtcacgacaaatgttttacgcatatttgctcccaggctacctcaaatcggtgcttctttgttagttcaaaaaaaatgggccttaagatcaaagaagttctaccgtttttattctgaaaagaatagcggtgaaatgcctcctaagaaggaagctgatagctctggaaaggcatccaataaatccacgatatcttcaatcgacaattcgcaaccaccacctccatcgaacactaatgataaaaccaaacaagcgaacgtagctgtgtcacatgctatgctagcaactagagaacaagaggccaataaagacttaacgagtcctgatgcacaagcagccttttacaaacttctcttacaatcaaactacccgcaatacgtggtctctaggtttgagacccccggtattgcgtcatcgcctgaatgcatggaactgtacatggaggccctgcagaggataggcagacactcggaggctgatgccgttagacaaaacctactgacagccagctctgctggcgcagttaacccatcattggcgtcatcttcatcaaaccagtcaggttatcatggtaactttccatcgatgtattctccgctttatggatctcgcaaagagccactacatgttgtcgtatctgaatcaacttttactgttgtatcgagatgggtaaagtggctgcttgttttcggtatcttaacctactctttttctgaaggttttaaatacatcacagaaaatacaacgctactaaagtcgtcagaagtagccgacaaatcagttgatgtagctaagacaaatgttaaatttgatgatgtctgcggttgtgatgaggcccgtgcggaattggaagaaattgttgatttcctgaaagatccaactaagtacgagtccttgggtggtaaactaccaaagggtgtactgttgactggacctcctggtacaggtaaaactttgttggctagggccactgccggagaggctggtgtagattttttctttatgtcaggttctgaatttgatgaagtttacgtcggtgttggtgctaaacgtatccgtgatttgtttgctcaagcgcgttctcgtgcaccagctattatttttattgatgaattagatgccatcggtggtaagcgtaatccaaaggaccaagcttacgccaaacaaacgttgaatcagttattggtcgaattagatggtttctcacaaacaagtggaattattattattggtgccacaaatttccctgaggctttagataaggcgttaactagaccaggtagatttgataaggttgtgaatgtggatttgccagatgttcgtggtcgtgctgatattttaaagcatcacatgaagaagattacattggcagacaatgtggatccaactattattgcgcgtggtacccccggtttatcaggcgctgagctggcaaatttagtcaaccaagcagcagtttacgcgtgtcaaaaaaatgctgtttccgttgatatgtcccacttcgagtgggctaaggataagatattgatgggtgctgagagaaagactatggtcttaacagatgcagccagaaaggccactgctttccacgaggctggacatgccattatggccaaatacaccaatggtgctaccccgctatacaaggccacgatattgcctagaggtagggcattgggtattacttttcaattgccagaaatggataaggtcgacatcaccaaaagggagtgtcaagccagactggacgtgtgcatggggggcaaaattgcagaagaattaatttatggtaaagataacaccacaagtggttgtgggtctgacttgcaaagcgccaccggcacagcaagggctatggttactcaatatggtatgagtgatgatgtaggtcccgttaacttgtcagaaaattgggaatcttggtctaataagattcgcgatattgctgataatgaagtgattgaacttttgaaggactccgaggaaagagcaagaagactattaactaagaaaaatgttgagctacatagacttgcgcaaggtcttattgaatatgaaactctagatgcccacgaaatcgaacaagtttgtaaaggtgaaaaactggacaaactgaaaacttccaccaatacagtcgtagaaggaccagacagtgatgaacgtaaagatataggcgatgataaacccaaaattcctacaatgttaaatgcatga

SEQ ID NO: 60802 - protein, 747 aa, Saccharomyces cerevisiae
MNVSKILVSPTVTTNVLRIFAPRLPQIGASLLVQKKWALRSKKFYRFYSEKNSGEMPPKKEADSSGKASNKSTISSIDNSQPPPPSNTNDKTKQANVAVSHAMLATREQEANKDLTSPDAQAAFYKLLLQSNYPQYVVSRFETPGIASSPECMELYMEALQRIGRHSEADAVRQNLLTASSAGAVNPSLASSSSNQSGYHGNFPSMYSPLYGSRKEPLHVVVSESTFTVVSRWVKWLLVFGILTYSFSEGFKYITENTTLLKSSEVADKSVDVAKTNVKFDDVCGCDEARAELEEIVDFLKDPTKYESLGGKLPKGVLLTGPPGTGKTLLARATAGEAGVDFFFMSGSEFDEVYVGVGAKRIRDLFAQARSRAPAIIFIDELDAIGGKRNPKDQAYAKQTLNQLLVELDGFSQTSGIIIIGATNFPEALDKALTRPGRFDKVVNVDLPDVRGRADILKHHMKKITLADNVDPTIIARGTPGLSGAELANLVNQAAVYACQKNAVSVDMSHFEWAKDKILMGAERKTMVLTDAARKATAFHEAGHAIMAKYTNGATPLYKATILPRGRALGITFQLPEMDKVDITKRECQARLDVCMGGKIAEELIYGKDNTTSGCGSDLQSATGTARAMVTQYGMSDDVGPVNLSENWESWSNKIRDIADNEVIELLKDSEERARRLLTKKNVELHRLAQGLIEYETLDAHEIEQVCKGEKLDKLKTSTNTVVEGPDSDERKDIGDDKPKIPTMLNA

SEQ ID NO: 60803 - DNA, 2130 bp, Oryza sativa
  CDS (1)..(2130)
atggcgtggaggcgcgtcctttcgcagcttgcgaggagtcgaccagcatccacaatctacaatgaactgataacctccagaccttcgtggctgcttagaggtgacgtcaacggtggtggcacacttaaaaacttaaatgagaggtatcagtcaagctttgttggtagcttagcacgcagggtgcaaaacctcgacgttccaagtgaagcctctctgctgaaagaaatatataaaagtgacccagaacgtgtcatacaaatatttgaaagccagccatggttgcactccaatcgtttagcactttcagagtatgttaaagctcttgtcaaggttgataggctggatgatagcaccttgcttaaaacactacggagaggtatggctgtttcaggaggagagggagaaagagttggtagctcttctgcattaaagagtgctggacaagcgacaaaagatggaattcttggcactgcaaacgcacccattcacatggtgacatcagaaacaggccattttaaggatcagatttggcgtacctttcgaagccttgcactaactttccttgtaatttcgggcattggggctcttatagaggatagaggaataagcaaaggtcttggtctaagtcaagaagttcaaccaatcatggattctaaaacaaaattcagtgatgtaaagggtgttgatgaagccaaagctgaacttgaggaaatagttcactatcttcgagatcccaagcgttttactcatcttggtggaaaactgccaaaaggtgtcttgctggttggccctcctggcactgggaagaccatgttagcgagggctgttgctggggaagctggtgtccctttcttctcatgcagcggtagtgagtttgaggagatgtttgtaggtgtaggagctagaagagtcagggacctttttgctgcagctaaaaaacgttctccctgtatcatattcatggatgaaattgatgcaatcggtgggagcagaaatccaaaggatcaacagtacatgaggatgaccttgaaccagttgcttgtcgaactggatggctttaagcagaatgagggaataattgtcattgctgcgaccaactttcctcagtccctagataaagcactagtgagacctgggcgctttgaccggcatattgttgttccgaatcctgatgttgaaggccggcggcaaatcctagagtcccatatgttgaaggtcttgaagagtgatgatgtggatttgatgatcattgccaggggaacacctggattctcaggtgcagaccttgctaacttggtaaatgtggctgctcttaaggctgccatggatggggcaaaagccgttacaatgaatgaccttgagtatgccaaggaccggatcatgatgggcagtgagcgcaagtcagcagttatttctgatgaatcccggaaattgacggcgtaccatgagggagggcacgcccttgttgccatccacactgaaggtgctcgccctgtccacaaagccaccatagtgcccaggggaaggacccttgggatggtgtcccaactcccagaaaaagatgagacaagcttctcacggaaacagatgctggcatggctggatgtctccatggcaggacgggtggcggaggagcttatttttggggatagcgaggtaacatccggtgcatcgtctgatttccagaacgcgaccaaaatggcaagagcaatggttacgaaatatggcatgagcaagcagcttggctttgtctcttacaattatgaggatgatggaaagagcatgagcacagaaacaaggcttctgattgagcaggaggtgaagagcctgctggagaatgcctacaacaatgcaaagaccatcctcacaaaacacagcaaggagcaccatgttctagcccaagcacttcttgagcacgagactctcaccggagcccagataaagaagatcttggcccaggcaaatagcacacagcagcagcaggagcatgctgttgaagctccacggaagacgccagctgcgccgtcgtctccagctgcgtcggcggccgcagcggcggcggcgacggcggccgccgcagcaaaacaagctgcggcgaaagccaagggtgttgctggtattggatcttga

SEQ ID NO: 60804 - protein, 709 aa, Oryza sativa
MAWRRVLSQLARSRPASTIYNELITSRPSWLLRGDVNGGGTLKNLNERYQSSFVGSLARRVQNLDVPSEASLLKEIYKSDPERVIQIFESQPWLHSNRLALSEYVKALVKVDRLDDSTLLKTLRRGMAVSGGEGERVGSSSALKSAGQATKDGILGTANAPIHMVTSETGHFKDQIWRTFRSLALTFLVISGIGALIEDRGISKGLGLSQEVQPIMDSKTKFSDVKGVDEAKAELEEIVHYLRDPKRFTHLGGKLPKGVLLVGPPGTGKTMLARAVAGEAGVPFFSCSGSEFEEMFVGVGARRVRDLFAAAKKRSPCIIFMDEIDAIGGSRNPKDQQYMRMTLNQLLVELDGFKQNEGIIVIAATNFPQSLDKALVRPGRFDRHIVVPNPDVEGRRQILESHMLKVLKSDDVDLMIIARGTPGFSGADLANLVNVAALKAAMDGAKAVTMNDLEYAKDRIMMGSERKSAVISDESRKLTAYHEGGHALVAIHTEGARPVHKATIVPRGRTLGMVSQLPEKDETSFSRKQMLAWLDVSMAGRVAEELIFGDSEVTSGASSDFQNATKMARAMVTKYGMSKQLGFVSYNYEDDGKSMSTETRLLIEQEVKSLLENAYNNAKTILTKHSKEHHVLAQALLEHETLTGAQIKKILAQANSTQQQQEHAVEAPRKTPAAPSSPAASAAAAAAATAAAAAKQAAAKAKGVAGIGS

SEQ ID NO: 60805 - DNA, 2469 bp, Oryza sativa
  CDS (1)..(2469)
atggcctccgcctccgccgccgccgaaaccctcgcggcggcgtcgctccccgtcgcgtcgccttcgcggtcgctgctgcggccgctccccaggagagcgtccgcgggaggcggctgctccgcgtccgtacgaatctccgccgtgccgccgcgggggctcgggttcgcggtcgtccagcgccgcgtcctccgccgcccgccggcggcgcgcgccaacgtcgagcgcgaaggggacggggccgaagcgtccgggccaggagaggcgtcgtcctcctcctctggagatggggaccgcgacggggcggcggcggcggcggaggcaggaggtgatggcgccagcacgagcaccacgagcgcggccgcgacgcctccgcagccgccctcatcgaagaggggggagaacaagtggcggcggaagctgattaagggcggaggcgttgggcggtggctttgggagcccatagttcaggggagggaaatggggttcctcctgctccagcttgggttcgccatattcgcgctccgaatgctgcggcccgagatcgcgctgcctggctcagagccccggccacagacaacgtacgtcagcgtcccatacagcgacttcctggcgagcatagacaagaaccaggtgaagaaggtcgaggtggacggggtgcacatcatgttcaggctccgtcctgaggttgaggcccgtgcaatggagcagccacaggtgcagcgtggaacagattctgttgctgataatgctggagttccaaggcgaattgtcttcacaacaacacgtccagtggacattaagacaccatatgaaaaaatggtggagaatagtgttgagtttgggtcgccggacaaaaggtctggtggcttgctcaattcggctttggtggctcttatttatgttgtattaattgctgtagttctgcagcgattgccaataagcttttctcagcattcagcaggccagctgaggaatcggaagaattcaaactctggtggggccaaagtttcagaaagtaccgatatagttacatttgctgatgtggctggagtagatgaggccaaagaagagctggaagagattgtggagttcctaaggaacccagaaagatatattcgtcttggtgcgcgacctccacgaggtgtcttgttggtgggccttccaggaactggaaagacgcttcttgcaaaagctgtcgcaggggaagctgaagtcccattcataagttgctctgcaagtgaatttgtggagttgtatgtaggcatgggagcagctcgagtgcgtgacctatttgctagagctaaaaaggaatctccttcgattatttttattgatgagattgatgctgtggcaaaaagccgtgatggccgttatcgtatcgtcagtaatgatgagcgagagcagacactaaatcaattactcacggaaatggatggatttgacaccaactcagctgtcattgtacttggagcaacaaaccgagcagatgttttagatcctgccctccgacgccctgggagatttgaccgtgtagttatggttgaagctcccgacagatttggaagagaatctattctgaaagttcatgtgagcagaaaggagcttccgcttggtaaagatgtagatcttagtgacattgctgcaatgacaactggttttactggggcagaccttgcaaatttagtaaatgaagctgctttgttggctgggagatcaaataaagaaatagtggaaaaaattgacttcatctgtgcagtggagcgctctattgctggcattgagaaaaagcatgcaaagctgaagggtaatgaaaaggctgttgttgcacggcatgaagttggtcatgccgttgtgggaactgctgtagcaaacctattgccagggcagccacgtgtggagaaattgagtatattgccaaggtcaggtggtgcattgggctttacatacacccctcccacaacagaagatagatatttgctctttgttgatgaactgcgtggacgtctagtaacacttttgggtggaagggcagcagaggaagtagtactgtcagggcgtgtttctactggagcacttgatgacataaggcgtgccactgacatggcatacaaggctgtagcagagtatggtcttaatcagcgcataggtccgatatcggtggcaacattgtcaaatggtgggctagatgaatccggaggctctccatggggaagggatcagggccatctagttgaccttgtccagcgggaagtaaaagcccttcttcaatcagcccttgatgtcgctctttcagttgtccgtgctaatcctacagttttggaaggccttggagcatatttagaagagaatgaaaaggttgagggcgaggagcttcaagagtggctcaagtcggttgttgcaccaaaagaattgacctcatttataagaggaaagcaagagcaggttcttcagctggaagcaggctcctag

SEQ ID NO: 60806 - protein, 822 aa, Oryza sativa
MASASAAAETLAAASLPVASPSRSLLRPLPRRASAGGGCSASVRISAVPPRGLGFAVVQRRVLRRPPAARANVEREGDGAEASGPGEASSSSSGDGDRDGAAAAAEAGGDGASTSTTSAAATPPQPPSSKRGENKWRRKLIKGGGVGRWLWEPIVQGREMGFLLLQLGFAIFALRMLRPEIALPGSEPRPQTTYVSVPYSDFLASIDKNQVKKVEVDGVHIMFRLRPEVEARAMEQPQVQRGTDSVADNAGVPRRIVFTTTRPVDIKTPYEKMVENSVEFGSPDKRSGGLLNSALVALIYVVLIAVVLQRLPISFSQHSAGQLRNRKNSNSGGAKVSESTDIVTFADVAGVDEAKEELEEIVEFLRNPERYIRLGARPPRGVLLVGLPGTGKTLLAKAVAGEAEVPFISCSASEFVELYVGMGAARVRDLFARAKKESPSIIFIDEIDAVAKSRDGRYRIVSNDEREQTLNQLLTEMDGFDTNSAVIVLGATNRADVLDPALRRPGRFDRVVMVEAPDRFGRESILKVHVSRKELPLGKDVDLSDIAAMTTGFTGADLANLVNEAALLAGRSNKEIVEKIDFICAVERSIAGIEKKHAKLKGNEKAVVARHEVGHAVVGTAVANLLPGQPRVEKLSILPRSGGALGFTYTPPTTEDRYLLFVDELRGRLVTLLGGRAAEEVVLSGRVSTGALDDIRRATDMAYKAVAEYGLNQRIGPISVATLSNGGLDESGGSPWGRDQGHLVDLVQREVKALLQSALDVALSVVRANPTVLEGLGAYLEENEKVEGEELQEWLKSVVAPKELTSFIRGKQEQVLQLEAGS

SEQ ID NO: 60807 - DNA, 2469 bp, Oryza sativa
  CDS (1)..(2469)
atgagcctcgcctcgctcgcccgcgcgctctcccgccgctccgcgccctcctcctcccgcgcgcgccagggtttctccctcggtgggctaggtgggaccaccaggtcgccgccgccgccgtcgtcgccgctcccatcgctccatggcggggagggcggtgggctgggattgggattcgtccgcgggtacctgacggcggcgctggggaggcccgccgcggtgaaggctgggacagactggaggtccatcctcgcgaacccgcagttccggaggctcttctctgacgggtccaagaagaattacgagaactactaccccaagggcaagaaggaggcgccgaagggggatgggagtaacaagtctgattcgaagcaagattcaagtacagacgatcaatggaatttccaggagactgcctcaaagcaattgcaaaattttctggcacctctactgtttcttggactgatgctctcgtccttgtcgtcgagctcatcagaccaaaaggagataagcttccaggaattcaagaataagctactagaacctggtttagttgaccgcattgttgtttcaaataaatcagtggcaaaggtctatgtcaggagttcaccacagtcgaacagccaaggtcagaacactgatgccatcattaccaccaatgatgttccgagcaagcatactcccagcagatacaagtattacttcaatattggaagtgttgattcctttgaagaaaagttagaggaagcccaggaagctttgggagtagatccacatgattttgttccagtaacttatgttgctgaagtgaattggttccaagaagtaatgagatttgccccaacagtctttcttgttgggctaatatatttgatgagcaaaagaatgcagagtggttttaatattggaggtggacctggcaagggtggccgtggtatttttaatattggaaaagctcaggtgacgaagatggacaaaaattccaaaaacaaggtgttttttaaggatgtagctggttgtgatgaagctaagcaagaaataatggagtttgtgcatttccttaagaatcccaagaagtatgaagagttaggagctaagataccaaaaggtgccttgcttgtgggtcctcctggaacaggcaagactctgcttgccaaagctacagcaggagagtctggtgtgcccttcctgtctatttctggatcagatttcatggaaatgtttgttggggttggaccatccagggtacggaacttattccaagaagctcggcaatgtgctcccagtattatatttattgatgagatcgatgcgattggtcgtgcaagaggccgtggagggttttctggttcaaatgatgagcgtgaaagtactttgaaccagctgcttgtagagatggatgggtttggtacaacttctggtgttgttgttcttgctggtacaaataggcctgatattttagataaagccttgctaaggcctggaagatttgatcgccaaataacaatagacaagccagatataaagggccgtgatcaaatattccgcatatatcttaaaaaacttaaacttgacaatgagccatcattttattcgcaaaggctagcggctttgacacctggatttgcaggagctgacattgccaatgtttgtaatgaagctgctttaattgctgcgagaagtgaggaaactcagattaccatgcaacattttgaatctgcaattgatagaattattggtggtttggagaagaaaaacaaggtcatcagcaaactggagcgccgcactgttgcttaccatgaatctggtcatgctgttgctggatggtttttagagcatgcagagcctcttctgaaagttacaattgttccccgtggaacagctgctttaggatttgcacagtatgttccaaatgaaaatcttttgatgacaaaagaacagctttttgatatgacatgcatgacattaggtggccgagctgcagaggaggttttgattggaaggatctccactggtgctcagaatgacctggagaaagttaccaaaatgacctatgcgcaggttgctgtatacggtttcagcgaaaaggttgggcttctgtccttccctcagagggacgatggctttgaaatgaccaaaccttacagcaaccaaacagcatccatcatcgacgatgaggtgagggaatgggttggcaaggcgtacaaaaaaacagtggaactgataactgagcacaaggagcaagtcgccaaaatcgctgaaatgctgcttgagaaggaggtcctccaccaggacgatttggttagggtattaggagaacggcctttcaaggcatccgagccaactaactacgacctcttcaagcaagggttccaggatgaagaagacagcaagaaccaagaggcggccaaaacccctcagcctgatgatgacggaacaccctcgcttggcgaggttgtacccacgtaa

SEQ ID NO: 60808 - protein, 822 aa, Oryza sativa
MSLASLARALSRRSAPSSSRARQGFSLGGLGGTTRSPPPPSSPLPSLHGGEGGGLGLGFVRGYLTAALGRPAAVKAGTDWRSILANPQFRRLFSDGSKKNYENYYPKGKKEAPKGDGSNKSDSKQDSSTDDQWNFQETASKQLQNFLAPLLFLGLMLSSLSSSSSDQKEISFQEFKNKLLEPGLVDRIVVSNKSVAKVYVRSSPQSNSQGQNTDAIITTNDVPSKHTPSRYKYYFNIGSVDSFEEKLEEAQEALGVDPHDFVPVTYVAEVNWFQEVMRFAPTVFLVGLIYLMSKRMQSGFNIGGGPGKGGRGIFNIGKAQVTKMDKNSKNKVFFKDVAGCDEAKQEIMEFVHFLKNPKKYEELGAKIPKGALLVGPPGTGKTLLAKATAGESGVPFLSISGSDFMEMFVGVGPSRVRNLFQEARQCAPSIIFIDEIDAIGRARGRGGFSGSNDERESTLNQLLVEMDGFGTTSGVVVLAGTNRPDILDKALLRPGRFDRQITIDKPDIKGRDQIFRIYLKKLKLDNEPSFYSQRLAALTPGFAGADIANVCNEAALIAARSEETQITMQHFESAIDRIIGGLEKKNKVISKLERRTVAYHESGHAVAGWFLEHAEPLLKVTIVPRGTAALGFAQYVPNENLLMTKEQLFDMTCMTLGGRAAEEVLIGRISTGAQNDLEKVTKMTYAQVAVYGFSEKVGLLSFPQRDDGFEMTKPYSNQTASIIDDEVREWVGKAYKKTVELITEHKEQVAKIAEMLLEKEVLHQDDLVRVLGERPFKASEPTNYDLFKQGFQDEEDSKNQEAAKTPQPDDDGTPSLGEVVPT

SEQ ID NO: 60809 - DNA, 2004 bp, Oryza sativa
  CDS (1)..(2004)
atgctctcgtccttgtcgtcgagctcatcagaccaaaaggagataagcttccaggaattcaagaataagctactagaacctggtttagttgaccgcattgttgtttcaaataaatcagtggcaaaggtctatgtcaggagttcaccacagtcgaacagccaaggtcagaacactgatgccatcattaccaccaatgatgttccgagcaagcatactcccagcagatacaagtattacttcaatattggaagtgttgattcctttgaagaaaagttagaggaagcccaggaagctttgggagtagatccacatgattttgttccagtaacttatgttgctgaagtgaattggttccaagaagtaatgagatttgccccaacagtctttcttgttgggctaatatatttgatgagcaaaagaatgcagagtggttttaatattggaggtggacctggcaagggtggccgtggtatttttaatattggaaaagctcaggtgacgaagatggacaaaaattccaaaaacaaggtgttttttaaggatgtagctggttgtgatgaagctaagcaagaaataatggagtttgtgcatttccttaagaatcccaagaagtatgaagagttaggagctaagataccaaaaggtgccttgcttgtgggtcctcctggaacaggcaagactctgcttgccaaagctacagcaggagagtctggtgtgcccttcctgtctatttctggatcagatttcatggaaatgtttgttggggttggaccatccagggtacggaacttattccaagaagctcggcaatgtgctcccagtattatatttattgatgagatcgatgcgattggtcgtgcaagaggccgtggagggttttctggttcaaatgatgagcgtgaaagtactttgaaccagctgcttgtagagatggatgggtttggtacaacttctggtgttgttgttcttgctggtacaaataggcctgatattttagataaagccttgctaaggcctggaagatttgatcgccaaataacaatagacaagccagatataaagggccgtgatcaaatattccgcatatatcttaaaaaacttaaacttgacaatgagccatcattttattcgcaaaggctagcggctttgacacctggatttgcaggagctgacattgccaatgtttgtaatgaagctgctttaattgctgcgagaagtgaggaaactcagattaccatgcaacattttgaatctgcaattgatagaattattggtggtttggagaagaaaaacaaggtcatcagcaaactggagcgccgcactgttgcttaccatgaatctggtcatgctgttgctggatggtttttagagcatgcagagcctcttctgaaagttacaattgttccccgtggaacagctgctttaggatttgcacagtatgttccaaatgaaaatcttttgatgacaaaagaacagctttttgatatgacatgcatgacattaggtggccgagctgcagaggaggttttgattggaaggatctccactggtgctcagaatgacctggagaaagttaccaaaatgacctatgcgcaggttgctgtatacggtttcagcgaaaaggttgggcttctgtccttccctcagagggacgatggctttgaaatgaccaaaccttacagcaaccaaacagcatccatcatcgacgatgaggtgagggaatgggttggcaaggcgtacaaaaaaacagtggaactgataactgagcacaaggagcaagtcgccaaaatcgctgaaatgctgcttgagaaggaggtcctccaccaggacgatttggttagggtattaggagaacggcctttcaaggcatccgagccaactaactacgacctcttcaagcaagggttccaggatgaagaagacagcaagaaccaagaggcggccaaaacccctcagcctgatgatgacggaacaccctcgcttggcgaggttgtacccacgtaa

SEQ ID NO: 60810 - protein, 667 aa, Oryza sativa
MLSSLSSSSSDQKEISFQEFKNKLLEPGLVDRIVVSNKSVAKVYVRSSPQSNSQGQNTDAIITTNDVPSKHTPSRYKYYFNIGSVDSFEEKLEEAQEALGVDPHDFVPVTYVAEVNWFQEVMRFAPTVFLVGLIYLMSKRMQSGFNIGGGPGKGGRGIFNIGKAQVTKMDKNSKNKVFFKDVAGCDEAKQEIMEFVHFLKNPKKYEELGAKIPKGALLVGPPGTGKTLLAKATAGESGVPFLSISGSDFMEMFVGVGPSRVRNLFQEARQCAPSIIFIDEIDAIGRARGRGGFSGSNDERESTLNQLLVEMDGFGTTSGVVVLAGTNRPDILDKALLRPGRFDRQITIDKPDIKGRDQIFRIYLKKLKLDNEPSFYSQRLAALTPGFAGADIANVCNEAALIAARSEETQITMQHFESAIDRIIGGLEKKNKVISKLERRTVAYHESGHAVAGWFLEHAEPLLKVTIVPRGTAALGFAQYVPNENLLMTKEQLFDMTCMTLGGRAAEEVLIGRISTGAQNDLEKVTKMTYAQVAVYGFSEKVGLLSFPQRDDGFEMTKPYSNQTASIIDDEVREWVGKAYKKTVELITEHKEQVAKIAEMLLEKEVLHQDDLVRVLGERPFKASEPTNYDLFKQGFQDEEDSKNQEAAKTPQPDDDGTPSLGEVVPT

SEQ ID NO: 60811 - DNA, 2046 bp, Oryza sativa
  CDS (1)..(2046)
atgtcgctgacgacgacgacgagccggctgccgatctgcagggcgcagggcggcggcgtcgccaaggagaagcggacgacgccgccacctgccaagatcacgccgccttcgtcgtcgtcgtcggaggccgccggactaagcaggaggaggctgctgcaatcggccggcctcgggctcggcctcggcctaacggcggcgaggccggcgcgagccgaggcgacggcgccggaggaggtgacgtcgaacaggatgtcctactcccggttcctggagtacctcgacgccggcgccgtcaagaaggtggacttcttcgagaacggcacggtggccgtcgccgaggtggacgacgcggcggcgctgtcgagggtgcaccgcgtcaaggtgcagctcccgggcctccccgccgagctcgtccggaagctccgggacaagggcgtcgacttcgcggcgcacccggtggagcccagcgccggggtgatgctgctcgacctcctcgtcaacttcggcttccctctcctcttcgtcgcctcgctcctgtggcggtcgccgaccatgaacaaccccggcggcgggcctagcctcccgttcgggctcggcaagtccaaggccaagttccagatggagcccaaaaccggcgtcacgttcgacgacgtcgccggcgtggacgaggccaagcaggacttccaggagatcgtccagttcttgaagttcccggagaagttcacggcggtcggtgcgaggacccccaagggcgtgctgctggtcggcccgccggggacggggaagacgctgctggccaaggcgatcgccggcgaggccggcgtgcccttcttctcgctgtccggctccgagttcatcgagatgttcgtcggcgtcggcgcgtcgcgggtgcgcgacctgttcgacagggccaaggcgagcgcgccgtgcctcgtcttcatcgacgagatcgacgccgtggggcggcagcgcggcgcggggatcggcggcgggaacgacgagagggagcagacgctgaaccagctgctcaccgagatggacgggttcggcggcggcgacggcggcgtcgtcgtgatcgccgccaccaaccggccggagatcctcgacgcggcgctgctccggccggggcgcttcgaccggcgggtgtccgtcggcctccccgacgtgcgcggacgggaggagatcctcctcgtgcacggcgccaacaagcggctcgaccccggcgtgtcgctcgccgtggtcgccatgcgcacgccggggttcagcggcgccgacctcgccaacctcatgaacgaggccgccatcctcgccggccgccgcggcaaggaccgcatcaccgtcagcgagatcgacgactccatcgaccgcatcgtcgccggcctcgagggcaccagcatgaccgacggcaagagcaagatgctcgtcgcctaccatgagatcggccacgccgtgtgcgcgactttgacggcggggcacgacgaggtgcagaaggtgacgctgatcccgcgggggcaggcgcgcgggctgacgtggttcctccccggcgaggaggacccggcgctggtgtcgaggcagcagatcttcgcggggatcgtgggcgggctgggcggccgcgccgccgaggaggtcgtcttcggcgagccggaggtgacgaccggcgcggcgggggacctgcagcaggtgacgcgggtggcgcggcggatggtgacggcgttcgggatgtcggagatcgggccgtgggcgctggcggagccggcggcgcagggcggcgacgtggtgctgcggatgctggcccggagctccatgtcggagaggctcgccgccgacatcgacgccgcggtgaggaccatcgtcgacgaggcgtacgaggtggccaaggcgcacgtgaggaggaaccgcgccgccatcgaccagctggtggacgtgctcatggagaaggagacgctcggcggcgacgagttcagggcgatcttgtcggagcacgtcgacatcggcaaggagcggcgggaaacggcggcgaggacacagcagctggccactgcttga

SEQ ID NO: 60812 - protein, 681 aa, Oryza sativa
MSLTTTTSRLPICRAQGGGVAKEKRTTPPPAKITPPSSSSSEAAGLSRRRLLQSAGLGLGLGLTAARPARAEATAPEEVTSNRMSYSRFLEYLDAGAVKKVDFFENGTVAVAEVDDAAALSRVHRVKVQLPGLPAELVRKLRDKGVDFAAHPVEPSAGVMLLDLLVNFGFPLLFVASLLWRSPTMNNPGGGPSLPFGLGKSKAKFQMEPKTGVTFDDVAGVDEAKQDFQEIVQFLKFPEKFTAVGARTPKGVLLVGPPGTGKTLLAKAIAGEAGVPFFSLSGSEFIEMFVGVGASRVRDLFDRAKASAPCLVFIDEIDAVGRQRGAGIGGGNDEREQTLNQLLTEMDGFGGGDGGVVVIAATNRPEILDAALLRPGRFDRRVSVGLPDVRGREEILLVHGANKRLDPGVSLAVVAMRTPGFSGADLANLMNEAAILAGRRGKDRITVSEIDDSIDRIVAGLEGTSMTDGKSKMLVAYHEIGHAVCATLTAGHDEVQKVTLIPRGQARGLTWFLPGEEDPALVSRQQIFAGIVGGLGGRAAEEVVFGEPEVTTGAAGDLQQVTRVARRMVTAFGMSEIGPWALAEPAAQGGDVVLRMLARSSMSERLAADIDAAVRTIVDEAYEVAKAHVRRNRAAIDQLVDVLMEKETLGGDEFRAILSEHVDIGKERRETAARTQQLATA

SEQ ID NO: 60813 - DNA, 2031 bp, Oryza sativa
  CDS (1)..(2031)
atggctccaacatccatgagccttgctgcaaagacgccgcttcccttctcgacacttccttcgagtggcgttgcacagaggccagtttctgtgactgcctccctcgagcacaagactaatgatgccagaaggaagttcctaaagctcgcgcttgggaacctcggggtcgggcttcccaccttgttgggtgctaagagagctcttgctgaagagcaaggtgtctcgtcgtcgagaatgtcttactcgaggttccttgagtatctagacaaggacagagtgaagaaggttgatttgtttgagaatggcacgattgccattgtagaggctatttctcctgagctcggcaaccgtgtgcagagagttcgtgtgcagcttcctggtctaagccaggagcttctccagaagttgagggaaaagaatatcgattttgctgcacacagcaaccaggaggactctggttctcttctgttcaacctgatcggaaacttggctttcccacttatccttattggtggtctatttttgctgtcaagaagagcacaaggtggccttggtggacctaacggtcctggctttccccttggttttggtcaatctagggccaagtttcagatggaacccaacactggtgttacatttgatgatgttgctggtgtcgatgaagcaaagcaagacttcatggaagtggttgagttcttgaagaaaccagaaaggttcaccgctgttggtgctcgcatccctaagggtgttctgcttgttggtcctcctggaactggtaagactttgcttgccaaggctattgcaggggaagctggtgtgccgtttttctcgatatcaggatctgagtttgtggagatgtttgtcggagttggtgcctcccgggttcgtgatctcttcaagaaggcaaaggagaatgctccttgcatagtatttgttgatgaaattgatgctgttgggaggcaaagagggacaggtattggtggtggaaatgatgaaagggagcagactttgaatcagttgctgactgagatggatggttttgaggggaacactggaatcattgttattgctgccaccaacagggctgatatcctggattctgctttactcagacctggacgttttgacagacaggtaagtgttgatgttcctgatgtacgcggaaggacagagattcttaaggtgcacggtagcaacaagaagttcgatactgatgtctctcttgaagtcatagcaatgagaacacctggctttagtggagcagacttggcaaatcttctaaatgaagcagccatattagcgggccgacgtggtcggacagcaatttcctcaaaggagattgatgattcaattgacagaatagtggctggtatggaaggaactgtgatgacagatgggaagagcaaaagtcttgttgcttaccatgaagttgggcatgcaatttgtggaactttgacgcctggccacgaccctgtccaaaaggttactttgatcccgaggggtcaagctcgtggtctcacatggttcattccaatggacgacccaacgctcatctccaggcaacaactgttcgccagaattgttggtggccttggcggtcgtgctgctgaggagatcatttttggggagcctgaggtgaccacaggagctgctggtgacttgcagcaaattactggcctagccaagcagatggtggttacattcggtatgtcggacattggtccgtggtcgctaatggactcaggagctcagagcggcgatgtcatcatgaggatgatggcaaggaactccatgtcggagaagctcgcggaggacatcgataccgctgtgaagcggttgtccgatgaggcctacgagatcgctttgagccagatcaggagcaaccgggaggccatggacaagatcgtggaggtgctccttgagaaggagacattgagtggtgacgagttcagggcgattctctccgagttcacggagatccctgtcgagaaccgggttcccccagccacgccggcagctctccctgcctaa

SEQ ID NO: 60814 - protein, 676 aa, Oryza sativa
MAPTSMSLAAKTPLPFSTLPSSGVAQRPVSVTASLEHKTNDARRKFLKLALGNLGVGLPTLLGAKRALAEEQGVSSSRMSYSRFLEYLDKDRVKKVDLFENGTIAIVEAISPELGNRVQRVRVQLPGLSQELLQKLREKNIDFAAHSNQEDSGSLLFNLIGNLAFPLILIGGLFLLSRRAQGGLGGPNGPGFPLGFGQSRAKFQMEPNTGVTFDDVAGVDEAKQDFMEVVEFLKKPERFTAVGARIPKGVLLVGPPGTGKTLLAKAIAGEAGVPFFSISGSEFVEMFVGVGASRVRDLFKKAKENAPCIVFVDEIDAVGRQRGTGIGGGNDEREQTLNQLLTEMDGFEGNTGIIVIAATNRADILDSALLRPGRFDRQVSVDVPDVRGRTEILKVHGSNKKFDTDVSLEVIAMRTPGFSGADLANLLNEAAILAGRRGRTAISSKEIDDSIDRIVAGMEGTVMTDGKSKSLVAYHEVGHAICGTLTPGHDPVQKVTLIPRGQARGLTWFIPMDDPTLISRQQLFARIVGGLGGRAAEEIIFGEPEVTTGAAGDLQQITGLAKQMVVTFGMSDIGPWSLMDSGAQSGDVIMRMMARNSMSEKLAEDIDTAVKRLSDEAYEIALSQIRSNREAMDKIVEVLLEKETLSGDEFRAILSEFTEIPVENRVPPATPAALPA

SEQ ID NO: 60815 - DNA, 2061 bp, Oryza sativa
  CDS (1)..(2061)
atggcgccgccgtgctccatctcctccgcctcccacctcctcatcactgcctccctccccaagccctccctccgcccacctcgcctcccccaccccaagcccctccccgccgccctcctcgccctcgccgccgccgcccccacgctccccgccctcgccgacgtgcccgcgccacccccctccccgacccaggatgtccaggtactagaggccccctccccggccgccaaccctttctccaacgccctcctcaccgcgcctaagcccacctcctccgccgccgccgacctccccgagggcgcccagtggcgctacagcgagttcctcagcgccgtcaagaagggcaaggtcgagcgcgtcaggttctccaaggatggtggcctactccagctcaccgccatcgacggccgccgcgccaccgtcgtcgtccccaacgaccccgatctcattgacatcctcgccaccaacggcgtcgacatctccgtcgccgagggcgacgccgccggccccggcggattcctcgccttcgtcggcaacctcctcttccccttcctcgctttcgctggcctcttcttcctcttccgccgcgcccagggcggccccggcgctggacctggcggcctcggcgggcccatggacttcggccgctccaagagcaagttccaggaggtgcccgagactggcgtcaccttcgtcgacgtcgccggcgccgaccaggccaagctcgagctgcaggaggtcgtcgatttcctcaagaaccccgacaagtacaccgcgctcggggccaagatccccaagggatgcctgctcgtcggcccgcccggaaccgggaagacactgctggcgcgtgccgtcgccggggaggccggagtgccattcttctcctgcgccgcgtccgagttcgttgagctgttcgtcggtgtcggtgcctccagggtcagggacctgttcgagaaggccaaggccaaggccccttgcatcgtcttcattgatgaaattgatgccgtcgggaggcagcgtggtgctgggctcggagggggaaatgatgagagggagcagaccattaaccagctcttgactgagatggatggatttgccggcaatagcggtgtcattgtgctcgccgcgacaaacaggcctgatgtgctcgacgcggctcttcttcgccctgggaggttcgatcggcaggtcaccgtagacaggccggatgtcgccgggcgtgtcaagattcttgaggttcactcgagaggaaaggctctggcaaaagatgtcgactttgagaaaattgcccggagaacccctggtttcactggagctgatcttcaaaacttgatgaatgaggctgctattcttgctgctcgtcgtgatctgaaggagattagcaaggatgagatctctgatgctttggagaggatcattgctgggcctgagaagaaaaatgctgttgtttcagaagagaagaggagacttgtggcttaccatgaggctggtcatgcccttgttggtgccctcatgcctgaatatgaccctgttgctaagatttccatcattcctcgtggtcaagctggtggactcacattctttgctccaagcgaggagaggcttgagtctggattgtacagcaggagctacctagagaaccaaatggccgtagctcttggtggaagggttgccgaagaggtgatctttggccaagaaaatgtgacaactggggcctccaacgattttatgcaggtttcacgtgttgcaagacaaatggttgaaagatttggattcagcaagaagatcgggcaagttgcgattggtggacctggtggaaatcctttcttgggccagcagatgtcgagccagaaggactactcgatggccaccgcggatgttgtggatgctgaggtgagggagctcgtggagaaggcctactcaagagcaacgcagatcatcacgacacacatcgacatcctccacaagcttgctcagcttctgatggagaaggagacggtggacggggaagagttcatgagcctgttcatcgacggtcaggcagagttgtttgtcgcttaa

SEQ ID NO: 60816 - protein, 686 aa, Oryza sativa
MAPPCSISSASHLLITASLPKPSLRPPRLPHPKPLPAALLALAAAAPTLPALADVPAPPPSPTQDVQVLEAPSPAANPFSNALLTAPKPTSSAAADLPEGAQWRYSEFLSAVKKGKVERVRFSKDGGLLQLTAIDGRRATVVVPNDPDLIDILATNGVDISVAEGDAAGPGGFLAFVGNLLFPFLAFAGLFFLFRRAQGGPGAGPGGLGGPMDFGRSKSKFQEVPETGVTFVDVAGADQAKLELQEVVDFLKNPDKYTALGAKIPKGCLLVGPPGTGKTLLARAVAGEAGVPFFSCAASEFVELFVGVGASRVRDLFEKAKAKAPCIVFIDEIDAVGRQRGAGLGGGNDEREQTINQLLTEMDGFAGNSGVIVLAATNRPDVLDAALLRPGRFDRQVTVDRPDVAGRVKILEVHSRGKALAKDVDFEKIARRTPGFTGADLQNLMNEAAILAARRDLKEISKDEISDALERIIAGPEKKNAVVSEEKRRLVAYHEAGHALVGALMPEYDPVAKISIIPRGQAGGLTFFAPSEERLESGLYSRSYLENQMAVALGGRVAEEVIFGQENVTTGASNDFMQVSRVARQMVERFGFSKKIGQVAIGGPGGNPFLGQQMSSQKDYSMATADVVDAEVRELVEKAYSRATQIITTHIDILHKLAQLLMEKETVDGEEFMSLFIDGQAELFVA

SEQ ID NO: 60817 - DNA, 2085 bp, Glycine max
  CDS (1)..(2085)
atggccttgggcaccagcgccttgatcggaaggaatgttcttgtctcacccccaacccccaaaacaaccaaatcatctactccgctacaattccttttcaagagaagcatcttaaatgctcacaattcacaagctgctctagctgcccttatcttttcctccgcgagcctctctgtgaccccacaagcccttgccgctgataacgtcacccctccccctgtaattgaagcccaacagagccaattaaacccctccaactcatcctcccctttctcacagaacctcctcctcacagctccaaagccacaagcctcctccgacctccccgaaggcaccaactggcgctacagcgagttcttgaacgccgtcaagaagggtaaagtcgagcgagtcaggttcagcaaagacggttccgccctccagctaaccgccattgacggccgtcgcgcctccgttattgtccccaatgacccggacctcatcgacatcctcgccatgaacggcgtcgacatttccgtcgccgagggcgaatcccccaacagcttgttcaacatcataggcaacttgctcttccccttactcgcattcgcgggcctgttcttcctcttccgcagagcccaaggcgggcccggcgggcctggcgggctgggagggcccatggacttcgggcggaacaagtccaagttccaggaagtccccgagaccggcgtgagcttcgctgacgtggcaggcgcggaccaagcgaagcttgaattacaagaggttgttgatttcttgaagaatcccgataagtacaccgcgctgggcgcgaagattccgaaagggtgtcttttggtgggcccaccgggaaccggaaagacccttctggcgagggctgtggcgggggaagctggggtgccgtttttctcgtgcgcggcttcggagttcgttgaactttttgtgggagttggtgcgtcgagggtgagagatttgtttgagaaggcgaaggggaaggcgccgtgcattgttttcattgatgagattgacgccgttgggaggcagagaggggcggggctcggaggtgggaatgacgagagggaacagactattaaccagcttctgacggagatggatggcttttctggcaattctggtgttattgttttggctgccactaacagaccggatgttcttgattcggcgttgttgaggcctggccggttcgacaggcaagttactgtggatagacctgatgttgccggcagagttaaaattcttcaggtgcattctagaggaaaagcacttgcaaaggatgttgactttgaaaaaattgcaaggagaacccctggattcactggggctgatctgcagaatctgatgaatgaagcggctattcttgcagccaggcgtgacctcaaggaaataagtaaagatgagatatctgatgcgcttgaaaggatcatagctggacctgagaagaaaaatgctgttgtctcagatgagaagaagaaattagtagcctatcatgaggctggccatgctctagtgggtgctttaatgccagaatatgaccctgtagccaagatatcaattattcctcgtggccaagctggtggtctcacattttttgctcccagcgaagagaggctcgagtctggattgtacagtagaagttaccttgaaaatcagatggctgttgccctgggtggaagggttgccgaagaggttatttttggccaggaaaatgtcaccaccggagcatcaaacgacttcatgcaagtttcacgagtggcaaggcagatggttgagagatttggattcagcaaaaaaattggacaagttgccattggtggacctggtggaaatccattcttgggtcaacagatgtcatcgcaaaaggattactccatggcaactgcggatgtagtggatgcggaagtgagggaactggtagagagagcatattctagggcaacacatattatctcaactcacattgatatccttcacaagcttgctcaacttctcatagaaaaagaaactgtggatggtgaagagttcatgagtctattcattgatggaaaagccgaattatatgttgcataa

SEQ ID NO: 60818 - protein, 694 aa, Glycine max
MALGTSALIGRNVLVSPPTPKTTKSSTPLQFLFKRSILNAHNSQAALAALIFSSASLSVTPQALAADNVTPPPVIEAQQSQLNPSNSSSPFSQNLLLTAPKPQASSDLPEGTNWRYSEFLNAVKKGKVERVRFSKDGSALQLTAIDGRRASVIVPNDPDLIDILAMNGVDISVAEGESPNSLFNIIGNLLFPLLAFAGLFFLFRRAQGGPGGPGGLGGPMDFGRNKSKFQEVPETGVSFADVAGADQAKLELQEVVDFLKNPDKYTALGAKIPKGCLLVGPPGTGKTLLARAVAGEAGVPFFSCAASEFVELFVGVGASRVRDLFEKAKGKAPCIVFIDEIDAVGRQRGAGLGGGNDEREQTINQLLTEMDGFSGNSGVIVLAATNRPDVLDSALLRPGRFDRQVTVDRPDVAGRVKILQVHSRGKALAKDVDFEKIARRTPGFTGADLQNLMNEAAILAARRDLKEISKDEISDALERIIAGPEKKNAVVSDEKKKLVAYHEAGHALVGALMPEYDPVAKISIIPRGQAGGLTFFAPSEERLESGLYSRSYLENQMAVALGGRVAEEVIFGQENVTTGASNDFMQVSRVARQMVERFGFSKKIGQVAIGGPGGNPFLGQQMSSQKDYSMATADVVDAEVRELVERAYSRATHIISTHIDILHKLAQLLIEKETVDGEEFMSLFIDGKAELYVA

SEQ ID NO: 60819 - DNA, 2457 bp, Brassica napus
  CDS (1)..(2457)
atgacgatgttcttctccaagctcggccgctcctccgtctctcgttcgaggtttttgcacggtggtggtgtgagatcggcgaggctgattggtccgccggctattgaggcggcggcggcgtcggtgaatcaaggaggtggattagggttcttgagtcggcactttgcctcgttaactggtagaaagggacttgtcgacaatgatttgattggtggtgtcttcgctaatccgagacttggtcgattcttctccgacgaagctcccaagaagaagaattatgagaactactttcctaaagctccaaagcaagaagaacccaagagtgatcacaaatctgagtctaaagagggttcagacaagaatgaaaacgagaacctgggagatatgtttgcgaataggttccaaaacttgctgattccactactggctcttgctattttcctttcttccttctcatttggctctggagatcagcaacagattagcttccaggagttcaaaaacaagcttctcgagcccgggctagtcgaccacatagacgtctcaaacaaatcagtagccaaagtctacgtgagaagcacaccgagagaccaacaacaacaaacatcccaagacgttgtcatccaaggaaacggcaacgcccaaggcatccccgccaagagaaccggcggtcagtacaagtactacttcaacatcggcagcgtcgactctttcgaggagaagctcgaagaagcacaagaggccctaggcatcgatccccaccatttcgtccccgtcacctacacaaccgaaatggcctggttccaagagctcctacgcttcgccccgactctactcctcctgggaactctcgtctacggcgcgaggcggatgcaaggcgggataggcggattaggaggaaccggcggggggaagaacggccgcgggatcttcaacataggcaaagccacgataacgagagccgacaaaaactccaagaacaagatttacttcaaggacgtggctggatgcgaggaggcgaaacaggagatcatggagtttgtgcattttctcaaaaaccctaaaaagtacgaagacttgggcgccaagatacctaaaggcgctcttttagtcggtcctcccggaacggggaagactctcttagccaaagctacagccggagagtcaggcgtcccgtttctctccatctcaggctcagacttcatggagatgttcgttggtgttggaccttcgagggtgaggaacttgttccaagaagctagacaggccgcgccgagcattatctttatagacgagatcgacgccattggtcgagcgagaggacgcggggggttaggtgggaacgatgagagggagagcactttgaatcagctgctggttgagatggatgggtttggtacaacggctggagttgtggttctcgctgggactaatagaccggatattttggataaggctttgttgaggcctggccggtttgatcgtcagataaccattgataaaccggatatcaaagggcgtgatcagatattccagatttacttgaagaagattaagcttgatcatgagccttcgtatttctctcagaggcttgctgcactcactcccggcttcgctggagctgatattgcgaatgtgtgtaacgaagcggctcttattgcggctagacatgaaggagcgaccgtcacgatggcgcacttcgactctgcgattgatcgtgtcattggtggtcttgagaagaagaacagggtgataagtaagttggagcgtcgtacagttgcgtatcatgagtctggtcacgcggttgctggttggttcctggaacatgcggagccattgctgaaggtgactatcgtgccacgtggcacagctgcgctcgggtttgcgcagtacgttccgaatgaaaaccttctcatgaccaaagagcagctctttgacatgacttgcatgactctaggtggccgtgcagccgaacaggtattgataggaaaaatctcgaccggtgcacaaaacgatctagagaaagtgacaaagatgacatacgcgcaagtagctgtgtacggtttcagcgacaaggtcggtctgctctcgtttccgccgagggacgatgggtacgacttcaacaaaccgtacagcaacaagaccggtgcgatcatagacgaggaagtgagggaatgggtggggaaagcgtatgagaagacggtggagctgatagagacgcacaaagagaaagtggctgagatcgctgagcttttactggagaaggaagtgctgcatcaggatgatcttttgaaagttttgggtgagcgtccgtttaaaccggctgaggtgactaattatgatcggttcaagtctgggtttgaagagagtgagaaggaggaggcgacaccgacggttgcgcctgtggtggatgaaggagctcctccgccgcttgagccgcaggtggttcctacgtag

SEQ ID NO: 60820 - protein, 818 aa, Brassica napus
MTMFFSKLGRSSVSRSRFLHGGGVRSARLIGPPAIEAAAASVNQGGGLGFLSRHFASLTGRKGLVDNDLIGGVFANPRLGRFFSDEAPKKKNYENYFPKAPKQEEPKSDHKSESKEGSDKNENENLGDMFANRFQNLLIPLLALAIFLSSFSFGSGDQQQISFQEFKNKLLEPGLVDHIDVSNKSVAKVYVRSTPRDQQQQTSQDVVIQGNGNAQGIPAKRTGGQYKYYFNIGSVDSFEEKLEEAQEALGIDPHHFVPVTYTTEMAWFQELLRFAPTLLLLGTLVYGARRMQGGIGGLGGTGGGKNGRGIFNIGKATITRADKNSKNKIYFKDVAGCEEAKQEIMEFVHFLKNPKKYEDLGAKIPKGALLVGPPGTGKTLLAKATAGESGVPFLSISGSDFMEMFVGVGPSRVRNLFQEARQAAPSIIFIDEIDAIGRARGRGGLGGNDERESTLNQLLVEMDGFGTTAGVVVLAGTNRPDILDKALLRPGRFDRQITIDKPDIKGRDQIFQIYLKKIKLDHEPSYFSQRLAALTPGFAGADIANVCNEAALIAARHEGATVTMAHFDSAIDRVIGGLEKKNRVISKLERRTVAYHESGHAVAGWFLEHAEPLLKVTIVPRGTAALGFAQYVPNENLLMTKEQLFDMTCMTLGGRAAEQVLIGKISTGAQNDLEKVTKMTYAQVAVYGFSDKVGLLSFPPRDDGYDFNKPYSNKTGAIIDEEVREWVGKAYEKTVELIETHKEKVAEIAELLLEKEVLHQDDLLKVLGERPFKPAEVTNYDRFKSGFEESEKEEATPTVAPVVDEGAPPPLEPQVVPT

SEQ ID NO: 60821 - DNA, 2076 bp, Brassica napus
  CDS (1)..(2076)
atggcagcttcatctacctgtctggtcggaaacggattgacactacacacaaccaaacacaagctaagcaaacactttccacgcagacagattggtctttcctcttcagttaccagaacatccaaggttaatctcgtgaaggcttctctggacgcgaagagacacgaaggaagaagagactttctcaaagtcttgttaggaaacgctggaatcggtttgctcggaagcggcaaagcaaacgccgcagacgaacaagaagatgcttcctcttcttcgaggatgtcgtactcaaggtttctcgagtatctggacaaggacagggtgagcaaagtggatctctacgagaacgggacgatagctatcgtagaagctattgctcctgagttaggtaaccgtgtccagcgcgttcgcgttcagcttccggggctaagccaagagcttctccagaagctgagagccaagaacattgactttgcagcgcataacgctcaggaagatcaaggctctgtgttgttcaacttgattgggaatctcgctttccctatgctcttgattggtgggttgttccttctctcgagaggctcccctggaggaatgggcggtccaggtggcggcggcccgcttcagtttggtcagtccaaagccaagttccagatggagccaaacaccggggtaacgttcgacgacgttgctggagttgatgaagccaagcaagacttcatggaagtggtggagtttctgaagaagcctgagaggttcactgcggtcggtgctcggatcccgaaaggagttctcctcgttggtcctcccggtactgggaaaacactcttggcaaaagccatagctggtgaagctggcgtgccgttcttctctatctcggggtctgagtttgttgagatgtttgtcggtgttggtgcttcgagggtccgtgatcttttcaaaaaggctaaggagaacgctccttgcatcgtctttgtggatgagattgatgctgttgggaggcaaagaggaacagggatcggtggaggtaatgatgaaagagaacagacgctgaaccagctgctaacggagatggatgggtttgaaggtaacactggtatcatcgtggttgctgcaaccaacagagcagacattcttgactccgccttgttgagaccaggacggtttgaccggcaggtgactgttgacgttccagacatcaagggaagaacagagatactaaaggttcacgctgggaacaagaaattcgaaaatgaagtctcactagaagtaatagccatgagaacgcctggattcagtggagctgatcttgcaaacctcttgaacgaagctgccatattggctggacgccgtggaaagacagcgatatcatcgaaagagattgatgattcgattgatagaattgtagctgggatggaaggaactgtcatgactgatgggaagagcaaaagcttggttgcttaccatgaagttggtcatgccgtctgtggaacattgactccaggacatgacgctgtacaaaaggtaacgttgataccaagaggccaagcgagaggtctgacttggttcattccatcagatgacccaactctaatctccaaacaacaactctttgcaagaattgttggtggactcggtggtagagccgctgaagaaatcatctttggtgagcctgaggttactactggcgcggttggtgacttgcaacagatcaccggtttggctaagcagatggtaacaacatttggaatgtctgaaattggaccatggtcgttgatggattcatcggcacaaagcgatgtgatcatgaggatgatggcaagaaactccatgtctgagaagcttgctgaagacattgatactgcggtgaagaaactatcagacagtgcgtacgagatagctctaagccacataaggaacaaccgtgaagccatggataagctcgttgaagtgcttctggagaaagaaactattggaggtgatgagttcagggcaattctctccgagttcactgagatcccgccggaaaacagagttcctgccgcaaccccaacatcaacaccagctcctgtctag

SEQ ID NO: 60822 - protein, 691 aa, Brassica napus
MAASSTCLVGNGLTLHTTKHKLSKHFPRRQIGLSSSVTRTSKVNLVKASLDAKRHEGRRDFLKVLLGNAGIGLLGSGKANAADEQEDASSSSRMSYSRFLEYLDKDRVSKVDLYENGTIAIVEAIAPELGNRVQRVRVQLPGLSQELLQKLRAKNIDFAAHNAQEDQGSVLFNLIGNLAFPMLLIGGLFLLSRGSPGGMGGPGGGGPLQFGQSKAKFQMEPNTGVTFDDVAGVDEAKQDFMEVVEFLKKPERFTAVGARIPKGVLLVGPPGTGKTLLAKAIAGEAGVPFFSISGSEFVEMFVGVGASRVRDLFKKAKENAPCIVFVDEIDAVGRQRGTGIGGGNDEREQTLNQLLTEMDGFEGNTGIIVVAATNRADILDSALLRPGRFDRQVTVDVPDIKGRTEILKVHAGNKKFENEVSLEVIAMRTPGFSGADLANLLNEAAILAGRRGKTAISSKEIDDSIDRIVAGMEGTVMTDGKSKSLVAYHEVGHAVCGTLTPGHDAVQKVTLIPRGQARGLTWFIPSDDPTLISKQQLFARIVGGLGGRAAEEIIFGEPEVTTGAVGDLQQITGLAKQMVTTFGMSEIGPWSLMDSSAQSDVIMRMMARNSMSEKLAEDIDTAVKKLSDSAYEIALSHIRNNREAMDKLVEVLLEKETIGGDEFRAILSEFTEIPPENRVPAATPTSTPAPV

SEQ ID NO: 60823 - DNA, 2109 bp, Brassica napus
  CDS (1)..(2109)
atggcttcaacctcgtcacgctcctcactcttcttcggatccaacgtcataatctcatcccccactcccaaaaccacaaaaccctccttccacatcactcgatcgtctctcgatgacaaacccataaagtcccttccttcacgagcagcgttagcagctatcctcttctcatcatcaatctcctcccaatccccaaaggccctagctttagacgaaccccttaccccaacccaacccatcgtcatcgaagctcaatcactctccccctctccctcctctctctccccctttgctcaaaaccaagtgattacagcccctaacccgaaagcccaatcatcctcagatctccccgatggatctcagtggcggtacagcgagttcctcaacgcggtcaaaaagggcaaagtcgagagagttagattcagcaaagacggctccgttctccagctcaccgccgtcgataaccgccgcgcctccgtcgtggtccccaacgaccccgatctcatcgatatcctcgccatgaacggagtcgacatctccgtctccgagggagagtccggtaacgatctcttcaccatcatcgggaacttgattttcccgatcttggcgttcggtgggcttttcttgctcttcaggagagctggaggtgggcctggtgggcctggagggttaggtggtccgatggatttcggacggtccaaatccaagtttcaggaagtccccgagacaggcgtttcatttgctgacgtggctggagcagaccaggctaagcttgagttgcaagaagtcgtcgactttttgaagaatccggataagtacactgccttgggcgccaagattcccaaagggtgtctcctcgtgggtccccccgggactgggaagactcttttagatagagctgtggctggagaaaatggagtgccgttcttctcctgcgcgacgtctgagtttgttgagctttccgatggtgaggcagcctctagggttagggatttgtttgagaaggcgaaggctaaggcgccttgtattgtttttatcgatgagattgatgctgtggggaggcagagaggagctgggatgggaggagggaatgacgagagagagcagacgattaatcagttgcttactgagatggatgggttcactggtaactctggtgtgattgtgttggctgctacgaataggcctgatgttttggactctgcgttgctgaggcctgggaggtttgataggcaggtgacggttgataggcctgatgttgctgggagagtcaagattcttcaggttcattctagagggaaggcgattggtaaagatgtggactttgataaggttgcgaggaggactcctggtttcactggtgctgatttgcagaacttgatgaatgaagcggcgattcttgcggcaaggcgggagcttaaggagataagcaaggatgagatctctgatgcgcttgagaggatcattgctggaccggagaagaagaatgctgttgtctctgatgagaagaagaggcttgttgcttaccatgaggctggtcatgctctagtgggtgctcttatgccagagtatgatcccgttgctaagatctccatcattcctcgtggccaagctggtgggcttaccttttttgctccgagtgaagagagactcgagtctggtttgtacagtagaagctacctcgagaatcaaatggctgttgcacttggtggaagggttgcagaggaggtgatctttggggatgacaatgtgacgactggagcatcaaatgatttcatgcaggtgtctcgtgtggcacgtcagatgatagagaggttcgggttcagcaaaaagattggacaagttgccgttggtggccctggtggaaatcccttcatgggtcaacaaatgtcttcacagaaagactactcaatggcaactgctgatatagtagatgctgaggtgagagagctggtggagaaggcgtacaagagagccacggacatcatcacaactcacattgatatcctacacaagcttgcgcagctcttgatcgagaaagaaactgttgatggagaagagttcatgagtctctttattgacggccaagctgagttgtatgtttcttaa

SEQ ID NO: 60824 - protein, 702 aa, Brassica napus
MASTSSRSSLFFGSNVIISSPTPKTTKPSFHITRSSLDDKPIKSLPSRAALAAILFSSSISSQSPKALALDEPLTPTQPIVIEAQSLSPSPSSLSPFAQNQVITAPNPKAQSSSDLPDGSQWRYSEFLNAVKKGKVERVRFSKDGSVLQLTAVDNRRASVVVPNDPDLIDILAMNGVDISVSEGESGNDLFTIIGNLIFPILAFGGLFLLFRRAGGGPGGPGGLGGPMDFGRSKSKFQEVPETGVSFADVAGADQAKLELQEVVDFLKNPDKYTALGAKIPKGCLLVGPPGTGKTLLDRAVAGENGVPFFSCATSEFVELSDGEAASRVRDLFEKAKAKAPCIVFIDEIDAVGRQRGAGMGGGNDEREQTINQLLTEMDGFTGNSGVIVLAATNRPDVLDSALLRPGRFDRQVTVDRPDVAGRVKILQVHSRGKAIGKDVDFDKVARRTPGFTGADLQNLMNEAAILAARRELKEISKDEISDALERIIAGPEKKNAVVSDEKKRLVAYHEAGHALVGALMPEYDPVAKISIIPRGQAGGLTFFAPSEERLESGLYSRSYLENQMAVALGGRVAEEVIFGDDNVTTGASNDFMQVSRVARQMIERFGFSKKIGQVAVGGPGGNPFMGQQMSSQKDYSMATADIVDAEVRELVEKAYKRATDIITTHIDILHKLAQLLIEKETVDGEEFMSLFIDGQAELYVS

SEQ ID NO: 60825 - DNA, 2076 bp, Brassica napus
  CDS (1)..(2076)
atggcagcttcatctacctgtcttgtcggaaacggattgacactacacacaaccaaacacaagctaagcaaacactttccacgcagacagattggtctttcctcttcagttaccagaacatccaaggttaatctcgtgaaggcttctctggacgcgaagagacacgaaggaagaagagactttctcaaagtcttgttaggaaacgctggaatcggtttgctcggaagcggcaaagcaaacgccgcagacgaacaagaagatgcttcctcttcttcgaggatgtcgtactcaaggtttctcgagtatctggacaaggacagggtgagcaaagtggatctctacgagaacgggacgatagctatcgtagaagctattgctcctgagttaggtaaccgtgtccagcgcgttcgcgttcagcttccggggctaagccaagagcttctccagaagctgagagccaagaacattgactttgcagcgcataacgctcaggaagatcaaggctctgtgttgttcaacttgattgggaatctcgctttccctatgctcttgattggtgggttgttccttctctcgagaggctcccctggaggaatgggcggtccaggtggcggcggcccgcttcagtttggtcagtccaaagccaagttccagatggagccaaacaccggggtaacgttcgatgacgttgctggagttgatgaagccaagcaagacttcatggaagtggttgagtttctgaagaagcctgagaggttcactgctgttggtgctcggatcccgaagggagttctgctcattggtcctcctggtactgggaagacgcttctggcgaaagctatagctggtgaagctggcgtgccgttcttctctatctccgggtccgagtttgttgagatgtttgtcggtgttggtgcttccagggtccgtgatcttttcaagaaggctaaggagaacgctccttgcatcgtctttgttgatgagattgatgctgttgggaggcagagagggacagggatcggtggaggtaatgatgagagagaacagactttgaaccagctgttaactgagatggatgggtttgaaggtaacactggtatcatcgttgttgctgcgaccaatagagcagacattcttgactccgctttgttgaggccgggacggtttgaccggcaggtgagtgttgacgttccggacatcaaggggaggactgatatcctcaaggttcacgctggtaataagaagtttgaaaatgatgtctcgcttgaagtgatagcgatgaggacgcctggattcagcggagcggatctcgctaacctcttgaatgaggctgcaatattggctggacgacgtgcgaagacggcgatatcgtcgaaagagattgatgattccattgatagaatcgttgctggtatggaaggaactgtgatgactgatagcaagagcaaaagcttggttgcttaccatgaagttggtcatgccgtgtgtggaacattgactccaggacatgacgctgtacaaaaggtaacgttggtaccaagaggccaagcgagaggacttacttggttcattccatcagatgaccctactctcatctccaagcaacagctctttgcaagaattgttggtggactcggtggtagagccgctgaagaaatcatctttggtgagcctgaggttactactggcgcggttggtgacttgcaacagatcaccggtttggctaagcagatggtaacaacatttgggatgtctgaaattggaccatggtcgttgatggattcatcggcacaaagcgatgtgatcatgaggatgatggcaagaaactccatgtctgagaagcttgctgaagacattgattctgcggtgaagaaactatcagacagtgcgtacgagatagctctaagccacataaggaacaaccgtgaagccatggataagctcgttgaagtgcttctggagaaagaaactattggaggtgatgagttcagggcaattctctccgagttcactgagatcccgccggaaaacagagttcctgccgcaaccccaacatcaacaccagctcctgtctag

SEQ ID NO: 60826 - protein, 691 aa, Brassica napus
MAASSTCLVGNGLTLHTTKHKLSKHFPRRQIGLSSSVTRTSKVNLVKASLDAKRHEGRRDFLKVLLGNAGIGLLGSGKANAADEQEDASSSSRMSYSRFLEYLDKDRVSKVDLYENGTIAIVEAIAPELGNRVQRVRVQLPGLSQELLQKLRAKNIDFAAHNAQEDQGSVLFNLIGNLAFPMLLIGGLFLLSRGSPGGMGGPGGGGPLQFGQSKAKFQMEPNTGVTFDDVAGVDEAKQDFMEVVEFLKKPERFTAVGARIPKGVLLIGPPGTGKTLLAKAIAGEAGVPFFSISGSEFVEMFVGVGASRVRDLFKKAKENAPCIVFVDEIDAVGRQRGTGIGGGNDEREQTLNQLLTEMDGFEGNTGIIVVAATNRADILDSALLRPGRFDRQVSVDVPDIKGRTDILKVHAGNKKFENDVSLEVIAMRTPGFSGADLANLLNEAAILAGRRAKTAISSKEIDDSIDRIVAGMEGTVMTDSKSKSLVAYHEVGHAVCGTLTPGHDAVQKVTLVPRGQARGLTWFIPSDDPTLISKQQLFARIVGGLGGRAAEEIIFGEPEVTTGAVGDLQQITGLAKQMVTTFGMSEIGPWSLMDSSAQSDVIMRMMARNSMSEKLAEDIDSAVKKLSDSAYEIALSHIRNNREAMDKLVEVLLEKETIGGDEFRAILSEFTEIPPENRVPAATPTSTPAPV

SEQ ID NO: 60827 - DNA, 2109 bp, Brassica napus
  CDS (1)..(2109)
atggcttcaacctcgtcacgctcctcactcttcttcggatccaacgtcataatctcatcccccactcccaaaaccacaaaaccctccttccacatcactcgatcgtctctcgatgacaaacccataaagtcccttccttcacgagcagcgttagcagctatcctcttctcatcatcaatctcctcccaatccccaaaggccctagctttagacgaaccccttaccccaacccaacccatcgtcatcgaagctcaatcactctccccctctccctcctctctctccccctttgctcaaaaccaagtgattacagcccctaacccgaaagcccaatcatcctcagatctccccgatggatctcagtggcggtacagcgagttcctcaacgcggtcaaaaagggcaaagtcgagagagttagattcagcaaagacggctccgttctccagctcaccgccgtcgataaccgccgcgcctccgtcgtggtccccaacgaccccgatctcatcgatatcctcgccatgaacggagtcgacatctccgtctccgagggagagtccggtaacgatctcttcaccatcatcgggaacttgattttcccgatcttggcgttcggtgggcttttcttgctcttcaggagagctggaggtgggcctggtgggcctggagggttaggtggtccgatggatttcggacggtccaaatccaagtttcaggaagtccccgagacaggcgtttcatttgctgacgtggctggagcagaccaggctaagcttgagttgcaagaagtcgtcgactttttgaagaatccggataagtacactgccttgggcgccaagattcccaaagggtgtctcctcgtgggtccccccgggactgggaagactcttttagctagagctgtggctggagaggctggagtgccgttcttctcctgcgcggcgtctgagtttgttgagcttttcgttggtgtgggtgcctctagggttagggatttgtttgagaaggctaaggctaaggcgccttgtattgtttttattgatgagattgatgctgtggggaggcagagaggagctgggatgggaggagggaatgacgagagagagcagacgattaatcagttgcttactgagatggatgggttctctggtaactctggtgtgattgttttggctgctacgaataggcctgatgttttggactctgcgttgctgaggcctgggaggtttgataggcaggtgacggttgataggcctgatgttgctgggagagtcaagattcttcaggttcattctagagggaaggcgattggtaaagatgtggactttgataaggttgcgaggaggactcctggtttcactggtgctgatttgcagaacttgatgaatgaagcggcgattcttgcggcaaggcgggagcttaaggagataagcaaggatgagatctctgatgcgcttgagaggatcattgctggaccggagaagaagaatgctgttgtctctgatgagaagaagaggcttgttgcttaccatgaggctggtcatgctctagtgggtgctcttatgccagagtatgatcccgttgctaagatctccatcattcctcgtggccaagctggtgggcttaccttttttgctcccagtgaagagagactcgagtctggtttgtacagtagaagctacctcgagaatcaaatggctgttgcacttggtggaagggttgcagaggaggtgatctttggggatgacaatgtgacgactggagcatcaaatgatttcatgcaggtgtctcgtgtggcacgtcagatgatagagaggttcgggttcagcaaaaagattggacaagttgccgttggtggccctggtggaaaccccttcatgggtcaacaaatgtcttcacagaaagactactcaatggcaactgctgatatcgtagatgctgaggtgagagagctggtggagaaggcgtacaagagagccacggacatcatcacaactcacattgatatcctacacaagcttgcgcagctcttgatcgagaaagaaactgttgatggagaagagttcatgagtctctttattgacggccaagctgagttgtatgtttcttaa

SEQ ID NO: 60828 - protein, 702 aa, Brassica napus
MASTSSRSSLFFGSNVIISSPTPKTTKPSFHITRSSLDDKPIKSLPSRAALAAILFSSSISSQSPKALALDEPLTPTQPIVIEAQSLSPSPSSLSPFAQNQVITAPNPKAQSSSDLPDGSQWRYSEFLNAVKKGKVERVRFSKDGSVLQLTAVDNRRASVVVPNDPDLIDILAMNGVDISVSEGESGNDLFTIIGNLIFPILAFGGLFLLFRRAGGGPGGPGGLGGPMDFGRSKSKFQEVPETGVSFADVAGADQAKLELQEVVDFLKNPDKYTALGAKIPKGCLLVGPPGTGKTLLARAVAGEAGVPFFSCAASEFVELFVGVGASRVRDLFEKAKAKAPCIVFIDEIDAVGRQRGAGMGGGNDEREQTINQLLTEMDGFSGNSGVIVLAATNRPDVLDSALLRPGRFDRQVTVDRPDVAGRVKILQVHSRGKAIGKDVDFDKVARRTPGFTGADLQNLMNEAAILAARRELKEISKDEISDALERIIAGPEKKNAVVSDEKKRLVAYHEAGHALVGALMPEYDPVAKISIIPRGQAGGLTFFAPSEERLESGLYSRSYLENQMAVALGGRVAEEVIFGDDNVTTGASNDFMQVSRVARQMIERFGFSKKIGQVAVGGPGGNPFMGQQMSSQKDYSMATADIVDAEVRELVEKAYKRATDIITTHIDILHKLAQLLIEKETVDGEEFMSLFIDGQAELYVS

SEQ ID NO: 60829 - DNA, 2034 bp, Zea mays
  CDS (1)..(2034)
atggcaccaccatccatgtgtcttgcggcaaagggggtgcttcccttctcggcacttatttcaagtggtgttacacaaaggccagtgtcagtgaccgcttccttggagcacaaaaccagcgatgctagaaggaagttcctaaaacttgcgcttgggaatatcggagttggactgcccaccttgttgggtgttaagaaagctctcgctgatgagcaaggaatctcgtcctcgaggatgtcttattcaaggttccttgagtatcttgacaagggtagagtgaagaaggttgatttatttgagaatgggacaattgctatcgtggaggccatttctcctgagcttggcaaccgcgtgcagagagtccgtgtgcagcttcctggtctaagccaggagcttcttcagaagttgagggagaagaacatcgattttgctgctcacagcaaccaggaggactctggttctcttctgttcaaccttattggaaatttggcattcccgcttatccttatcggtggtctgtttttactttcaagaagggcacagggtggcctcggtggacccaatggtcctggctttccccttggttttggtcaatctagggccaagtttcagatggaacccaacactggtgttacatttgatgatgttgctggtgtcgatgaagcgaagcaagacttcatggaagtggttgagttcttgaagaaacccgaaaggttcactgctgttggtgctcgcattcctaagggtgttctgcttgtcggtcctcctgggacgggtaaaactttgcttgccaaggcaattgcaggagaggctggcgtgccatttttctcaatttcaggttctgagtttgtggagatgtttgttggtgttggagcttccagagttcgtgaccttttcaagaaggccaaggagaatgctccttgcatagtgtttgttgatgaaattgatgctgttggaaggcaaagaggtacctgtattggtggtggaaatgatgaaagggagcagactctcaatcaactactaactgagatggatggtttcgagggcaacactggaattattgttattgctgccactaaccgagctgacatcttggattccgctttacttagacctgggcgctttgacagacaggtgtctgttgatgttcctgatgtacgtggaaggacagagattctaaaagtgcatggtggcaacaagaaatttgattctgatgtttctctcgatgtcatagcaatgagaacacctgggttcagtggagcagacttggcaaaccttctgaatgaagcagccattctggctggacggcgggggaggacagcaatttcttcaaaagagatagatgattctattgacagaattgtggctggtatggaagggactgtgatgacagacgggaagagcaaaagtcttgttgcttaccatgaagttgggcatgcaatttgcggaactttgacacctggccatgatcctgtccaaaaggttaccttaatcccaaggggtcaagctcgtggtcttacatggtttatcccgatggatgacccaacactcatctccaggcagcaactttttgccagaattgttggcggccttggtggtagagctgctgaggaggtgatatttggagagcctgaggtgaccactggagctgctggtgacttgcagcaaattactggcttagccaagcagatggtggtaacgttcggtatgtctgaaattggtccatggtctctgatggagggtggggcacagagtggggacgtcatcatgcgaatgatggcaaggaactccatgtcagagaagcttgcggaggacattgattcggcagtgaagcagttgtcagatgaggcctatgagatcgcattgaggcacattagaaacaacagggaggccatcgacaaaatcgttgaggtgctcattgagaaggagacactggccggagacgagttccgggcgattctttctgagtttgtggagatccctgtagagaaccgggttcccccagccacaccggcggccgccctccctgcctaa

SEQ ID NO: 60830 - protein, 677 aa, Zea mays
MAPPSMCLAAKGVLPFSALISSGVTQRPVSVTASLEHKTSDARRKFLKLALGNIGVGLPTLLGVKKALADEQGISSSRMSYSRFLEYLDKGRVKKVDLFENGTIAIVEAISPELGNRVQRVRVQLPGLSQELLQKLREKNIDFAAHSNQEDSGSLLFNLIGNLAFPLILIGGLFLLSRRAQGGLGGPNGPGFPLGFGQSRAKFQMEPNTGVTFDDVAGVDEAKQDFMEVVEFLKKPERFTAVGARIPKGVLLVGPPGTGKTLLAKAIAGEAGVPFFSISGSEFVEMFVGVGASRVRDLFKKAKENAPCIVFVDEIDAVGRQRGTCIGGGNDEREQTLNQLLTEMDGFEGNTGIIVIAATNRADILDSALLRPGRFDRQVSVDVPDVRGRTEILKVHGGNKKFDSDVSLDVIAMRTPGFSGADLANLLNEAAILAGRRGRTAISSKEIDDSIDRIVAGMEGTVMTDGKSKSLVAYHEVGHAICGTLTPGHDPVQKVTLIPRGQARGLTWFIPMDDPTLISRQQLFARIVGGLGGRAAEEVIFGEPEVTTGAAGDLQQITGLAKQMVVTFGMSEIGPWSLMEGGAQSGDVIMRMMARNSMSEKLAEDIDSAVKQLSDEAYEIALRHIRNNREAIDKIVEVLIEKETLAGDEFRAILSEFVEIPVENRVPPATPAAALPA

SEQ ID NO: 60831 - DNA, 2433 bp, Glycine max
  CDS (1)..(2433)
atgattttttcaaggattgcacgctccgtttcgagttcgtctcgcgctagaaatttattacacggtgatgggagattgggaacccatgtcggatcgccacggacgaatgcgtgttctgaaggagccgaaggggtattagggtctgttaggggctacgtgtcttctgccagagctcgcagtaatggcttcgtttcaaatttgcctgattttaaatctgttgcagcaaaccctacgattcgccgattgttttgcagcaaagctccaaagaagaagaattatgagaacttctatcccaaggaaaagaaggaagttccgaaaggaaacgacaaaaaatacgagtccaaagataactcgaacgcaaacacagaggatagtggaaattttcaggaagctttcatgaagcaagttcaaaatctagtcaccccattattgttgatggggctatttcttacatccttttcgtttggtcctcgtgaacagaagcagattagctttcaggagtttaaaaacaagcttttggaaccaggattagtagaccatattgttgtctcaaataaatcagttgccaaagtatatgtaaggaacactcccctcaaccaaacagataatgaagtagcccaagggacccaacctgcaattggatctggaggccagtataaatattatttcaatattggaagtgttgagtcttttgaggagaagctagaggaagcgcaagaagctctgggcatttactctcatgattttgtgcctgtcacatattcttctgaagtggtttggtaccaggaattgatgaggtttgctccaacactgttgcttttgggatctctcttgtatatgggaaggagaatgcaaggtggaattggtgttggtggcagtggtggcggcaagggtgcccgtggaatattcaacataggaaaagcaccagttactaaagtagacaaaaatgccaaaaacaagatctattttaaagatgttgctggctgtgatgaggcaaagcaagaaattatggagtttgtccacttcctcaagaacccaaagaaatatgaagaacttggtgcaaaaattccaaaaggtgctctcttggttggtcctccaggcacaggaaaaacccttttagcaaaagctacagcaggggagtctggtgtgccatttctttctatatctggttctgatttcatggaaatgtttgttggtgttggaccatctagggtgagaaacttgtttcaggaagcaaggcagtgttcacctagtatagtatttattgatgagattgatgcaattggtcgagcaaggcggggtagtttttctggtgcaaatgatgaacgtgaaagtactttaaatcaattgttggtcgagatggatggttttggaaccacttctggagttgttgtgttggcaggaacaaataggcctgaaatcttagacaaagctcttcttaggcctgggcgatttgaccgccagataacaattgacaaacctgatattaaaggtcgtgaccagatatttcagatctacttgaagaaaatcaaacttgatcatgagccttcatattattctccaaggcttgcagcccttacacctggatttgctggagcagacattgctaatgtctgcaatgaagctgctctgattgctgcaagaggtgaaggaacacaagtcacaatggaacattttgaggcagccattgataggatcattggtggtttggaaaagaggaacaaggtaataagcaagctggaaaggcggactgttgcctaccatgaagcaggccatgctgtttcaggttggttcttggagcatgttgagcccttgttgaaagtaactattgttccacgtggcactgctgctcttgggtttgcccaatatgttcccaatgagaaccttctcatgacaaaggagcagctttttgatatgacttgtatgacacttggcggtcgggctgctgagcaggttcttatagggagaatctcaacaggagcacaaaatgacttggaaaaagtgaccaagctgacgtatgcccaagtagcagtttatggttttagcgacaaagtaggcctcctctccttccctccaactgagggctcatatgagttttccaaaccatacagcagcaaaactgctgcaatcattgatagcgaagtgcgtgattgggtggacaaagcatacaaacatacgattcagcttatcgaggaacacaaggagcaagttactcaaattgcagagttgctgcttgaaaaagaagtacttcaccaggacgacttgcttcgagttttgggcgagcggccgttcaaggctactgaactcaccaattatgatagatttaagcagggttttatagaggaagaggaaaaggtcgtggaaagcaccgtagatacgcctgaggaaggtggtgggtcttcacctctagaaccccaggttgttcccacatag

SEQ ID NO: 60832 - protein, 810 aa, Glycine max
MIFSRIARSVSSSSRARNLLHGDGRLGTHVGSPRTNACSEGAEGVLGSVRGYVSSARARSNGFVSNLPDFKSVAANPTIRRLFCSKAPKKKNYENFYPKEKKEVPKGNDKKYESKDNSNANTEDSGNFQEAFMKQVQNLVTPLLLMGLFLTSFSFGPREQKQISFQEFKNKLLEPGLVDHIVVSNKSVAKVYVRNTPLNQTDNEVAQGTQPAIGSGGQYKYYFNIGSVESFEEKLEEAQEALGIYSHDFVPVTYSSEVVWYQELMRFAPTLLLLGSLLYMGRRMQGGIGVGGSGGGKGARGIFNIGKAPVTKVDKNAKNKIYFKDVAGCDEAKQEIMEFVHFLKNPKKYEELGAKIPKGALLVGPPGTGKTLLAKATAGESGVPFLSISGSDFMEMFVGVGPSRVRNLFQEARQCSPSIVFIDEIDAIGRARRGSFSGANDERESTLNQLLVEMDGFGTTSGVVVLAGTNRPEILDKALLRPGRFDRQITIDKPDIKGRDQIFQIYLKKIKLDHEPSYYSPRLAALTPGFAGADIANVCNEAALIAARGEGTQVTMEHFEAAIDRIIGGLEKRNKVISKLERRTVAYHEAGHAVSGWFLEHVEPLLKVTIVPRGTAALGFAQYVPNENLLMTKEQLFDMTCMTLGGRAAEQVLIGRISTGAQNDLEKVTKLTYAQVAVYGFSDKVGLLSFPPTEGSYEFSKPYSSKTAAIIDSEVRDWVDKAYKHTIQLIEEHKEQVTQIAELLLEKEVLHQDDLLRVLGERPFKATELTNYDRFKQGFIEEEEKVVESTVDTPEEGGGSSPLEPQVVPT

SEQ ID NO: 60833 - DNA, 2076 bp, Glycine max
  CDS (1)..(2076)
atggcagcaccattggcatgtgttgttgggagtggtttatccatacagagtaataaaataactcttggcaaggacgtcaatggaagatatctcttctcatatcataggctttcagcacagagtaaggagtcaaagacaatatgcataaaggcatccttggatcaaaggaagcatgaagggagaagaggatttctgaaattgttgaatgtgggagttggcttacctgtattattaggaggtgggaaagcgtatgctgatgaacaaggaccttcctcctccagaatgtcttattccagatttcttgagtatttggataagggtagagttaaaaaagtggatctgtttgagaatggaaccacggctgttgtggaggctgtttctcctgagttgggtaatagggtgcagcgagtgcgtgttcaacttcctggacttagccaagagcttcttcagaaattcagggaaaagaacattgactttgcagctcataatggccaagaagagacaggttctccattagctaacctgattgggaacctggcttttcctctgattttgattggaggattgttccttctctcgagacgatcatcaggagggatgggaggtcccggtgggggctttcctcttgcttttggtcaatctaaagccaagtttcaaatggaacccaacaccggagtgacatttgatgatgttgctggggtggatgaagccaagcaggactttatggaggtggtggagtttctaaagaagcctgagaggttcactgctgttggggctcgcataccaaaaggagttcttcttgttggtcctccaggaactgggaagaccttgttagccaaggctattgctggtgaagctggtgttccatttttctctatatcaggttctgagtttgttgagatgtttgttggtgttggtgcttctcgtgttcgtgatttgttcaagaaggcgaaagagaatgccccttgcattgtctttgttgatgaaattgatgctgttggaagacaaagagggactggaattggtggagggaatgatgaaagagagcagaccctcaaccaacttttgacagaaatggatgggtttgagggtaacacaggtatcattgtcgttgcagcaactaacagggctgacattcttgactcggccttgttgagacctggccgatttgatagacaggtgacagttgatgttccagatataaggggaaggactgaaatcctaaaggttcatgctagcaacaaaaagtttgatgctgatgtttctcttgaagtgattgcaatgagaacacctggctttagtggagctgatcttgcgaatctgttgaatgaagctgctatattagctggtcgccgtggaaagacagctatttcatctaaagaaattgatgattctattgataggattgtggctggaatggaaggaacagtgatgacagatgggaagagcaaaagtttagtggcatatcatgaagttggtcatgctatttgtggaactttgactcctggtcatgatgctgtgcaaaaggtaacactagttcctcgcggtcaagctcgtggacttacatggttcattcctaacgatgacccaactctgatctccaaacaacaactctttgcaagaattgttggaggactaggtggaagggctgcagaagaaattattttcggtgagcctgaagttacaactggagcagctggtgatttgcagcaaatcaccagtttggcaaaacagatggtgaccacatttggaatgtctgatattggtccttggtcacttatggaaccatcagcacaaggtggggatgtcatcatgagaatgatggcaaggaactcaatgtcagagaggcttgcagaagacattgatgctgccatcaagaggatctcagatgaagcatatgaaattgcactggaccatataaggaacaaccgtgaggccattgacaagattgtggaagtccttctggagaaggagactctgagcggagatgaattccgtgctatattgtctgagtttgttgaaattccagctgaaaaccgtgttgctccttcaactccagtaccagccactgtttga

SEQ ID NO: 60834 - protein, 691 aa, Glycine max
MAAPLACVVGSGLSIQSNKITLGKDVNGRYLFSYHRLSAQSKESKTICIKASLDQRKHEGRRGFLKLLNVGVGLPVLLGGGKAYADEQGPSSSRMSYSRFLEYLDKGRVKKVDLFENGTTAVVEAVSPELGNRVQRVRVQLPGLSQELLQKFREKNIDFAAHNGQEETGSPLANLIGNLAFPLILIGGLFLLSRRSSGGMGGPGGGFPLAFGQSKAKFQMEPNTGVTFDDVAGVDEAKQDFMEVVEFLKKPERFTAVGARIPKGVLLVGPPGTGKTLLAKAIAGEAGVPFFSISGSEFVEMFVGVGASRVRDLFKKAKENAPCIVFVDEIDAVGRQRGTGIGGGNDEREQTLNQLLTEMDGFEGNTGIIVVAATNRADILDSALLRPGRFDRQVTVDVPDIRGRTEILKVHASNKKFDADVSLEVIAMRTPGFSGADLANLLNEAAILAGRRGKTAISSKEIDDSIDRIVAGMEGTVMTDGKSKSLVAYHEVGHAICGTLTPGHDAVQKVTLVPRGQARGLTWFIPNDDPTLISKQQLFARIVGGLGGRAAEEIIFGEPEVTTGAAGDLQQITSLAKQMVTTFGMSDIGPWSLMEPSAQGGDVIMRMMARNSMSERLAEDIDAAIKRISDEAYEIALDHIRNNREAIDKIVEVLLEKETLSGDEFRAILSEFVEIPAENRVAPSTPVPATV

SEQ ID NO: 60835 - DNA, 2433 bp, Glycine max
  CDS (1)..(2433)
atgattttttcaaggattgcacgctccgtttcgagttcgtctcgcgctagaaatttattacacggtgatgggagattgggaacccatgtcggatcgccacggacgaatgcgtgttctgaaggagccgaaggggtattagggtttgttaggggctacgtgtcttctgccagagctcgcagtaatggcttcgtttccaatttgcctgattttaaatctgttgcagcaaaccctacgattcgccgattgttttgcagcaaagctccaaagaagaagaattatgagaacttctatcccaaggaaaagaaggaagttccgaaaggaaacgacaaaaaatacgagtccaaagataactcgaacgcaaacacagaggatagtggaaattttcaggaagctttcatgaagcaagttcaaaatctagtcaccccattattgttgatggggctatttcttacatccttttcgtttggccctcgtgaacagaagcagattagctttcaggagtttaaaaacaagcttttggaaccaggattagtagaccatattgttgtctcaaataaatcagttgccaaagtatatgtaaggaacactcccctcaaccaaacagataatgaagtagcccaagggacccaacctgcaattggatctggaggccagtataaatattatttcaatattggaagtgttgagtcttttgaggagaagctagaggaagcgcaagaagctctgggcatttactctcatgattttgtgcctgtcacatattcttctgaagtggtttggtaccaggaattgatgaggtttgctccaacactgttgcttttgggatctctcttgtatatgggaaggagaatgcaaggtggaattggtgttggtggcagtggtggcggcaagggtgcccgtggaatattcaacataggaaaagcaccagttactaaagtagacaaaaatgccaaaaacaagatctattttaaagatgttgctggctgtgatgaggcaaagcaagaaattatggagtttgtccacttcctcaagaacccaaagaaatatgaagaacttggtgcaaaaattccaaaaggtgctctcttggttggtcctccaggcacaggaaaaacccttttagcaaaagctacagcaggggagtctggtgtgccatttctttctatatctggttctgatttcatggaaatgtttgttggtgttggaccatctagggtgagaaacttgtttcaggaagcaaggcagtgttcacctagtatagtatttattgatgagattgatgcaattggtcgagcaaggcggggtagtttttctggtgcaaatgatgaacgtgaaagtactttaaatcaattgttggtcgagatggatggttttggaaccacttctggagttgttgtgttggcaggaacaaataggcctgaaatcttagacaaagctcttcttaggcctgggcgatttgaccgccagataacaattgacaaacctgatattaaaggtcgtgaccagatatttcagatctacttgaagaaaatcaaacttgatcatgagccttcatattattctccaaggcttgcagcccttacacctggatttgctggagcagacattgctaatgtctgcaatgaagctgctctgattgctgcaagaggtgaaggaacacaagtcacaatggaacattttgaggcagccattgataggatcattggtggtttggaaaagaggaacaaggtaataagcaagctggaaaggcggactgttgcctaccatgaagcaggccatgctgtttcaggttggttcttggagcatgttgagcccttgttgaaagtaactattgttccacgtggcactgctgctcttgggtttgcccaatatgttcccaatgagaaccttctcatgacaaaggagcagctttttgatatgacttgtatgacacttggcggtcgggctgctgagcaggttcttatagggagaatctcaacaggagcacaaaatgacttggaaaaagtgaccaagctgacgtatgcccaagtagcagtttatggttttagcgacaaagtaggcctcctctccttccctccaactgagggctcatatgagttttccaaaccatacagcagcaaaactgctgcaatcattgatagcgaagtgcgtgattgggtggacaaagcatacaaacatacgattcagcttatcgaggaacacaaggagcaagttactcaaattgcagagttgctgcttgaaaaagaagtacttcaccaggacgacttgcttcgagttttgggcgagcggccgttcaaggctactgaactcaccaattatgatagatttaagcagggttttatagaggaagaggaaaaggtcgtggaaagcaccgtagatacgcctgaggaaggtggtgggtcttcacctctagaaccccaggttgttcccacatag

SEQ ID NO: 60836 - protein, 810 aa, Glycine max
MIFSRIARSVSSSSRARNLLHGDGRLGTHVGSPRTNACSEGAEGVLGFVRGYVSSARARSNGFVSNLPDFKSVAANPTIRRLFCSKAPKKKNYENFYPKEKKEVPKGNDKKYESKDNSNANTEDSGNFQEAFMKQVQNLVTPLLLMGLFLTSFSFGPREQKQISFQEFKNKLLEPGLVDHIVVSNKSVAKVYVRNTPLNQTDNEVAQGTQPAIGSGGQYKYYFNIGSVESFEEKLEEAQEALGIYSHDFVPVTYSSEVVWYQELMRFAPTLLLLGSLLYMGRRMQGGIGVGGSGGGKGARGIFNIGKAPVTKVDKNAKNKIYFKDVAGCDEAKQEIMEFVHFLKNPKKYEELGAKIPKGALLVGPPGTGKTLLAKATAGESGVPFLSISGSDFMEMFVGVGPSRVRNLFQEARQCSPSIVFIDEIDAIGRARRGSFSGANDERESTLNQLLVEMDGFGTTSGVVVLAGTNRPEILDKALLRPGRFDRQITIDKPDIKGRDQIFQIYLKKIKLDHEPSYYSPRLAALTPGFAGADIANVCNEAALIAARGEGTQVTMEHFEAAIDRIIGGLEKRNKVISKLERRTVAYHEAGHAVSGWFLEHVEPLLKVTIVPRGTAALGFAQYVPNENLLMTKEQLFDMTCMTLGGRAAEQVLIGRISTGAQNDLEKVTKLTYAQVAVYGFSDKVGLLSFPPTEGSYEFSKPYSSKTAAIIDSEVRDWVDKAYKHTIQLIEEHKEQVTQIAELLLEKEVLHQDDLLRVLGERPFKATELTNYDRFKQGFIEEEEKVVESTVDTPEEGGGSSPLEPQVVPT

SEQ ID NO: 60837 - DNA, 2115 bp, Zea mays
  CDS (1)..(2115)
atggcgtggcggcgcgtcctcacccagattgcaaggcatcgaccaacaaaagcaatctacaatgaactagttgcttcctcccctttgggcgcttttcaaagtgacatcactgcaggtgccagaattaaaaatttgcaagagaggaaccagtcaagttacatcggtagccttgcacgccgggtgcgagacctagaatcaccaagccaaacctctcttcttaaagagatttacagaagtgacccggagcgtgtcatacaaatatttgaaagccatccttcattacattctaatcccgcagcactttcggagtatgtaaaagctcttgtaagggttgataggctggacgagagtgccttgcttaaaacactgcagagaggtgttgtttccttgacaaggggggaagaaagctttagtagcattccagctttaattggtgctggtcaactgacaaaggatggagctcttggcactgcaaatgcacctattcacatggtcacagcagagacaggtcaatttaaggatcagctttggcgtaccttccgaagcattgcactaactttccttcttatttcgggcatcggtgctctcatcgaggatagaggaatcagcaaaggtcttggtctgaatgaagaggttcaaccaagcatagagtctactacaaaattcagtgatgtaaagggtgttgatgaagcaaaatctgaacttgaagaaatagttcattatcttcgagatcccaagcgcttcacacgtcttggtggaaaacttccgaaaggagtcttgcttgttggtcctcctggcactgggaaaaccatgctagctagggctattgctggtgaagctggtgttcctttcttctcttgcagtggaagcgagtttgaggaaatgtttgtgggtgttggagctcggagagtgcgagacctttttgctgcagcaaaaaaacgatctccttgcataatatttattgatgaaatagatgcaattggtgggagccggaatcctaaggatcaacagtatatgaagatgaccttgaaccagctgcttgtcgagttggatggttttaagcagaaccaggggataattgtcattgctgcaaccaactttcctgagtcactagataaagccctaatcagacctgggcgttttgaccgccatattgttgttcccaacccagatgttgaaggtcgacgtcaaattctagaatcccatatgtcaaagatcttgaaaggtgatgatgtggacttaatgatcattgctagaggaacaccgggattctctggtgcagaccttgctaacttggtaaatgttgctgctcttaaggctgccatggatggcgcaaaatctgtcacaatgaatgatcttgagtatgcaaaggaccgaatcatgatgggtagtgagcggaagtcggcagttatctctgatgaatgcaggaagctgacagcataccatgagggtgggcatgcccttgttgccatccacacagaaggagctcaccctgtccacaaggctaccatcgtacccaggggggtggccctaggaatggtggcccaactccctgacaaagaccagactagtgtgtcaaggaaacagatgctagcgaaactggatgtctgcatgggaggccgcgtggcagaagagcttatatttggggatactgaggtgacatccggtgcgtcgtcagacttccagcaagcaactgcaatggcaagagcgatggttaccaagtatggcatgagcaagcatgtcggccttgtctcttataactacgaggacgatggaaagagcgtgagctcagaaaccaggcttgtgattgagcaggaggtgaagaatttcctagagaacgcgtataataatgcgaagaccatccttacgaaacacaataaagagctacatgctctggccaacgcacttcttgagcacgagaccctcacaggagcccagataacgaacatattggcccaggtacgtaacaaacagcaacaagaacatactgtcgaagcaccacagagggccccagcttccccggcatcaccagctgcggcggcagcagctgcagccgccgcggcagcacagcaggcggcagccaaagctaagggagtggctggtatgggatcttag

SEQ ID NO: 60838 - protein, 704 aa, Zea mays
MAWRRVLTQIARHRPTKAIYNELVASSPLGAFQSDITAGARIKNLQERNQSSYIGSLARRVRDLESPSQTSLLKEIYRSDPERVIQIFESHPSLHSNPAALSEYVKALVRVDRLDESALLKTLQRGVVSLTRGEESFSSIPALIGAGQLTKDGALGTANAPIHMVTAETGQFKDQLWRTFRSIALTFLLISGIGALIEDRGISKGLGLNEEVQPSIESTTKFSDVKGVDEAKSELEEIVHYLRDPKRFTRLGGKLPKGVLLVGPPGTGKTMLARAIAGEAGVPFFSCSGSEFEEMFVGVGARRVRDLFAAAKKRSPCIIFIDEIDAIGGSRNPKDQQYMKMTLNQLLVELDGFKQNQGIIVIAATNFPESLDKALIRPGRFDRHIVVPNPDVEGRRQILESHMSKILKGDDVDLMIIARGTPGFSGADLANLVNVAALKAAMDGAKSVTMNDLEYAKDRIMMGSERKSAVISDECRKLTAYHEGGHALVAIHTEGAHPVHKATIVPRGVALGMVAQLPDKDQTSVSRKQMLAKLDVCMGGRVAEELIFGDTEVTSGASSDFQQATAMARAMVTKYGMSKHVGLVSYNYEDDGKSVSSETRLVIEQEVKNFLENAYNNAKTILTKHNKELHALANALLEHETLTGAQITNILAQVRNKQQQEHTVEAPQRAPASPASPAAAAAAAAAAAAQQAAAKAKGVAGMGS

SEQ ID NO: 60839 - DNA, 2121 bp, Triticum aestivum
  CDS (1)..(2121)
atggcctggcggctcgccctctccaaggctggaaggcggtcgtcgagtgtggtctacaatgagctagtgagtacaagtgctttcaggacacctgcaaatggcaccggcggagttctcaaggcgctgcaagagaggtaccgatcaagctacgtcggtagcttcgcgcgcaggctacgagactttgacacgccaagtgatgcctcccttcttaaagagatctacagaagtaacccagaaagggtcgtgcagatctttgagagccagccttccttacataacaactcttcggctctctcccagtatgtgaaggctcttgtcgctctcgacaggctggatgaaagcccgctgcttaagacattgcagagaggaattgtcaattcagcaagggaggaagaagggcttagtggcatcccagcatttcaaagtgttggccgtacgacgaaagatggggctcttggtactgctggtgcaccaattcacatggttgcatcagagactggccaattcaaggagcagctttggcgtaccttccgaagcattgcactcactttcctagtaatctccggcatcggggctctgattgaagatagaggaattagtaaaggccttggattgcatgaagaggttcagccaagcttggattcgagcacaaaattcagtgatgtcaagggggttgatgaagctaaagctgaactcgaggaaatagttcactacctacgagatcccaagcgtttcacacgccttggtggcaagcttccaaaaggtgttttgcttgtcggcccacccgggacagggaaaaccatgttggcaagggccatcgctggggaagctggtgttcctttcttctcctgcagtggcagtgagtttgaggagatgtttgtgggtgtcggggcgagaagagtgagggatctcttcagtgcagcaaagaagagatctccttgtataattttcattgatgaaattgatgcaatcggtgggagcagaaacccaaaagatcaacagtatatgaagatgaccttgaaccagttgcttgttgagctggatggctttaagcagaatgatgggataattgtaattgcagcaacaaacttcccccagtcactggataaagcccttgttaggcctgggcggtttgatcgtcatatcgtggttcctaacccagatgttgagggccgacgtcagatcctggagactcatatgtcaaaggtgttaaaagcagacgatgtggatttgatgaccattgccaggggaacgcctggattctcaggtgcagaccttgcaaacctggtgaacgtggctgctctcaaggctgccatggatggagcgaaatccgtttcaatgaccgacctcgagtttgccaaggacaggatcatgatgggcagcgagcgcaaatcagcagtgatatccgacgaaagcaggaagatgactgcataccatgagggagggcatgcgctggtcgcgatacacacggccggtgcccaccctgtccacaaggccaccattgttccgaggggaatgtctttgggcatggtcacgcagctgccagagaaggaccagaccagcgtatctaggaagcagatgctggcaaggctggacgtctgcatgggagggcgggtggccgaggagcttatattcggggagagcgaggtgacgtccggcgcgtcgtccgacctcagccaggcgacccggctggccaaggccatggtgaccaagtacggcatgagcaagcgcgtgggcctcgtggcctacaactacgacgacgacggcaagaccatgagcacgcagacgcggggcctggtggagcaggaggtgaaggagctgctggagacggcctacaacaacgccaagacgatcctcacgacccacaacaaggagctgcacgtgctcgccaacgccctcatcgagcgcgagaccctcaccggcgcccagatcaagaaccttctgtcgcaggtgaacagcagcagtgacacccagcagccccaggccgccgaggttccacagcaaacacctgctgccccagcctcgccccagtctccagcagcagcggctgcggccgctgcagcagctgcagcacagcaagcggcggctcaagccaaaggagtcgcaggcatcgggtcctag

SEQ ID NO: 60840 - protein, 706 aa, Triticum aestivum
MAWRLALSKAGRRSSSVVYNELVSTSAFRTPANGTGGVLKALQERYRSSYVGSFARRLRDFDTPSDASLLKEIYRSNPERVVQIFESQPSLHNNSSALSQYVKALVALDRLDESPLLKTLQRGIVNSAREEEGLSGIPAFQSVGRTTKDGALGTAGAPIHMVASETGQFKEQLWRTFRSIALTFLVISGIGALIEDRGISKGLGLHEEVQPSLDSSTKFSDVKGVDEAKAELEEIVHYLRDPKRFTRLGGKLPKGVLLVGPPGTGKTMLARAIAGEAGVPFFSCSGSEFEEMFVGVGARRVRDLFSAAKKRSPCIIFIDEIDAIGGSRNPKDQQYMKMTLNQLLVELDGFKQNDGIIVIAATNFPQSLDKALVRPGRFDRHIVVPNPDVEGRRQILETHMSKVLKADDVDLMTIARGTPGFSGADLANLVNVAALKAAMDGAKSVSMTDLEFAKDRIMMGSERKSAVISDESRKMTAYHEGGHALVAIHTAGAHPVHKATIVPRGMSLGMVTQLPEKDQTSVSRKQMLARLDVCMGGRVAEELIFGESEVTSGASSDLSQATRLAKAMVTKYGMSKRVGLVAYNYDDDGKTMSTQTRGLVEQEVKELLETAYNNAKTILTTHNKELHVLANALIERETLTGAQIKNLLSQVNSSSDTQQPQAAEVPQQTPAAPASPQSPAAAAAAAAAAAAQQAAAQAKGVAGIGS

SEQ ID NO: 60841 - DNA, 2448 bp, Zea mays
  CDS (1)..(2448)
atgacgctcgcctccctcgcccgcgccctcggccggtccgcgcgctcctcccgcccgcgccagggtttccagctcgggggcctccggcagccgcccgcgccaccgctaccgccgcccgtccacggcggtgagggtggggcggcaggatttgttcgcagctacctgactgcggcctcgtcggcagctcttgggaagccatccgcgggcaagaccgtggattggagatatgtcctcgccagcccacatttccgacgcctcttctcggacgggtccaagaagaactacgagaactattaccccaagggtaagaaggaggtgcctaaaggagatggtacaaacaagtctgaatctaagcaggaatccaatacagatgaaggatggaattttcaggataatgctatgaaacacatgcagaatttccttgcgcctttattgattcttggcctgatgctatcatccatgtcatctagctctgcagaccagaaggagataagcttccaagagttcaagaacaagttactagaacctggtttagttgatcgcattgttgtttcaaataaatcagtagcgaaggtctacatcaggagttcacctcatccaaagagccaaggccaagatagtgatatccatattactaccactgatgctccaggcaagcctgctcccagcagatgcaagtattacttcaatattggtagtgttgatttgtttgaagagaagttagaggaagcccaggaagctttgggaatagatccacatgattttgtcccagtaacttatgttgctgaagtaaattggttccaagaagttatgaggtttgccccaacagcattgattgttggtctattatatttcacgggaaaaaggatgcagagtggtttcaatattggaggtggtgctggcaaaggaagaggaggtattttcaacattggaaaagctacagtgatgaagatggacaagaactccaaaaataaggtgttttttaaggatgtagccggttgtgacgaagcaaaacaagaaataatggagtttgtgcatttccttaaaaaccctaagaagtatgaagatttgggagctaaaatacccaaaggtgctctacttgtaggccctcctgggacagggaagactttgctcgccaaagctacagcaggagagtctggtgtgccatttttgtctatttctggttcagatttcatggaaatgtttgttggtgttggaccgtccagggtacggaacttgttccaagaagctaggcagtgtgctcctagtattgtattcattgacgaaatcgatgctattggtcgtgcaagaggacgtggaggtttttcaggttcaaatgatgaacgtgagagtactttgaaccagctgcttgtagagatggatggatttggaacaacttctggtgttgttgttcttgctgggacaaatagacctgacatcctggataaggcattattaaggccaggaagatttgatcgccagatagcaattgacaaaccagatataaagggccgtgatcaaatattccgcatatatcttaaaaagcttaagttggacaacaaaccatcattttattcgcaaaggctagctgccttgacacctgggttcgcaggagctgacattgccaatgtttgtaatgaagctgctttaattgctgcgagaagtgaggaaactcagattaccatgcagcattttgagtccgcaattgataggattatcggtggtttggagaagaaaaatagggtcattagcaaactggagcgccgtactgttgcttaccatgaatctggacatgcagttgctggatggttcttggaacatgctgagcctcttctaaaagttacaattgttcctcgtggaacagctgctttaggctttgcacaatacgtcccaaatgaaaatcttttgatgacaaaagagcagctttttgatatgacatgcatgacattaggtggccgtgctgcagaggaggttttgattggcaaaatctcaactggtgctcagaatgacctggagaaagttaccaaaatgacatatgcacaggtcgccgtgtatggttttagtgaaaaggttgggcttctgtccttcccccagaaagatggtggtttcgaaatgagcaagccttacagtaatcagacagcatccatcatcgacgatgaggtccgggaatgggttggcaaggcctacaagaaaacagttgaattgataacagagcacaaggagcaagttgcacagatcgcagaattgctgctcgagaaggaagtcctacaccaggacgatctaaccagggtactaggagaacgtccattcaaggcactggagccaaccaactacgacctctttaagaaaggtttcgaggatggtggtgacaacagccaagcaccagcagagaacgccgagctgcctgatgattcatctcccccagttggtgacgttgtacccacgtag

SEQ ID NO: 60842 - protein, 815 aa, Zea mays
MTLASLARALGRSARSSRPRQGFQLGGLRQPPAPPLPPPVHGGEGGAAGFVRSYLTAASSAALGKPSAGKTVDWRYVLASPHFRRLFSDGSKKNYENYYPKGKKEVPKGDGTNKSESKQESNTDEGWNFQDNAMKHMQNFLAPLLILGLMLSSMSSSSADQKEISFQEFKNKLLEPGLVDRIVVSNKSVAKVYIRSSPHPKSQGQDSDIHITTTDAPGKPAPSRCKYYFNIGSVDLFEEKLEEAQEALGIDPHDFVPVTYVAEVNWFQEVMRFAPTALIVGLLYFTGKRMQSGFNIGGGAGKGRGGIFNIGKATVMKMDKNSKNKVFFKDVAGCDEAKQEIMEFVHFLKNPKKYEDLGAKIPKGALLVGPPGTGKTLLAKATAGESGVPFLSISGSDFMEMFVGVGPSRVRNLFQEARQCAPSIVFIDEIDAIGRARGRGGFSGSNDERESTLNQLLVEMDGFGTTSGVVVLAGTNRPDILDKALLRPGRFDRQIAIDKPDIKGRDQIFRIYLKKLKLDNKPSFYSQRLAALTPGFAGADIANVCNEAALIAARSEETQITMQHFESAIDRIIGGLEKKNRVISKLERRTVAYHESGHAVAGWFLEHAEPLLKVTIVPRGTAALGFAQYVPNENLLMTKEQLFDMTCMTLGGRAAEEVLIGKISTGAQNDLEKVTKMTYAQVAVYGFSEKVGLLSFPQKDGGFEMSKPYSNQTASIIDDEVREWVGKAYKKTVELITEHKEQVAQIAELLLEKEVLHQDDLTRVLGERPFKALEPTNYDLFKKGFEDGGDNSQAPAENAELPDDSSPPVGDVVPT

SEQ ID NO: 60843 - DNA, 2448 bp, Zea mays
  CDS (1)..(2448)
atgacgctcgcctccctcgcccgcgccctcggccggtccgcgcgctcctcccgcccgcgccagggtttccagctcgggggcctccggcagccgcccgcgccaccgctaccgccgcctgtccacggcggtgagggtggggcggcaggatttgttcgcagctacctgactgcggcctcgtcggcagctcttgggaagccatccgcgggcaagacggtggattggagatatgtcctcgccagcccacatttccgacgcctcttctcggacgggtccaagaagaactacgagaactattaccccaagggtaagaaggaggtgcctaaaggagatggtacaaacaagtctgaatctaagcaggaatccaatacagatgaaggatggaattttcaggataatgctatgaaacacatgcagaatttccttgcgcctttattgattcttggcctgatgctatcatccatgtcatctagctctgcagaccagaaggagataagcttccaagagttcaagaacaagttactagaacctggtttagttgatcgcattgttgtttcaaataaatcagtagcgaaggtctacatcaggaattcacctcatccaaagagccaaggccaagatagtgatatccatattactaccactgatgctccaggcaagcctgctcccagcagatgcaagtattacttcaatattggtagtgttgatttgtttgaagagaagttagaggaagcccaggaagctttgggaatagatccacatgattttgtcccagtaacttatgttgctgaagtaaattggttccaagaagttatgaggtttgccccaacagcattgattattggtctattatatttcacgggaaaaaggatgcagagtggtttcaatattggaggtggtgctggcaaaggaagaggaggtattttcaacattggaaaagctacagtgatgaagatggacaagaactccaaaaataaggtgttttttaaggatgtagccggttgtgacgaagcaaaacaagaaataatggagtttgtgcatttccttaaaaaccctaagaagtatgaagatttgggagctaaaatacccaaaggtgctctacttgtaggccctcctgggacagggaagactttgctcgccaaagctacagcaggagagtctggtgtgccatttttgtctatttctggttcagatttcatggaaatgtttgttggtgttggaccgtccagggtacggaacttgttccaagaagctaggcagtgtgctcctagtattgtattcattgacgaaatcgatgctattggtcgtgcaagaggacgtggaggtttttcaggttcaaatgatgaacgtgagagtactttgaaccagctgcttgtagagatggatggatttggaacaacttctggtgttgttgttcttgctgggacaaatagacctgacatcctggataaggcattattaaggccaggaagatttgatcgccagatagcaattgacaaaccagatataaagggccgtgatcaaatattccgcatatatcttaaaaagcttaagttggacaacaaaccatcattttattctcaaaggctagctgccttgacacctgggttcgcaggagctgacattgccaatgtttgtaatgaagctgctttaattgctgcgagaagtgaggaaactcagattaccatgcagcattttgagtccgcaattgataggattatcggtggtttggagaagaaaaatagggtcattagcaaactggagcgccgtactgttgcttaccatgaatctggacatgcagttgctggatggttcttggaacatgctgagcctcttctaaaagttacaattgttcctcgtggaacagctgctttaggctttgcacaatacgtcccaaatgaaaatcttttgatgacaaaagagcagctttttgatatgacatgcatgacattaggtggccgtgctgcagaggaggttttgattggcaaaatctcaactggtgctcagaatgacctggagaaagttaccaaaatgacatatgcacaggtcgccgtgtatggttttagtgaaaaggttgggcttctgtccttcccccagaaagatggtggtttcgaaatgagcaagccttacagtaatcagacagcatccatcatcgacgatgaggtccgggaatgggttggcaaggcctacaagaaaacagttgaattgataacagagcacaaggagcaagttgcacagatcgcagaattgctgctcgagaaggaagtcctacaccaggacgatctaaccagggtactaggagaacgtccattcaaggcactggagccaaccaactacgacctctttaagaaaggtttcgaggatggtggtgacaacagccaagcaccagcagagaacgccgagctgcctgatgattcatctcccccagttggtgacgttgtacccacgtag

SEQ ID NO: 60844 - protein, 815 aa, Zea mays
MTLASLARALGRSARSSRPRQGFQLGGLRQPPAPPLPPPVHGGEGGAAGFVRSYLTAASSAALGKPSAGKTVDWRYVLASPHFRRLFSDGSKKNYENYYPKGKKEVPKGDGTNKSESKQESNTDEGWNFQDNAMKHMQNFLAPLLILGLMLSSMSSSSADQKEISFQEFKNKLLEPGLVDRIVVSNKSVAKVYIRNSPHPKSQGQDSDIHITTTDAPGKPAPSRCKYYFNIGSVDLFEEKLEEAQEALGIDPHDFVPVTYVAEVNWFQEVMRFAPTALIIGLLYFTGKRMQSGFNIGGGAGKGRGGIFNIGKATVMKMDKNSKNKVFFKDVAGCDEAKQEIMEFVHFLKNPKKYEDLGAKIPKGALLVGPPGTGKTLLAKATAGESGVPFLSISGSDFMEMFVGVGPSRVRNLFQEARQCAPSIVFIDEIDAIGRARGRGGFSGSNDERESTLNQLLVEMDGFGTTSGVVVLAGTNRPDILDKALLRPGRFDRQIAIDKPDIKGRDQIFRIYLKKLKLDNKPSFYSQRLAALTPGFAGADIANVCNEAALIAARSEETQITMQHFESAIDRIIGGLEKKNRVISKLERRTVAYHESGHAVAGWFLEHAEPLLKVTIVPRGTAALGFAQYVPNENLLMTKEQLFDMTCMTLGGRAAEEVLIGKISTGAQNDLEKVTKMTYAQVAVYGFSEKVGLLSFPQKDGGFEMSKPYSNQTASIIDDEVREWVGKAYKKTVELITEHKEQVAQIAELLLEKEVLHQDDLTRVLGERPFKALEPTNYDLFKKGFEDGGDNSQAPAENAELPDDSSPPVGDVVPT

SEQ ID NO: 60845 - DNA, 2448 bp, Zea mays
  CDS (1)..(2448)
atggcttccgccgccgtggaaaccctcgtctcgttcccaatcgcatcccgtccccgctcgctcctacgccccttcccgcggcgacctgccgccgccgccgccgccgggggatgcgcgccttcgatccggatatccgccgtgccgccgcggggcctcgggctcgcgctggtgcaccgccgcgcgcgccgctgcccgccagcggcgcgcgcgaatgttgagcacggcggcgacggcgcctctggtaacggcgagccgtcgtcctcgtccggggacggcgaccgcgacgcggctgcggactcggggggcgacaccaccggcacgagcaccacgagcgccgcccagacgccgccgccgccctcgtcgaagaggggcgaaaacaagtggcggcggaggctgactaagggaggtggcgtcgggcgctggctatgggagcccatagtccaggggcgggagatgggcttcctcctgctccagctcggcttcgccgtattcgcgctacgcatgcttcgaccggagatcgcgttgcctggctcagagccccgcccgcagaccacgtacgtcagtgtaccgtacagcgacttcctggcgagcatagacaaggaccaggtgaagaaggttgaggtggacggggtgcacgtcatgttccgactccgtccagaggttgagtcccaggtccgtgtggagcagacaccatcacagcgcggaacagatgctgtcgtcgataatgctggagtctcgaggagaattgtgttcaccacgactcgtccagtggacataaagacgccatacgagaagatggtggaaaacatggttgaatttgggtcaccggacaagaggtctggcggcacgctcaattctgcgctggtagctcttatttatgtcgtattgattgcagtagttttgcagcgtttgccaataagcttttctcagcattcagccggtcagttgaggaacaggaagaattctaattctggtagagcaaaagtttctgaaagtacagatatagttacatttgctgatgtggctggagtagatgaggcaaaagaagagcttgaagaaattgtggagttcttaaggaacccagaaagatatgttcgtcttggtgctcgccctcctcgtggtgtcttattggtgggtcttccagggactggaaagacacttcttgcaaaagccgtagcaggagaagcagaagtcccgttcataagttgctctgctagtgaatttgttgagctatatgtaggcatgggagcagctcgagtacgtgacctatttgctaaggccaaaaaggaatcaccgtcgattatttttatcgatgagattgatgctgttgcaaaaagccgtgatggtcgatatcgcattgtcagtaatgatgaacgtgagcagacactaaaccaattgctcacggaaatggatggcttcgacaccaattcggctgtcattgtactaagggcaacaaatcgagctgatgttttggatcctgcccttaggcgacctgggagatttgaccgtgtagttatggttgaagctcctgataggtttggaagagaatcaattctaaaagttcatgtgagcagaagagagcttccactgagtaaagatgtagatctagccgatattgctgcaatgacaactggttttactggagcagaccttgcaaacttggtaaatgaagctgctttgttggctgggcgattaaataaagaaattgtggaaaagattgacttcatccatgcggttgagcgatctatagctgggatagagaaaaagcatgcaaaattgaagggtaatgaaaaggctgtcgttgcacggcatgaagtaggtcatgcactcgtgggaactgctgtagcgaaccttcttcctggacagccacgtgttgagaaattgagtatattgccaaggtcaggaggtgcattaggctttacatacacccctcccaccacagaggatagatatttactctttgttgatgaactacgtggccgtttagtaacacttctgggtgggagggcagcagaggaagttgttttagcaggacgggtttccactggtgcacttgatgacataagacgtgctactgacatggcctacaaagctgtagcagaatacggtcttaatcagcgcatcgggccaatatcacttgctacactgtcaaatggtgggttagatgactctggtggttctccatggggaagagatcagggccatctagttgatctcgttcagagggaagtaaaagcgcttttacagacggcactggaagtagctctttcagttattcgtgctaatcctgcagttttggaaggcctcggagcatatttagaagagaatgaaaaggttgaaggcgaggaacttgaagagtggctaaagtcagttgttgcatcaaaagagttgacctcttttatcagaggacagcaagagcaagttcttcagctggaagcaggctcctag

SEQ ID NO: 60846 - protein, 815 aa, Zea mays
MASAAVETLVSFPIASRPRSLLRPFPRRPAAAAAAGGCAPSIRISAVPPRGLGLALVHRRARRCPPAARANVEHGGDGASGNGEPSSSSGDGDRDAAADSGGDTTGTSTTSAAQTPPPPSSKRGENKWRRRLTKGGGVGRWLWEPIVQGREMGFLLLQLGFAVFALRMLRPEIALPGSEPRPQTTYVSVPYSDFLASIDKDQVKKVEVDGVHVMFRLRPEVESQVRVEQTPSQRGTDAVVDNAGVSRRIVFTTTRPVDIKTPYEKMVENMVEFGSPDKRSGGTLNSALVALIYVVLIAVVLQRLPISFSQHSAGQLRNRKNSNSGRAKVSESTDIVTFADVAGVDEAKEELEEIVEFLRNPERYVRLGARPPRGVLLVGLPGTGKTLLAKAVAGEAEVPFISCSASEFVELYVGMGAARVRDLFAKAKKESPSIIFIDEIDAVAKSRDGRYRIVSNDEREQTLNQLLTEMDGFDTNSAVIVLRATNRADVLDPALRRPGRFDRVVMVEAPDRFGRESILKVHVSRRELPLSKDVDLADIAAMTTGFTGADLANLVNEAALLAGRLNKEIVEKIDFIHAVERSIAGIEKKHAKLKGNEKAVVARHEVGHALVGTAVANLLPGQPRVEKLSILPRSGGALGFTYTPPTTEDRYLLFVDELRGRLVTLLGGRAAEEVVLAGRVSTGALDDIRRATDMAYKAVAEYGLNQRIGPISLATLSNGGLDDSGGSPWGRDQGHLVDLVQREVKALLQTALEVALSVIRANPAVLEGLGAYLEENEKVEGEELEEWLKSVVASKELTSFIRGQQEQVLQLEAGS

SEQ ID NO: 60847 - DNA, 2067 bp, Zea mays
  CDS (1)..(2067)
atggcgccgccgtcggtgtccgcctcccacctcctaatcaccgcctcgctcccaaagcccaagccttcctccctccgcccgccgcggctccctctcgccaagccccttcccgcatcggcggcgctcctggcgctcgcggcctcgcccgcgctcgccgccgacgcgccggcgcctgcccccgccccaacccccgcgccggcgccggagctccaggccgaggcgcccaccccgacagtcaaccccttctccagctccctcctcacggcccccaagccctccgccgcggcctccgacctccccgagggcgctcagtggcgctacagcgagttcctctccgccgtcaagcgcggcaaggtcgagcgcgtgcgcttttccaaggacggcggtctgctccagctcaccgccgtcgacggccgccgcgccaccgtcgtcgtccccaacgaccccgacctcatagacatcctcgccaccaacggcgtcgacatctccgtctccgagggcgagtcggcgggcccgggcggcttcgtcgccttcgtcggcaacctcctcttcccttttatcgcgttcgctggcctcttcttcctcttccgccgcgcgcagggcgggcccggcgccgggcctggtggcctcggcgggcccatggacttcggccgctccaagagcaagttccaggaggtgcctgagacgggtgtcaccttcctcgacgttgccggcgcggaccaggccaagctcgagctgcaggaggtcgtggatttcctcaagaaccccgacaagtacaccgcgctcggagccaagatccccaagggttgtctcctcgtcggcccgcctgggaccgggaagaccctccttgcgcgtgccgtcgctggggaggccggggtgcccttcttctcctgcgctgcctctgagttcgtcgagctcttcgtcggtgtcggtgcctccagggtgcgcgacctcttcgagaaggccaaggccaaggcgccctgcattgtcttcattgatgagattgatgccgttggaaggcagcgcggtgccggacttggtgggggtaatgacgagagagagcagaccattaaccagctcttgacggagatggatggcttcgctggcaacagcggtgtcattgtgcttgccgccaccaacaggcccgatgtgctggactccgcgctcctacgaccagggagatttgataggcaggtcaccgttgacaggccagatgttgccggacgcgtcaagattcttgaggtccactcccgaggaaaggctttggcgaaagatgttgattttgataaaattgctagaaggacccctggtttcactggtgctgacctccaaaacctcatgaatgaggctgccatccttgctgctcgccgtgatcttaaggaaattagcaaggatgagatctctgatgctcttgagagaatcattgctggccctgagaagaaaaatgctgttgtttccgaggagaagaagaggctcgtcgcttaccatgaggctggccatgcccttgtcggcgccctcatgccagagtatgatccagtagccaagatttccatcatccctcgtggccaggctggtggactcacattctttgctccaagcgaagaaaggctagaatctggattgtacagcaggagctatcttgagaaccaaatggctgtagcccttggtggcagggttgctgaggaggtgatctttggccaagacaacgtgacaacaggagcttccaacgacttcatgcaagtgtcacgtgtcgcaaggcagatggtcgaaagatttggattcagtaagaagatcggccaagttgcgatcgggggaccgggtggaaaccctttcttggggcaacagatgtcaagccagaaggactactctatggcaacagcggatgttgtggacgccgaggtgagggaactcgtggagaaggcctactctagagcaaggcagataatcaccacgcacatcgacatcctccacaagctcgcccagctcctgatcgagaaggagaccgtggacggggaggagttcatgagcttgttcattgacggccaggccgagctgtttgtcgcttga

SEQ ID NO: 60848 - protein, 688 aa, Zea mays
MAPPSVSASHLLITASLPKPKPSSLRPPRLPLAKPLPASAALLALAASPALAADAPAPAPAPTPAPAPELQAEAPTPTVNPFSSSLLTAPKPSAAASDLPEGAQWRYSEFLSAVKRGKVERVRFSKDGGLLQLTAVDGRRATVVVPNDPDLIDILATNGVDISVSEGESAGPGGFVAFVGNLLFPFIAFAGLFFLFRRAQGGPGAGPGGLGGPMDFGRSKSKFQEVPETGVTFLDVAGADQAKLELQEVVDFLKNPDKYTALGAKIPKGCLLVGPPGTGKTLLARAVAGEAGVPFFSCAASEFVELFVGVGASRVRDLFEKAKAKAPCIVFIDEIDAVGRQRGAGLGGGNDEREQTINQLLTEMDGFAGNSGVIVLAATNRPDVLDSALLRPGRFDRQVTVDRPDVAGRVKILEVHSRGKALAKDVDFDKIARRTPGFTGADLQNLMNEAAILAARRDLKEISKDEISDALERIIAGPEKKNAVVSEEKKRLVAYHEAGHALVGALMPEYDPVAKISIIPRGQAGGLTFFAPSEERLESGLYSRSYLENQMAVALGGRVAEEVIFGQDNVTTGASNDFMQVSRVARQMVERFGFSKKIGQVAIGGPGGNPFLGQQMSSQKDYSMATADVVDAEVRELVEKAYSRARQIITTHIDILHKLAQLLIEKETVDGEEFMSLFIDGQAELFVA

SEQ ID NO: 60849 - DNA, 20 bp, Artificial sequence
  primer
atgccgcagcggttcaaccc

SEQ ID NO: 60850 - DNA, 23 bp, Artificial sequence
  primer
ttattcctgccctaggtcctcgg

SEQ ID NO: 60851 - protein, 530 aa, Artificial sequence
  consensus sequence
  Variant (2)..(34): Xaa in position 2 to 34 is any amino acid
  Variant (35)..(55): Xaa in position 35 to 55 is any or no amino acid
  Variant (57)..(57): Xaa in position 57 is any amino acid
  Variant (62)..(63): Xaa in position 62 to 63 is any amino acid
  Variant (67)..(67): Xaa in position 67 is any amino acid
  Variant (69)..(70): Xaa in position 69 to 70 is any amino acid
  Variant (72)..(72): Xaa in position 72 is any amino acid
  Variant (74)..(74): Xaa in position 74 is any amino acid
  Variant (77)..(78): Xaa in position 77 to 78 is any amino acid
  Variant (80)..(83): Xaa in position 80 to 83 is any amino acid
  Variant (84)..(85): Xaa in position 84 to 85 is any or no amino acid
  Variant (87)..(88): Xaa in position 87 to 88 is any amino acid
  Variant (91)..(91): Xaa in position 91 is any amino acid
  Variant (93)..(93): Xaa in position 93 is any amino acid
  Variant (96)..(96): Xaa in position 96 is any amino acid
  Variant (108)..(108): Xaa in position 108 is any amino acid
  Variant (110)..(110): Xaa in position 110 is any amino acid
  Variant (115)..(115): Xaa in position 115 is any amino acid
  Variant (119)..(121): Xaa in position 119 to 121 is any amino acid
  Variant (125)..(125): Xaa in position 125 is any amino acid
  Variant (127)..(127): Xaa in position 127 is any amino acid
  Variant (136)..(136): Xaa in position 136 is any amino acid
  Variant (141)..(141): Xaa in position 141 is any amino acid
  Variant (143)..(144): Xaa in position 143 to 144 is any amino acid
  Variant (146)..(148): Xaa in position 146 to 148 is any amino acid
  Variant (151)..(151): Xaa in position 151 is any amino acid
  Variant (153)..(153): Xaa in position 153 is any amino acid
  Variant (161)..(161): Xaa in position 161 is any amino acid
  Variant (163)..(164): Xaa in position 163 to 164 is any amino acid
  Variant (166)..(167): Xaa in position 166 to 167 is any amino acid
  Variant (168)..(173): Xaa in position 168 to 173 is any or no amino acid
  Variant (175)..(175): Xaa in position 175 is any amino acid
  Variant (176)..(176): Xaa in position 176 is any or no amino acid
  Variant (181)..(181): Xaa in position 181 is any amino acid
  Variant (188)..(188): Xaa in position 188 is any amino acid
  Variant (194)..(197): Xaa in position 194 to 197 is any amino acid
  Variant (198)..(206): Xaa in position 198 to 206 is any or no amino acid
  Variant (212)..(212): Xaa in position 212 is any amino acid
  Variant (214)..(214): Xaa in position 214 is any amino acid
  Variant (217)..(217): Xaa in position 217 is any amino acid
  Variant (220)..(220): Xaa in position 220 is any amino acid
  Variant (228)..(233): Xaa in position 228 to 233 is any amino acid
  Variant (236)..(237): Xaa in position 236 to 237 is any amino acid
  Variant (240)..(240): Xaa in position 240 is any amino acid
  Variant (241)..(241): Xaa in position 241 is any or no amino acid
  Variant (243)..(245): Xaa in position 243 to 245 is any amino acid
  Variant (247)..(260): Xaa in position 247 to 260 is any amino acid
  Variant (261)..(285): Xaa in position 261 to 285 is any or no amino acid
  Variant (287)..(288): Xaa in position 287 to 288 is any amino acid
  Variant (293)..(293): Xaa in position 293 is any amino acid
  Variant (298)..(298): Xaa in position 298 is any amino acid
  Variant (300)..(301): Xaa in position 300 to 301 is any amino acid
  Variant (306)..(307): Xaa in position 306 to 307 is any amino acid
  Variant (311)..(323): Xaa in position 311 to 323 is any amino acid
  Variant (325)..(330): Xaa in position 325 to 330 is any amino acid
  Variant (332)..(332): Xaa in position 332 is any amino acid
  Variant (333)..(334): Xaa in position 333 to 334 is any or no amino acid
  Variant (336)..(347): Xaa in position 336 to 347 is any amino acid
  Variant (348)..(349): Xaa in position 348 to 349 is any or no amino acid
  Variant (354)..(354): Xaa in position 354 is any amino acid
  Variant (358)..(369): Xaa in position 358 to 369 is any amino acid
  Variant (370)..(374): Xaa in position 370 to 374 is any or no amino acid
  Variant (376)..(377): Xaa in position 376 to 377 is any amino acid
  Variant (379)..(379): Xaa in position 379 is any amino acid
  Variant (383)..(383): Xaa in position 383 is any amino acid
  Variant (384)..(384): Xaa in position 384 is any or no amino acid
  Variant (386)..(386): Xaa in position 386 is any amino acid
  Variant (388)..(392): Xaa in position 388 to 392 is any amino acid
  Variant (394)..(412): Xaa in position 394 to 412 is any amino acid
  Variant (413)..(416): Xaa in position 413 to 416 is any or no amino acid
  Variant (420)..(420): Xaa in position 420 is any amino acid
  Variant (423)..(431): Xaa in position 423 to 431 is any amino acid
  Variant (432)..(433): Xaa in position 432 to 433 is any or no amino acid
  Variant (436)..(437): Xaa in position 436 to 437 is any amino acid
  Variant (439)..(439): Xaa in position 439 is any amino acid
  Variant (440)..(442): Xaa in position 440 to 442 is any or no amino acid
  Variant (444)..(445): Xaa in position 444 to 445 is any amino acid
  Variant (447)..(448): Xaa in position 447 to 448 is any amino acid
  Variant (451)..(453): Xaa in position 451 to 453 is any amino acid
  Variant (455)..(455): Xaa in position 455 is any amino acid
  Variant (457)..(458): Xaa in position 457 to 458 is any amino acid
  Variant (459)..(459): Xaa in position 459 is any or no amino acid
  Variant (461)..(468): Xaa in position 461 to 468 is any amino acid
  Variant (469)..(485): Xaa in position 469 to 485 is any or no amino acid
  Variant (487)..(489): Xaa in position 487 to 489 is any amino acid
  Variant (490)..(493): Xaa in position 490 to 493 is any or no amino acid
  Variant (495)..(495): Xaa in position 495 is any amino acid
  Variant (497)..(525): Xaa in position 497 to 525 is any amino acid
  Variant (527)..(529): Xaa in position 527 to 529 is any amino acid
PXXXXXXXXXXXXXXXXXXXXXXXXXXXXXXXXXXXXXXXXXXXXXXXXXXXXXXFXDVAGXXEAKXEXXEXVXFLXXPXXXXXXGXXIPXGXLLXGPPGTGKTLLAXAXAGEAXVPFXXXSGSXFXEMFVGVGAXRVRDXFXXAXXXAPXIXFIDEIDAXGXXRXXXXXXXXGXXDEREXTLNQLLXEMDGFXXXXXXXXXXXXXAATNRXDXLDXALXRPGRFDRXXXXXXPDXXGRXXIXXXHXXXXXXXXXXXXXXXXXXXXXXXXXXXXXXXXXXXXXXXAXXTPGFXGADLXNXXNEAAXXAARXXXXXXXXXXXXXAXXXXXXGXXXEXXXXXXXXXXXXXXAYHEXGHAXXXXXXXXXXXXXXXXXKXXIXPRGXXAXGXXXXXPXXXXXXXXXXXXXXXXXXXXXXXGGRXAEXXXXXXXXXXXGAXXDXXXXTXXAXXMVXXXGXSXXXGXXXXXXXXXXXXXXXXXXXXXXXXXSXXXXXXXDXEXXXXXXXXXXXXXXXXXXXXXXXXXXXXXLXXXE

SEQ ID NO: 60852 - protein, 32 aa, Artificial sequence
  protein pattern
  Variant (9)..(9): Xaa in position 9 is Lys or Arg
  Variant (11)..(11): Xaa in position 11 is any amino acid
  Variant (15)..(15): Xaa in position 15 is Ala or Ser
  Variant (16)..(16): Xaa in position 16 is any amino acid
  Variant (20)..(20): Xaa in position 20 is any amino acid
  Variant (21)..(24): Xaa in position 21 to 24 is any or no amino acid
  Variant (26)..(26): Xaa in position 26 is Ala, Asp, Glu, Gly or Ser
  Variant (28)..(28): Xaa in position 28 is any amino acid
  Variant (29)..(29): Xaa in position 29 is Asp, Glu or Gln
  Variant (30)..(30): Xaa in position 30 is Ile, Leu, Met or Val
  Variant (31)..(31): Xaa in position 31 is any amino acid
GTGKTLLAXAXAGEXXVPFXXXXXSXFXXXXV

SEQ ID NO: 60853 - protein, 21 aa, Artificial sequence
  protein pattern
  Variant (2)..(2): Xaa in position 2 is Ala, Gly or Ser
  Variant (3)..(3): Xaa in position 3 is any amino acid
  Variant (4)..(4): Xaa in position 4 is Asp, Glu or Ser
  Variant (6)..(6): Xaa in position 6 is Gln or Arg
  Variant (8)..(8): Xaa in position 8 is Ala, Asn, Gln, Ser or Thr
  Variant (10)..(10): Xaa in position 10 is Ile or Leu
  Variant (13)..(13): Xaa in position 13 is any or no amino acid
  Variant (15)..(15): Xaa in position 15 is any amino acid
  Variant (16)..(16): Xaa in position 16 is any or no amino acid
GXXXEXEXTXNQXLXXEMDGF

SEQ ID NO: 60854 - protein, 21 aa, Artificial sequence
  protein pattern
  Variant (2)..(2): Xaa in position 2 is Ala, Pro, Ser or Thr
  Variant (3)..(4): Xaa in position 3 to 4 is any amino acid
  Variant (5)..(5): Xaa in position 5 is Ala, Ser, Thr or Val
  Variant (6)..(6): Xaa in position 6 is Gly or Pro
  Variant (7)..(7): Xaa in position 7 is Ala or Val
  Variant (8)..(8): Xaa in position 8 is Asp, Glu or Asn
  Variant (9)..(9): Xaa in position 9 is Ile, Leu or Val
  Variant (10)..(10): Xaa in position 10 is any amino acid
  Variant (12)..(13): Xaa in position 12 to 13 is any amino acid
  Variant (18)..(18): Xaa in position 18 is any or no amino acid
  Variant (20)..(20): Xaa in position 20 is any or no amino acid
TXXXXXXXXXNXXNEAAXLXA

SEQ ID NO: 60855 - protein, 20 aa, Artificial sequence
  protein pattern
  Variant (2)..(3): Xaa in position 2 to 3 is any amino acid
  Variant (5)..(5): Xaa in position 5 is any amino acid
  Variant (6)..(6): Xaa in position 6 is Lys or Arg
  Variant (7)..(7): Xaa in position 7 is Phe or Tyr
  Variant (8)..(9): Xaa in position 8 to 9 is any amino acid
  Variant (10)..(10): Xaa in position 10 is Ile, Leu or Val
  Variant (12)..(12): Xaa in position 12 is Ala or Gly
  Variant (13)..(14): Xaa in position 13 to 14 is any amino acid
  Variant (16)..(16): Xaa in position 16 is any amino acid
  Variant (18)..(18): Xaa in position 18 is any amino acid
  Variant (20)..(20): Xaa in position 20 is Leu or Met
LXXPXXXXXXGXXXPXGXLX

SEQ ID NO: 60856 - protein, 11 aa, Artificial sequence
  protein pattern
  Variant (2)..(3): Xaa in position 2 to 3 is any or no amino acid
  Variant (7)..(7): Xaa in position 7 is any amino acid
  Variant (11)..(11): Xaa in position 11 is Ile, Leu, Met or Val
AXXYHEXGHAX

SEQ ID NO: 60857 - protein, 18 aa, Artificial sequence
  protein pattern
  Variant (2)..(2): Xaa in position 2 is any or no amino acid
  Variant (4)..(4): Xaa in position 4 is any or no amino acid
  Variant (8)..(8): Xaa in position 8 is any amino acid
  Variant (9)..(9): Xaa in position 9 is Ala, Asp, Glu or Asn
  Variant (10)..(10): Xaa in position 10 is Glu, Gly or Gln
  Variant (11)..(13): Xaa in position 11 to 13 is any amino acid
  Variant (14)..(14): Xaa in position 14 is Ala, Asp or Glu
  Variant (15)..(15): Xaa in position 15 is Phe, Ile, Leu or Val
  Variant (16)..(16): Xaa in position 16 is any amino acid
  Variant (18)..(18): Xaa in position 18 is Phe, Ile, Leu, Met or Val
FXDXVAGXXXXXXXXXEX

SEQ ID NO: 60858 - protein, 12 aa, Artificial sequence
  protein pattern
  Variant (2)..(2): Xaa in position 2 is Ala, Ile or Val
  Variant (3)..(3): Xaa in position 3 is Ser or Thr
  Variant (5)..(5): Xaa in position 5 is Ile, Leu, Met or Val
  Variant (9)..(9): Xaa in position 9 is any amino acid
  Variant (10)..(10): Xaa in position 10 is Ala, Gly or Ser
  Variant (11)..(11): Xaa in position 11 is any amino acid
  Variant (12)..(12): Xaa in position 12 is Gly or Leu
KXXIXPRGXXXX

SEQ ID NO: 60859 - DNA, 1068 bp, Thermus thermophilus
  CDS (1)..(1068): transl_table=11
atgttcgccctctccaaacgcctcaccgacgcctttagcctccgcttcgcccgggcggtgcgggagacctaccgggaggacgaggcctacgccagcacccccttgggccgcctcgccctctacgcctttctcctcctgctcctcctcctccccctcctcctcggcccctaccccatgtacgtggccaccctggtggccatcggggccctctccgccctgggcctccacctcctggtggggggcgcggggcagatctccttaggccacgccgccttcatgggggtgggggcctacgcggcaagccacctcacgggccccctcgcccccttggggatcctcctcgggggcgggatcgccgcctttttggggcttctcctcggcctcccctccctcaggatcaagggggtgtacctggccatcgccaccctggccttccagttcctggcggactacgtcttcaagacctgggaggcggtcacgggggggatccggggccggacccttcctccccccgaggtcttgggcctcgtcctggacaccccggagaagctctggtacctggtcctcctcttcgccctccccctcttcttctacggcaagcgcctcctcatgacccgcgccgggcgggccttccgggcggtgcgggacaacgacctctccgcccgggtggccggggtggacctcacccggaccaagctcctcgccttcgccctctccgccttctacgccggggtggcgggggggcttctcgccgggctctacaaggcggtgaccccggagtactttcccctctccgtgagcatccagtacctggccatggtcatcgtgggcggggcggggacggtcttgggagcggtcttgggggccttcttcgtcctcctcatccccgaggtgctcaatagcttcgtgggggccctgggcccggagtacgccgcccagctcgccgcctggcgcaacgtggtcttcggcggcctcatcctcctcttcctggtcctcgagcccctgggcctggtggggctttgggggcgggtgcgggactacttccgcacctggcccctgccctactaa

SEQ ID NO: 60860 - protein, 355 aa, Thermus thermophilus
MFALSKRLTDAFSLRFARAVRETYREDEAYASTPLGRLALYAFLLLLLLLPLLLGPYPMYVATLVAIGALSALGLHLLVGGAGQISLGHAAFMGVGAYAASHLTGPLAPLGILLGGGIAAFLGLLLGLPSLRIKGVYLAIATLAFQFLADYVFKTWEAVTGGIRGRTLPPPEVLGLVLDTPEKLWYLVLLFALPLFFYGKRLLMTRAGRAFRAVRDNDLSARVAGVDLTRTKLLAFALSAFYAGVAGGLLAGLYKAVTPEYFPLSVSIQYLAMVIVGGAGTVLGAVLGAFFVLLIPEVLNSFVGALGPEYAAQLAAWRNVVFGGLILLFLVLEPLGLVGLWGRVRDYFRTWPLPY

SEQ ID NO: 60861 - DNA, 1089 bp, Xanthobacter autotrophicus Py2
  CDS (1)..(1089): transl_table=11
atgttctaccgtgaggccggccacttccacgacaagtaccgggacgagatggcgatcttccagatccgggaggaccgcatcggcatccgcctgctgctgatcgctgcctttgtcgccgtgccgcttctccacgcggccggcgtgccgcccttcgccggcgactatctcttcagcgcggtgctgacgccgctcctgatcctcgccaccgccgccatcggcctcaacctgctcgtcggctattgcgggcagatctccctcggcgccggtgccttcatgggggtgggggcctacgctgcctacaacgtgtcggtccacctgccgggactgccgctcctcgccaccttcctgctggcgggtgcggcaagcgccgtcgtgggcctcgtcttcggcatcccctcgctgcgcatcaagggtctctacctcgcggtcgcgacgctcgccgcgcaattcttcctggactgggcgttcctgcgcgtcgggtggatcaccaattattccgcctccggctcggtcactgcgccgcccctcgtcatcgccggctggcacgtggactcgccggtggaacgctatctgctcgtcctcgccgtcgcggccatcgtggcgctcggcgccgcgaacctggtgcggggcaatctcggccggcaatggatggcgatccgcgacatggacatcgcggccgaaatcatcggcatccgccccatgcagtcgaagctgaccgcgttcgccatctcctccttcatcctggggctcgcgggggcgctgtgggcgttcgtcaacctgcgcgcgtgggagccctacgccttctccatcgaccgctcgttccagctgctgttcatcgtcatcatcggcgggctcggctccatcatcggctgctttttgggggcggccttcatctggctgctgccgctcgcggtcgaaggcatcccgcgctggctctcgatccccatcgctgcggatgccgcggcgaacctgacgctcggcgtgttcggcgcgctgatcctcatcacgctgatcttcgagccccacggcctcgcccgcatctgggccatcatgaaacacaaactccgacgctggcccttcccctactga

SEQ ID NO: 60862 - protein, 362 aa, Xanthobacter autotrophicus Py2
MFYREAGHFHDKYRDEMAIFQIREDRIGIRLLLIAAFVAVPLLHAAGVPPFAGDYLFSAVLTPLLILATAAIGLNLLVGYCGQISLGAGAFMGVGAYAAYNVSVHLPGLPLLATFLLAGAASAVVGLVFGIPSLRIKGLYLAVATLAAQFFLDWAFLRVGWITNYSASGSVTAPPLVIAGWHVDSPVERYLLVLAVAAIVALGAANLVRGNLGRQWMAIRDMDIAAEIIGIRPMQSKLTAFAISSFILGLAGALWAFVNLRAWEPYAFSIDRSFQLLFIVIIGGLGSIIGCFLGAAFIWLLPLAVEGIPRWLSIPIAADAAANLTLGVFGALILITLIFEPHGLARIWAIMKHKLRRWPFPY

SEQ ID NO: 60863 - DNA, 1071 bp, Xanthobacter autotrophicus Py2
  CDS (1)..(1071): transl_table=11
atggccatcgacacccttcgcccgtgcggcgactaccgcaccagctacaaggccgaccagaccatcttcgcgacccggctcaccatgctgttctgcgtggcgggcgtggtgctggcctgcttcgcgccgttcttcttctcgcgctacatcctgagcctgatgatccagatcgggtatctgggcatcgccgcgctggggctgaacatcctcgtcggcttttccgggcagatctcggtgggccatgcggtgttcttcggcttcggcggattcgcctccgccttcctcgccgacaagggcgtgccggtgccgctggctatcgtgcttgcgggactgtggaccacggcggtgggcctgttgttcggactgcccgccgcgcgggtgaaggggctctatctcgccatcgcgacgctggccgcccagttcatcctgcaggatttcttcgtgcgggcggaatggttcaccggcggcacccacggcgccatggccgcgcccttcaccctgttcggctatgacctctccggcgacgaccgctatttctacgtggtgctgttcttcgtggtggtcatgtatctgggcgccgccaacctgatgcgcagccgcgacggccgggcgctgatcgcggtgcgcgaccattatctctcggcggagatgatgggggtgaacctcaccaagtatcgcaccatggcgttcggcatctcctccttctatgccggcatcggcggcgcgctctatgcccattatgtggggttcatgtcagtggaggggctggatatcctgttctccatccagttcctgggcatgatcatcatcggcgggctcggctccatcatgggctcgctcatgggcaccatcttcatggtgcttttgcccgaggccaccggctggctcgcctccgcgctgtcgggtagcgtcatcgaccaggtgcttcacctgaaggacggcctcacctacatgcgcgagatgctgatcggcctcaccatcatcctgttcctgatcttcgagccggacggcctcgcccaccgctggcgcctcatcaaggcctattggaagctctatcccttctcttactga

SEQ ID NO: 60864 - protein, 356 aa, Xanthobacter autotrophicus Py2
MAIDTLRPCGDYRTSYKADQTIFATRLTMLFCVAGVVLACFAPFFFSRYILSLMIQIGYLGIAALGLNILVGFSGQISVGHAVFFGFGGFASAFLADKGVPVPLAIVLAGLWTTAVGLLFGLPAARVKGLYLAIATLAAQFILQDFFVRAEWFTGGTHGAMAAPFTLFGYDLSGDDRYFYVVLFFVVVMYLGAANLMRSRDGRALIAVRDHYLSAEMMGVNLTKYRTMAFGISSFYAGIGGALYAHYVGFMSVEGLDILFSIQFLGMIIIGGLGSIMGSLMGTIFMVLLPEATGWLASALSGSVIDQVLHLKDGLTYMREMLIGLTIILFLIFEPDGLAHRWRLIKAYWKLYPFSY

SEQ ID NO: 60865 - DNA, 1041 bp, Mesorhizobium loti MAFF303099
  CDS (1)..(1041): transl_table=11
atggccgcgatcacaagcaatttctcctccgcgccggtgctgccgaaatggaccgcgcccgtgctgctgcttgccttcgcctatggcatcgtgccgttgatcggttcgagctatctgttcgaagccatcctgctgccgttcctggccctcggtcttgccggcgtcgggctgaacatcctcaccggctatgccggccaggtttcgctgggcagcgccgccttcatggcggcgggtgccttcgctgcctataatttcaacctgagggtcgaaggcctgccgctgatcggcagcatcgtgctcgccggcatcgtcgccgcggcgatcggcatcgtcttcggcctgccaagcctgcggctgaaaggcttctatcttgccgtctcgacgcttgccgcgcagttcttcgtacaatgggcgctgaccaagttcagctggttctccaacaactccgcgtcgggcgtcatcgacgcgccgaggctgtcgatcggcggtcttgcgctggatggcgcggtcggccgctatctcttcgcgctgaccaccgtcgcgctcctcaccttccttgcccaccgtctggtcacgtcgcagaccggtcgcaacttcattgccatccgcgacaatgaaaccgccgcccgcatcatcggcatcccggtgctgaagaccaagcttctggccttcgccatctcgtccttcatcatcggcgtcgccggcgtcatctgggccttcgcctatctgcggaccgtcgagccggccggcttcgatctcgaccgctcgttccagatcctgttcatcatcatcatcggcggtctggcctccatccgtggtgccttcttcggcgccgccctgatcgtggtctttccgcttggcctgtcgcgcctcggcggcttcctgctcggcgatgtctttgactcgggcgtcctcgacatgagccagcgcatcgtgctcggcgccctcatcatcctgtttctgatcctggaacccgacgggctggtggccctgtgggacagggtccgaagacggctcctgttcgcctggcagtcgacatga

SEQ ID NO: 60866 - protein, 346 aa, Mesorhizobium loti MAFF303099
MAAITSNFSSAPVLPKWTAPVLLLAFAYGIVPLIGSSYLFEAILLPFLALGLAGVGLNILTGYAGQVSLGSAAFMAAGAFAAYNFNLRVEGLPLIGSIVLAGIVAAAIGIVFGLPSLRLKGFYLAVSTLAAQFFVQWALTKFSWFSNNSASGVIDAPRLSIGGLALDGAVGRYLFALTTVALLTFLAHRLVTSQTGRNFIAIRDNETAARIIGIPVLKTKLLAFAISSFIIGVAGVIWAFAYLRTVEPAGFDLDRSFQILFIIIIGGLASIRGAFFGAALIVVFPLGLSRLGGFLLGDVFDSGVLDMSQRIVLGALIILFLILEPDGLVALWDRVRRRLLFAWQST

SEQ ID NO: 60867 - DNA, 1038 bp, Aeropyrum pernix K1
  CDS (1)..(1038): transl_table=11
atgccggcgggagtattcaaggagagttacgaggctgatatggccatcttccggtaccccatccactgggcggctctaatactcgccgtggttgccgcggtcgccgcgcctttcgtaataggcaagtactacctcaacctgctggtagttatgatgatattctggatagccgccataggcctcaacataacgctgggcctcgcgggccagatatcacttgcccacgccgccctcatgggcataggagcctatacagtagctaacgcggcgctccacctgggtgtcaactccgtagccatactacctatagccgggttggcggccgccctcctgggtataatactaagcctgcccagcttcaggttgaaggagtactatctggctatggcaagcctcgcggcacagctcatactagagtacgtttactcgaggatagaccctgaccagtatacccccgtaccgccggagacgaagaccctcctcggcataagcctcacggagccgacggccctctactactttatactagcaataacagtggttatggcgctcgcagcggcgaacataggccgctccagcctggggagggcaatgaaagcggtaagggacaacgacgtcgcgtcagaggctataggcataaacgtccagctagttaaagctacagccttcgccatcggcgggttctacgccggagttgcaggcggcctctacgccatctacagttctgggataggctgggagggcttcaccctggtgaactcgatagagctcctgggcatggtgctgatcggcggcccgggcagggtggtttggggcagcctcctaggggtgttagttatgaggacgggctggactatgatggagagtactataacccctctgctagccgggattgggctatcgatcatagcctcctcagccaaatacatcgtcctgggcttcctgatagtggcgttcatcatagcggagcctgagggcttgatagcggtgctgaggagggttaaagagtacttcagactatggccttatagctattag

SEQ ID NO: 60868 - protein, 345 aa, Aeropyrum pernix K1
MPAGVFKESYEADMAIFRYPIHWAALILAVVAAVAAPFVIGKYYLNLLVVMMIFWIAAIGLNITLGLAGQISLAHAALMGIGAYTVANAALHLGVNSVAILPIAGLAAALLGIILSLPSFRLKEYYLAMASLAAQLILEYVYSRIDPDQYTPVPPETKTLLGISLTEPTALYYFILAITVVMALAAANIGRSSLGRAMKAVRDNDVASEAIGINVQLVKATAFAIGGFYAGVAGGLYAIYSSGIGWEGFTLVNSIELLGMVLIGGPGRVVWGSLLGVLVMRTGWTMMESTITPLLAGIGLSIIASSAKYIVLGFLIVAFIIAEPEGLIAVLRRVKEYFRLWPYSY

SEQ ID NO: 60869 - DNA, 1080 bp, Thermotoga maritima MSB8
  CDS (1)..(1080): transl_table=11
gtgatgaagatggagaagaaactatctgcacgaacgaacttcattctcacggttgttttcctgatcttcatggcccttcttctctatctggctgatagatacatggacagctacaagctgagagtagtgaggctcatcgccatatacggtatcatggcggtgagtttgaacctgataaacggtatcacgggtatcttttctcttggacacgccggtttcatcttgataggtgcttatacggcgtctcttctcacactttcaccagagcagaaagcgatgtcttttataatagagccgatcgttccctggcttgcgaacgcgcacaccgacttcttcaccgccacagtggcaggcggtgttctggcagccgtcttcgcttttctcatagggtggccggttttgaggctttccggtgattacctcgcgatagcgtcccttgggttcgcagaggtgataaggatcatcgctctcaacgccatcagcatcacaaacggccctctcggtctcaagggaattccggaatactcaaacatctggtggtgttacggctggctattcgtaacggttctgttcatggcaagccttgtgaacagtagctacggaagagctttgaaggccatcagagaagaccgcatagcagccgaagccatgggaataaatgttttcaaacatcagcttctttctttcgtcataggagccttctttgcgggtgtttctggttcgctctacgcgcactggctcaccacgatagatcccagaacgaccacactcggtcccatgctcactttctacgttctcatcatgatagttctgggtggactcggcagtatttccggttcgctcataggagccgctctcttcgctatactcttcgagtggctcagggatctggaagagcctttcacgttcttcggcatacacgttcccggtataaagggaatgaggatcctcgtgatatccgccattttcatccttgtgatgatcttctggcagaggggtatcatgggaagagaagaactcacctggaacaacctttacagatggctctttgctcgtcgcaggggtggtgaagagaaatga

SEQ ID NO: 60870 - protein, 359 aa, Thermotoga maritima MSB8
MMKMEKKLSARTNFILTVVFLIFMALLLYLADRYMDSYKLRVVRLIAIYGIMAVSLNLINGITGIFSLGHAGFILIGAYTASLLTLSPEQKAMSFIIEPIVPWLANAHTDFFTATVAGGVLAAVFAFLIGWPVLRLSGDYLAIASLGFAEVIRIIALNAISITNGPLGLKGIPEYSNIWWCYGWLFVTVLFMASLVNSSYGRALKAIREDRIAAEAMGINVFKHQLLSFVIGAFFAGVSGSLYAHWLTTIDPRTTTLGPMLTFYVLIMIVLGGLGSISGSLIGAALFAILFEWLRDLEEPFTFFGIHVPGIKGMRILVISAIFILVMIFWQRGIMGREELTWNNLYRWLFARRRGGEEK

SEQ ID NO: 60871 - DNA, 1053 bp, Campylobacter jejuni subsp. jejuni NCTC 11168
  CDS (1)..(1053): transl_table=11
atgatggttagaattaaggtttcacatttaatctttttaattgcttcaattatttttattttcatttctccttatatttttggggattatggattaaacattgttaatcaaattgctatttttattattttggctgtgagttacaatcttattaatggtgtaactggacaattttcactagaacccaatggatttgttgcgattggagcttatgcggctgctttagttcttttaagtgctgatgcaaaaaatgatcagttttttttagatggtcctagttcttttattttagctatccattcaaattcctttattctagctttaattgtggctggaatttgttcatctttacttgccctgattttggcttttgctgtatttcgcgtgagaggggattatttggctattgtaactttaggctttggaataattattaaaatagctgctattaattttccttctattactaatggctcaagagggctggtagatattccacaattttccacgatctattggacaggtggtattgctattgtagcggttattttaattttaaatatagtttattctaaatatggtcgtgcaatgaaggctataagagatgatgaagatgctgcaagcgctatgggaataaatactttttggataaaaactttagcttttagcacttcagcatttttagaaggtgtaggtggcggacttttagcttgtctgttgactaccgtatctccaactcaatttgattttttacttacttttcagcttttgattattattgttttaggtggacttggttctactacaggtgctattataggtgcgatattggttattggtggaagtgagtggcttagatttttagatgagttaaatataaaaatagattctttaaatcttgatatccaatcaacgccagggcttagaatggttgttttttctattgttctgattttagtaatgctttttgcaagaaaaggcataatgggttattatgagttgagtgatgtgattagagggattaaaaagcgttttaaaaggagcaaaaaatga

SEQ ID NO: 60872 - protein, 350 aa, Campylobacter jejuni subsp. jejuni NCTC 11168
MMVRIKVSHLIFLIASIIFIFISPYIFGDYGLNIVNQIAIFIILAVSYNLINGVTGQFSLEPNGFVAIGAYAAALVLLSADAKNDQFFLDGPSSFILAIHSNSFILALIVAGICSSLLALILAFAVFRVRGDYLAIVTLGFGIIIKIAAINFPSITNGSRGLVDIPQFSTIYWTGGIAIVAVILILNIVYSKYGRAMKAIRDDEDAASAMGINTFWIKTLAFSTSAFLEGVGGGLLACLLTTVSPTQFDFLLTFQLLIIIVLGGLGSTTGAIIGAILVIGGSEWLRFLDELNIKIDSLNLDIQSTPGLRMVVFSIVLILVMLFARKGIMGYYELSDVIRGIKKRFKRSKK

SEQ ID NO: 60873 - DNA, 1029 bp, Escherichia coli O157:H7 EDL933
  CDS (1)..(1029): transl_table=11
atgctgaagtttattcagaacaaccgtgaaatcacggcactgctggcggtgctgctgctgtttgtattacccggttttctcgaccgccagtatttaagtgtgcaaacgctgaccatggtttatagcagcgcgcaaatcctgatcctgctggcaatgggcgcgacgctggtaatgcttacgcgcaatattgatgtttcagtgggttcgattaccggaatgtgcgcggtgctgttggggatgttactgaacgcaggatattcactacctgttgcctgtgtcgcgactttactgcttggtttgctcgcgggatttttcaacggtgtcctggtcgcgtggctaaagatccctgccattgttgccacccttggcacgttagggttgtacagaggcatcatgttgctgtggactggcggtaaatggattgaagggttacccgccgaactgaaacagctctccgccccgctgctgcttggcgtttcagcaattggttggttaacgataattctggtggcatttatggcctggctgctggcgaagacagcgtttggacgcagtttttatgccacgggcgataatttacagggcgctcgtcaactgggcgttcgtacggaagccattcgcattgtggcattttcgttgaacggctgcatggcggcactggcgggaattgtgtttgcttcgcagattggttttatccccaaccagaccggtaccgggctggagatgaaagcaattgcagcctgcgtgctgggcggcattagtttgctcggcggttccggtgcgatcatcggtgcggtactcggcgcatggttcctgacgcagatcgatagcgtactggtgctgttgcgcattccggcatggtggaatgattttatcgcgggtctggttctgctggcggtgctggtgtttgatggacgcctgcgttgtgcgctggaacttaatctgcggcggcaaaaatatgcccgctttatgacgccaccgccatccgttaaacccgcttcgtcaggtaaaaaacgggaggctgcataa

SEQ ID NO: 60874 - protein, 342 aa, Escherichia coli O157:H7 EDL933
MLKFIQNNREITALLAVLLLFVLPGFLDRQYLSVQTLTMVYSSAQILILLAMGATLVMLTRNIDVSVGSITGMCAVLLGMLLNAGYSLPVACVATLLLGLLAGFFNGVLVAWLKIPAIVATLGTLGLYRGIMLLWTGGKWIEGLPAELKQLSAPLLLGVSAIGWLTIILVAFMAWLLAKTAFGRSFYATGDNLQGARQLGVRTEAIRIVAFSLNGCMAALAGIVFASQIGFIPNQTGTGLEMKAIAACVLGGISLLGGSGAIIGAVLGAWFLTQIDSVLVLLRIPAWWNDFIAGLVLLAVLVFDGRLRCALELNLRRQKYARFMTPPPSVKPASSGKKREAA

SEQ ID NO: 60875 - DNA, 1278 bp, Escherichia coli O157:H7 EDL933
  CDS (1)..(1278): transl_table=11
atgaaaccgatgcatattgcaatggcgttgctctctgccgcgatgttttttgtcctggcgggcgtctttatgggcgtacaactggagctggatggcaccaaactggtggtcgacacggcttcagacatccgttggcagtgggtgtttatcggcacggcggtggtctttttcttccagcttttgcgaccggctttccagaaagggttgaaaagcgtttccggaccgaagtttattctgcccgccattgatggctccacggtgaagcaaaagctgtttctcgtggcgctgctggtgcttgcggtggcgtggccgtttatggtctcacgcgggacggtggatatcgccaccctgaccatgatctacattatcctcggactcgggctgaacgtggtggtagggctttctggtctgctggtgctggggtacggcggcttttacgccatcggcgcttatacctttgcgctgctcaatcactattacggcttgggcttctggacctgtctgccgatagccgggttgatggcggcggcggcgggcttcctgctcggcttcccggtgcttcgcttgcgcggtgactatctggcgatcgttaccctcggtttcggcgaaattgtgcgcatattgctactcaataacaccgaaattaccggcggtccgaacggtatcagtcagatcccgaaaccgacttttttcggccttgagttcagccgtaccgctcgtgaaggcggctgggacacgttcagtaatttctttggcctgaaatacgatccctccgatcgtgtcattttcctctacctggtggcgttgctgctggtggtgctaagcctgtttgtcattaaccgcctgctgcggatgccgctgggtcgcgcctgggaagcgttgcgtgaagatgaaatcgcctgccgttcgctgggcttaagcccgcgtcgtatcaagctgactgcctttaccatcagcgccgcgtttgccggttttgccggaacgctgtttgctgcgcgtcagggctttgtcagcccggaatccttcacctttgccgaatcggcgtttgtgctggcgatagtggtgctcggcggtatgggctcgcaatttgcggtaattctggcggcaattttgctggtggtgtcgcgcgagttgatgcgtgatttcaacgaatacagcatgttaatgctcggtggtttgatggtgctgatgatgatctggcgtccgcagggcttgctgcccatgacgcgcccgcaactgaagctgaaaaacggcgcagcgaaaggagagcaggcatga

SEQ ID NO: 60876 - protein, 425 aa, Escherichia coli O157:H7 EDL933
MKPMHIAMALLSAAMFFVLAGVFMGVQLELDGTKLVVDTASDIRWQWVFIGTAVVFFFQLLRPAFQKGLKSVSGPKFILPAIDGSTVKQKLFLVALLVLAVAWPFMVSRGTVDIATLTMIYIILGLGLNVVVGLSGLLVLGYGGFYAIGAYTFALLNHYYGLGFWTCLPIAGLMAAAAGFLLGFPVLRLRGDYLAIVTLGFGEIVRILLLNNTEITGGPNGISQIPKPTFFGLEFSRTAREGGWDTFSNFFGLKYDPSDRVIFLYLVALLLVVLSLFVINRLLRMPLGRAWEALREDEIACRSLGLSPRRIKLTAFTISAAFAGFAGTLFAARQGFVSPESFTFAESAFVLAIVVLGGMGSQFAVILAAILLVVSRELMRDFNEYSMLMLGGLMVLMMIWRPQGLLPMTRPQLKLKNGAAKGEQA

SEQ ID NO: 60877 - DNA, 1008 bp, Agrobacterium tumefaciens str. C58
  CDS (1)..(1008): transl_table=11
atggcggtgctcatgaacgacgtgactgaaacggcagagatcccgaaggcgcgctcgccgctgcgcacgctcgcggggccgctcctcatcatcaccgccgcgatcatcggctacttcctgtttccggataatctggcgcttctgacccgcatcatcgccattgcgcttctcgtgctgtcgatcgatctcgtcactggttattgcggcgtcgccacgcttggccatgccgcactcttcggcgcgggcgcttatgccgccggcattgccgctgcccatttcgagatcaccgacccgcttctcatgaccgtaatcggcgcagcaggcggcggtgtggccgggctgctttccggcacggtgttactgcgcgcccacggcttgccgcagctggtgctttccatcgccgtcatccatttgttccatgaggcggccaacaaggcatcgggctggacaggcggcagcgacggtctgtcaggcgtgtctcctgacgccctgttcggcaccttcgaattcgaccttttcggccgcaccgcctatgtttacggcgtctgtctgctgctcctcgttttcatcgccctcagggtcgtggtcaattcgcctttcggcatgttgtgccgcggcgtcaagcaggacagcatccgcattcaagccatgggcggctccgtcaatggcacggttctaaagatgttcgtgatatcaggcatcgtcgccggcattggcggcgcgctgaacgccatctccacccaggtcgtcgggctcgacagtctcagcttcacgctttcggccgaggggctggtcatgctggttctcggcggcgcgggctcgctttacggcgcgctgatcggcaccgtcaccttcatgtggttcgaggatgtcgtttccgcggccaatccgttccactggctcaccattgtcggcctgctgctgatcgccgtcgtactcttcgcgccgcgcgggctttacggcgcgggtgaacagatcatcgggcgcctgcggggagatcgcaaatga

SEQ ID NO: 60878 - protein, 335 aa, Agrobacterium tumefaciens str. C58
MAVLMNDVTETAEIPKARSPLRTLAGPLLIITAAIIGYFLFPDNLALLTRIIAIALLVLSIDLVTGYCGVATLGHAALFGAGAYAAGIAAAHFEITDPLLMTVIGAAGGGVAGLLSGTVLLRAHGLPQLVLSIAVIHLFHEAANKASGWTGGSDGLSGVSPDALFGTFEFDLFGRTAYVYGVCLLLLVFIALRVVVNSPFGMLCRGVKQDSIRIQAMGGSVNGTVLKMFVISGIVAGIGGALNAISTQVVGLDSLSFTLSAEGLVMLVLGGAGSLYGALIGTVTFMWFEDVVSAANPFHWLTIVGLLLIAVVLFAPRGLYGAGEQIIGRLRGDRK

SEQ ID NO: 60879 - DNA, 1095 bp, Agrobacterium tumefaciens str. C58
  CDS (1)..(1095): transl_table=11
atgtccgctattgcagccgatctttcattgccttgttcgctgccacgccgtgccggaacggtcgtggtgcttgccatcgcctatcttgtcgtgccgttcgtcggcaccagttatctcttcgaggcaatcctcctgccgttccttgccctcagccttgccggggtcggtctcaacctgctcaccggctatgcgggtcaggtgtcgctcggttcggccgctttcatggccgttggtgccttcgcggcttacaatttcgacctgcgggtcgatgggctgccgctcaccgtttcgatcgtgctcgccggtctttcggcagcaatcatcggcatcgtcttcggcctgcccagccttcgcctgcgtggtttctatctcgccgtctcgacccttgccgctcagttcttcgtgcaatgggcgttgacgaaattcagctggctctcgaacgaatccgcatcaggcgtcatcgatgcaccggcgttgtcgctggccgggatttcattcgagggaccggtcgggcgttatctcttcgcgctgacgaccgtcacggccctcacgttcctcgcctaccgcctggtgtcgtcgcagaccggccgtaacttcatcgcagtgcgcgacaacgagaccgccgcacgcatcatcggcgttccggtgctgcgcacgaagctgctcgcctttgcgatctcgtccttcatcatcggcgttgcaggcgtgatctgggcctttgcctatctgcgcacggtggagccggctggcttcaatctcgaccgttcgttccagatccttttcatcgtcatcattggcgggcttgcatcgatccgaggcgcctttttcggtgcggccctgatcgtcgtctttccgcttgtcctctcccggctcggctccctgttattgggggacgtgttcgattccggggtgctcgacatgacgcagcgcatcgttatcggcgccctgatcattctgtttctgatcctcgagcccgacggcctcgtgtcgttgtgggatcgcttgaagtcacgcattgcggccgccatcaggcgggcgcgaacccctcgaagcccggccccgaaggctaaagggcttccaacaagaaaagcctga

SEQ ID NO: 60880 - protein, 364 aa, Agrobacterium tumefaciens str. C58
MSAIAADLSLPCSLPRRAGTVVVLAIAYLVVPFVGTSYLFEAILLPFLALSLAGVGLNLLTGYAGQVSLGSAAFMAVGAFAAYNFDLRVDGLPLTVSIVLAGLSAAIIGIVFGLPSLRLRGFYLAVSTLAAQFFVQWALTKFSWLSNESASGVIDAPALSLAGISFEGPVGRYLFALTTVTALTFLAYRLVSSQTGRNFIAVRDNETAARIIGVPVLRTKLLAFAISSFIIGVAGVIWAFAYLRTVEPAGFNLDRSFQILFIVIIGGLASIRGAFFGAALIVVFPLVLSRLGSLLLGDVFDSGVLDMTQRIVIGALIILFLILEPDGLVSLWDRLKSRIAAAIRRARTPRSPAPKAKGLPTRKA

SEQ ID NO: 60881 - DNA, 1137 bp, Ralstonia solanacearum GMI1000
  CDS (1)..(1137): transl_table=11
atgacagaaactgcaacggaattcaaagcgccgaagaagacgcgcgccgcgcttctcggcttcttcgtcctcgccatcttcgccccgttcctcgtgggcgccgtcggcgggaactactgggtacgcgtgctggacttcgcactgctgtacatcatgctggccctgggcctgaacatcgtggtgggttttgccggcctgctcgacctgggctacatcgcgttctacgcggtgggcgcctacatgatggcgctgctgggctcgccgcacctgaccaaccagttcgagtggatccatcagctgttcccgaacgggctgcatctgctgatctggtgggtgatcccgctgggcgcggggctggcggcgctgttcggcatcctgctgggggcgccgacgctcaagctgcgcggcgactacctcgccatcgtgacgctgggcttcggcgagatcatccgcatcttcatgaacaacctcgaccgcccggtgaacatcaccaacggtccgaagggcgtcaacctgatcgagccggtcaagctcttcgggttcgacttctcgaagcggcatgacatcttcggcatccacttcgagccggtgcacatgtactactacctgttcgtgctgctggcgatgggcatcatcacggtgtgcctgcgcctgcagaattcgcggatcggtcgtgcatgggttgccatccgcgaggacgagatcgccgccaaggccatgggcatcaacacccgcaacatcaagctgctggcgttcgccatgggtgcgtcgttcggcggcgtgtcgggggcgatgttcgcgtcgttccagggcttcgtgtcgccggaatcgttcgtgctgtgggagtcgatctacatcctggccatcgtggtgctgggcggcatgggccatatcccgggcgtgatcctgggcggcatcctgctggtgggcttccaggaactgctgcgcgcgctggccgagccgatccagaacaagctgttcggccacgtgatcgtggaagcggaagtgctgcgtcagctgctgttcggcctggcgatggtgggggtgatgctgtatcgccccgcgggcctgtggccctcgccgcgcaaggaagaccgcccgcagaaggcgcgggtcggtggtttgtcccgcatctga

SEQ ID NO: 60882 - protein, 378 aa, Ralstonia solanacearum GMI1000
MTETATEFKAPKKTRAALLGFFVLAIFAPFLVGAVGGNYWVRVLDFALLYIMLALGLNIVVGFAGLLDLGYIAFYAVGAYMMALLGSPHLTNQFEWIHQLFPNGLHLLIWWVIPLGAGLAALFGILLGAPTLKLRGDYLAIVTLGFGEIIRIFMNNLDRPVNITNGPKGVNLIEPVKLFGFDFSKRHDIFGIHFEPVHMYYYLFVLLAMGIITVCLRLQNSRIGRAWVAIREDEIAAKAMGINTRNIKLLAFAMGASFGGVSGAMFASFQGFVSPESFVLWESIYILAIVVLGGMGHIPGVILGGILLVGFQELLRALAEPIQNKLFGHVIVEAEVLRQLLFGLAMVGVMLYRPAGLWPSPRKEDRPQKARVGGLSRI

SEQ ID NO: 60883 - DNA, 1179 bp, Agrobacterium tumefaciens str. C58
  CDS (1)..(1179): transl_table=11
atgattaccggcttcctcctgcgcgcgctcgatcgccgcatttccatcgccatcggcatcatcctggccatcgccgtcctggtgcccgcctccaacctgcttttgccggagggcagcgcgttccgcatcccgacctatatcatgtcgatgctgggcaaatatctggcctatgcgctgctggccctggcgcttgacctggtctggggttattgcggcattctttcgctcggccacgccgccttcttcgcgcttggcggttatgccatgggcatgtatctgatgcggcagatcggcacgcgcggcgtgtacggccatccggtgctgcctgacttcatggtgttcctcaactggaaggagttgccgtggttctggcacggcttcgacatgttctggtttgcggcgctgatggtgcttgtcgtgccggggctgctcgccttcgtgttcggctggttcgccttccgctcgcgcgtcaacggcgtttacctctcgatcatcacccaggccatgacctacgctctgctgcttgccttcttccgcaacgacatgggtttcggcggcaataacggcctcaccgatttcaaggatatcctcggcttttccgtgcaggcggatggcacccgcgccatgctgtttgcaatgacggccgcgatgctggcgctttctctgctgattgcgtcgggtatcgtcaattccaaattcggcaaggtgctggtgggcgtgcgggacgccgaaagccgggtgcgcttcctcggtttccgggtggaaaacatcaagctcttcaccttcgtcgtgtcggcgatgatggcgggtgttgccggtgcgttgttcgtgccgcaggtgggcatcatcaaccccggcgaattttctcccgccaactccatcgaggtggtggtatggacggcagtcggcgggcgcggcacgctgatcgggccgatcatcggcgcgctgctggtgaatggcggcaagagctatttcaccggcgcttttcccgaattctggctgtttgcgctgggtgggctgttcatcgcggtgacgctgttcttccccaagggcatcgtcggcacaatccagcattatctggccgggcggcgcgagaagcgtgtcgcgcgggcagcggcggcggccaagcagccgggcaacgacagtgcggcaacggccgcgcaacaggcggcggagtaa

SEQ ID NO: 60884 - protein, 392 aa, Agrobacterium tumefaciens str. C58
MITGFLLRALDRRISIAIGIILAIAVLVPASNLLLPEGSAFRIPTYIMSMLGKYLAYALLALALDLVWGYCGILSLGHAAFFALGGYAMGMYLMRQIGTRGVYGHPVLPDFMVFLNWKELPWFWHGFDMFWFAALMVLVVPGLLAFVFGWFAFRSRVNGVYLSIITQAMTYALLLAFFRNDMGFGGNNGLTDFKDILGFSVQADGTRAMLFAMTAAMLALSLLIASGIVNSKFGKVLVGVRDAESRVRFLGFRVENIKLFTFVVSAMMAGVAGALFVPQVGIINPGEFSPANSIEVVVWTAVGGRGTLIGPIIGALLVNGGKSYFTGAFPEFWLFALGGLFIAVTLFFPKGIVGTIQHYLAGRREKRVARAAAAAKQPGNDSAATAAQQAAE

SEQ ID NO: 60885 - DNA, 1398 bp, Agrobacterium tumefaciens str. C58
  CDS (1)..(1398): transl_table=11
atgaccaatatcgcttccgaaaatgccgcttccagcccgagcctgatggcgacggccatgaaggagggcctgattgccggcgtcatctcgttcggcatgttcattctctatatcggcatcatcacctatcaggatatcaataaccagctgatctggggcacacgctgggggctgctggcgatcttcgtcgccgttgccgccgttggccgctttcttgtggtcggtttcatcaagccgtcgctggatcgccgcaagctctccaaggccaagagcggcgtgctggaaatctccgaagaaaaaggcttttttcacaagcacttcctgaaattcgcgctggttctgctgctgctttatcccgtgattgccgtgcagcttttcggttttcagggttcgctgaaattcgtcgacaatttcggcatccagatcctgatctacgtgatgctggcctggggcctcaatatcgtcgtcggtctcgctggcctgctcgatctcggttatgtggccttttatgcggtgggcgcttattcctacgcgctgctttccagccagttcggcctgtccttctgggtgcttctgccggttgccggtattcttgccggcttctggggcgtcatcctcggtttcccggtgcttcgtcttcgcggcgactatctggcgatcgtcacgcttgccttcggtgaaatcatccgtctcgtgctgttgaactggacggccgtcaccaagggcacctttggtatttccggcatcgccaaggcgtccgtcttcggcatctggtccttcgatgtcggcgcgcccaacaacttcgccaaggtctttggcctgtcgatgtcgtcggcctattacaagattttcctgttctacgtgatcctgcttctgtgcatgctgacggcttacgtcaccatcaagttgcgccgcatgccgatcggccgcgcatgggaagcgttgcgtgaagatgaaatcgcctgccgttcgctcggcatcgataccgtcatcaccaagctcaccgcctttgccacgggcgcgatgttcggcggtttcgccggttcgttcttcgctgcgcgtcagggtttcgtgtcgccggaaagcttcgtgttcctcgaatccgccgtcattctcgccatcgtcgttctcggcggcatgggctcgctgacgggtatcgccattgcggcgctcgtcatggtcggcggcaccgagcttctgcgcgaaatggagttcctgaagcatgtcttcgggcctgatttcacgccggaactttaccgcatgctgctcttcggtctcgccatggtcatcgtcatgctgttcaagccgcgcggcttcgtcggctcgcgtgaacccacggccttcctcagggaacgcaaggccgtgtccggcagctttaccaaggaaggtcacggttga

SEQ ID NO: 60886 - protein, 465 aa, Agrobacterium tumefaciens str. C58
MTNIASENAASSPSLMATAMKEGLIAGVISFGMFILYIGIITYQDINNQLIWGTRWGLLAIFVAVAAVGRFLVVGFIKPSLDRRKLSKAKSGVLEISEEKGFFHKHFLKFALVLLLLYPVIAVQLFGFQGSLKFVDNFGIQILIYVMLAWGLNIVVGLAGLLDLGYVAFYAVGAYSYALLSSQFGLSFWVLLPVAGILAGFWGVILGFPVLRLRGDYLAIVTLAFGEIIRLVLLNWTAVTKGTFGISGIAKASVFGIWSFDVGAPNNFAKVFGLSMSSAYYKIFLFYVILLLCMLTAYVTIKLRRMPIGRAWEALREDEIACRSLGIDTVITKLTAFATGAMFGGFAGSFFAARQGFVSPESFVFLESAVILAIVVLGGMGSLTGIAIAALVMVGGTELLREMEFLKHVFGPDFTPELYRMLLFGLAMVIVMLFKPRGFVGSREPTAFLRERKAVSGSFTKEGHG

SEQ ID NO: 60887 - DNA, 1197 bp, Streptomyces coelicolor A3(2)
  CDS (1)..(1197): transl_table=11
gtgtctgacccgcgacccctcctcctcaggcgcggcccgctgctgctgaccgcactgctcctgtgtgccctgcccttctacctcgacgccttctggctgcgcatcggcctgttctccatggccgcggccatcggcgccgtcggactcggcctgctcagcggcaccgccgggcaactctccctcggacacgccttcttcctggccgtcggcgcctacggctacgtctggctggcgggcgagcccgggcccggtctgccgcccgccgtcgccacagtcctcgccgtcctgctcgccggggccgcgggcgggctgttcagccccgtcgccggacgcgtgaagggcatctacctcggcgtcgcgaccctcgccctggtcttcctcggccaccacgtcctgctcaccgcggactccgtcaccggcggcttcaacggccgctccgtgccgccgctggaactgggcggcttcaccttcgccgagtcggaccccggactcaccgtcctgggcgtgccgttcggcgccgaggaacggctctggtacctgggcctggccctgttcgccgtcacctggttcaccgcgcgcggactgctgcgcggacggcccggccgcgccctggcggcggtgcgggacagcgagaccgccgcggccgtgatgggcgtgcacgtggcccggtaccgctcggccgccttcgtcgtctcctcgatgtacgcgggtctggccggcgtactgctcgcgctctccttccgccgcgtggtgcccgactacttctccctcgccctctccgtcgactacctcgccatgatcgtcatcggcggcctcggctcggtggccggagccaccgcgggagccgtcttcgtcaccgcgctgcccctgctgatgacccgctacgccgaccagctgcccctggtcgcgacgcccgggtccggcggcggctcgatcggcccgaccgaggcgtcccgctacctctacggcgcggccatcgtcgtgatcctcctctacgcccccgacggcctgcacggcctggcccgccgcctccgcgcccgcctgcgccgccgcccgaccgtcaccggcccacccggcaccggaccctcgtccggacccgaccggaccgaccccgacaccccttccggcaccactggcaccaccggtaccaccggcaccgacgacacctccgcacgagccaaggagcacaccccgtga

SEQ ID NO: 60888 - protein, 398 aa, Streptomyces coelicolor A3(2)
MSDPRPLLLRRGPLLLTALLLCALPFYLDAFWLRIGLFSMAAAIGAVGLGLLSGTAGQLSLGHAFFLAVGAYGYVWLAGEPGPGLPPAVATVLAVLLAGAAGGLFSPVAGRVKGIYLGVATLALVFLGHHVLLTADSVTGGFNGRSVPPLELGGFTFAESDPGLTVLGVPFGAEERLWYLGLALFAVTWFTARGLLRGRPGRALAAVRDSETAAAVMGVHVARYRSAAFVVSSMYAGLAGVLLALSFRRVVPDYFSLALSVDYLAMIVIGGLGSVAGATAGAVFVTALPLLMTRYADQLPLVATPGSGGGSIGPTEASRYLYGAAIVVILLYAPDGLHGLARRLRARLRRRPTVTGPPGTGPSSGPDRTDPDTPSGTTGTTGTTGTDDTSARAKEHTP

SEQ ID NO: 60889 - DNA, 1050 bp, Streptomyces coelicolor A3(2)
  CDS (1)..(1050): transl_table=11
gtgtcgcaccgggcacgcgccctggtcggctcccgtgccgccgggtacgccgtcttcgtcgtactgctgctggcggtccccgccgtcttcacgagggtgcccttctacacgatgtcggtcgccgtgctgatgtgtctgcaggccacggcggccctcggcctcgttccgctggtcggccgggccggtcagatctccctcgggcaggccgccttcttcgccgtcggcgggtacacctccgcgatcctcaccggcagatggcacgtcaacgccctgctcgcgctgaccgccggggtcgcgctggccatggccgtggcctatgtcgtggggctgttcatcttccgggcgcagggccagtacctggcgctggcgaccctgtcgttcggtctggtggtcagctccctggccaatcaactgccgctgaccggcgcctcgaacggcctcgcgggcattccgtcgctggcgccgttcggtgtggagctggacaccgacctgtcggtctactacctcgtggccggcgtgctgctggtcgccgtgctgtccgtggacgcgctgctgcggtcccccgcaggggacgcgctgagcgcgctgggcgacagccccgtggcgacggaggcggccggggtgtcggccgccgcgctgcgccggggcgcgttggcgctcgcggccgggctcgcctcgatcgcgggcagcctgtacgcccattggtcgtccttcatggactccggtcaggcaggactcctcaactccgtgcaactgctcgtcatcgcctcggtcgggggactgcgcaccccgtggggcgcgccgctcggtgcgctggtgatcgtcacgttctccgaggcgtccaaggacttgatcccgaaggtgttcccgtccgctaccgggaatttcgacatcatcgtctacgggatcgcgttgatagccgtgctgctgttcctgccccgaggggtgggtggtgtgacggcggtccgcagagagcggtcggttcggaagcggcaggacggtcctgcccccgccacgacggctcgtactcaggaaagagagacacagtga

SEQ ID NO: 60890 - protein, 349 aa, Streptomyces coelicolor A3(2)
MSHRARALVGSRAAGYAVFVVLLLAVPAVFTRVPFYTMSVAVLMCLQATAALGLVPLVGRAGQISLGQAAFFAVGGYTSAILTGRWHVNALLALTAGVALAMAVAYVVGLFIFRAQGQYLALATLSFGLVVSSLANQLPLTGASNGLAGIPSLAPFGVELDTDLSVYYLVAGVLLVAVLSVDALLRSPAGDALSALGDSPVATEAAGVSAAALRRGALALAAGLASIAGSLYAHWSSFMDSGQAGLLNSVQLLVIASVGGLRTPWGAPLGALVIVTFSEASKDLIPKVFPSATGNFDIIVYGIALIAVLLFLPRGVGGVTAVRRERSVRKRQDGPAPATTARTQERETQ

SEQ ID NO: 60891 - DNA, 987 bp, Oceanobacillus iheyensis HTE831
  CDS (1)..(987): transl_table=11
atgattaaaaataatacacaaaaatatatcgttattggattactcatggttgctattctcttccctctattcacccaaaataattactatattcatgtcatgacgctatcgtttatatggatgatcgccgtatatggattaaatatactggcgggatataccggttatttatcattggctcatgctggattctttgcaattggagcatatgcattaggcttactaaccgtaaaggcagaagtgggtttttggctagctttaattttagcaccaattataacaacaatcattggatttggaattggtttaattgcattgcgcaccaaggaacatttttttgctatatacacactttgtgtagggtacgtcatctatttattaattgataagtgggatagtttaacagaaggagttcgcggactaatgggcataccgttaccatctgatattggtccaatctcttttgagagtaatatcgctcaatactatttcattttaatcgtattgcttttctctattttcgtgatttatagaattgtaaattccatagtcggaaaaaagctaatcgcaattcgtaatagtgaacaactcgctttatcattaggtatttcaacgaaaaaaaataaactacttgcttttgtattatctacgttttttgcaggattagcgggtgcgttatatgcaagttttatacggttcctaggtccagatatcggttctacaaatataacatttgatctactcatgtatttaattgtcggaggtattggtacattatctggtccgattataggtactctattagtcgtatggctttctcaaaatctacaattcttacaagattatcgaatgctaatatttggtccattattggcactgttaatcattttctcccctcgaggtattgtaggtatgttctctagcatgaagcaaaacatccaacaaaaaagagatttacggcaaaaacaactaaaaaaagaagcgtag

SEQ ID NO: 60892 - protein, 328 aa, Oceanobacillus iheyensis HTE831
MIKNNTQKYIVIGLLMVAILFPLFTQNNYYIHVMTLSFIWMIAVYGLNILAGYTGYLSLAHAGFFAIGAYALGLLTVKAEVGFWLALILAPIITTIIGFGIGLIALRTKEHFFAIYTLCVGYVIYLLIDKWDSLTEGVRGLMGIPLPSDIGPISFESNIAQYYFILIVLLFSIFVIYRIVNSIVGKKLIAIRNSEQLALSLGISTKKNKLLAFVLSTFFAGLAGALYASFIRFLGPDIGSTNITFDLLMYLIVGGIGTLSGPIIGTLLVVWLSQNLQFLQDYRMLIFGPLLALLIIFSPRGIVGMFSSMKQNIQQKRDLRQKQLKKEA

SEQ ID NO: 60893 - DNA, 1020 bp, Pseudomonas putida KT2440
  CDS (1)..(1020): transl_table=11
atgagcgagaaaaacccattgccagtcgccaagggccgcgccccggcgctgctgtcgctggtagttgccagcctggtggcgctgccgctgttgctgccctcggccaccctggccaccgagatcctgatctttgccatggccgcactggcctgcaacctgctgctcggctacaccggactgctgtcgttcggccagggcatcttctttggcgtgggcgcctatggcgcagcgctgctgatgatccacctgcagtggggcatgttcgccgcgctgcttggcgcagcagtgttcggcgccttcctcgcgctgctggtgggcgcactggcgatccgtcgcacgggcatctacttcgtcatgctgaccctggccttcagccagatggcctacttcctggcctataccctcagcggctggaccggcggtgacaacggcctgcttgatgtgccacggccgaatatcgaaatcgccggccatgtgctagtcgacctggccgacccacggcacttctatgtgttcgtcgcggtgctgttcctgttgatcttcgccgcagccctgcgggtgatccgttcgccattcggcagcaccctgctggctatccgtgagaacgagacccgcgccgccgccatcggctacgacacccgccatttcaagattctggtgttcatgctgtcgggcgccatcaccggcatcgccggggcgctgtacgccatgctgctgcactttgcgccgctgtcgaacatcgacctgatgatgagcgagaacatcctgatcatgaccatcgtcggcggcaccggctcattgttcggctcgctgctgggggccggcgccatcgtgctgctgggtgacgtgctgtcggagctttggccacgctggctgatgctgctgggggtgatcctgattctggtggtggtgttcatgcgtggcggcctgtggggcggcctgaccgaactgggcaagcgcctgctggccacgcgcaatgccgatgacaaaccccaggccaagaccaaggagaccctgtaa

SEQ ID NO: 60894 - protein, 339 aa, Pseudomonas putida KT2440
MSEKNPLPVAKGRAPALLSLVVASLVALPLLLPSATLATEILIFAMAALACNLLLGYTGLLSFGQGIFFGVGAYGAALLMIHLQWGMFAALLGAAVFGAFLALLVGALAIRRTGIYFVMLTLAFSQMAYFLAYTLSGWTGGDNGLLDVPRPNIEIAGHVLVDLADPRHFYVFVAVLFLLIFAAALRVIRSPFGSTLLAIRENETRAAAIGYDTRHFKILVFMLSGAITGIAGALYAMLLHFAPLSNIDLMMSENILIMTIVGGTGSLFGSLLGAGAIVLLGDVLSELWPRWLMLLGVILILVVVFMRGGLWGGLTELGKRLLATRNADDKPQAKTKETL

SEQ ID NO: 60895 - DNA, 1257 bp, Pseudomonas putida KT2440
  CDS (1)..(1257): transl_table=11
atgaacagaaatctcaaacaggcgttcttcagcgccttgctggtctgggccgtggccttcccggtactgggcctgaaactgagcatcgacggcatcagcctggtcgtgcacagtcagggctcgttcaccatcagcatcatcgccgtgtgttccgtgctgatgttcctgcgcgtgctgttcgacaagcagtggagttcggtgatgggccgccgatcggatcgcaagctgatccccccggcagtcagcaactacctcaccctgcccaagacccagcgctatgtcatcatcgggttgatcgtggtggcactggtatggccgttcttcggctctcgtggtgcggtcgacattgccacgctgatcctgatctacgtgttgctgggcctgggcctgaatatcgtggtcggtctggcgggcctgctcgacctcggctacgtgggcttctatgccgtcggtgcctacagctacgccatgctctcgcattacctgggctggagcttctgggtgtgcctgccgattgccggcctgatggctgccacgttcggcttcctgctcggcttcccggtgctgcgcctgcgtggtgactacctggcgatcgtgaccctcggtttcggtgagatcatccgcctgttcctgcgtaacctcaccgactggaccggcggccccaacggcatcagcaacatccccaagccggagttcttcggcctgaccttcgaacgccgtgcggccgagggcatgcagaccttccacgagttcttcgggctgcaatacaactcgatcaacaaggtcatcttcctgtatctggtggccctgctgctggccctgctggcgttgttcgtgatcaaccgcctgctgcgcatgccgatcggccgtgcctgggaagccctgcgtgaagacgagatcgcctgccgtgctctgggcctgaacccgaccgtgatcaagctctcggcattcaccctgggtgcctgcttcgccggcttcgccggcagcttcttcgccgcgcgccaaggcctggtgacgccggagtcgttcaccttcatcgagtcggcgatcatcctcgccatcgtcgtgctgggtggcatgggttcacaactgggcgtgattctcgcggccatcgtgatgatcctgctgcctgagctgatgcgtgagttcagcgaataccgcatgctgatgttcggtgcgctgatggtgttgatgatgatctggcgtccgcaaggcctgctgcctatgcaacgtccacacatggagctgcgtcgatga

SEQ ID NO: 60896 - protein, 418 aa, Pseudomonas putida KT2440
MNRNLKQAFFSALLVWAVAFPVLGLKLSIDGISLVVHSQGSFTISIIAVCSVLMFLRVLFDKQWSSVMGRRSDRKLIPPAVSNYLTLPKTQRYVIIGLIVVALVWPFFGSRGAVDIATLILIYVLLGLGLNIVVGLAGLLDLGYVGFYAVGAYSYAMLSHYLGWSFWVCLPIAGLMAATFGFLLGFPVLRLRGDYLAIVTLGFGEIIRLFLRNLTDWTGGPNGISNIPKPEFFGLTFERRAAEGMQTFHEFFGLQYNSINKVIFLYLVALLLALLALFVINRLLRMPIGRAWEALREDEIACRALGLNPTVIKLSAFTLGACFAGFAGSFFAARQGLVTPESFTFIESAIILAIVVLGGMGSQLGVILAAIVMILLPELMREFSEYRMLMFGALMVLMMIWRPQGLLPMQRPHMELRR

SEQ ID NO: 60897 - DNA, 1065 bp, Pseudomonas putida KT2440
  CDS (1)..(1065): transl_table=11
atgaccgctaccgtttcacgcttgggcgccggcttcgacgaggcgccgctgaccctggtgcgccgtcgctggccagtgggcctgccgttgctgctgctggtggccttcgtcggcttgccctggctgggcaacgactactggctcaacgcgatcctgattcccttcctggtgctgtcgctggccgggctggggctgaacgtgctgaccggctacaccgggcagacctcggtcggtgccgccggcttcatggcggtgggcgccttcgccacctacggcctgctgctgcgtgtgcctgggctcccgttgccgctggcgctgatcggcggcgggctgattgccggcctggtcggcttgctgttcggcattcccagctcgcggatcaagggtttctacctgatggtcaccacgctggctgcgcagttcttcctcgagtgggtgttcgccaagtttccctggttctacaaccatgcctcgtccggcaccatcagtgcaccgcgcctggagttgttcagccacagcctggcctcgccggtcggtcgctacctgctgaccctgagctgcgtggtgctgctgacctgggtcgcggtcaacctggtgcgcagccaggtcgggcgcaactggatggcgatccgcgacatggataccgccgcctcggtcatcggcattccagtggagcgctacaaacgcctggcctttgccgtcagctctttctacctgggcatcgccggggcgctctgggccttcgcctacctgggcacgtccagtgccggcagcttcgacatcaaccgctcgttccagatcctcttcatcatcatcatcggtggcatgggcagtatcgccggcaatttcatcggcgcggctttcatcagcctcacaccgattctgctcagccatgccgggcagtggctgttcggcggcaacgtcgatgccgggcaattgcagaacctgcagaagattctcttcggctgcctgatcatctggttcctgatcaaggagccggaaggcctggtacgcctgctcggcgacctgcgcgaacgtatcagggtctggccgctgcgattctga

SEQ ID NO: 60898 - protein, 354 aa, Pseudomonas putida KT2440
MTATVSRLGAGFDEAPLTLVRRRWPVGLPLLLLVAFVGLPWLGNDYWLNAILIPFLVLSLAGLGLNVLTGYTGQTSVGAAGFMAVGAFATYGLLLRVPGLPLPLALIGGGLIAGLVGLLFGIPSSRIKGFYLMVTTLAAQFFLEWVFAKFPWFYNHASSGTISAPRLELFSHSLASPVGRYLLTLSCVVLLTWVAVNLVRSQVGRNWMAIRDMDTAASVIGIPVERYKRLAFAVSSFYLGIAGALWAFAYLGTSSAGSFDINRSFQILFIIIIGGMGSIAGNFIGAAFISLTPILLSHAGQWLFGGNVDAGQLQNLQKILFGCLIIWFLIKEPEGLVRLLGDLRERIRVWPLRF

SEQ ID NO: 60899 - DNA, 990 bp, Pseudomonas putida KT2440
  CDS (1)..(990): transl_table=11
atgctgtatcgagaagcgggtcagttcagcgtgcgttacgccgacgaccgtcgattcttccgcctgcgccaggatcggctgggcttggcggccttggtcctgtttgccttcatcggtgtgccactgctgggcaacgattactggttcagtgccatcctgattccatttctactgttgtcgctggccggcctcgggctgaacctgctgaccggttatgccgggcaactgtcgctgggttcggcggcgtttatggcagtaggtgccttcgcggcctataatttcgagctgcgcgtggcgtggctgccgctgctggccagcctgctgctcggcggcctggtggcggcgctggtggccgtggtgttcggcctgccaagcctgcgcatcaagggcttctatctgctggtgtcgacactggcggcgcagttcttcgtgccatgggcgctgacccgcttcagttggttcagcaacgacagtgcctcgggggtgatcagcgcgctgttctggctgggcgccaacctggtgcgcagcgaactggggcgcaactggatggcggtgcgcgacatggacaccgccgccgcagtgatcggcatccccctgttgaagaccaaactgctggcttttgccatcagcggcttctacctcggcgtggccggttcgctctgggccttcacctacctgggcacggtggagccacacggcttcgacctgaaccgctcgttccagatcctgttcatcatcattatcggcggcctgggcagcatcctcgggaacttcctcggcgccgccttcatcgtgctgttcccggtgctgctgtcgaacctggccgggttgctgccgactgggctgatcgatgccgggcagatagagaacctgcagaagattgccttcggcacgctgatcatcatcttcctgatcaaggaaccggagggcctggcgcgcctctggcaacgctttcgcgagcgcgctcggcgttggccgttgcgctactga

SEQ ID NO: 60900 - protein, 329 aa, Pseudomonas putida KT2440
MLYREAGQFSVRYADDRRFFRLRQDRLGLAALVLFAFIGVPLLGNDYWFSAILIPFLLLSLAGLGLNLLTGYAGQLSLGSAAFMAVGAFAAYNFELRVAWLPLLASLLLGGLVAALVAVVFGLPSLRIKGFYLLVSTLAAQFFVPWALTRFSWFSNDSASGVISALFWLGANLVRSELGRNWMAVRDMDTAAAVIGIPLLKTKLLAFAISGFYLGVAGSLWAFTYLGTVEPHGFDLNRSFQILFIIIIGGLGSILGNFLGAAFIVLFPVLLSNLAGLLPTGLIDAGQIENLQKIAFGTLIIIFLIKEPEGLARLWQRFRERARRWPLRY

SEQ ID NO: 60901 - DNA, 1041 bp, Pseudomonas putida KT2440
  CDS (1)..(1041): transl_table=11
gtgcgcctgctgggtgaaaccggcgacccgctggcccgcacccgcctcgaagccctgctgcagcccgatgcagaactagacccgggcgtgcgcacagccgccgaaacgagcctggcccaggtcaagcgcaaactgctgctaggcgaactgctcggccaggccttcagcggcctgtcgctgggttcggtcctgctgctggcagcgctgggccttgcgatcaccttcggcctgctcggggtgatcaacatggcccatggcgagatgttgatgctcggcgcctacagcacctacatggtccaggtactgctgcagcgcttcgccccaggcgccatcgagttctacccgctgattgccctgccggtggccttcgccgtcagtgccggggtaggcatggcgctggagcgcacggtgatccgccacctgtacggccgcccactggaaaccctgctggccacctggggcatcagcctgatcctgatccaggccatccgcctgctgttcggcgcgcagaacgtcgaggtgagcaacccggcctggctgtctggcggcatccagctgctacccaacctggtgctgccgtacaaccgcctggtcatcatcggcttcgccctggccgtggtgctgcttacctggctgctgctcaaccgtacccggttgggtctgaacgtgcgcgcagtcacccagaaccgcaacatggccgcctgctgcggcgtgtccaccgggcgcgtcgacatgctcgcctttggccttggctcgggcatcgcagggctcggtggcgtggctttaagccaggtgggcaacgtcggcccggacctgggccagagctacatcatcgattcgttcctggtggtggtgctcggcggcgtcgggcagctggccggtagcctctgggccgcgttcggcctgggcatcgccaacaagctgctggagccgcagatcggtgccgtactcggcaagatcctcatccttgcgttgatcattctgttcatccagaaacgcccgcaaggcctgttcgccctcaagggacgggtaatcgactga

SEQ ID NO: 60902 - protein, 346 aa, Pseudomonas putida KT2440
MRLLGETGDPLARTRLEALLQPDAELDPGVRTAAETSLAQVKRKLLLGELLGQAFSGLSLGSVLLLAALGLAITFGLLGVINMAHGEMLMLGAYSTYMVQVLLQRFAPGAIEFYPLIALPVAFAVSAGVGMALERTVIRHLYGRPLETLLATWGISLILIQAIRLLFGAQNVEVSNPAWLSGGIQLLPNLVLPYNRLVIIGFALAVVLLTWLLLNRTRLGLNVRAVTQNRNMAACCGVSTGRVDMLAFGLGSGIAGLGGVALSQVGNVGPDLGQSYIIDSFLVVVLGGVGQLAGSLWAAFGLGIANKLLEPQIGAVLGKILILALIILFIQKRPQGLFALKGRVID

SEQ ID NO: 60903 - DNA, 1080 bp, Pseudomonas putida KT2440
  CDS (1)..(1080): transl_table=11
atgaaccagccactgcttgtcactgctacgcaaaaggccggcccacgcctgacccttgccatcggtgccgtcgtcgtcctgctgctggtggctttgccactgtgctcactgctgccggcagatcatgccctgcacgtgtcggcctacaccctgaccctggtcggcaagattctctgttacgccatcgtcgccctggccctggacctggtctggggctatgccgggctgctgtcactgggccatggcctgttcttcgccctgggcggctatgccatgggcatgtacctgatgcgacaggccgccggcgacggcttgcctgggttcatgaccttcctgtcgtggaccgagctgccctggtactgggccggtacccagcatttcgcctgggccctgtgcctggtggtgctggcacccgggctgctggcgctggtgttcggctggttcgccttccgctcgcggatcaagggcgtgtacttctcgatcatgacccaggccctgacctttgccggcatgctgctgttcttccgcaacgaaaccggcttcggcggcaacaacggcttcaccagcttccgcaccatcctcggcttcgacattgcagcccagggcacccgcgcggtgttgttcctgctgaccgtggccctgctgctggccagcctgtacctgtgctggcgcctgacccgcagcaagttcggccgcctgctcaccgccgtgcgtgacgctgaaaaccgcatgatgttctgtggctacgacccgcgcggcttcaagctgctggtgtgggtactgagcgccgtgctgtgcggcctggccggtgccctgtacgtgccgcaggtgggcatcatcaaccccagcgagatgtcgccgaccaactcgatcgaagccgccgtctgggtagccttgggcgggcgcggcacgctgatcggtccgctgctcggtgccggcctggtcaacggcatgaaaagctggttcaccgtggccttccccgagttctggctgttcttcctcggcgcgttgttcatcctcgttaccctgtacctgcccaagggcgtggtcggcctgttgaagaaaaggagccagccatga

SEQ ID NO: 60904 - protein, 359 aa, Pseudomonas putida KT2440
MNQPLLVTATQKAGPRLTLAIGAVVVLLLVALPLCSLLPADHALHVSAYTLTLVGKILCYAIVALALDLVWGYAGLLSLGHGLFFALGGYAMGMYLMRQAAGDGLPGFMTFLSWTELPWYWAGTQHFAWALCLVVLAPGLLALVFGWFAFRSRIKGVYFSIMTQALTFAGMLLFFRNETGFGGNNGFTSFRTILGFDIAAQGTRAVLFLLTVALLLASLYLCWRLTRSKFGRLLTAVRDAENRMMFCGYDPRGFKLLVWVLSAVLCGLAGALYVPQVGIINPSEMSPTNSIEAAVWVALGGRGTLIGPLLGAGLVNGMKSWFTVAFPEFWLFFLGALFILVTLYLPKGVVGLLKKRSQP

SEQ ID NO: 60905 - DNA, 1308 bp, Pseudomonas putida KT2440
  CDS (1)..(1308): transl_table=11
gtgaacatgtccgttgccaaaactgcctctattagcgaaaccaagggtttcgaccttaaacgcagcctgctggagaccattgtcgctggcctgctggcacttatcgtgtttggtccggtcgttggtgtggtgctcgacggctacaccttcaatgccgagccgcgccgcgtggcctggctggtcggcggtgtgatggtggggcgcttcctgctcagcctgttcctgcagactgcccccgggcagcgcatgctcctgggcttcgacagcggtggctcgggcgtgcatgtgaccgcaccggactacaagtcgcgcctgcgttacatcatccccgcgctgatcgtgattgccatcgttttcccgatcttcgccaacaagtacctgctgaccgtggtcatcctcggcctgatctacgtattgctgggccttggcctgaacatcgtggtcggcctggccggcctgctcgacctgggttacgtggcgttctatgccatcggtgcctacggcctggcgctgggttaccagtacctggggctgggcttctggagcgtgctgccgctggcggccatcgctgcggcgctggcggggtgcatcctcggcttcccggtgttgcgcatgcacggtgactacctggcgatcgtgacgctgggctttggcgagatcattcgcctggtgctgaacaactggctatcgttcaccggtggccccaacggcatgccggcaccttcacccaccttcttcggccttgagttcggccgccgggccaaggatggcggggtgccgatccacgagttcttcggcttcgagtacaacgccagcctcaagttcgtgttcatctacgcggtgctgttcatggtcgtgctggcagtgctgtacatcaagcatcgcctgactcgcatgccggtcggccgggcctgggaagcgctgcgcgaagacgagattgcctgccgttcgatgggcctgaaccacgtgctggtcaagctgtcggcctttaccctgggcgcctcgactgccggtctggccggggtgttcttcgccacctaccagggcttcgtcaacccgtcgtcgttcacatttttcgagtcggcgctgatcctcgccatcgtcgtgctgggtggcatgggctcgaccgtgggtgtggtcatcgcggcgttcgtgctgaccgtggcgccggaactgctgcgcagcttctccgagtaccgggtgctgctgttcggcgtgctgatggtgctgatgatgatctggcgaccgcgtgggctgatccgtatcagccgtaccggtgtgaccccacgtaaaggagtggcgccatga

SEQ ID NO: 60906 - protein, 435 aa, Pseudomonas putida KT2440
MNMSVAKTASISETKGFDLKRSLLETIVAGLLALIVFGPVVGVVLDGYTFNAEPRRVAWLVGGVMVGRFLLSLFLQTAPGQRMLLGFDSGGSGVHVTAPDYKSRLRYIIPALIVIAIVFPIFANKYLLTVVILGLIYVLLGLGLNIVVGLAGLLDLGYVAFYAIGAYGLALGYQYLGLGFWSVLPLAAIAAALAGCILGFPVLRMHGDYLAIVTLGFGEIIRLVLNNWLSFTGGPNGMPAPSPTFFGLEFGRRAKDGGVPIHEFFGFEYNASLKFVFIYAVLFMVVLAVLYIKHRLTRMPVGRAWEALREDEIACRSMGLNHVLVKLSAFTLGASTAGLAGVFFATYQGFVNPSSFTFFESALILAIVVLGGMGSTVGVVIAAFVLTVAPELLRSFSEYRVLLFGVLMVLMMIWRPRGLIRISRTGVTPRKGVAP

SEQ ID NO: 60907 - DNA, 1074 bp, Bradyrhizobium japonicum USDA 110
  CDS (1)..(1074): transl_table=11
atggccggccctgccctcatccctgctggtgatttccgcacctcctatgcggccgacaccacgatcttcccgacggcgaccagccgcaattttgcgatcgtaggcgtgctgctgctctgcctcgtgccgcaattcctcggcggctactggctcagcattctgatccagatcggcatcttctcgatcgcggcgctcgggttgaacatcctggtcggcttcaccggccagatctcgatcgggcatgccgccttcttcctgctcggcgccttcacctcggcctacatctccaacaatgcgccgatcccggtgttcttcgcgatcccgctcgcaggcgtcgtcaccgcgctggtcgggctggtcttcggcattccggcggcgcggctgaagggcctttacctcgtcatcgcgacgctcgccgcgcaatatatcctgctcgacttcttctcgcgcgccgagtggttcaccggcggctcggtgccggccagcgccaatccgttctcgatcttcggcttcaccttgcgcggcgacaagcagtatttctacgtcgtgctggcctatgtgctggcgagctacatcctcgtcaccaatctgatgcgcacgcgcgacggccgcgcgctggtggcgatccgcgaccattacctctccgccgagatcatgggcatcaacctcaccaaataccgcacgctgtcgttcggcctcgccgccttcttcgccggcatcgccggcgcgctctatgcgcactaccagctcgtggtctcccaggaaggtttcggcatcgagcgctcgatcctgttcctggcgatgatcatcatcggcggcacgggttcgatcatgggcacgctgatgggcaccgccttcgtggtgctgctgccggagtcgatggagttcctcagcatctatttgaagggcggcgcgatcgacaaggcgctttcgctcaacaacaacatcaccttcctgcgcgagatcgcgatcggcgtgatcatcatcgcgttcctgatgttcgagcctgacgggctcgcgcatcgctggcggcagatcaaggcgtactggaaactctacccgttctcgcattga

SEQ ID NO: 60908 - protein, 357 aa, Bradyrhizobium japonicum USDA 110
MAGPALIPAGDFRTSYAADTTIFPTATSRNFAIVGVLLLCLVPQFLGGYWLSILIQIGIFSIAALGLNILVGFTGQISIGHAAFFLLGAFTSAYISNNAPIPVFFAIPLAGVVTALVGLVFGIPAARLKGLYLVIATLAAQYILLDFFSRAEWFTGGSVPASANPFSIFGFTLRGDKQYFYVVLAYVLASYILVTNLMRTRDGRALVAIRDHYLSAEIMGINLTKYRTLSFGLAAFFAGIAGALYAHYQLVVSQEGFGIERSILFLAMIIIGGTGSIMGTLMGTAFVVLLPESMEFLSIYLKGGAIDKALSLNNNITFLREIAIGVIIIAFLMFEPDGLAHRWRQIKAYWKLYPFSH

SEQ ID NO: 60909 - DNA, 1152 bp, Bradyrhizobium japonicum USDA 110
  CDS (1)..(1152): transl_table=11
atgcgcttcctgttcaagaccgactacgaagacgacatcaagctgttcccgcattcgggctatttcgtctcctacggcatcctgctcgcgctgctgctggtcgcgccttacgtgctctccagctatctgatgagccagctcgtcttcgtctgcatctatgcaaccgtcggcgtggcgctgctgatcctgaccggctttacggggcaggcctcgctcgggcatgccgcgttcctcgcgatcggcgcctacacggcggcctatttgcagaaatacaacgtgccgttcccggtctacttcctcgccgcaggccttctgaccggcatcatcggcgcgatggtcggctttcccgcgctgcggctccagggcatctatctcgtcatcgccaccatctcctttgccctgatcgtcgaggagatcctggcgcgctgggagagcgtcaccaacggcaacgagggtatgcgggtcaagacgctgtcgctgctcggcgtcgcggtgccgcgcgacagcccgaccttctatttcctgtgtctcgccgttctggtgctgaccatcgtcggcacgctcaatctgctgcgctcgccgacgggccgcgccttcgtcgcgatccgcgacagcgagaccgcggcgcgcagcatgggcgtcaacgtcgcgctctacaaggtgaagtcctttgcgatctcggcggcgatcaccggctttgccggcgtgctgttcgcgcacaagctctcgttcatctcgccggagatgttcacgctccagctctcgatcgagttcatcatcgtgatcctgatcggcggcagcttcagcctgcacggtgccgtgctgggcgcgatcttcatcgtgatgatcgacccgttcctgacctatttgaaggacgacatgcccggcatcatcgccggcattgccgccgctttcggcgccggcacccaaggagcggccaacgtccagtccaaggtcgcggccttcgcctcgctcaacggtctgaagggcgcgatctacggcatcatcatcgtgctgttcgtgctgttcgagccgctcgggctctacggccgctggctcaagatcaagctcttcttccagctcttcccgctctacaagcgcgccaccttcaagcggcagaagatctacgtgaagtcggagcgcaaccgatga

SEQ ID NO: 60910 - protein, 383 aa, Bradyrhizobium japonicum USDA 110
MRFLFKTDYEDDIKLFPHSGYFVSYGILLALLLVAPYVLSSYLMSQLVFVCIYATVGVALLILTGFTGQASLGHAAFLAIGAYTAAYLQKYNVPFPVYFLAAGLLTGIIGAMVGFPALRLQGIYLVIATISFALIVEEILARWESVTNGNEGMRVKTLSLLGVAVPRDSPTFYFLCLAVLVLTIVGTLNLLRSPTGRAFVAIRDSETAARSMGVNVALYKVKSFAISAAITGFAGVLFAHKLSFISPEMFTLQLSIEFIIVILIGGSFSLHGAVLGAIFIVMIDPFLTYLKDDMPGIIAGIAAAFGAGTQGAANVQSKVAAFASLNGLKGAIYGIIIVLFVLFEPLGLYGRWLKIKLFFQLFPLYKRATFKRQKIYVKSERNR

SEQ ID NO: 60911 - DNA, 1095 bp, Tropheryma whipplei str. Twist
  CDS (1)..(1095): transl_table=11
gtgatgggctttctatcgtctgttatgcggtggtggaagggtatgtctcgcccccagcagtggttttttcttcttccgtttgtggtccttgtttatcttttgccaattattaatcctccggttatcacaaccgaaccgggcaataattttccaatctcactgtttacaatggcaatttatgccctcgccgcggtcggtcttaatgtagttgttggttatgcaggacttcttgatttgggttatattgcattttttgcggttggtgcttatgtatctgctgtatttacgagtccggattctccgtatgtcaaaattccttatctttggaccattcctgttgcgatttttactgccatggtttttggcgcagccctgggtgtacctaccctccgtcttcggggagactatctggcgattgttactcttgggtttggagagatagtcagaattatggcgactattatccctgccctccgtggtaacctcgggttttccaatgttggccacccgccgggcgactatccttctggccagccgattttcacgcctgataatggagtagcttggtattgggtcgctattacagttgttatattcgttcttgtaatcgttgggaatctcgagaggagtattgtcggcagaaactggtttgctatctgccaggatgaagatgctgcagaggttatgggtgtgaataccttttccttcaaggtatgggcttttgcaattggtgctgcaattggtggcctctccggttccctgcaggctgcacagacagggtttgtaaataatcagcgttttgatgttgcgacctccgttttattccttgttgcagtcgtacttggcggttctggtaacaaatttggtgctgcaattggtggtgcacttgtggcgtatattccactgcgttttacggagattgcacaatacaagtatttgatcttcggtgtatgtcttatacttctgatgctttttagacatgaaggcctgtttcctatgaaggcaaatcttttttcaagacaggttttgctgcggaaattgtcattgcgccattcacccgataaacgtgcgtcatcttcgccctcggggtcttga

SEQ ID NO: 60912 - protein, 364 aa, Tropheryma whipplei str. Twist
MMGFLSSVMRWWKGMSRPQQWFFLLPFVVLVYLLPIINPPVITTEPGNNFPISLFTMAIYALAAVGLNVVVGYAGLLDLGYIAFFAVGAYVSAVFTSPDSPYVKIPYLWTIPVAIFTAMVFGAALGVPTLRLRGDYLAIVTLGFGEIVRIMATIIPALRGNLGFSNVGHPPGDYPSGQPIFTPDNGVAWYWVAITVVIFVLVIVGNLERSIVGRNWFAICQDEDAAEVMGVNTFSFKVWAFAIGAAIGGLSGSLQAAQTGFVNNQRFDVATSVLFLVAVVLGGSGNKFGAAIGGALVAYIPLRFTEIAQYKYLIFGVCLILLMLFRHEGLFPMKANLFSRQVLLRKLSLRHSPDKRASSSPSGS

SEQ ID NO: 60913 - DNA, 1095 bp, Tropheryma whipplei TW08/27
  CDS (1)..(1095): transl_table=11
gtgatgggctttctatcgtctgttatgcggtggtggaagggtatgtctcgcccccagcagtggttttttcttcttccgtttgtggtccttgtttatcttttgccaattattaatcctccggttatcacaaccgaaccgggcaataattttccaatctcactgtttacaatggcaatttatgccctcgccgcggtcggtcttaatgtagttgttggttatgcaggacttcttgatttgggttatattgcattttttgcggttggtgcttatgtatctgctgtatttacgagtccggattctccgtatgtcaaaattccttatctttggaccattcctgttgcgatttttactgccatggtttttggcgcagccctgggtgtacctaccctccgtcttcggggagactatctggcgattgttactcttgggtttggagagatagtcagaattatggcgactgttatccctgccctccgtggtaacctcgggttttccaatgttggccacccgccgggcgactatccttctggccagccgattttcacgcctgataatggagtagcttggtattgggtcgctattacagttgttatattcgttcttgtaatcgttgggaatctcgagaggagtattgtcggcagaaactggtttgctatctgccaggatgaagatgctgcagaggttatgggtgtgaataccttttccttcaaggtatgggcttttgcaattggtgctgcaattggtggcctctccggttccctgcaggctgcacagacagggtttgtaaataatcagcgttttgatgttgcgacctccgttttattccttgttgcagtcgtacttggcggttctggtaacaaatttggtgctgcaattggtggtgcacttgtggcgtatattccactgcgttttacggagattgcacaatacaagtatttgatcttcggtgtatgtcttatacttctgatgctttttagacatgaaggcctgtttcctatgaaggcaaatcttttttcaagacaggttttgctgcggaaattgtcattgcgccattcacccgataaacgtgcgtcatcttcgccctcggggtcttga

SEQ ID NO: 60914 - protein, 364 aa, Tropheryma whipplei TW08/27
MMGFLSSVMRWWKGMSRPQQWFFLLPFVVLVYLLPIINPPVITTEPGNNFPISLFTMAIYALAAVGLNVVVGYAGLLDLGYIAFFAVGAYVSAVFTSPDSPYVKIPYLWTIPVAIFTAMVFGAALGVPTLRLRGDYLAIVTLGFGEIVRIMATVIPALRGNLGFSNVGHPPGDYPSGQPIFTPDNGVAWYWVAITVVIFVLVIVGNLERSIVGRNWFAICQDEDAAEVMGVNTFSFKVWAFAIGAAIGGLSGSLQAAQTGFVNNQRFDVATSVLFLVAVVLGGSGNKFGAAIGGALVAYIPLRFTEIAQYKYLIFGVCLILLMLFRHEGLFPMKANLFSRQVLLRKLSLRHSPDKRASSSPSGS

SEQ ID NO: 60915 - DNA, 1068 bp, Pseudomonas syringae pv. tomato str. DC3000
  CDS (1)..(1068): transl_table=11
atgctgtttcaagaagccggacaactggcgagtacgtatgcaggcgagcggcgcatctttcgcctgcgtcaggaccgtgtcgccctttgggggctgttggtttttgcgttcgttggcgtgccgttgctgggcaacgattactggttcagcgcgattctgattccgtttctagtgctctcgctggcggggctcggactgaacctgctgaccggatacgccgggcaattgtcgctgggctcggcggcgttcatggcggtgggcgcgtttgctgcctataacctgcaactgcgcgtgccgggtatgccgctgttgcttgggtttgcactcggcggtctggtgtcggcggcggtggcgttgctgttcggactgcccagtctgcgcatcaagggcttttacctgctggtctcgacattggcggcgcagtttgtcgtcgagtgggtgttgacccgtttcagctggtttaccaacgacaacgcatcgggggtgatcacctcgccaccgttgatcatcgccgggatgaatttcagttcgccgcaaggccgttatctgttgacgctggcgctggtggtgctgctgttctggctggccagaaacctgctgcgcggcgaactgggtcgcaactggatggccgtgcgcgacatggacaccgctgctgcggtcattggcatccgcctgttcaaggccaagctgctggcattcgccatcagcggcttctacctgggtatcgccggctcgttgtgggcgtttgcctatctgggcacggtcgagccgcatggctttgatctgaaccggtcattccagatcctgttcatcatcattatcggcgggctgggcagtgtgcaaggcaacttcttcggtgcggccttcatcgtgctgttcccgattttgctgggcaacctcagcgcccagctgccggtcggcctgatcgattccgggcaactggaaaacattcagaagatgcttttcggcgcgttgatcattgcctttctgatcaaggagcccgaagggctggcgcgcctctggcagcgctttcgccagcgtgcgcgggtctggccgctgcgttattga

SEQ ID NO: 60916 - protein, 355 aa, Pseudomonas syringae pv. tomato str. DC3000
MLFQEAGQLASTYAGERRIFRLRQDRVALWGLLVFAFVGVPLLGNDYWFSAILIPFLVLSLAGLGLNLLTGYAGQLSLGSAAFMAVGAFAAYNLQLRVPGMPLLLGFALGGLVSAAVALLFGLPSLRIKGFYLLVSTLAAQFVVEWVLTRFSWFTNDNASGVITSPPLIIAGMNFSSPQGRYLLTLALVVLLFWLARNLLRGELGRNWMAVRDMDTAAAVIGIRLFKAKLLAFAISGFYLGIAGSLWAFAYLGTVEPHGFDLNRSFQILFIIIIGGLGSVQGNFFGAAFIVLFPILLGNLSAQLPVGLIDSGQLENIQKMLFGALIIAFLIKEPEGLARLWQRFRQRARVWPLRY

SEQ ID NO: 60917 - DNA, 1068 bp, Vibrio parahaemolyticus RIMD 2210633
  CDS (1)..(1068): transl_table=11
atggctcaacttagcatgcgcccatgtggggattttcgaaccacatacaaaagtgatacgccaatttttgaaaccaaaaccatcagaagcctcgcgatagcgggtgtgatcgccatgctggcagcgcctctggtactggatatttacttccttaacttgtttattcaaattgcgtacctcggtatcgcggcccttggtttgaacattttggtcggctttaccggacaaatctcgctaggtcacggtgcgttctttggctttggcgcatttgcatcggcttggctgaacaaccagttcaacattccagtggtgtttgccattccgctcgcgggttacttgaccatgatcgtcgggatgctctttggcttgccagccgcgcgaatcaaaggtttgtaccttgcgattgcaactttagctgcgcagttcattttggaagacttctttgctcgtgcggagtggttcagtggcggttcatacggcgcgagtgccagcccaatcaacctatttgggtttgagttctcgaccgatgaaagcttcttctatgttgcactgtttgcgctgatctttatgtatctatgggcttccaacctcatccgttctcgtgatggtcgtgcgtttgtttcggtacgcgatcattacctatcggctgaaataatgggtatcaacctgaccaaatatcgtctgctctcttttggtgtgtgtgcgttttatgcaggcattggcggcgcactttacgggcattacttagggttcgtttctgccgaaggcttcaccatcatgatgtctattcagttcctcgcgatgatcatcatcggtggtctgggatcggtgaaaggtacattgatgggtacgatcttcatcgtattgctaccagaggttttagagtttggtgtgacggggctggctgcgtttagcgataacacgtcgttcattgatgggcttgcttacttcaaagaaatggcgattggtttggtcatcatgctgttcctgatttttgaacctcaaggattgtcgcatcgctggcaacaaattcgagcatattggaaacactatccgttttcttattaa

SEQ ID NO: 60918 - protein, 355 aa, Vibrio parahaemolyticus RIMD 2210633
MAQLSMRPCGDFRTTYKSDTPIFETKTIRSLAIAGVIAMLAAPLVLDIYFLNLFIQIAYLGIAALGLNILVGFTGQISLGHGAFFGFGAFASAWLNNQFNIPVVFAIPLAGYLTMIVGMLFGLPAARIKGLYLAIATLAAQFILEDFFARAEWFSGGSYGASASPINLFGFEFSTDESFFYVALFALIFMYLWASNLIRSRDGRAFVSVRDHYLSAEIMGINLTKYRLLSFGVCAFYAGIGGALYGHYLGFVSAEGFTIMMSIQFLAMIIIGGLGSVKGTLMGTIFIVLLPEVLEFGVTGLAAFSDNTSFIDGLAYFKEMAIGLVIMLFLIFEPQGLSHRWQQIRAYWKHYPFSY

SEQ ID NO: 60919 - DNA, 1182 bp, Streptomyces avermitilis MA-4680
  CDS (1)..(1182): transl_table=11
gtgtctaggcgcctcgtcatggcgggcgctgccgtcctcctgtgcgtactgcccttctatctgggcgcgttctggctccaggtcggactgttctcgatggccgccgcgctcggagccgtcggactcaccctcctcaccggcaccgccggccagctctccctcggccacgcgttcttcctcgcggtcggcgcctacggatacgtgtggctggcgggcgaccccgggccggggctgccgccgctgctcgccctggtgctggcggtctgtctgagcggtctggtgggcggcctgttcagtccggtcgccggccgggtgcgcggcgtctacctcggggtggcgacgctcgccctggtcttcctcggccaccacgtgatgctcaacgccgactccatcaccggcggcttcaacgggcggtccgtgccgcccatgtccctcggcggcttcaccttcaccgcgagcgatccccaactgaccgtgctgggcgtcccgttcggcgccgaggagcgcctgtggtacctggcgctgatcctgctcgcggtgggctggttcgccgcccgcaacctgctgaacggccgcccgggactggccctgaccgcgctgcgcgacagcgagaccgcggcggccgtgatgggcgtcccggtcgcccgccggcgctcggccgccttcgtggtctcctccatgtacgcgggcctggccggggtcctgctcgcgctcgtcttccgccggatcgtgccggactacttcggcctcgcactgtccatcgactacctcgcgatgatcgtcatcggcggcctcggctcggtggcgggcgccgccgcgggcgccgtcttcgtcaccgcgctgccgttgctcatggcccgctacgccgaccagttgccgctggtcgccgcgcccggcgccgcgggccacgcggtgggccccaccgaggcctcccgctatctgtacggcgccgccatcgtcctcgtcctgctcttcgcccccgacgggctgagcggcgtcgcccggcgcgccggcgccgcggtccgccgacgccggaccgcgcccccgcgcacggcgtccgccgatgtcgcatcaccggcctccgcatcaccggcctccgaatcaccggcctccgcatccccggccgcctccaccccggccgcgtccgcatcagatcaacgacccaaggagcgcacctcgtga

SEQ ID NO: 60920 - protein, 393 aa, Streptomyces avermitilis MA-4680
MSRRLVMAGAAVLLCVLPFYLGAFWLQVGLFSMAAALGAVGLTLLTGTAGQLSLGHAFFLAVGAYGYVWLAGDPGPGLPPLLALVLAVCLSGLVGGLFSPVAGRVRGVYLGVATLALVFLGHHVMLNADSITGGFNGRSVPPMSLGGFTFTASDPQLTVLGVPFGAEERLWYLALILLAVGWFAARNLLNGRPGLALTALRDSETAAAVMGVPVARRRSAAFVVSSMYAGLAGVLLALVFRRIVPDYFGLALSIDYLAMIVIGGLGSVAGAAAGAVFVTALPLLMARYADQLPLVAAPGAAGHAVGPTEASRYLYGAAIVLVLLFAPDGLSGVARRAGAAVRRRRTAPPRTASADVASPASASPASESPASASPAASTPAASASDQRPKERTS

SEQ ID NO: 60921 - DNA, 1065 bp, Bordetella parapertussis 12822
  CDS (1)..(1065): transl_table=11
atgttctatcgcgaaaacggccagttcaagaccagctatcgcgccgaccagcagatctttccgatccgccaggaccgcatcttcatcgccctgctgatggcggtgatattcgtcgtcgttcccctgaccgccagcgactatctgctgcgcgccatcctgatcccgttcctgctcctggcgctggcggcggtggggctgaacatcctggtgggctactgcggccagatctcgctgggcaccggcgccttcatggcggtgggcgcctacgcggcctggaacttcggcgtgcgctttcccggcatgccgctggtggcgcagatcctgctgggcggctgcttcgccacgctggtgggcgtcatcttcggcattcccagcctgcgcatccgcggcctgtacttggcggtggccacgctggccgcgcagttcttcgtcgactgggcgttcctgcgcattccattcttcaccaactattcgtcctcgggcagcgtatcggtgccgcccatgacgttcttcggcctgccggtgcaatcggcgctggagaagtacctgctggtgctgggcttcgtggtcgtgttcacactgctggccaagaacctggtgcgcggcgccatcggccgccagtggatggcgatccgcgacatggacgtcgccgcggcagtgatcggcatccggcccatgtacgccaagctgtcggcgttcgcggtcagctcgttcatcgtgggcgtggccggcgcgctgtggggctacgtccacctcggctcgtgggagccgctggccttcgacctggcgcggtcgttccagctgctgttcatggtcatcatcggcggcctgggctcgatcctgggcagcttcttcggcgccgccttcatcgtgctggtgccggtggccctgaccaatgtcccgcacctgctgggtctgtcgctgtcggtcgacacggccgcgcacatcgagcacatggtgttcggcgcgttgatcgtgttcttcctcatcgccgagccgcacggattggcgcggctgtggagcatcgccaaggagaagctgcgcatctggccgttcccgcattga

SEQ ID NO: 60922 - protein, 354 aa, Bordetella parapertussis 12822
MFYRENGQFKTSYRADQQIFPIRQDRIFIALLMAVIFVVVPLTASDYLLRAILIPFLLLALAAVGLNILVGYCGQISLGTGAFMAVGAYAAWNFGVRFPGMPLVAQILLGGCFATLVGVIFGIPSLRIRGLYLAVATLAAQFFVDWAFLRIPFFTNYSSSGSVSVPPMTFFGLPVQSALEKYLLVLGFVVVFTLLAKNLVRGAIGRQWMAIRDMDVAAAVIGIRPMYAKLSAFAVSSFIVGVAGALWGYVHLGSWEPLAFDLARSFQLLFMVIIGGLGSILGSFFGAAFIVLVPVALTNVPHLLGLSLSVDTAAHIEHMVFGALIVFFLIAEPHGLARLWSIAKEKLRIWPFPH

SEQ ID NO: 60923 - DNA, 1038 bp, Bordetella parapertussis 12822
  CDS (1)..(1038): transl_table=11
atgcgcatcgcgaccgccaagcagacctaccaggccgacgaggcgctgttcgacacggccacgcagcgcgtgtggctggcgctgctgctggccgccctggcgctgtttcccttcctggccaatgcctattggctgtacctggcctgcctggtggcgatccatgtggccagcgccaccgggctgaacatcctgaccggctataccgggctggtcagcctggggcaggcggctttcatgggcctgggcgcctacacggtggcggtgctcgaggtgcacgtgggcacgccggccttgctgaacctgctggccgccggcgcggtggtcatgctgggcgggctggtggtgggcgtgccttcgctgcgcgtcaaggggctgtacctggcgatcgtcaccatcgccgcgtcgttcatcgcccatttcctgttcgccaatctgccgctgaccggcggcacggccggcctgcaggtgccgccggcgcgcctgctgggcgtcgacctggacacctccttcaagatctattggctgatcgtgcccatcaccgtgctgatggtgctgggcgcggccaacctgttccgtacccgcatcggccgcgccttcatcgcgatacgcgatcgcgatatctcggccgaagtgctgggcatcgacctgctgcgctacaagctgctgtcgttcggcctgtcgtcgttctatgccggcgtggccggcggcctgtgggcgtatttcttccgcgtggtcacgcccgagagcttcccgctgatcatgtcgatcttcttcctggccgccatcatcgtcggcggcatgggctcgatcctgggcgccatcctgggcgcggtcttcatgaccatggtgcccgagttcctcaagctggtggtgggatggctgccggtaggcgacgacgcgctcggcctgctttcgccggtgcgcaccatcgtgttcggggcgctgatcgtgggctttctgattttcgaaccgctggggctggccgagatatggcggcgcgtgcggcgttttttccacctatggccgtttcgcacctga

SEQ ID NO: 60924 - protein, 345 aa, Bordetella parapertussis 12822
MRIATAKQTYQADEALFDTATQRVWLALLLAALALFPFLANAYWLYLACLVAIHVASATGLNILTGYTGLVSLGQAAFMGLGAYTVAVLEVHVGTPALLNLLAAGAVVMLGGLVVGVPSLRVKGLYLAIVTIAASFIAHFLFANLPLTGGTAGLQVPPARLLGVDLDTSFKIYWLIVPITVLMVLGAANLFRTRIGRAFIAIRDRDISAEVLGIDLLRYKLLSFGLSSFYAGVAGGLWAYFFRVVTPESFPLIMSIFFLAAIIVGGMGSILGAILGAVFMTMVPEFLKLVVGWLPVGDDALGLLSPVRTIVFGALIVGFLIFEPLGLAEIWRRVRRFFHLWPFRT

SEQ ID NO: 60925 - DNA, 966 bp, Bordetella parapertussis 12822
  CDS (1)..(966): transl_table=11
atgcatagatcgactctgtggacgctggccctgctggccgcgctggcgcttttccccctggttgcgccggcgctgggcctggacttctatatctcgttcgtgcggcgcgtactgatctacgcgctggcggccaccagcctcaacctgatcctgggctacggcggcatggtggcgctggggcatgccgccttcttcggcgccggtgcctacgccgtcggcatcctgggggcggccggcatcacttcggcgctgctggcctggccggcggcgatcgcgctggccggcgcgctggcctggatcaccggcgcgatctcgctgcgcacgcgcggcgtgtacttcatcatgattaccctggcgttcgcccagatggtctattacgtgttcatttcgctgcgccagtatggcggcgaggacggcctgaacctgtcgggctattccacgcttcccgggctggacctggccaatgacctgactttctattatctggtgctggtcctgttcgccgtgctcatgggcgtgttcggccgcgtggtcgattcgcgcttcggcgccgccctgcagggcatacgcgagaacgagtcgcgcatggagtcgctgggctatccggtgtaccggctgaagctgacggctttcgtcatcagcggcgccgcggccgggctggccggcgccctgctggccaaccacaacctgttcatctcgcccagcctcatgcactggacgcaatcggccaacctgctgatcatggtgctggtcggcggcatcggcctgcgctatggcggagtggccggcgccgtggtcatgctggtgctggaagaagtgctgcggcaatggaccgagtattggcacctgccactgggcgtgctgctgctgtgcgtggtgctggacgcgccgcgcgggctggtgggcctggtgggcccctggttcgccggccgcgccggcgccgattcgacgagggccggaacatga

SEQ ID NO: 60926 - protein, 321 aa, Bordetella parapertussis 12822
MHRSTLWTLALLAALALFPLVAPALGLDFYISFVRRVLIYALAATSLNLILGYGGMVALGHAAFFGAGAYAVGILGAAGITSALLAWPAAIALAGALAWITGAISLRTRGVYFIMITLAFAQMVYYVFISLRQYGGEDGLNLSGYSTLPGLDLANDLTFYYLVLVLFAVLMGVFGRVVDSRFGAALQGIRENESRMESLGYPVYRLKLTAFVISGAAAGLAGALLANHNLFISPSLMHWTQSANLLIMVLVGGIGLRYGGVAGAVVMLVLEEVLRQWTEYWHLPLGVLLLCVVLDAPRGLVGLVGPWFAGRAGADSTRAGT

SEQ ID NO: 60927 - DNA, 1065 bp, Bordetella bronchiseptica RB50
  CDS (1)..(1065): transl_table=11
atgttctatcgcgaaaacggccagttcaagaccagctatcgcgccgaccagcagatctttccgatccgccaggaccgcatcttcatcgccctgctgatggcggtgatattcgtcgtcgttcccctgaccgccagcgactatctgctgcgcgccatcctgatcccgttcctgatcctggcgctggcggcggtggggctgaacatcctggtgggctactgcggccagatctcgctgggcaccggcgccttcatggcggtgggcgcctacgcggcctggaacttcggcgtgcgctttcccggcatgccgctggtggcgcagatcctgctgggcggctgcttcgccacgctggtgggcgtcatcttcggcattcccagcctgcgcatccgcggcctgtacctggcggtggccacgctggccgcgcagttcttcgtcgactgggcgttcctgcgcattccattcttcaccaactattcgtcctcgggcagcgtatcggtgccgcccatgacgttcttcggcctgccggtgcaatcggcgctggagaagtacctgctggtgctgggcttcgtggtcgtgttcacgctgctggccaagaacctggtgcgcggcgccatcggccgccagtggatggcgatccgcgacatggacgtcgccgcggcagtaatcggcatccggcccatgtacgccaagctgtcggcgttcgcggtcagctcgttcatcgtgggcgtggccggcgcgctgtggggctacgtccacctcggctcgtgggagccgctggccttcgacctggcgcggtcgttccagctgctgttcatggtcatcatcggcggcctgggctcgatcctgggcagcttcttcggcgccgccttcatcgtgctggtgccggtggccctgaccaatgtcccgcacctgctgggcctgtcgctgtcggtcgacacggccgcgcacatcgagcacatggtgttcggcgcgttgatcgtgttcttcctcatcgccgagccgcacggattggcgcggctgtggagcatcgccaaggagaagctgcgcatctggccgttcccgcattga

SEQ ID NO: 60928 - protein, 354 aa, Bordetella bronchiseptica RB50
MFYRENGQFKTSYRADQQIFPIRQDRIFIALLMAVIFVVVPLTASDYLLRAILIPFLILALAAVGLNILVGYCGQISLGTGAFMAVGAYAAWNFGVRFPGMPLVAQILLGGCFATLVGVIFGIPSLRIRGLYLAVATLAAQFFVDWAFLRIPFFTNYSSSGSVSVPPMTFFGLPVQSALEKYLLVLGFVVVFTLLAKNLVRGAIGRQWMAIRDMDVAAAVIGIRPMYAKLSAFAVSSFIVGVAGALWGYVHLGSWEPLAFDLARSFQLLFMVIIGGLGSILGSFFGAAFIVLVPVALTNVPHLLGLSLSVDTAAHIEHMVFGALIVFFLIAEPHGLARLWSIAKEKLRIWPFPH

SEQ ID NO: 60929 - DNA, 1038 bp, Bordetella bronchiseptica RB50
  CDS (1)..(1038): transl_table=11
atgcgcatcgcgaccgccaagcagacctaccaggccgacgaggcgctgttcgatacggccacgcagcgcgtgtggctggcgctgctgctggccgccctggcgctgtttcccttcctggccaatgcctattggctgtacctggcctgtctggtggcgatccatgtggccagcgccaccgggctgaacatcctgaccggctataccgggctggtcagcctggggcaggcggctttcatgggcctgggcgcctacacggtggcggtgctcgaggtgcacgtgggcacgccggccttgctgaacctgctggctgccggcgcggtggccatgctgggcgggctggtggtgggcgtgccttcgctgcgcgtcaaggggctgtatctggcgatcgtcaccatcgccgcgtcgttcatcgcccatttcctgttcgccaatctgccgctgaccggcggcacggccggcctgcaggtgccgccggcgcggctgctgggcatggacctggacacctccttcaagatctattggctgatcgtgcccatcaccgtgctgatggtgctgggcgcggccaacctgttccgtacccgcatcggccgcgccttcatcgcgatacgcgatcgcgatatctcggccgaagtgctgggcatcgacctgctgcgctacaagctgctgtcgttcggcctgtcgtcgttctatgccggcgtggccggcggcctgtgggcgtatttcttccgcgtggtcacgcccgagagcttcccgctggtcatgtcgatcttcttcctggccgccatcatcgtcggcggcatgggctcgatcctgggcgccatcctgggcgcggtcttcatgaccatggtgcccgagttcctcaagctggtggtgggatggctgccggtaggcggcgacgcgctcggcctgctctcgccggtgcgcaccatcgtgttcggggcgctgatcgtgggctttctgattttcgaaccgctggggctggccgagatatggcggcgcgtgcggcgttttttccacctatggccgtttcgcacctga

SEQ ID NO: 60930 - protein, 345 aa, Bordetella bronchiseptica RB50
MRIATAKQTYQADEALFDTATQRVWLALLLAALALFPFLANAYWLYLACLVAIHVASATGLNILTGYTGLVSLGQAAFMGLGAYTVAVLEVHVGTPALLNLLAAGAVAMLGGLVVGVPSLRVKGLYLAIVTIAASFIAHFLFANLPLTGGTAGLQVPPARLLGMDLDTSFKIYWLIVPITVLMVLGAANLFRTRIGRAFIAIRDRDISAEVLGIDLLRYKLLSFGLSSFYAGVAGGLWAYFFRVVTPESFPLVMSIFFLAAIIVGGMGSILGAILGAVFMTMVPEFLKLVVGWLPVGGDALGLLSPVRTIVFGALIVGFLIFEPLGLAEIWRRVRRFFHLWPFRT

SEQ ID NO: 60931 - DNA, 1092 bp, Chromobacterium violaceum ATCC 12472
  CDS (1)..(1092): transl_table=11
atggatctgaatcatctgagcaccggcaagaaaatggcggtcttcgccgcctgcgcggtccttctggccgtgctgcccttcctggtcggcggcgcgctgggcaattcctgggtgcgcatcatcgacttcgcgctgctgtacgtgatgctggcgctgggcctgaacatcgtggtgggcttcgccggcctgctggacctgggcttcatcgccttctacgcgatcggcgcctatacctacgcgctgctgagctcgccgcacttcgacatccactggctattcttcctcaccattccgctgggcgcggccttcgcctcgctgggcggggtgctgctgggcacgccggtgctgaagctgaagggcgactacctggccatcgtgaccctgggtttcggcgagatcgtgcgcatcttcatgaacaacctgaaccagccggtcaacatcaccaacggtccccagggcatcaacctgatcgacccgatccacatcggcggcgcgtcgctgggccagaccatcgagctgttcgggctgagcttccacaacgtctacctgtactactacctgttcctggcgctgaccgtgctggtggtgatcatggcctggcgtctgcagcactcccgcatcggccgcgcctgggtggcgctgcgcgaggacgacatcgccgccgcggcgatgggcatcaacatccgcaacatcaagctcttggccttcggcctgggcgccttgtccggcggcgtggccggcggcctgttcgcctcgttccagggcttcgtgtcgccggaatcgttcagcctgctggagtccatcatgatcctggccatgatcgtgctgggcggcatgggccacatcccgggcgtgatcctgggcgccgtggtgctgaccatcgcgccggaaatcctgcgcgacgtgatcggcccgctgcagatgaagaccgtcggccgcatgctgatcgacccggaaaacgcccgcatgctgctgttcggcctggcgatggtggtgatgatgctggtccgtccggaagggatgtggccgtccaagcggcgcaaggctgagttccagcacgccaaagaagacgccgcggtgcagaaaggttaa

SEQ ID NO: 60932 - protein, 363 aa, Chromobacterium violaceum ATCC 12472
MDLNHLSTGKKMAVFAACAVLLAVLPFLVGGALGNSWVRIIDFALLYVMLALGLNIVVGFAGLLDLGFIAFYAIGAYTYALLSSPHFDIHWLFFLTIPLGAAFASLGGVLLGTPVLKLKGDYLAIVTLGFGEIVRIFMNNLNQPVNITNGPQGINLIDPIHIGGASLGQTIELFGLSFHNVYLYYYLFLALTVLVVIMAWRLQHSRIGRAWVALREDDIAAAAMGINIRNIKLLAFGLGALSGGVAGGLFASFQGFVSPESFSLLESIMILAMIVLGGMGHIPGVILGAVVLTIAPEILRDVIGPLQMKTVGRMLIDPENARMLLFGLAMVVMMLVRPEGMWPSKRRKAEFQHAKEDAAVQKG

SEQ ID NO: 60933 - DNA, 1110 bp, Gloeobacter violaceus PCC 7421
  CDS (1)..(1110): transl_table=11
atgctaaaatccagccaatttcgatggggtccaattggttcggtggcacagcttcccattcggcaaacgatttttcagtggagcgaacgcctgccggcaccgctcaggcgctacgggcttttgggtgtgggcctgctcatcccggcattgatgctgctcacttcccagccgagctacctggccaatgtcgcggtgaccgtggcggtttacatggtgctggccatggggctcaacatcgtggtcggcctggcgggcctgttggatctgggctacatcgcctttttcgcggtgggcgcctatacctacgccatcggggcgccccatggcctcagcttctggctcgccctgccggtggctgcactgcttgccgccggtttcggggtgcttctgggggcaccgactttgcccttgcgcggcgactacctggccatcgtcaccctcggtttcggcgaaatcatccgcatctcgctcaacaacctcgactggctcacccgcggtccggcgggcatcagcggtgtacccgcacccgtgatcccctggataggcgccaaaggcttcacctggctcacgctctatcagccgctgcaactctatttcatcgcgcttgccttcgtcgcctttgtctactggatgaccagccgcctgaagcagtcgcgcgtcggccgcgcctgggtagccatccgcgaggatgagattgccgccgccgccatgggcgtcgacaccgtcaagctcaagctcctggccttcgccaccggggcggccctggccggcatggtcggggtgctctttgccgtgcagctcacctatgtctcccccgacagcttcaccctgatcgaatcggtgatggtcgtctcgatggtggtcctgggagggatgggatcggtgcccggggtggcccttggggctttgatcctaattgtcctgccggaggcgctccggggcttttccgagtaccggctgctgttatttggcgcggcgatgatcctggtgatgctcatccgtccccagggattattgggcgagcggcagggcgtgccgccccggcctacaggagccggtcttgaagacgaaacgccgctcgaagtcgaaaagcgcgacctgccggtgtaa

SEQ ID NO: 60934 - protein, 369 aa, Gloeobacter violaceus PCC 7421
MLKSSQFRWGPIGSVAQLPIRQTIFQWSERLPAPLRRYGLLGVGLLIPALMLLTSQPSYLANVAVTVAVYMVLAMGLNIVVGLAGLLDLGYIAFFAVGAYTYAIGAPHGLSFWLALPVAALLAAGFGVLLGAPTLPLRGDYLAIVTLGFGEIIRISLNNLDWLTRGPAGISGVPAPVIPWIGAKGFTWLTLYQPLQLYFIALAFVAFVYWMTSRLKQSRVGRAWVAIREDEIAAAAMGVDTVKLKLLAFATGAALAGMVGVLFAVQLTYVSPDSFTLIESVMVVSMVVLGGMGSVPGVALGALILIVLPEALRGFSEYRLLLFGAAMILVMLIRPQGLLGERQGVPPRPTGAGLEDETPLEVEKRDLPV

SEQ ID NO: 60935 - DNA, 1146 bp, Rhodopseudomonas palustris CGA009
  CDS (1)..(1146): transl_table=11
atgagcgcgcacgtccgaaccagctacgcgcagagcgagcagctgttcccgtcgaagaacgccgcgttctggtacgccgtcctggtcgcggcgctgatcgtcgcgccttatgtgctggaatcctattatctcagccagctcgtgttcgtgctgatctacgccatcgtcggcatcgccatgaacgtgctgtcgggccaggccgggcaggtgtcgatcggccatgccgcgttcatggcgatcggcgcctactccgccgcggtggccgagaaatacggcctgcctctgccggtctatctggtgctggccggcggtttcactgggctgatcggctatctggtcggacttccggcactacggcttcacgggatctatctggcgatcgccacactggcgttcgcgttcatcgtcgaagagatcgtcacccgctgggagagcgtcaccaacggcaacgaaggccttatgctcggtgcgccctcgctcttcgggctcaagctcggcgcgcagggcttctattatctctgcctcggcgtcaccgtggtggtgatcctcgccgccatcaacatcctgcgctcgccgaccggccgcgccttcctggcgattcgcgacagcgaaaccgcagcgcgaagcatgggcatcgacaccgcgcgctacaagacgcgcgcgttcgcgatctccgcagcgtttactggccttgctggcgtgctgtacgcgcacaagctgtcgttcatcagcccggaaatgttcagcctgtcgatgtctatcgaattcgtcatgatcatcatcatcggcggcgtgctcagcctgcgcggcgcggtgttcggcgcgatcttcatgatcatggtcgatccgatcctgatcgtggtgaaggacaaggtgccgcaactgacgctcggggcgatgcagggcgtgggcttgtcggatcagctcaccgatgcgatccaggccggcgtggtccgcgtcgccggcgcgccggggctgaagtcgctgatcttcggcctgatcatcatcctgttcatcatcttcgagccgatgggcctcgacggtcgctgggcccgagtgaagtcgtatttccgacagttcccgctgtatcggccgaccagctcccgcgcgcaaaggatgttcctgaagtcggagcgcaaccggtga

SEQ ID NO: 60936 - protein, 381 aa, Rhodopseudomonas palustris CGA009
MSAHVRTSYAQSEQLFPSKNAAFWYAVLVAALIVAPYVLESYYLSQLVFVLIYAIVGIAMNVLSGQAGQVSIGHAAFMAIGAYSAAVAEKYGLPLPVYLVLAGGFTGLIGYLVGLPALRLHGIYLAIATLAFAFIVEEIVTRWESVTNGNEGLMLGAPSLFGLKLGAQGFYYLCLGVTVVVILAAINILRSPTGRAFLAIRDSETAARSMGIDTARYKTRAFAISAAFTGLAGVLYAHKLSFISPEMFSLSMSIEFVMIIIIGGVLSLRGAVFGAIFMIMVDPILIVVKDKVPQLTLGAMQGVGLSDQLTDAIQAGVVRVAGAPGLKSLIFGLIIILFIIFEPMGLDGRWARVKSYFRQFPLYRPTSSRAQRMFLKSERNR

SEQ ID NO: 60937 - DNA, 1074 bp, Rhodopseudomonas palustris CGA009
  CDS (1)..(1074): transl_table=11
atggcgaatgcttccctgatccccgccggcgattttcgcacctcctacgccgccgacaccacgatcttcccgaccaggaccagccgcaacgcggcgatgctcggcatcgtgctggtgtgcttcgcgccgctggtgctgtcgggctattggctcagcatcctgatccagatcgggatcttcggcatcgccgcgctcgggctgaacatcctggtcggcttcaccggccagatctcgatcggtcacgccgcgttcttcctgctcggcgcctacacctcggcctatctgaacaaccacttcccgatcccggtgttcttcgcgattccgctcgccgggctcgtcaccgcgctggtcgggctggtgttcggcgtgccggcggcgcggctgaaaggtctgtatctcgtgatcgccacgctggcggcgcagtacatcctgatcgactttttctcgcgcgccgaatggttctccggcggctcggtgccggcgatggccaatccgttctcgctgttcgggtacgtcctgcagggcgacaagcagtatttctacgtcgtactggcgtatctgctggtcagctacatcctggtcaccaacctgatacgcacccgcgacggccgcgccttggtggcggtgcgcgaccattatctctcggccgagatcatggggatcaacctcacgaaatatcggacgctttcgttcgcgctcgcggcgttctttgccggcatcgccggcgcgctgtacgcgcattaccagctcgtcgtctccaacgagggcttcggcatcgaacgctcgatcctgttcctggcgatgatcatcatcggcggcatcggctcgatctcgggcacgctgatgggtactgccttcgtggtgctgctgccggagacgatggaatggctcagcagtggcttgaagggcagcgcgatcgaccgtgcgctggagctgaacaacaacctgaccttcctgcgcgaaatcgcgatcggcctgatcatcatcctgttcctggtgttcgagcccgatgggctggcgcaccgttggcggcagatcaaggcgtattggaaactctacccgttctcgcattga

SEQ ID NO: 60938 - protein, 357 aa, Rhodopseudomonas palustris CGA009
MANASLIPAGDFRTSYAADTTIFPTRTSRNAAMLGIVLVCFAPLVLSGYWLSILIQIGIFGIAALGLNILVGFTGQISIGHAAFFLLGAYTSAYLNNHFPIPVFFAIPLAGLVTALVGLVFGVPAARLKGLYLVIATLAAQYILIDFFSRAEWFSGGSVPAMANPFSLFGYVLQGDKQYFYVVLAYLLVSYILVTNLIRTRDGRALVAVRDHYLSAEIMGINLTKYRTLSFALAAFFAGIAGALYAHYQLVVSNEGFGIERSILFLAMIIIGGIGSISGTLMGTAFVVLLPETMEWLSSGLKGSAIDRALELNNNLTFLREIAIGLIIILFLVFEPDGLAHRWRQIKAYWKLYPFSH

SEQ ID NO: 60939 - DNA, 1056 bp, Bradyrhizobium sp. ORS278
  CDS (1)..(1056): transl_table=11
atgagcacgatcgccgaaaccgctctgacgccttcgcgtctcgcctggcgcacgtcgagcctgctcggcatcgcgctactgctcctgcttggctacggcgtcgtgccgtggatcggctcggactatctgatggacgcagtcctgacgccgttcctggcgctggcattggctgcggtcgggctcaacgtgctgaccggctatgccggccaggtctcgctgggctcggcggcgttcctcgcggtcggcgcttatgctgcctacaacctcaatctgaggttgccagtcctgccgctgctcgccgatatcgtgctggccggcggcatcgccgcggccatggggatcgtgttcggcctgccgagcctgcggctgcgcggcttctatctcgcggtctcgacgctcgcggcgcagttcttcgtgcagtgggcgctgaccaagttcggctggttctccaatgacaatgcctccggcgtgatcgacgcgccggtcatccgggtcggcggactgacgttcacgagcgcgaccggacgctacgtgttctcgttgacgatcgtggtggtcgcgaccgccctgaccgcgcgtctcttggcgtcgcagaccgggcgcaacttcatcgcggtgcgcgaccacgaggtcgcggcgaaggtgatcggtgtgccgttgttgcgcacgaagctgctcgcctttggcgtctcgtcgttcctgatcggcgtcgccggcgtgctctgggcgttcgcgtacctgcgcacggtcgaaccggccggcttcaatctcgatcgctcgttccagattctgttcatcatcatcatcggcgggctcgcgtcgctgcgtggcgccttcatcggcgcggccttcatcgtggtctttccgctgctgctgtcgcggctcggcgccgccgtgcttggcagcgtgttcgatcgcggcgtgctcgagatgagccagcgcatcgtcatcggcgcgctgatcatcgccttcctgatcgccgagccgcgcggcctcgtcgcgctgatcgaccgtgcggccggcgcgctgcgccgcgtccgttcatcccagacctga

SEQ ID NO: 60940 - protein, 351 aa, Bradyrhizobium sp. ORS278
MSTIAETALTPSRLAWRTSSLLGIALLLLLGYGVVPWIGSDYLMDAVLTPFLALALAAVGLNVLTGYAGQVSLGSAAFLAVGAYAAYNLNLRLPVLPLLADIVLAGGIAAAMGIVFGLPSLRLRGFYLAVSTLAAQFFVQWALTKFGWFSNDNASGVIDAPVIRVGGLTFTSATGRYVFSLTIVVVATALTARLLASQTGRNFIAVRDHEVAAKVIGVPLLRTKLLAFGVSSFLIGVAGVLWAFAYLRTVEPAGFNLDRSFQILFIIIIGGLASLRGAFIGAAFIVVFPLLLSRLGAAVLGSVFDRGVLEMSQRIVIGALIIAFLIAEPRGLVALIDRAAGALRRVRSSQT

SEQ ID NO: 60941 - DNA, 1074 bp, Bradyrhizobium sp. ORS278
  CDS (1)..(1074): transl_table=11
atggttgcacgctccaccattcccgccggtgacttccgcacctcctacgcggccgacaccacgatcttccccacaaagacgagccgcaacttcgcgatcgccggcgtgatcctgctgtgcttcgcgccgcaagtgttctcggagttttggctgtcgatcgcgatccagatcggcatcttctcgatcgctgccctcggcctgaacatcctggtcggcttcaccggccagatctcgatcggccaggccggcttcttcctgctcggtgccttcacctcggcctacatcaacaacacctatgcgatcccggtgttcttcgcgatcccgctcgccggcgtcatcaccgcgctggtcgggctcgtgttcggtctaccggcggcgcgattgaaggggctctatctcgtcatcgcgacgctggccgcgcaatacatcctgctcgacttcttctcccgcgccgaatggttctccggcggttcggtgcccgcctcggccaatccgttctcgatcttcggctacacgctgcgcggcgaccggcaatatttctacgtcgtcctcgcttatgtgctggtctgctacatcctggtcaccaatctgatgcgcacccgcgacggccgcgcgctgatcgcgatccgcgatcattatctctcggccgagatcatgggcatcaacctgaccaagtaccgcacgctgtcgttcgggctggccgccttcttcgcagggatcgccggcgcgctctacgcgcattaccagctggtggtctcacaagaaggattcggcatcgagcgctcgatcctgttcctggcgatgatcatcatcggcggcaccggctcgatcatgggcaccctgatgggaaccgccttcgtcgtgctgctgccggaatcgatggaattgctgagccactacctcaagggcggcgcgatcgacaaggcgctcgcgctcaacaacaacatcaccttcctgcgcgagatcgcgatcggcctgatcatcatcgccttcctgatgttcgagccggacgggctggcgcatcgctggcggcagatcaagacatactggaagctctacccgttctcgcattga

SEQ ID NO: 60942 - protein, 357 aa, Bradyrhizobium sp. ORS278
MVARSTIPAGDFRTSYAADTTIFPTKTSRNFAIAGVILLCFAPQVFSEFWLSIAIQIGIFSIAALGLNILVGFTGQISIGQAGFFLLGAFTSAYINNTYAIPVFFAIPLAGVITALVGLVFGLPAARLKGLYLVIATLAAQYILLDFFSRAEWFSGGSVPASANPFSIFGYTLRGDRQYFYVVLAYVLVCYILVTNLMRTRDGRALIAIRDHYLSAEIMGINLTKYRTLSFGLAAFFAGIAGALYAHYQLVVSQEGFGIERSILFLAMIIIGGTGSIMGTLMGTAFVVLLPESMELLSHYLKGGAIDKALALNNNITFLREIAIGLIIIAFLMFEPDGLAHRWRQIKTYWKLYPFSH

SEQ ID NO: 60943 - DNA, 999 bp, Bradyrhizobium sp. ORS278
  CDS (1)..(999): transl_table=11
atgagcaagcatagcagactgctcctcgccgcgctggcggtcgtcgtcattgccggcctgatcatcatcccgatgaacttcaaccgctatggcctgtacatcttgagccaatgggctgtcatgaccatcgccgcgatggggctcaatttgacgctcggctatgccggccaggtgtcgctggcgcagggcgccttcgtcggcatgggtgcgtatggcgccgccatcctgaccacccacggctggccgctgatcgcggccctcgggctcgtcatcgtgatctgcttcatcgtcggctggctgctcggttatccggcgctgcgcgtgcagcatcactatctcgctttcgtgacgctagcgttctcgaccctgatgttcctggtgttccgcaacgagacctggctgaccaacggcatctatggcatcagcaacatcccgcgtcccgaggtctttggctttccgacccgcaagccactgccgttctactacctctgcctcggctcgctcgcgctggtgacgcttgcgatgtggtggctgatccgctcgccctggggccgcgccttcatggcgctgcgcgagaatccaatccgcgcgcagtcgctcggcatcgacacccgccgctacaccttgatggccttcgcgatcggctctgtgctcggcggcatcgccggcgtgctctatgcgccgctcacgcaatatgtcgatcccgtcccgttcaacctgcagctctcgctcgatctcttgatgatggtgatcgtcggcggggccggcttcatgctcggaccattcctcggggcgatgatcgcggtgctgctgccggaatggctgcgcgtggccgagggttactatctgatgctctatgcgatcgcggtcatcgcgctgctgatctactcgccgaccggcattctcggcatcctcgatcgttatctcagctcacgccggacacaggcggcgtccgcgttgcgcgcagcggcgcaatccaagctggagaccgcgcaatga

SEQ ID NO: 60944 - protein, 332 aa, Bradyrhizobium sp. ORS278
MSKHSRLLLAALAVVVIAGLIIIPMNFNRYGLYILSQWAVMTIAAMGLNLTLGYAGQVSLAQGAFVGMGAYGAAILTTHGWPLIAALGLVIVICFIVGWLLGYPALRVQHHYLAFVTLAFSTLMFLVFRNETWLTNGIYGISNIPRPEVFGFPTRKPLPFYYLCLGSLALVTLAMWWLIRSPWGRAFMALRENPIRAQSLGIDTRRYTLMAFAIGSVLGGIAGVLYAPLTQYVDPVPFNLQLSLDLLMMVIVGGAGFMLGPFLGAMIAVLLPEWLRVAEGYYLMLYAIAVIALLIYSPTGILGILDRYLSSRRTQAASALRAAAQSKLETAQ

SEQ ID NO: 60945 - DNA, 1032 bp, Bradyrhizobium sp. ORS278
  CDS (1)..(1032): transl_table=11
atgtcgcggagcgtgatcgccgccgtcattctcgcggttctcgcgatcctgggcacgctgctgctcggccgcttcggcgcctacctgatgcatgcggttgcgatcgccgcaatcggcgcgctgtcgctcaatctgctgaccggcttctgcggccagatcaacttcgcccaggctggcctgctcggcgtcggcgcctacacggcggggctggccggcaatgccggctgggatgtgctggcgctccccgtggcgggccttgccgctgtcgtgaccgcgatgctgatcggattgccggcactgcggctgcgcggtctctatttcgcgatcgctaccctcgctgcacagttcattctcgaatatctgttcaaattcgccgagccgatcacccatggcgtctcgggcctgctgatcaggccgatgaccgtgctcggccagccgatccagacagaccagggttatgcgatcgtggcgatcgtgctgctgctcgtcaccttcctcgtgatgcaatggctgcgccgcaccgatctcggccgcgcgttcctggtggtccgcgagaacgaggtggtcgccaagggcatgggcatcaacgtcgcccggaccaagatgctggctttcatgatcagcggcttcttcgccggcgtcgccggcggcctgatcggcttcaccgcgcggctcgcgcatcccgaatccttcggcatgagcatgtcggtcgactatgtcgcgatgatcatcgtcggcggtctcggctcgatgtcgggtgcggtgctcggggccggcttcatcacactgctgcccgaggcgatccagcgccttggcgagatcgtccatatctccgacctcttgtccgcgctgcgcgagatggcgttcggcctgctcatcatcgtcttcctcatcttcgaggggcgcggactgtcggcgatcggcgcgcggctgatgtccccacgctggctgcggaaggcaggccaggtcgaccgcgacaagcagggcctgcagttacagaagatcaaatcaacacagggaggactggaatga

SEQ ID NO: 60946 - protein, 343 aa, Bradyrhizobium sp. ORS278
MSRSVIAAVILAVLAILGTLLLGRFGAYLMHAVAIAAIGALSLNLLTGFCGQINFAQAGLLGVGAYTAGLAGNAGWDVLALPVAGLAAVVTAMLIGLPALRLRGLYFAIATLAAQFILEYLFKFAEPITHGVSGLLIRPMTVLGQPIQTDQGYAIVAIVLLLVTFLVMQWLRRTDLGRAFLVVRENEVVAKGMGINVARTKMLAFMISGFFAGVAGGLIGFTARLAHPESFGMSMSVDYVAMIIVGGLGSMSGAVLGAGFITLLPEAIQRLGEIVHISDLLSALREMAFGLLIIVFLIFEGRGLSAIGARLMSPRWLRKAGQVDRDKQGLQLQKIKSTQGGLE

SEQ ID NO: 60947 - DNA, 1059 bp, Bartonella quintana str. Toulouse
  CDS (1)..(1059): transl_table=11
atgacaaaatcagcttcaacttttctatcatgtatcagtattctcgttcttatcggttttttgttttatgctgataatcattttaatgactacacacttcgtgtcatcaatcttattgctatcaatgcgatattggcaatttcgcttaatttgatttatggtttcacgggtatgttttctcttggacatgctggcttcatggccattggtgcttatgtatgcgcaattttacttctctctcctgaacaaaaagaaatgatgtggattctcgaacctatagctgagccgttgcattatttgcagttacctttttttgtggctgttgttataagtggtctgtgtgctgcagttatagggttattagttgctcttcctatattacgtcttggtggcgattatcttggaattgcaacattgggttttgcagaaattattcgcattgttattacaaacgcaacatctctaacaaatggttctttgggaatcaaagggatacctcaaaatgctacattatggtggaactatggttggttagcatttacggttacctttattgttctcttactgcgaagcaatgctggtaatgtactgcgcgctattcgtgacgatgaaatcgctgcgaaaacaatgggtatcaacgcttttttctaccgtagcttttcctttactgttggtgcattttttgcagggatcggaggagcattaacggctgctcttatttcaactatcgatcccaaaatgttcaactttctcctaacctttaatattttgatgattgttgttgctggtggtcttggttcgattacaggcagtgttataagtagtgttattgttacagctatgcttgaatggcttcgtatcattgaaagtccatttgacttaggttttatatatattccagaaataccaggacttcgtatggttgttttttctcttttattgttagtaattatcttattttggcgaaaaggattgctgggacaacgtgaattctcatggaattggatttatggttttttgacacgaaagaagctccctaatactgagggaaagctatga

SEQ ID NO: 60948 - protein, 352 aa, Bartonella quintana str. Toulouse
MTKSASTFLSCISILVLIGFLFYADNHFNDYTLRVINLIAINAILAISLNLIYGFTGMFSLGHAGFMAIGAYVCAILLLSPEQKEMMWILEPIAEPLHYLQLPFFVAVVISGLCAAVIGLLVALPILRLGGDYLGIATLGFAEIIRIVITNATSLTNGSLGIKGIPQNATLWWNYGWLAFTVTFIVLLLRSNAGNVLRAIRDDEIAAKTMGINAFFYRSFSFTVGAFFAGIGGALTAALISTIDPKMFNFLLTFNILMIVVAGGLGSITGSVISSVIVTAMLEWLRIIESPFDLGFIYIPEIPGLRMVVFSLLLLVIILFWRKGLLGQREFSWNWIYGFLTRKKLPNTEGKL

SEQ ID NO: 60949 - DNA, 1059 bp, Bartonella henselae str. Houston-1
  CDS (1)..(1059): transl_table=11
atggcaaaatcagcttcaacttttttatcatgtatcagtattcttttttttatcggttttttattttatgctgataaccattttaatgagtacacacttcgtgtcatcaaccttattgctatcaatgcgatattggcaatttcgcttaatttgatttacggtttcaccgggatgttttctcttggacatgctggattcatggctattggtgcttatgtatgcgcgattttacttctttctcctgaacaaaaagaaatgatgtggattcttgaacctatagctgagccattgcatgatctacagttacctttttttgtaactgttgttgtaagtggtctgtgtgctgcagttgtaggtttattaattgctcttcctatcttacgtcttggcggagattatcttggaattgcaacgttgggttttgcagaaattattcgcattgttattacaaacgcgacatccgtaacaaatggttctttaggaatcaaaggaatacctcaaaatgcgacattatggtggaactatagttggttagtatttacggttaccttcattattctcttactgcgaagcaatactggtaatgtactgcgcgctattcgtgatgatgaaatcgctgcgaaaacaatggggattaacgcttttttctaccgtagcttttcctttactgcaggtgcattctttgcaggtgtcggaggagcattaatggccgctcttatttcaacaatcgatccaaaaatgttcaacttccttctaacttttaatattttgatgattgttgttgctggtggtcttggttcgattacaggtagcattattggcagcattattattacggtcatgcttgaatggcttcgcattatcgagagtccatttgacttaggttttatacatattccagagacaccagggcttaggatggttattttttctcttttattgctcgtcattatcttattttggagaagaggtttattgggacaacgtgaattctcatggagcgggatttatagcttttttacacgcaaaaagttctctaatactgaggaaaagctatga

SEQ ID NO: 60950 - protein, 352 aa, Bartonella henselae str. Houston-1
MAKSASTFLSCISILFFIGFLFYADNHFNEYTLRVINLIAINAILAISLNLIYGFTGMFSLGHAGFMAIGAYVCAILLLSPEQKEMMWILEPIAEPLHDLQLPFFVTVVVSGLCAAVVGLLIALPILRLGGDYLGIATLGFAEIIRIVITNATSVTNGSLGIKGIPQNATLWWNYSWLVFTVTFIILLLRSNTGNVLRAIRDDEIAAKTMGINAFFYRSFSFTAGAFFAGVGGALMAALISTIDPKMFNFLLTFNILMIVVAGGLGSITGSIIGSIIITVMLEWLRIIESPFDLGFIHIPETPGLRMVIFSLLLLVIILFWRRGLLGQREFSWSGIYSFFTRKKFSNTEEKL

SEQ ID NO: 60951 - DNA, 1071 bp, Acinetobacter sp. ADP1
  CDS (1)..(1071): transl_table=11
atgtttttattttctcaagctgaacagtttattcgtcgttatcaggatgaaaaaagaatttttgcgctcaaacaacatcgcatattgttctggttttttgttgctattgcttttttatttatcccttttgttgggtctgattatttatttaatgcgattctggttccttaccttgtactggcactggctggattgggtctcaatattttaactggttttacaggtcagttatctctgggatcagcagcatttatggctgttggtgcatttgcaacatataactttgagctccgtattcctcaattacctttactcctcagtttgtttcttgggggaacgatagcggcagtttttggtgtgattgtgggattgccaagcctgcggattaaagggttttacctgattgtctcaactctggcagcacagttttttattccttggttatttacacaatatggttggtttaccaactatagcgcgtcaggagtgattaccgcgcccaagttggtgattcttggatattcattagattctccagttggacattatcttttaacaatcagcatcgttcttgggttgactttgattgcacgtaatctcctgaatagtcagtatggtcgtaatttccaagcgattcgtgatatggaaacagccgcggtgaccttaggtatttctgctgccaagaccaagttgctcgcatttgcaatcagttcattttatttaggtgttgcgggtgctctttgggcctttgcttatctgggaacaattgaagccaatgggcttgatctcgatcgctcatttcagattctgttcatcatcattattggtggattgagtagtctggcaggaagcttttttggagccgcctttattgtgctgcttccgatcattttaagttttttgagtaacttgttttttggtcaaggttttgatcaggcattactacaaaatatccagaaaattatttttggtattttaattatttattttcttattcgcgaacctgaagggcttgtacgtctttatcagcgtttttatacacgtgttagaaagtggcctttgcgctattaa

SEQ ID NO: 60952 - protein, 356 aa, Acinetobacter sp. ADP1
MFLFSQAEQFIRRYQDEKRIFALKQHRILFWFFVAIAFLFIPFVGSDYLFNAILVPYLVLALAGLGLNILTGFTGQLSLGSAAFMAVGAFATYNFELRIPQLPLLLSLFLGGTIAAVFGVIVGLPSLRIKGFYLIVSTLAAQFFIPWLFTQYGWFTNYSASGVITAPKLVILGYSLDSPVGHYLLTISIVLGLTLIARNLLNSQYGRNFQAIRDMETAAVTLGISAAKTKLLAFAISSFYLGVAGALWAFAYLGTIEANGLDLDRSFQILFIIIIGGLSSLAGSFFGAAFIVLLPIILSFLSNLFFGQGFDQALLQNIQKIIFGILIIYFLIREPEGLVRLYQRFYTRVRKWPLRY

SEQ ID NO: 60953 - DNA, 1068 bp, Symbiobacterium thermophilum IAM 14863
  CDS (1)..(1068): transl_table=11
ttgcggtacccgttcgccctggagtgcggggtgtacatcaccacctacgagcaggaccacgccctgcaccagaccccgctggccgtggcccgcggctgggtgctggtcgccctgctctacgcgatcccgtggttcctgcccaactactacgtctcgatcctgaacatggtggcgatctacaccatcgccgcgctggggctcaacctgctcaccggcgtgaccgggcagatctcggtgggccacggcgccttcaccgggatgggcgccttcacggtgggctacctgatgaagcaggggctcccgttctgggtcgcgatgccgctggccgggctcaccgccgccgccgtcggggccctcttcgggctgccgtccgcccgcctgaaggggctttacctcgccatcgcctcgctggcggcgcaggtgatcctcacgttcttcttcacccgggccgactggttcaccgggggcatccactcgatgtcggtcaggcggccgagcttcttcggtcacaccctctccggtgaacgcagctacttctacctggccctgacggtggcgctgctgctcggggtcttcgcccagaacctgctccgcacccggatcgggcgggcgttcatggccgtgcgggaccgggacctggcggccgaggtcatgggcatcgacctgttccggacgaaggtgacggcctttgcgctgtcggcgttctacgccggcatcgccggggcgatctgggctccgtacgtgatgatcatctcgccggagcagttcgagatccacctgtccatcgagctgctcgcgatgatcatcatcggcggcatgggctcggtgatggggtccgtctacggcgccgccttcatgacggtcatgccgatcgtggtgcgggagctggcgatgctgctggagccggtgttcccgtccgttggcaccaagctgctgctgatccgggatgcggccttcggcgccgcgatcgtgctcttcctgatattcgagcccgaggggctggccaagctctggcggaacatcaaggattactttcggctctggcccttcggttacagcaagtcgtga

SEQ ID NO: 60954 - protein, 355 aa, Symbiobacterium thermophilum IAM 14863
MRYPFALECGVYITTYEQDHALHQTPLAVARGWVLVALLYAIPWFLPNYYVSILNMVAIYTIAALGLNLLTGVTGQISVGHGAFTGMGAFTVGYLMKQGLPFWVAMPLAGLTAAAVGALFGLPSARLKGLYLAIASLAAQVILTFFFTRADWFTGGIHSMSVRRPSFFGHTLSGERSYFYLALTVALLLGVFAQNLLRTRIGRAFMAVRDRDLAAEVMGIDLFRTKVTAFALSAFYAGIAGAIWAPYVMIISPEQFEIHLSIELLAMIIIGGMGSVMGSVYGAAFMTVMPIVVRELAMLLEPVFPSVGTKLLLIRDAAFGAAIVLFLIFEPEGLAKLWRNIKDYFRLWPFGYSKS

SEQ ID NO: 60955 - DNA, 1026 bp, Symbiobacterium thermophilum IAM 14863
  CDS (1)..(1026): transl_table=11
atgggcaagaagctgctcttcctcctgggcgccctggccgtgctggcgctgccctacgcgctgcctgacgaatggtcgtggctggtgctgctcaccaaccgggccctgatcctggccatcgcggccatcggcctcaacctgctcaccggcttcgccggccagatctccatcggccacgcggccttcatggccatcggcgccttcgccagctacggcctcaccgccaaggtcggcattcccttctggggcgccctgccgctggcagggctgatcagcgccgccgtgggctacgccctgggcttcccggcgctccggctgcagggccactacctggccatcgccaccctgggcttcggcgtggcggtgccccagatcctcaacctctggaaggggctctccggcggctggaccggggtgaagcccgccgccccttacctctatggcctctacttcaaggaggaccgcccctactactacctgatcctgatcgccctggccctcctcacctgggtggccctgaacatcgccagacggcgcaccggtcgggccttcatcgccctgcgggacagcagcgtcgccgcgcaggcgatgggcatcagcctggcccggtacaagaccaccgccttcgccctctcggcgttctacgccggcatcgccggcagcctctgggcccacatgatgaactacatcgccccccacgacttcaacctggccctgtcgatggagctgttcaccatcatcgtgctgggcggcctggcctcggtgcccggctcgatcgtgggttcgctgttcatgtccctgatgcccaaggccgtggaacggatctcgctggcgcttcagcggtcgggggccttcgaccattccccgttcctcatgaacgtcttcaagaacctgaatcaggtgctgacgggcgtcatcctggtgctggtggtgctctacctgcccctggggctcgtggacctgtggcggaggctgcagcactggtgggccgggcgccggcacgccgcggccgggggggtggagtag

SEQ ID NO: 60956 - protein, 341 aa, Symbiobacterium thermophilum IAM 14863
MGKKLLFLLGALAVLALPYALPDEWSWLVLLTNRALILAIAAIGLNLLTGFAGQISIGHAAFMAIGAFASYGLTAKVGIPFWGALPLAGLISAAVGYALGFPALRLQGHYLAIATLGFGVAVPQILNLWKGLSGGWTGVKPAAPYLYGLYFKEDRPYYYLILIALALLTWVALNIARRRTGRAFIALRDSSVAAQAMGISLARYKTTAFALSAFYAGIAGSLWAHMMNYIAPHDFNLALSMELFTIIVLGGLASVPGSIVGSLFMSLMPKAVERISLALQRSGAFDHSPFLMNVFKNLNQVLTGVILVLVVLYLPLGLVDLWRRLQHWWAGRRHAAAGGVE

SEQ ID NO: 60957 - DNA, 1860 bp, Symbiobacterium thermophilum IAM 14863
  CDS (1)..(1860): transl_table=11
gtggcggcgcctttgcgatctggaacccgtaggagggggagcatgctggaccagctgatcaacggcctggtggttggcaacctctacgccctcacggcggtgggcatcacccagatctacggcgtggccaacgtgatcaacttcgcccacggctccctctacatggtcggcgccttcgtgggctggatggcggtcacctggctgggcctgccgctactgcccaccctgctgctcgtgctcgtcgcctcggccctgctggggctggcggtggagcgggtcgccatccgccccttcgccggttctggccggacggtgctgctgctcaccaccatcgccgcggggctcgtcctggagcaggcggcccagctgatatgggggccggagaccaaggccttccacacccccttcgccgacgtgcgggtccgggtgggcggcggcttcctctcctccctggacctggtgatcctggctgtgggcttgaccaccgctctggcgctctggctcttcctgaagcggtcccgcctgggctgggcggtccgggccaccgcccaggaccgggaggccgccctgcagatgggcgtcgacgtgaaccaggtcagccgggtcagcttcgccatggccggcgccctggccggggtgagcgggctcctggtggggctgtactaccacagcgtctaccccaccatgggcttctccgcgagcctgaagggattcacggcggccctgctgggcggattgggcaacatccccggcgcgctggtgggggcgtacctgctgggaacggcggagtcgctggcggtggcctggctgggctccacctggcgcgacctggtgggcatcggactgctgctcggcgtgctgcttttccgccccaacggcctgttcgcggccgcccgggcgctgctgcccgagcccactgccggcactttcatcccgatcgggcggccgctgcctatcccccggtgggcgctgcccgcggcgggggccgtcgccctggccctgccgctggtggtgcggaacgggtactggctgcaggtgctggcgaccgcctggatcttcggcctgctggccatcagcctcaacctgattgccgggacggccgggcagatctccctcgggcacgccggcttcctggccctgggggcgtacgcctcggccatcctcaccacccggctgcagtggcccttcctgctgtcgctggctgtcgcgcccgtcatcgccgccgccgtcggcgtggtgctttgctacccggccctgcggctccgggggcagtacctggcggtggccaccatcggcctgggccaggggatcgcgctggtggcgctcaactggacggcactgacccgggggcccctgggcatcagcaacatcgccccgcctggcctcttcggagtggagatcacctcggccgcggggttctactggctgaccctgaccctgctgctgggcggcatctgggtggcggagcggctctccggctcgtacctgggccgggcgctgcgggccgtgcgggaggacgaggtggccgcccgggcgtacggggtggggctggagcggtacaagtccatcgccttcggcctcagcgccttcatcgcgggcctcgccggcgtcctgctggcgcacgcctacacctacatcgcgccggacacgttcacccacgcgatgtcgctgcaggtgctgacgatggtggtgctgggcgggctggacaacaccatcggcgccgtggcgggggccctcgccctgatcgtcatccccgagtccgcccggttcctggcggagtaccggttcctggtctacggcctgctgcttctggtcatgctcaggttccggccccggggcctcctgagcgccgcatcgtga

SEQ ID NO: 60958 - protein, 619 aa, Symbiobacterium thermophilum IAM 14863
MAAPLRSGTRRRGSMLDQLINGLVVGNLYALTAVGITQIYGVANVINFAHGSLYMVGAFVGWMAVTWLGLPLLPTLLLVLVASALLGLAVERVAIRPFAGSGRTVLLLTTIAAGLVLEQAAQLIWGPETKAFHTPFADVRVRVGGGFLSSLDLVILAVGLTTALALWLFLKRSRLGWAVRATAQDREAALQMGVDVNQVSRVSFAMAGALAGVSGLLVGLYYHSVYPTMGFSASLKGFTAALLGGLGNIPGALVGAYLLGTAESLAVAWLGSTWRDLVGIGLLLGVLLFRPNGLFAAARALLPEPTAGTFIPIGRPLPIPRWALPAAGAVALALPLVVRNGYWLQVLATAWIFGLLAISLNLIAGTAGQISLGHAGFLALGAYASAILTTRLQWPFLLSLAVAPVIAAAVGVVLCYPALRLRGQYLAVATIGLGQGIALVALNWTALTRGPLGISNIAPPGLFGVEITSAAGFYWLTLTLLLGGIWVAERLSGSYLGRALRAVREDEVAARAYGVGLERYKSIAFGLSAFIAGLAGVLLAHAYTYIAPDTFTHAMSLQVLTMVVLGGLDNTIGAVAGALALIVIPESARFLAEYRFLVYGLLLLVMLRFRPRGLLSAAS

SEQ ID NO: 60959 - DNA, 966 bp, Azoarcus sp. EbN1
  CDS (1)..(966): transl_table=11
gtgatgcgggcagacgggatcgtccggtggacggcgggcatgatcgggcttgcaatgctcggcgcgctggcgctgcgcgcgctcgggccggagtatgtgctggcgcaggcggcgttcgtgttcacgtacgcgatcgcagggctcggggtggttctcgtcgtcggccagtgcggccagatcccgctcggtcagggcgcgttgctcgggctcggcgcgtatgccgagacgctgctggcgcttcacggcgtgccggcgccgttgtcgctgccgctggcgatcgtgctcggtgcggcgggcggctggttcgcgagcctgccggcgcagcgcttgggcgggctgtatttcgcgatgagcacgctcgcgttcgcgctgatcgtcgaggaagcgctggtgcgctgggagtcgctgacgggcggcgcggccgggctcgcggtgccgaccatgacgctgggcagttggtccgcggacactgcggccgcgcaggcgacgctgagcctcgtcgcgctcgtactcgcgtggttcgcgtgccggcgctgggtggcgtcgcggctcgggcgggcctggcgcgcagtgcgtgaggacgagaccgccgcggcggcaagcggcatcgacctcggccgtgcaaaaatgctggctttcgtgcttggcggggggctgtcggggctcgccggcgccctgtatgcgcactggatcggcttcgtcagcccggaacagttcggcctggcgctgtcgttcgagctgctgatgctggttttcatcggcggcgcgcgccgtcttgcgggcgcgttgtggggcgcgctggtggtgatcgggattccgcaggccatttcgctcgcgagcgaagtgttgcccccgcatctggccgctgcagcgggtctcgagacgctgctgttcggcgcggttgtcgtcgcagtggtcgtgctgcggcccgaaggcctggcaggccggggatcgcgcagctcgtga

SEQ ID NO: 60960 - protein, 321 aa, Azoarcus sp. EbN1
MMRADGIVRWTAGMIGLAMLGALALRALGPEYVLAQAAFVFTYAIAGLGVVLVVGQCGQIPLGQGALLGLGAYAETLLALHGVPAPLSLPLAIVLGAAGGWFASLPAQRLGGLYFAMSTLAFALIVEEALVRWESLTGGAAGLAVPTMTLGSWSADTAAAQATLSLVALVLAWFACRRWVASRLGRAWRAVREDETAAAASGIDLGRAKMLAFVLGGGLSGLAGALYAHWIGFVSPEQFGLALSFELLMLVFIGGARRLAGALWGALVVIGIPQAISLASEVLPPHLAAAAGLETLLFGAVVVAVVVLRPEGLAGRGSRSS

SEQ ID NO: 60961 - DNA, 1098 bp, Silicibacter pomeroyi DSS-3
  CDS (1)..(1098): transl_table=11
atgcgcatcgttttcaaaaccgactacatgcaggatatccgcccctggaaggacggctatcagttgggcctctacatgatcctgctggccatcgtggtggccgcgccctggctgctggacgcgttctatctgggcgagctgaccaatgtactgatctgggccatcgcgggcatgggcctgatggtgctgaccggccataccggtcaggccagcctgggtcacgcggcctttctggcctttggctgttatgccaatgtcatcctgctggaagcaggggtgccctttatcatcgcctttccgctggccggtgtgatcaccgggctgatcggcgcaacggtggcgatccccgccctgcgcctgcatggcatctatctggccatcttcaccctggccctgtcgatcctggtcgatgacatcatcgtgctcagcgaaccctggaccggcggcgtcagcggcaaatacgtggccgggatcgacctgttcggcttgaccatcgaccgctggggcacgccgatgctgttctattggctggtgctggcggtgacggtgatcgtggcgctgggctatatcaacctgctgcgctcgccgcttgggcgcagcttcatcgcggtgcgcgacagcgaggtgtcggcccaggcgatgggtgtcgatatcgcgcgcgccaagaccatctcgttcggcctgtcgtgcatggtcaccggctgggcgggcgccttcatgggcctgttcgccggcgccttcaacaacgagaccttcagcgtggtgatctcgatcgagctgttgatgatgatcgtgatcggcgggcttggctcgatccacggcgccttcttcggcgccatcgtgatcgggttcctgccgcagttcctgtcgatcgccaaggaatacgtgggcgccgtattcgggggcagcaccgtggccattccggggctggaattcgggatcttcggcatgatcctgatcgccttcattctgctcgagccgatgggcatctatggccgatggctgaagatccgcaccttcttcgagctgttccccttctaccgcaaggacatgttcaagcggcagaaatcctatctgaagacggagcgcctgagatga

SEQ ID NO: 60962 - protein, 365 aa, Silicibacter pomeroyi DSS-3
MRIVFKTDYMQDIRPWKDGYQLGLYMILLAIVVAAPWLLDAFYLGELTNVLIWAIAGMGLMVLTGHTGQASLGHAAFLAFGCYANVILLEAGVPFIIAFPLAGVITGLIGATVAIPALRLHGIYLAIFTLALSILVDDIIVLSEPWTGGVSGKYVAGIDLFGLTIDRWGTPMLFYWLVLAVTVIVALGYINLLRSPLGRSFIAVRDSEVSAQAMGVDIARAKTISFGLSCMVTGWAGAFMGLFAGAFNNETFSVVISIELLMMIVIGGLGSIHGAFFGAIVIGFLPQFLSIAKEYVGAVFGGSTVAIPGLEFGIFGMILIAFILLEPMGIYGRWLKIRTFFELFPFYRKDMFKRQKSYLKTERLR

SEQ ID NO: 60963 - DNA, 1077 bp, Silicibacter pomeroyi DSS-3
  CDS (1)..(1077): transl_table=11
atgttctaccgtgaagccggagatttcaaaacctcctaccaggccgatagccagacctttccgatcaagttcgaccgttatcggtattacgtggtgctggcggttgccttcgggatcatcccgttcatcatcaacgactattgggcgaatgcgctgctgattccctttctgatctatgcgatcgctgcaatcgggctgaacatcctggtgggttattgcggtcaggtcagcctggggaccggcgggttcatggccgtgggcgcctatgcctgctacaagctgatgaccgcctttcccgaggtgagcatgttcatccacgtgatcctggccggtggcatcaccgccgcggtgggggtgctgttcggcctgcccagcctgcggatcaaggggttctatctggcggtggccacgctggcggcgcagttctttctggtttggctgttcaaccgggtgccgtggttctacaactattcggcctcgggccagatcaacgcgcccgagcgcgacacgttcggcatcatcatcaccggccccaatgcgccggcctgggccacctatctgttctgcctggtcttcctgaccgcttgtgcgctgatcgcccgcaacctgacccgtggcaccatgggccggacctggatggcgatccgcgacatggatatcgcggccgagatcatcggggtgaacccgctcaaggccaagatgacagccttcgccgtcagctccttcttcatcggcatctcgggcgcgctgttctttgcgctttatctgggcgcggtcgaagtgggcgaggcctttggtatccagaaatcgttcctggtgctgttcatggtgatcatcggcggcctcggttcgatcttcggttcctttgccggagcggccttcctggtgctgctgccggtggtcctgaaggtcgtgggcgccgacatgctgggctggcccaccgatatcgtggcgcatctgcagctggtgatcgtcggcgggctgatcgtcgtgttcctgatcatggagccgcatgggctggcgcagctgtggcgcgtggccaaggaaaaactcagactctggcccttcccgcattaa

SEQ ID NO: 60964 - protein, 358 aa, Silicibacter pomeroyi DSS-3
MFYREAGDFKTSYQADSQTFPIKFDRYRYYVVLAVAFGIIPFIINDYWANALLIPFLIYAIAAIGLNILVGYCGQVSLGTGGFMAVGAYACYKLMTAFPEVSMFIHVILAGGITAAVGVLFGLPSLRIKGFYLAVATLAAQFFLVWLFNRVPWFYNYSASGQINAPERDTFGIIITGPNAPAWATYLFCLVFLTACALIARNLTRGTMGRTWMAIRDMDIAAEIIGVNPLKAKMTAFAVSSFFIGISGALFFALYLGAVEVGEAFGIQKSFLVLFMVIIGGLGSIFGSFAGAAFLVLLPVVLKVVGADMLGWPTDIVAHLQLVIVGGLIVVFLIMEPHGLAQLWRVAKEKLRLWPFPH

SEQ ID NO: 60965 - DNA, 1053 bp, Silicibacter pomeroyi DSS-3
  CDS (1)..(1053): transl_table=11
atgatcaaagcggttctttcgggcgacatgccccgctcattggtgctggccctgatcctggggctgatcctggtctgtctggcgctggcgcccttcctgtttcccggcgtgcgcactgtcgatacggcggcacggatctgcgtgttcatcgtgctggtggccagttacgatctgctcttgggctatggcggcatcgtcagtttcgcccataccatgttctttggcatcggcgcctatggggtcgcactggccctgacccatctcgggcgtggcttcgatgcgatccttgtgggcgcgggtgcaagcgcgctgctggcagcggcgcttgcctttgtcattggtctcttcagcctgcgggtacgggcgatcttctttgccatgatcacgctggcggtggcctcggcggtggccgttctggtcagccagctgtcgggcctgaccgggggggaggatgggctgaccttcaagacaccgcgcgcgctgggcccggccttcaagttcggggacgagctgttcggggtgaagctgaacggcaaactgttgtcctattacgtggtgttcattggcagcctggtcctgttcctgctgatgctcagggtggtgaattcgccctttggccgggtgttgcaggcgatccgcgagaatgatttccgggccgaggcgatcggctatcgggtggtctattaccgggttgcggcgacctgcctttcggcagcggtggcggcgctggcgggcagtctctatgcgatctggctgcgctatgtggggccggataccacgctgagcatggagatcatgatcgacatcctgctgatggtggtgatcggcggcatgggaaccatgtatggcgctgtgatcggagcaacgctgctggttctggcgcagaactatctgcagaacctgatgggtgtcgccgggtcgctggtcgacggggtgccggtgctgccgcagcttttggatgccgaccgctggctcttgtggcttggggttctgttcatcctcagcgtctatttctttcccaccggcgtggtgggccggttgcggcgcggctag

SEQ ID NO: 60966 - protein, 350 aa, Silicibacter pomeroyi DSS-3
MIKAVLSGDMPRSLVLALILGLILVCLALAPFLFPGVRTVDTAARICVFIVLVASYDLLLGYGGIVSFAHTMFFGIGAYGVALALTHLGRGFDAILVGAGASALLAAALAFVIGLFSLRVRAIFFAMITLAVASAVAVLVSQLSGLTGGEDGLTFKTPRALGPAFKFGDELFGVKLNGKLLSYYVVFIGSLVLFLLMLRVVNSPFGRVLQAIRENDFRAEAIGYRVVYYRVAATCLSAAVAALAGSLYAIWLRYVGPDTTLSMEIMIDILLMVVIGGMGTMYGAVIGATLLVLAQNYLQNLMGVAGSLVDGVPVLPQLLDADRWLLWLGVLFILSVYFFPTGVVGRLRRG

SEQ ID NO: 60967 - DNA, 1053 bp, Dehalococcoides ethenogenes 195
  CDS (1)..(1053): transl_table=11
atggacctaccttgcggaacgcgtaatttcagctacaagacggatatggctatcttccgtaccaaaacccattgggctatgctgattggttttctgattcttttattcagcctgccgttcaatatcagcagttactggctgggtattatgaaccttataggcattacggttgtggcggcggccggtttaaatatacttatgggttactgcggacagctttcggtaggccatgccggctttattgcggtgggggcatatactaccgctattttggccagcaaactgggagtgcctttcccctttgacatgatagcgtccggcattatggccggtctggtgggtgtgctgttcgggttgccatcacttcgggtaaaggggttttatctggctatttccactattgccgcccaattcatcataatctgggtgataaaccactggtccagccttaccggcggttttaacgggattgtgatacccccgattaatctttttaattttgactttaccactcagggcagccagtacttcattattatgctggtggctgttttggctattttcttcatgaaaaatatagcccgcacccgcatagggcgggcatttgtagccatacgggataatgatttggcggctgaggttatgggtataaatgtcttcaagtataagctgctggcttttttcatcggctgttttctggccggtgtggccggttcgcttatggctcactggataggttatttgacggctgaaaatttcaccttgtctgattctattttatacgttggtattgtgattataggcggtttgggtacaggggttggccccatattcggggcgctctttatccgtctgctgcagcagggtgtccagtatgtatcccctcttatgggctctgctttcccgcagttgccgtcaggctttgcagccgggcttgggccgatggtattcggtctggcaattgtcttgtttttagtgcttgaaccaagaggcctcgcccaccgctggcaattgttcaagtcctcttaccggtattggcctttctcgtattag

SEQ ID NO: 60968 - protein, 350 aa, Dehalococcoides ethenogenes 195
MDLPCGTRNFSYKTDMAIFRTKTHWAMLIGFLILLFSLPFNISSYWLGIMNLIGITVVAAAGLNILMGYCGQLSVGHAGFIAVGAYTTAILASKLGVPFPFDMIASGIMAGLVGVLFGLPSLRVKGFYLAISTIAAQFIIIWVINHWSSLTGGFNGIVIPPINLFNFDFTTQGSQYFIIMLVAVLAIFFMKNIARTRIGRAFVAIRDNDLAAEVMGINVFKYKLLAFFIGCFLAGVAGSLMAHWIGYLTAENFTLSDSILYVGIVIIGGLGTGVGPIFGALFIRLLQQGVQYVSPLMGSAFPQLPSGFAAGLGPMVFGLAIVLFLVLEPRGLAHRWQLFKSSYRYWPFSY

SEQ ID NO: 60969 - DNA, 1050 bp, Pseudomonas fluorescens Pf-5
  CDS (1)..(1050): transl_table=11
atgtcccttcttctgacgcggcaaaccgcccccttgctgctggtccagcgccgcctgccctggggcctggccggcctgttgctgctggccttcggcgtggtgccggtgctgggcaacgactattggctcaacgcgatcctgattccgttcctggtgctgtccctggccgggctcgggctcaacctgctgaccggctacaccggccagacctcggtgggcgccgccggcttcatggccgtgggggcctttgccacctacggtattctgctgcgcctgccgcagctggggctgcccctggccctgctcggcggcggcctgatcagcgccctggtgggctggctgttcggcctgcccagctcgcggatcaagggtttctacctgatggtcagcaccctggcggcgcagttcttcctggagtggctgttcgtcaagtttccctggttctacaactacggttcctcgggcaccatttcggcgccgcagttgagcctgctgggccatgacctgaaccacccccaggggcgctacctgctgaccctggtgacggtgctgctgttgacctgggtcgcgcagaacctggtgcgcagccaggtcgggcgcaactggatggcgatccgcgacatggacaccgccgccgcggtgatcggcatcccggtggcccgctacaaacgccaggcgtttgccgtcagctcgttctacctgggcatcgccggtgcgttgtgggccttcgcctacctgggtaccgccagcgccagcagcttcgatatcaatcgttcgttccagatcctcttcatcatcattatcggcggcatgggcagcgtggccggcaacttcgtcggcgcggccttcatcagcctgttgccgattctcctcagccatgccgggcaggcactgctgggcggggcggtggacgccgggcagttgcagaacctgcagaaaatcattttcggcgtgctgatcatcctgttcctgatcaaggaacccgagggcctgatccgcttgctgggcaacctgcgcgagcgcctgcggcactggccgctgcgcttctga

SEQ ID NO: 60970 - protein, 349 aa, Pseudomonas fluorescens Pf-5
MSLLLTRQTAPLLLVQRRLPWGLAGLLLLAFGVVPVLGNDYWLNAILIPFLVLSLAGLGLNLLTGYTGQTSVGAAGFMAVGAFATYGILLRLPQLGLPLALLGGGLISALVGWLFGLPSSRIKGFYLMVSTLAAQFFLEWLFVKFPWFYNYGSSGTISAPQLSLLGHDLNHPQGRYLLTLVTVLLLTWVAQNLVRSQVGRNWMAIRDMDTAAAVIGIPVARYKRQAFAVSSFYLGIAGALWAFAYLGTASASSFDINRSFQILFIIIIGGMGSVAGNFVGAAFISLLPILLSHAGQALLGGAVDAGQLQNLQKIIFGVLIILFLIKEPEGLIRLLGNLRERLRHWPLRF

SEQ ID NO: 60971 - DNA, 1074 bp, Colwellia psychrerythraea 34H
  CDS (1)..(1074): transl_table=11
atgtctagtttaagtatgcgcccgtgcggagattttcgtactagctataaacaagataatacaatttttgaaacaaaaaccatccgttgggtgaccatctttaccattatagcgttgtgctttgcaccgttagttgttgatggttactttattaccttattaattcaaatatcctacttaggcattgctgcattaggtttgaatattttagttggctacaccggacaaatatcgttagggcatggtgctttctttggttttggtgcgtttgcctcggcctggttaaacaccagcttacatattccagtgtttttatgtattcctttagcgggtttcttaaccatgggcgttggcatgatgtttggtgcgccagctgctcgaattaaaggtttatatttagcgatagcaacacttgcatcgcaatttattattgaagatttcttcgctcgtgcagattggttttctggtggtgcatcgggttcaatggccgaaccagtaagcttattcggttttgcttttgataccgaccaaagcttttactatatagcgctattttctctagtctttatgtttatctggggttgtaacttaatgcgtagccgtgatggacgtgcttttgttgctgtacgtgaccattacttatctgctgaaatcatgggcgtaaagttaaataaatatcgcttactttcatttggtatctcttctttttatgccggtatcggtggtgcgttatatgcccattacttaggttatgtatcggcggaaggttttaccatcatgatgtcaattcagttcttagccatgatcattatcggtggcttaggttcgataaaaggtactttgatgggggtcatcttcatggtgttcttacctgaagtattagaaagcggtgttggcgtaatgaaaatgactgattggggcaatatccctatggtagttgacggtttagcttacatcaaagaaatggctattggcttagttattatcggcttcttaatttttgagccagaaggaatagcgcatcgttggacacaaattaaaaactattggaaattctatccatttgcttactaa

SEQ ID NO: 60972 - protein, 357 aa, Colwellia psychrerythraea 34H
MSSLSMRPCGDFRTSYKQDNTIFETKTIRWVTIFTIIALCFAPLVVDGYFITLLIQISYLGIAALGLNILVGYTGQISLGHGAFFGFGAFASAWLNTSLHIPVFLCIPLAGFLTMGVGMMFGAPAARIKGLYLAIATLASQFIIEDFFARADWFSGGASGSMAEPVSLFGFAFDTDQSFYYIALFSLVFMFIWGCNLMRSRDGRAFVAVRDHYLSAEIMGVKLNKYRLLSFGISSFYAGIGGALYAHYLGYVSAEGFTIMMSIQFLAMIIIGGLGSIKGTLMGVIFMVFLPEVLESGVGVMKMTDWGNIPMVVDGLAYIKEMAIGLVIIGFLIFEPEGIAHRWTQIKNYWKFYPFAY

SEQ ID NO: 60973 - DNA, 1068 bp, Pseudomonas syringae pv. phaseolicola 1448A
  CDS (1)..(1068): transl_table=11
atgctttatcgagaaaccggacaactggcgagtagctacgcggatgaacgccgggtgtttcgtctgcgccaggaccgcatcggactgtggagcctgttggtattcgcttttatcgcagtgccgttgctgggtaacgattactggttcagcgcgatcctgattccgtttctggtgctgtcgctggcggggctggggctgaacctgttaaccggttacgccgggcagttatcgctgggctcggctgcgtttatggcggtgggtgctttcgctgcttataacctgcaactgcgcgtgccgggcatgccgttgctgctcggtttcgcgctgggtgggctggtgtctgcgctggtggcgttgctgttcgggctgcccagcctgcggatcaagggcttctacctgctggtttcgacactcgccgcacagtttgtggtcgagtgggtgttgacccgcttcagctggttcaccaacgacaatgcgtcgggcgtgatcacctcgccgccactgatcatcgccggggtgaatttcagctcgccgcaaggccgctacctgttgacgcttgggctggtagtgctgcttttctggctggcgagaaatctgcttcgcggggagctgggccgcaactggatggccgtgcgcgatatggacaccgccgctgcggtaatcggcattcgcctgttcaaggccaaacttctggcattcgccatcagcggtttctatctgggcgtcgctggctcgctgtgggcgttcgcttatctgggcatggtcgagccgcatggttttgacctgaaccggtcattccagattctgttcatcatcattatcggcgggctgggcagtgtgcaaggcaacttccttggcgcagcgttcatcgtgctgttcccgattctgctcggcaacctcagcgccttgttgccggtcggcctgatcgattccgggcaactggaaaacattcagaaaatgcttttcggcgccttgatcatcgcttttctgatcaaggagcccgaagggctggcgcgtctctggctgcgctttcgtcagcgcgcacgcgtctggccgctgcgctattga

SEQ ID NO: 60974 - protein, 355 aa, Pseudomonas syringae pv. phaseolicola 1448A
MLYRETGQLASSYADERRVFRLRQDRIGLWSLLVFAFIAVPLLGNDYWFSAILIPFLVLSLAGLGLNLLTGYAGQLSLGSAAFMAVGAFAAYNLQLRVPGMPLLLGFALGGLVSALVALLFGLPSLRIKGFYLLVSTLAAQFVVEWVLTRFSWFTNDNASGVITSPPLIIAGVNFSSPQGRYLLTLGLVVLLFWLARNLLRGELGRNWMAVRDMDTAAAVIGIRLFKAKLLAFAISGFYLGVAGSLWAFAYLGMVEPHGFDLNRSFQILFIIIIGGLGSVQGNFLGAAFIVLFPILLGNLSALLPVGLIDSGQLENIQKMLFGALIIAFLIKEPEGLARLWLRFRQRARVWPLRY

SEQ ID NO: 60975 - DNA, 1077 bp, Dechloromonas aromatica RCB
  CDS (1)..(1077): transl_table=11
atgctttatcgtgaagccggtcaattcaagaccacctacgccgccgaccagcagctcttcccgatcagacaggaccggatcggtgtcatcaccctgcttgtcgtcgcctttctcggcgtgccgttctttgccagcgaatactggttctcggccatcctgatccccttcctgatctttgcgctggcggccttgggcctgaacatcctgaccggctacgccggccagttgtcgcttggctcggctgccttcatggcggtcggcgcctatgcggcctacaacttccagttgcgcatcgaaggcatcccgattctggtctccttcgcgttggccgggttgaccgcagccggtgtcggcatcctgttcggtttgccatcgctgcgcatcaaggggttttatctggctgtggcgacgctggcagcgcagttcttcatcgtctggtgcctgaccaaattcccttggttgtcgaataactcgtcttccggcgtgatttcgacgcagcaactgatcttctttggccatgagctgaagaccccggtcgagaaatacctgctggtcctctccatcgtcgtcgtcatggcgctggccgccaagaacatggtccgttcgaccaccggtcgggcctggatggcagtgcgcgacatggacgtggcagcctcggtgattggcatcaagttgatgccgactaaactgctcgcttttgccgtcagttcgttttactgcggcgtagccggtgcgatgtacgccttctgctacctcggctcggtcgagccggacggcttctcgctggaaatgtcgttcaagattctgttcatgatcatcatcggcggtgttggctcgatcatgggcagtttcctgggggcggccttcattctcttgctgccgatctttctcgatatcgcattgccgttttttgccgacctgttcggtctgccgttttccagcgctaccgtctcgcacatccagattacggtgttcggtgcgctgatcatgttcttcctgatcgttgagccgcacgggctggcccgtctgtggcaaatcgccaaggaaaagctgcgcctgtggccgttcccgcactaa

SEQ ID NO: 60976 - protein, 358 aa, Dechloromonas aromatica RCB
MLYREAGQFKTTYAADQQLFPIRQDRIGVITLLVVAFLGVPFFASEYWFSAILIPFLIFALAALGLNILTGYAGQLSLGSAAFMAVGAYAAYNFQLRIEGIPILVSFALAGLTAAGVGILFGLPSLRIKGFYLAVATLAAQFFIVWCLTKFPWLSNNSSSGVISTQQLIFFGHELKTPVEKYLLVLSIVVVMALAAKNMVRSTTGRAWMAVRDMDVAASVIGIKLMPTKLLAFAVSSFYCGVAGAMYAFCYLGSVEPDGFSLEMSFKILFMIIIGGVGSIMGSFLGAAFILLLPIFLDIALPFFADLFGLPFSSATVSHIQITVFGALIMFFLIVEPHGLARLWQIAKEKLRLWPFPH

SEQ ID NO: 60977 - DNA, 1047 bp, Dechloromonas aromatica RCB
  CDS (1)..(1047): transl_table=11
atgcgtatcggtaccgccaagcaaagctacgcccacgacgagtcgctgttcgacaccaggacccagtggatctggctgggcctcctcggcgtcagtctgctggtcttccccttcgtcgtcgatgattactggctctatctggcctgtctggttgcgatcaacatcgccagcgccaccgggctgaacatcctgaccggctataccggcctggtcagccttgggcaggctgctttcatggggctgggcgcttacacggtggccattctggaacagcgtttcggtacgccggccgtgcttaatctggtggccggcggcgccgttgccatgctggtcggcgttgtcgtcggcattccatccttgcgggtcaaggggctgtacctggccatttcgaccattgcggcatcgttcatcctgcacttcgtctttgccaactggagcagcctgaccggtggcacaggcgggatgacagtgccgccggccaacttcttcggtattccgctggatacatcgttccgcctgtactggctgatcgtcccggtggcgctgaccatgctggtctgtgccgcgaacctgttccgcacgcggatcggccgggccttcatcgccatccgtgatcgcgacatctcggctgaggtgctgggcattccgctgcttcgctacaagctgacctcatttgcgctgtcgtcgttttacgccggcgtcgctggtggcttgtgggcctacttcttccgggtcgttacgccggaaagcttcccgctgatgatgtccatcttcttcctggccgcggtgatcgtcggcggcatgggcaccatccttggcggcatcctcggtgccatcttcatgaccatggtgccggaagtcctcaagctgatcgttggctggctgccgctgggcagtgagggcgccgtgattctttcgccggtgcggaccatcgtgtttggtctgctcatcgtcggattcctgatcttcgagccccttgggctccaggaactgtggcgccgtgtgcgccgcttctttcacctgtggcctttccgggctcagggataa

SEQ ID NO: 60978 - protein, 348 aa, Dechloromonas aromatica RCB
MRIGTAKQSYAHDESLFDTRTQWIWLGLLGVSLLVFPFVVDDYWLYLACLVAINIASATGLNILTGYTGLVSLGQAAFMGLGAYTVAILEQRFGTPAVLNLVAGGAVAMLVGVVVGIPSLRVKGLYLAISTIAASFILHFVFANWSSLTGGTGGMTVPPANFFGIPLDTSFRLYWLIVPVALTMLVCAANLFRTRIGRAFIAIRDRDISAEVLGIPLLRYKLTSFALSSFYAGVAGGLWAYFFRVVTPESFPLMMSIFFLAAVIVGGMGTILGGILGAIFMTMVPEVLKLIVGWLPLGSEGAVILSPVRTIVFGLLIVGFLIFEPLGLQELWRRVRRFFHLWPFRAQG

SEQ ID NO: 60979 - DNA, 1074 bp, Thermobifida fusca YX
  CDS (1)..(1074): transl_table=11
atgacttcctccctgcgacgagacgacccgccgacggacgtggtcgcccccaaggccgcgccgtccacgcgcccccggccccggatccggcccgtgctgctcacccacctggctgcggccctgctcgccctcctcggggtcgtcgcactgaccttcctggtcggcccgatcgagcagttgcgcatcgccaaagtgggctacctgatgctcgcgatcgccgggctgcaactgctggtcggcgccagcgggcagatctccctggggcacggcgctttcatgttcatcggcgcctacgccacggctctgaccgtgctgcacgcgccgatggtgccgctggcagcgatcatggtgctcaccgtagtcgtgggctgcctcgccgggatcgtggtcggcgcggccacagcgcggctgcacggcccctacctggccggggccaccctcgccctggcggtgggtttgcctgccctggccctgtacttctccgacgttctcggcgggtccaacggcctgctgttcaagatgcgcggcgccccgcccgagctcgccgggctggtcaccgacaaccagtggaaggcctgggtcatctggttcaccgtgctggtggccctcgtcgtgctggcgacgctgagccggggacggctgggccggcggctacgcgctatccgcgacgacgaggcggccgccgccatggcgggcatccccgtgggacgcaccaaagtgaccgcgttcgtcatcagcgccggatgcgggtcgctggcgggagcctgcgaagcctatctgctgggcaccgccacccccagctcgttctcgctcgcactgtcgctgagcctgcttgccgcgctcgtcctgggcgggctgggcagcctgtggggcgcgttctggggtgcgctggccctggtctacctggagctggcaggaaaggagctggcagacctgctcgggttgagcagcagcgtggccgacaacgtgccgctggtgttcttcggaacgctgctcatcgtcatcgttatggcctggccgatgggcatccacggcgcgctcagccgcctcagcggcgtggtgcgccgacggtga

SEQ ID NO: 60980 - protein, 357 aa, Thermobifida fusca YX
MTSSLRRDDPPTDVVAPKAAPSTRPRPRIRPVLLTHLAAALLALLGVVALTFLVGPIEQLRIAKVGYLMLAIAGLQLLVGASGQISLGHGAFMFIGAYATALTVLHAPMVPLAAIMVLTVVVGCLAGIVVGAATARLHGPYLAGATLALAVGLPALALYFSDVLGGSNGLLFKMRGAPPELAGLVTDNQWKAWVIWFTVLVALVVLATLSRGRLGRRLRAIRDDEAAAAMAGIPVGRTKVTAFVISAGCGSLAGACEAYLLGTATPSSFSLALSLSLLAALVLGGLGSLWGAFWGALALVYLELAGKELADLLGLSSSVADNVPLVFFGTLLIVIVMAWPMGIHGALSRLSGVVRRR

SEQ ID NO: 60981 - DNA, 1077 bp, Ralstonia eutropha JMP134
  CDS (1)..(1077): transl_table=11
atgttctatcgtgaagccggccagttcaagacgagctacgtctcggacagccagatcttccccatccgtcaggaccgcatcggctttgcggtgctgatggcggtggccttcggcgtgattccgttcgttgggtcggaatactggttctcggccatcctgattccgttcctgatcttctcgctcgcggcgctggggctgaacatcctcacgggctacgcaggccaactgtcgcttggtacggccgctttcatggcggtgggtgcctacgccgcgtacaacttccagcttcgcatcgaggggatgccggtgctgctcaccttcatcctcgccggcctgtcggcggcggtggtgggcgtggccttcggcttgccgtcgctgcgcatcaagggcttttatctcgcggtcgccacgctcgccgcgcagttcttcgtagtgtgggcgctgaccaagttcccctggttctccaacaacagctcgtcgggcgtgatcacggcgcagcggctggacctgttcggcatcgccatcgacacgccggtgaagaagtatctgttcgtgctggccctcgtcaccgtactggcgttcatcgccaagaacctggtgcgctcggccacgggccgtgcatggatgtcggtgcgcgacatggacgtggcagcggaagtcatcggcattccgctgatgcgcaccaagctgctggcctttgccgtgagctcgttctactgcggcgtggccggcgcgctgtatgcgttctgctatctcggctcggtcgagccggacggcttctcgctggacctgtcgttccgcgtgttgttcatgatcatcatcggcggcgtgggcagcatcctgggttcgttccttggcgcggcgttcatcctgctgctgccgatcttcctggacaacgtgctgccgccgctcgcatcgctgctgcacctgccgttcacgaatgccacggtgtcgcatatccagttgatggtgttcggtggcctgatcatcttcttcctgatcgtcgagccgcacgggcttgcgcggttgtggcagatctccaaggagaaactcaggctgtggccgttcccgcactga

SEQ ID NO: 60982 - protein, 358 aa, Ralstonia eutropha JMP134
MFYREAGQFKTSYVSDSQIFPIRQDRIGFAVLMAVAFGVIPFVGSEYWFSAILIPFLIFSLAALGLNILTGYAGQLSLGTAAFMAVGAYAAYNFQLRIEGMPVLLTFILAGLSAAVVGVAFGLPSLRIKGFYLAVATLAAQFFVVWALTKFPWFSNNSSSGVITAQRLDLFGIAIDTPVKKYLFVLALVTVLAFIAKNLVRSATGRAWMSVRDMDVAAEVIGIPLMRTKLLAFAVSSFYCGVAGALYAFCYLGSVEPDGFSLDLSFRVLFMIIIGGVGSILGSFLGAAFILLLPIFLDNVLPPLASLLHLPFTNATVSHIQLMVFGGLIIFFLIVEPHGLARLWQISKEKLRLWPFPH

SEQ ID NO: 60983 - DNA, 1053 bp, Dehalococcoides sp. CBDB1
  CDS (1)..(1053): transl_table=11
atggatttaccttgcggaacgcgtaattttagctataagacggatatggcaattttccgtaccaaaacccactgggccatgcttataggttttttgatactcctgttcagcctgcctttcaatatcaacagttactggctggggatattaaacctcataggcattacagttattgccgccgccggcttaaatatattgatgggatattgcggccagctttcggtaggtcatgccggctttattgcagtaggggcatacaccaccgctattttggcaaataagctgggtgtgcctttcccctttgatatgatagcctcaggcattatggccgggctggtaggtgttttgttcgggttgccttccctgcgggtaaaagggttttatctggccatttctaccattgccgcccagttcattattatctgggtaataaaccactggtcaggtctgaccggcggtttcaacggcattgtgatacctccaatcaacctttttaactttgactttactactcagggcagccagtttttcatcattatgctggtggcggttttggctatcttctttatgaaaaatattgcccgcacccgtataggacgggcatttgtagccatacgggataatgatttggcggccgaggttatgggtataaatgtatttagatacaagcttctggcatttttcatcggatgttttctggctggtgtggcaggttcgctcatggctcactggataggttatttgacggctgaaaacttcactctgtcagattctattttgtatgtaggtattgtgattatcggcggattgggtacaggggtaggccctatattagggacactgtttatccgcctgcttcaacagggagtgcaatatgtatctccccttatgggctctgcttttccgcagttgccatccgggtttgcagccgggcttgggcctatggtcttcggtctggcaatcgtcttgttcctggtgcttgaaccaaggggcctcgcccatcgctggcagttgttcaagtcatcttaccggtattggcctttctcgtattag

SEQ ID NO: 60984 - protein, 350 aa, Dehalococcoides sp. CBDB1
MDLPCGTRNFSYKTDMAIFRTKTHWAMLIGFLILLFSLPFNINSYWLGILNLIGITVIAAAGLNILMGYCGQLSVGHAGFIAVGAYTTAILANKLGVPFPFDMIASGIMAGLVGVLFGLPSLRVKGFYLAISTIAAQFIIIWVINHWSGLTGGFNGIVIPPINLFNFDFTTQGSQFFIIMLVAVLAIFFMKNIARTRIGRAFVAIRDNDLAAEVMGINVFRYKLLAFFIGCFLAGVAGSLMAHWIGYLTAENFTLSDSILYVGIVIIGGLGTGVGPILGTLFIRLLQQGVQYVSPLMGSAFPQLPSGFAAGLGPMVFGLAIVLFLVLEPRGLAHRWQLFKSSYRYWPFSY

SEQ ID NO: 60985 - DNA, 1077 bp, Rhodobacter sphaeroides 2.4.1
  CDS (1)..(1077): transl_table=11
atgctttaccgtgaagcgggcgagttcaagacgagctacgcgcaggacagccagaccttcccgatctggtgggaccggctctggtatcaggtggcgctggtcgtgggcttcgccatcctgcccttcgtcatcaacgactactgggccaatgccgtggtcgtgcccttcctgatctatgccatcgcggccatcgggctcaacatcctgaccggctactgcgggcaggtgagcctcgggacgggcggcttcatggcggtgggggcctatgcggtctacaagctgatgaccgcctttcccgacgtgccgatcctgatccatgtgatcctcgcaggcgcgatcaccgcgggcgtgggcgtgctcttcggcctgccctcgctccggatcaagggcttctatctggccgtcgccacgctcgccgcgcagttctttctcgtctggctcttcaacaaggtgccgtggttctacaactactcggcctcgggccagatcaccgcgcccgagcggaccatgttcggcatcgcggtgacgggggccaacacacccgcttgggccaagtatctcttctgcgcggccttcctcttcgcgctggcctggatcgcgcggaacctcacgcgcggcaccatcggccggaagtggatggccatccgcgacatggacatcgcggccgagatcatcggggtgaacccgctcacgaccaagctatcggcctttgcggtctcgtccttcttcatcggcatcgcgggggcgctgttcttcgcggtctatctcggcgcggccgaggtgggcgaggccttcgggatccagaagtccttcctcattctcttcatgatcatcatcgggggcctcggcagcatcttcggcagcttcgcgggcgccgccttcctcgtgctcctgccggtctttctcaagaacgtgctggtgggcgggctcggctggccctcggatctcgcggcccacatcgagctcatgatcgtgggcgcgctcatcatcggatttctcatcctcgagccgcacgggctggcccagctctggcgcgtgctcaaggagaagctgcggctgtggcccttcccgcactga

SEQ ID NO: 60986 - protein, 358 aa, Rhodobacter sphaeroides 2.4.1
MLYREAGEFKTSYAQDSQTFPIWWDRLWYQVALVVGFAILPFVINDYWANAVVVPFLIYAIAAIGLNILTGYCGQVSLGTGGFMAVGAYAVYKLMTAFPDVPILIHVILAGAITAGVGVLFGLPSLRIKGFYLAVATLAAQFFLVWLFNKVPWFYNYSASGQITAPERTMFGIAVTGANTPAWAKYLFCAAFLFALAWIARNLTRGTIGRKWMAIRDMDIAAEIIGVNPLTTKLSAFAVSSFFIGIAGALFFAVYLGAAEVGEAFGIQKSFLILFMIIIGGLGSIFGSFAGAAFLVLLPVFLKNVLVGGLGWPSDLAAHIELMIVGALIIGFLILEPHGLAQLWRVLKEKLRLWPFPH

SEQ ID NO: 60987 - DNA, 1122 bp, Rhodospirillum rubrum ATCC 11170
  CDS (1)..(1122): transl_table=11
atggcgaccctgtccttgcggccttgcggtgacttccgcaccagctaccgcgccgataccaagatcttcgacactcccaccagccgctgggcgatggttgggttcctgtgcgcgctctatgggctggtcatcctgccccaggcctttccgcctttggcaagcctgccggtcttgcgccttttcgccgatggctatgccctctcgctgggtattcaggtctgctactacgccatcgccgcccttggcctgaacatcctggtcggcttcaccggccagatctcgctgggccatgccgccttcttcggggtcggtgctttttcctcggcctggctcaacacccgcgtcggcttgccggtcctggtctgcattcccctggccggtctgatgagcgccgccgccggcctgctgttcggggcgccggcggcgcggatcaaggggctttatctggcgatcgccaccctggccgcccagttcatcatcgaagacctgttcgttcgcatggactggttcaccggcggctcgtcgggggcgatggccgatacgccgatgctgggatccttcgccttcgataacgacgcccgctatttcctgctgtcgctcagcttcaccatcgtcttgttcgtcatggcggcgaacctgatgcgctcgcgcgacggccgggccttcgtcgccctgcgcgaccattatctatcggccgaggtgatgggcatcgccctgacccgctaccgggtgatgtcgtttggcatcgccgccttttatgccggcatcggcggggcgctttacggccattacctgatgttcgtctcggccgaggccttcaccattctgctgtcgatccagttcctgggcatgatcatcatcggcggcctgggcagcgtgatgggggcgatgctgggaacgatcttcatggtcgccctgcccgaggtcatgggggcggtgatcgccgccttgcagaccacccaatggggcaaccggccggcggtgatcaacggcctgccgttcttccgcgaaatggccatcggcgcggcgatcatcttgttcctgatctttgaacccgatggcctcgcccaccgctggcggctgatcaagacctattggaagctctaccccttctctcactaa

SEQ ID NO: 60988 - protein, 373 aa, Rhodospirillum rubrum ATCC 11170
MATLSLRPCGDFRTSYRADTKIFDTPTSRWAMVGFLCALYGLVILPQAFPPLASLPVLRLFADGYALSLGIQVCYYAIAALGLNILVGFTGQISLGHAAFFGVGAFSSAWLNTRVGLPVLVCIPLAGLMSAAAGLLFGAPAARIKGLYLAIATLAAQFIIEDLFVRMDWFTGGSSGAMADTPMLGSFAFDNDARYFLLSLSFTIVLFVMAANLMRSRDGRAFVALRDHYLSAEVMGIALTRYRVMSFGIAAFYAGIGGALYGHYLMFVSAEAFTILLSIQFLGMIIIGGLGSVMGAMLGTIFMVALPEVMGAVIAALQTTQWGNRPAVINGLPFFREMAIGAAIILFLIFEPDGLAHRWRLIKTYWKLYPFSH

SEQ ID NO: 60989 - DNA, 1203 bp, Syntrophus aciditrophicus SB
  CDS (1)..(1203): transl_table=11
atgaagaaggtaaagaatgccgtcctgacctccctctggttcatgtttctcacgtttcctctactggcgatccgggtgaacacgatcgaaaacattgtggaatggcgttggaaaaacatgattatcgtcggaatcggcaccttcgttatgtcgcttctctggcaatacatgcaggccagaaagggatcaggtccgggaccggctgaaaagaaaaatgaatacctgcattttttttcccgaaaaattctcgatgaaccgttgatttacaagtcgatccttgtttccggtggactgttcgcccttgtttttccctttcttttctccagttatcagaccagcatcatgacgacggctcttctttacatcgttctcggactgggactgaacatcgtcgtgggacttgcgggcctgctcgatctaggctatgtggccttttatgccgtaggcgcttacacctatgcccttctcaatgtccacttcggcgtgggattctggaccgcgctgcccatcggcgccctgctcgccgcctgtttcggcgttatcctcggctttcccgtcctgaggctccggggggattatctggcaatcgtaaccctgggattcggagaaatcatccgtctcattctcgaaaactggaatgccttttcttttggccccagcggtatttccaacattcctcgccctggcttcttcggcatcgaactcagcctgcaaaacgccacaatttatatctattatctcatgatcgccctctgcctcttcaccattctggtggttaaccgcctccagcattcgcgtatcggccgggcctggatcgctcttcgggaggatgaactggcctgcgaagccatgggggttgacaaaactcgaacgaaactgaccgcttttgccctgggagccacctgggccggcatggccggggtgatcctggccgccaagaccaccttcatcaatccggcgagcttcacctttctggaatcggccatgattctatccatcgttgtgctgggaggcatgggttcaatccccggcgtgattctgggcgccctgctgttgatgcttcttccggaatacctgagggtcttcaaggattacaggatgctcctcttcggagccaccatggtgctgatgatggtcttccggccacagggcatgatcacggccgtccggcggacctatcagtacaaggagaacgattcgtga

SEQ ID NO: 60990 - protein, 400 aa, Syntrophus aciditrophicus SB
MKKVKNAVLTSLWFMFLTFPLLAIRVNTIENIVEWRWKNMIIVGIGTFVMSLLWQYMQARKGSGPGPAEKKNEYLHFFSRKILDEPLIYKSILVSGGLFALVFPFLFSSYQTSIMTTALLYIVLGLGLNIVVGLAGLLDLGYVAFYAVGAYTYALLNVHFGVGFWTALPIGALLAACFGVILGFPVLRLRGDYLAIVTLGFGEIIRLILENWNAFSFGPSGISNIPRPGFFGIELSLQNATIYIYYLMIALCLFTILVVNRLQHSRIGRAWIALREDELACEAMGVDKTRTKLTAFALGATWAGMAGVILAAKTTFINPASFTFLESAMILSIVVLGGMGSIPGVILGALLLMLLPEYLRVFKDYRMLLFGATMVLMMVFRPQGMITAVRRTYQYKENDS

SEQ ID NO: 60991 - DNA, 978 bp, Burkholderia xenovorans LB400
  CDS (1)..(978): transl_table=11
atgccgacgatgaaccacaccaccacgaccgcgctgccggcgcgcgcaaaaagcagccgcgaccagtggtttctcggcggctttgtcattctgtatgcgctgatcgcgctcttcagcggcggctatttcgtctacctgctgaacctgatcggcatcttcgcgctggtcgccatcggcctgacgatcctcaccggcttctccggccagaccagtctcggtcatgcgggattcttcgcgatcggcgcgtacgcatcggccattttcgcgcagcgctggggcgtgccgttctggctcgccattccgctcgctggcgcgttcgcgaccgtgatcggcgcgctgatcgctttgccggcgctgcggctcaaggacctgtatctggcgatcgccaccctcggtttcggcatcgtcacacagaaggtgattttcgagtggcgcacggtcacgggcggcggcggcggcatgcaggtgccgatgccgtcgctgttcggcatgtccgttgcggacggcagccgcatggcatgggtgatcgccgcgacgcttgcggccggcacgtgggccgctttccggctcgcgtcgagccgcaccggccgcgccctctcgatgctgcgcgaaagcgaaacagcggccgcgtgcatcggcattcgcgtggcgcgctacaaggtcgtcgcgttcgccttgagcgcgttctacaccgcggtggccggcggcttatatgcgaacgtggtgcgctacgtgaatcccgaaagctttgacgtcaacatgtcgatcatgtttctcgccatgatcgtgatcggcggcatgggcagcgtgcgcggcgccctgctcggcgcggcgttctacgtcgcggtgcccgaagcgtttcgcggtttcaaggacgcgccgggcctgatcttcggcatctcgctgatgctggtcgtgatcctgctgcccggcgggctcaccagtctgctgcgcgcccggcgcaaggcgggatcatga

SEQ ID NO: 60992 - protein, 325 aa, Burkholderia xenovorans LB400
MPTMNHTTTTALPARAKSSRDQWFLGGFVILYALIALFSGGYFVYLLNLIGIFALVAIGLTILTGFSGQTSLGHAGFFAIGAYASAIFAQRWGVPFWLAIPLAGAFATVIGALIALPALRLKDLYLAIATLGFGIVTQKVIFEWRTVTGGGGGMQVPMPSLFGMSVADGSRMAWVIAATLAAGTWAAFRLASSRTGRALSMLRESETAAACIGIRVARYKVVAFALSAFYTAVAGGLYANVVRYVNPESFDVNMSIMFLAMIVIGGMGSVRGALLGAAFYVAVPEAFRGFKDAPGLIFGISLMLVVILLPGGLTSLLRARRKAGS

SEQ ID NO: 60993 - DNA, 1077 bp, Ralstonia metallidurans CH34
  CDS (1)..(1077): transl_table=11
atgctttatcgcgaatccggacagttcaagaccagctacgttgccgacagccagattttcccgatccggcaggaccgcatcttctttgccctgctgatggcggtggcgttcgtggcgattccgttcgtcggcaccgaatactggctcagcgccatcctgacgccgttcctgatcttctcgctggcggcgcttggactcaacattctcaccggctacgctggccagctctcgctcggcacggccgcattcatggcggtgggcgcgtacgcggcctacaacttccagcttcggatcgaaggcattccggtgctgctgacgttcatcctggccggcgcgtcggcggcggtggtgggtgtggcgttcgggctgccgtcgctgcgcatcaagggcttctacctggcggtggccacgctggccgcgcagttcttcgtggtgtgggcgctgaccaagtttccctggttgtcgaacaacagttcctcgggcgtgatcacggcgcagcggctcgacctgtttggcgtggcgatcgacaccccggtgaagaagtatctgtttgtgctgggcatcgtcaccgtgctggcgctgatcgccaagaacctggtgcgctcggccacgggccgcgcgtggatggcggtgcgcgacatggacgtggcggccgaggtgatcggcatcccgctgatgcgcaccaagctgctggcgttcgcagtcagctccttctattgcggcgtggctggcgcgctgtatgcgttctgctatctgggctcggtggagccagatggcttctcgctcgatctgtcgttccgcatcctgttcatgatcatcatcggcggcgtgggcagcatcctgggctcgttcctgggcgccgcattcatcctgctgctgccgatatttctcgacaacgtgctgcccgcgctggcgtcgtcgctgcacctgccgttcacgaacgccacggtgtcgcatatccagctcatggtgttcggcgggttgatcatcttcttcctgatcgtcgagccgcatggcctggctcgcctctggcagatcgccaaggagaagctgcgcttgtggccattcccgcactag

SEQ ID NO: 60994 - protein, 358 aa, Ralstonia metallidurans CH34
MLYRESGQFKTSYVADSQIFPIRQDRIFFALLMAVAFVAIPFVGTEYWLSAILTPFLIFSLAALGLNILTGYAGQLSLGTAAFMAVGAYAAYNFQLRIEGIPVLLTFILAGASAAVVGVAFGLPSLRIKGFYLAVATLAAQFFVVWALTKFPWLSNNSSSGVITAQRLDLFGVAIDTPVKKYLFVLGIVTVLALIAKNLVRSATGRAWMAVRDMDVAAEVIGIPLMRTKLLAFAVSSFYCGVAGALYAFCYLGSVEPDGFSLDLSFRILFMIIIGGVGSILGSFLGAAFILLLPIFLDNVLPALASSLHLPFTNATVSHIQLMVFGGLIIFFLIVEPHGLARLWQIAKEKLRLWPFPH

SEQ ID NO: 60995 - DNA, 1077 bp, Silicibacter sp. TM1040
  CDS (1)..(1077): transl_table=11
atgttctatcgtgaagccggggatttcaaactctcctatgtcgaggacagtcagacttttccgatcaaattcgatcgctaccgctactatgcggtgctcgctctggcctttggcgtggtgccttttgtagtcaatgactattgggtcaatgcgatcctcttgcccttcctcatctatgcgattgcggcgattgggttgaatatccttgttggttactgcgggcaggtgtcgctgggcaccgggggcttcatggcggttggggcctatgcctgctacaagctgatgacagcctttcccgaagtgtccatgtttatccatgttctgcttgcaggcggaatcaccgcgctggtctgcgtgctctttggtttgcccagtttgcgcatcaagggattttatctggcggtggccacattggcggcgcagttcttcctggtctggctcttcaaccgcgtgccgtggttttacaactattccgcttctggccagatcaacgcgcccgagcgtgacgtatttggcatcatcatcaccggccccaatgcaccggcctgggcgacctatctgttctgcctgattttcctgaccttctgcgccatcgtggcccgcaacctgacccgcggcacccaggggcggacgtggatggcgatccgggacatggatatcgcggccgaaatcatcggggtgaaccctttgaaggcaaaaatgacggcctttgcggtctcgggcttctttgtcgggatctcgggcgcgctgttcttcgcggtctacctcggggcggtcgaagtgggcgaggcctttggcatcaacaagtcgttccttgtcctcttcatggtcatcattggcggcttgggctcgatctttggctcttttgcgggcgccgcgttcctggtgctgctgccggtgatcctgaaggtcgtaggcgtggattggctgggttggccgacggacatcgtcgcacatttccagctggtgatcgtgggtgcgctgatcatcacgttccttatcctggagccacacggccttgcgcagctctggcgcgtcgccaaggagaaactgcggctctggcccttcccgcactag

SEQ ID NO: 60996 - protein, 358 aa, Silicibacter sp. TM1040
MFYREAGDFKLSYVEDSQTFPIKFDRYRYYAVLALAFGVVPFVVNDYWVNAILLPFLIYAIAAIGLNILVGYCGQVSLGTGGFMAVGAYACYKLMTAFPEVSMFIHVLLAGGITALVCVLFGLPSLRIKGFYLAVATLAAQFFLVWLFNRVPWFYNYSASGQINAPERDVFGIIITGPNAPAWATYLFCLIFLTFCAIVARNLTRGTQGRTWMAIRDMDIAAEIIGVNPLKAKMTAFAVSGFFVGISGALFFAVYLGAVEVGEAFGINKSFLVLFMVIIGGLGSIFGSFAGAAFLVLLPVILKVVGVDWLGWPTDIVAHFQLVIVGALIITFLILEPHGLAQLWRVAKEKLRLWPFPH

SEQ ID NO: 60997 - DNA, 1002 bp, Rubrobacter xylanophilus DSM 9941
  CDS (1)..(1002): transl_table=11
atgggcgctctgcggcgcttcgaccgggacctgctcgtcctcgcagcgggcgtcctcgtcctgatccccgttccgctgttcctctccggcttcctgctggaggtggcgatccagaccctcctcttcgggctcctcggcgtcgcctggaacctcatgggcgggttcgcggggcagttcagcttcgggcacgccgccttcttcggcatcggggcctacgccaccgccgtcgcggtcacggactacgggctctcgccctgggtcggcatgctcctcggggccgcgctcgcggcggccttcggggtgctggtgggcttcctctccttccgctacgggctcaagggcgtcttcttcgccctggcgaccttcgccttcgccgagatgctgcgcctgatctcccggagcctcgaggcggtgaacgcggcacgcggatacaacatacccatacggagcggcaacccgtggctgacgctccagttcccgcagggctcgcccaactactactacgtgatcctggcgctcttggcgctcagcctgctggccgtcatcctcctgatgcgcagccgcgcgggtacgttcatcctctccatccgggagaacgaggacgccgccgcggccctcggcgtgaacccgatgcgctacaagctactggccgtcgccctcagcgccgcgctcaccgccgttggcggggccttctacgtccagtacttcttctttatagacccggagctggccttcggcgcaagcgtctccatccagatcctcctccccgccatagtcggcgggatcgggacgacctggggacccgtagtgggctcgctcatcataaccgtgctcggtcaggggagcaccgcgctggtgcgcacgccgccgcccttcctggaggcgctgcagggcgtctcgggtctcgacgtggccatctacggcgccctgatcgtgctcgtcgtgctcttccttccgaggggcgtcttcgggacgctccgggagcggttgggggcggcgtga

SEQ ID NO: 60998 - protein, 333 aa, Rubrobacter xylanophilus DSM 9941
MGALRRFDRDLLVLAAGVLVLIPVPLFLSGFLLEVAIQTLLFGLLGVAWNLMGGFAGQFSFGHAAFFGIGAYATAVAVTDYGLSPWVGMLLGAALAAAFGVLVGFLSFRYGLKGVFFALATFAFAEMLRLISRSLEAVNAARGYNIPIRSGNPWLTLQFPQGSPNYYYVILALLALSLLAVILLMRSRAGTFILSIRENEDAAAALGVNPMRYKLLAVALSAALTAVGGAFYVQYFFFIDPELAFGASVSIQILLPAIVGGIGTTWGPVVGSLIITVLGQGSTALVRTPPPFLEALQGVSGLDVAIYGALIVLVVLFLPRGVFGTLRERLGAA

SEQ ID NO: 60999 - DNA, 1086 bp, Rhizobium leguminosarum bv. viciae 3841
  CDS (1)..(1086): transl_table=11
atgaccatggccattccatccttcaccgtcgagacgcgtaccagggcatcgacattgtcggctgtcgcggtcgttgcccttctgctgcttgccttcgctgcacccttcatcgtcgcgcgcggcgtcatccaggaccttttcttcatcctcaccatgctggtgctggcacagaactggaacctgcttgccggttatgccgggctgatctcggtcggccagcaggttttcgtcggctttggagcctatacgatgttcggctgcgtcatcctgttcggcgtcgatcctgtcgtggccatcctgattgccggcgtattttccgtcgcccttgccattcccacagccttcttcaccttccgcctctacggtccctatttcgccatcggcacctgggttgtggccgaagtcgtgcggttgctgctggcccagtggaaggcgctcggcggcggcaccggcacctcgttgccgcgggaggcgacccgcgacatgatgggcgtcggcgcgatgcgcgacctcttcggcatgaaggcttccgaggcgggcgacgcgctgacttactggctggcgctgatcctcgccgtcgccacaatcggcttcatctatggtcttctgcgcagcaagcagggtctcggccttgccgccgttcgtgacaacgagcaggcagcccgcgccctcggcgtcgatgcgcggcggatgaagacgctggtctatctcgccaccgccttcatgacaggcatcgccggggcgctgatctacgtgcagaaggcgcgcatctcgccggacgccgccttctcggtcaccgactggacggcctatgtcatcttcatcgtcgtgatcggcggcatcggcacgatcgagggaccgatcctcggcgtcatcatcttctttctcttacagaacctcctggccgattacggctcctggtatctgctgatgctcggtcttctcggcatcgccatcatgcttctcgcgccgcgcggcctctggggattgttctccgagcgcaccggcatccagcttttcccggttcgccgcgtcctgaagggcgggccgctcaatctcacgcataggggagggactcatggctga

SEQ ID NO: 61000 - protein, 361 aa, Rhizobium leguminosarum bv. viciae 3841
MTMAIPSFTVETRTRASTLSAVAVVALLLLAFAAPFIVARGVIQDLFFILTMLVLAQNWNLLAGYAGLISVGQQVFVGFGAYTMFGCVILFGVDPVVAILIAGVFSVALAIPTAFFTFRLYGPYFAIGTWVVAEVVRLLLAQWKALGGGTGTSLPREATRDMMGVGAMRDLFGMKASEAGDALTYWLALILAVATIGFIYGLLRSKQGLGLAAVRDNEQAARALGVDARRMKTLVYLATAFMTGIAGALIYVQKARISPDAAFSVTDWTAYVIFIVVIGGIGTIEGPILGVIIFFLLQNLLADYGSWYLLMLGLLGIAIMLLAPRGLWGLFSERTGIQLFPVRRVLKGGPLNLTHRGGTHG

SEQ ID NO: 61001 - DNA, 1038 bp, Rhizobium leguminosarum bv. viciae 3841
  CDS (1)..(1038): transl_table=11
atgagccccaacgcgacccttgcctccaacggaatatcgatagaacgctggacgaaatcgtcacgggtggcgctcggctgcatggccgcggtgctcgtcctgctgatgtttgccccggccgtgctcggcgccggcgcgatcgaccggatgacggccctgttcatctacgtgatccttgccgccatgtggaatgcgcttgccggtttcggtgggctcgtttcggtcggccagcaggtgttcttcggcctcggcgcctatttcaccatccgcctggcggatgcggggctcaatcccttcgtctcgctgtttgccgccgcgatcgtgaccggcgcgctgtcgatcccgctatcgctgttcatgctgcgcctgaagggcggcgagttcgcgatcggcatgtgggtgatagcggaactcgcccatctgctcgtcaacctcgaccggctcatccagggggaaacgggaacctcgctgatctcgctcaacgtctatgacggcgcaacgcggcgggcaacgatctactggctcgccttgacggccatggccgccctgctcggcgcgctcttcatgctgatgcgcagccgcgcaggtgcggccatgcaggcgatccgcgacaatgaggaggcggcaacctcggtcggcgtgcgcgtgatcgccaccaagagactgctcttcgtgctcgccgccttcggcatcgcggtcgccggaggcctgtggctggcgaccgccacgaccttccagccgaagacctatttcagcgtccagtggacggcctacatgatcttcatggtgctagtcggcgggatcggcaagtttgaaggcgcgatccttggcgccatcctgttcttcgtgatcgagaccgtcttcggttcagccggcgtctggtacctgatcggcctcggcgccaccgccgtgatcttctcgctctacctgccacgcggcctctggggcgaaatcgagcgccgcttcgactttcaacttctgccggtcggctatcggctgaaattgcccggcccgcataaaatcaaatgggaagaatga

SEQ ID NO: 61002 - protein, 345 aa, Rhizobium leguminosarum bv. viciae 3841
MSPNATLASNGISIERWTKSSRVALGCMAAVLVLLMFAPAVLGAGAIDRMTALFIYVILAAMWNALAGFGGLVSVGQQVFFGLGAYFTIRLADAGLNPFVSLFAAAIVTGALSIPLSLFMLRLKGGEFAIGMWVIAELAHLLVNLDRLIQGETGTSLISLNVYDGATRRATIYWLALTAMAALLGALFMLMRSRAGAAMQAIRDNEEAATSVGVRVIATKRLLFVLAAFGIAVAGGLWLATATTFQPKTYFSVQWTAYMIFMVLVGGIGKFEGAILGAILFFVIETVFGSAGVWYLIGLGATAVIFSLYLPRGLWGEIERRFDFQLLPVGYRLKLPGPHKIKWEE

SEQ ID NO: 61003 - DNA, 1047 bp, Rhizobium leguminosarum bv. viciae 3841
  CDS (1)..(1047): transl_table=11
atgagcgacgcgcgcaacgaggcgagaaaacgcgccatcgaacagcttcgccgcggcaatgcctggcggctctatgagatcgtcctctggattgcggcggtcgttgccatcttcgtgctgccttcgaagatgctgctgctcaccgaaatcgccatcaccgcgctatttgccttatccctcgatctggtgctcggctacgccggcatcgtttcgctcggtcacgccgccttcttcggcctcggcgcctatgctgcaggtctctttgccaaatatgccatcgccgaacccgtcaccggcctctttgccgcagccgcggtctccggccttgccggcttcggggcgagcttcctcgtccttcgaggctcggatctcacgcggctgatgacgacgctcggcatcgccttgatgctcgccgagctcgccaaccagatggcatgggtgacgggcggggcggatggcctcagcggcgtcaccatcgggccgatcctcggccttttcgagttcgacctctggggccgcaccggctatgtctacagcctcgccgcactcttcgtcctgacatttgtcgcacggcatctggtgaactcctccttcggcctgtcgctgagggcgatcaaggccaatccgatgcgcgccgcgatggtcgccattccggcgaggaaccggatcatcgtcatctatacgatcgccgccgcctatgccggcattgccggcgcattgctgacgcatacgacgagtttcgtttcgcccgatgtcctcgccttccatcgctcggcggatgtgcttctggttctggtcatcggcggtgtcggttatctctatggcggcatcatcggcgcggtcatctttaccgtgctgcgcgactggctctcggtctccacgccgcaatactggatgttctggatcggcctgatcctgatcgccattgtgctcgttggccgcgagcgcatcgcccgctggcacacatttctgccggcctcgctgcaggccggcatcaagcggctggcgacatggcggcctggcgtgaaactgaaagaaagccgatga

SEQ ID NO: 61004 - protein, 348 aa, Rhizobium leguminosarum bv. viciae 3841
MSDARNEARKRAIEQLRRGNAWRLYEIVLWIAAVVAIFVLPSKMLLLTEIAITALFALSLDLVLGYAGIVSLGHAAFFGLGAYAAGLFAKYAIAEPVTGLFAAAAVSGLAGFGASFLVLRGSDLTRLMTTLGIALMLAELANQMAWVTGGADGLSGVTIGPILGLFEFDLWGRTGYVYSLAALFVLTFVARHLVNSSFGLSLRAIKANPMRAAMVAIPARNRIIVIYTIAAAYAGIAGALLTHTTSFVSPDVLAFHRSADVLLVLVIGGVGYLYGGIIGAVIFTVLRDWLSVSTPQYWMFWIGLILIAIVLVGRERIARWHTFLPASLQAGIKRLATWRPGVKLKESR

SEQ ID NO: 61005 - DNA, 1014 bp, Rhizobium leguminosarum bv. viciae 3841
  CDS (1)..(1014): transl_table=11
atgatgaacctcgtcccgaaatggctgctgatcgccgtcggaatagcacttctcgcgcttgctccgatcggacacggaaattacgtggccctcatcctctgctcgtggctcatctacacgatcgcggcgatgggcctgaacctgacgctcggctatgccggacagatatccctcgcgcaggcctcgttcatggctgtcggcgcctatatcaccgccctcatgaccatgaacggcatccactggctgatcgccatgccggtatcggtggccgcctgtttcgtgatcggcctgctggtgggctttccggcgctgcgcgtcaaaggccatttccttgccttcgtcacgctcgccttcaacacgctgctcgtgctcgtgcttcgcaacgaggactggctgaccgggggatcctatggaaagtcgaacatgccgcggcctgatttctgggtgttcgataccggcatgaaatccaccgtcctgtcgatcccgctgacgtcgaaccagaagatgtactatctctgcctggtggtcttcgtgatcttcgccctgctgatgtacgggctggtccgttctccatgggggcgtgccttcaagggcctgcgcgaaaatccaattcgcgccgaaagcctcggcctcgatatccgccggatcaccctgcttgcctttgcgatcggttcggcggccggggggcttgccggatcgctggtctcgccggtggtccaatatatcgagccgaactccttcgcgctcagtttttcgctgaaaattctgctgatggtcgtcgttggcgggtccggctatttcttcggcccgatgctgggagccgcggtggtgatccttctgccggaattccttcggttcaccgaaggctattacctcatcatatattccgcgctggtgatcctgctcatggtgttttcgccgagcggcctgatgggggtaggcggtcgactggtcggcgccgttcgtccgagacgcgtcacccgcggcgacatgaaggaaggagcacagctatga

SEQ ID NO: 61006 - protein, 337 aa, Rhizobium leguminosarum bv. viciae 3841
MMNLVPKWLLIAVGIALLALAPIGHGNYVALILCSWLIYTIAAMGLNLTLGYAGQISLAQASFMAVGAYITALMTMNGIHWLIAMPVSVAACFVIGLLVGFPALRVKGHFLAFVTLAFNTLLVLVLRNEDWLTGGSYGKSNMPRPDFWVFDTGMKSTVLSIPLTSNQKMYYLCLVVFVIFALLMYGLVRSPWGRAFKGLRENPIRAESLGLDIRRITLLAFAIGSAAGGLAGSLVSPVVQYIEPNSFALSFSLKILLMVVVGGSGYFFGPMLGAAVVILLPEFLRFTEGYYLIIYSALVILLMVFSPSGLMGVGGRLVGAVRPRRVTRGDMKEGAQL

SEQ ID NO: 61007 - DNA, 1392 bp, Rhizobium leguminosarum bv. viciae 3841
  CDS (1)..(1392): transl_table=11
atggcaaacatcgaaaattctgcaggcaagcccgatgccggacttgtccgcaaaggccttaccgaagctcttttcgccgccgtcctgtcgttcggtatgttcgttctctatgtcggcctcaagaccgaccagaacatcagcaacgagttgatcattgtccagcgctggggcctgcttgcgatcttcgtcgcggtcgccgccatcggccgcttcgccatggtcgttttcatcaggccgaatatcgaccgccgcaagctcagcaaggcgcgcgagggcgagctcgacatctcgacagagaagagcttcttccaccggcatttcctgaagatcgcgctgatcgcgctgctgctttatcccatggtggtggtggcgatcaaaggccctcagggctcgctgacatatgtcgacaatttcggcatccagatcctgatctatgtgatgctcgcctgggggctgaacatcgtcgtcggcctcgccggcctgctcgacctcggctatgtcgccttctatgccgtcggcgcttattcctacgcgctgctttcgagctatttcggcctgtccttctgggtgctgctgccgctttcgggcatcttcgccgcactctggggcgtcattctcggcttcccggtgctgcgcctgcgcggcgattacctcgccatcgtgacgcttgccttcggtgaaatcattcgtctcgtcctcatcaactggactgacgtgacgaagggcaccttcggtatctcgagcatcccgaaggcaacactcttcggcattcccttcgatgcgacggccggcggctttgccaagctctttcacctgccgatctcctcggcctattacaagatcttcctgttctatttgatcctggcgctctgcatgctgacggcctatgtcaccatccggctgcgccgcatgccgatcggacgcgcctgggaagctttgcgtgaagatgagatcgcctgccgttcactcggcatcaacacggtgacgaccaagctcaccgcctttgcgacaggtgcgatgtttgccggtttcgctggctcgttctttgccgcccgccagggcttcgtctcgccggaatccttcgtcttcctggaatcggccgtcattctcgccatcgtcgttcttggcggcatggggtcgttgaccggcatcgcgatcgccgccatcgtcatggtcggcggcaccgagttgctgcgcgagatgagcttcctaaaactcatcttcggaccagattttacgccggaactctaccgcatgttgatcttcggcctcgccatggtcgtcgtcatgctgttcaagccgcgcggcttcgtcggctcgcgtgagccgacagccttcctcagagaacgcaaggcgatatccggaagcttcatcaaggagggccatggttga

SEQ ID NO: 61008 - protein, 463 aa, Rhizobium leguminosarum bv. viciae 3841
MANIENSAGKPDAGLVRKGLTEALFAAVLSFGMFVLYVGLKTDQNISNELIIVQRWGLLAIFVAVAAIGRFAMVVFIRPNIDRRKLSKAREGELDISTEKSFFHRHFLKIALIALLLYPMVVVAIKGPQGSLTYVDNFGIQILIYVMLAWGLNIVVGLAGLLDLGYVAFYAVGAYSYALLSSYFGLSFWVLLPLSGIFAALWGVILGFPVLRLRGDYLAIVTLAFGEIIRLVLINWTDVTKGTFGISSIPKATLFGIPFDATAGGFAKLFHLPISSAYYKIFLFYLILALCMLTAYVTIRLRRMPIGRAWEALREDEIACRSLGINTVTTKLTAFATGAMFAGFAGSFFAARQGFVSPESFVFLESAVILAIVVLGGMGSLTGIAIAAIVMVGGTELLREMSFLKLIFGPDFTPELYRMLIFGLAMVVVMLFKPRGFVGSREPTAFLRERKAISGSFIKEGHG

SEQ ID NO: 61009 - DNA, 993 bp, Rhizobium leguminosarum bv. viciae 3841
  CDS (1)..(993): transl_table=11
atgagaaacaactcgatcccattctggttactcgcactggcgctcccggtcctggccttcatattgccgaagctcgggctcaatgaatattacctctatgtcgggtacgtcattcttcagtacgttgtgctcgctacggcctggaacattcttggcggttacgcaggctatgtcaattttggcacgggcgcctttttcggacttggcgcctacacggctctggtgctgatgaaggcctttggtgcaccacttccgattcagatcgcgggcgccgccatcgttggcgcgctgcttggcatcggagccgggttactgacgttgcgcctcaagggcatcttcttttcgatcgcgacgattgcagctgcgatcgtgatcgaaacctttattctcaactggcgcttcgtcggcggcgcaaccggtatgcagatcatccgcccggaggtgccccttggatttgatacctatacacggctgttgctgttcgtgatgacggtgctgacggttattgcaatcatcgttgctcgctacatcgagcggtcctggctcggcagaggcctgcatgccgtgcgcgatgcggaggcggcagctgaatgctcgggcgttccgacattgcggctcaggctgatcgcctgcgcgatatcgggtgccctcatggctgcagccggggctccgttcccgctatatacgagctttgtcgagccgagttcgaccttcagcctgaattactcggtcatggccctttcgatggctgtggtcggcggaatgtcgcgctggtggggacccgtgctcggcgcaatcctgatcgccagcagccagcaactcgctgcctcagcaagcccggagcttcacctgctggtcgttggactgctgatggtcatcttcgtgatcatggcgcccgaggggctggtcggattggcaaaactcgcccgcaaaagcctgcaaccaggcgccaagtcaatccgcctcgtcgaaggagcaaaagcgcatgactag

SEQ ID NO: 61010 - protein, 330 aa, Rhizobium leguminosarum bv. viciae 3841
MRNNSIPFWLLALALPVLAFILPKLGLNEYYLYVGYVILQYVVLATAWNILGGYAGYVNFGTGAFFGLGAYTALVLMKAFGAPLPIQIAGAAIVGALLGIGAGLLTLRLKGIFFSIATIAAAIVIETFILNWRFVGGATGMQIIRPEVPLGFDTYTRLLLFVMTVLTVIAIIVARYIERSWLGRGLHAVRDAEAAAECSGVPTLRLRLIACAISGALMAAAGAPFPLYTSFVEPSSTFSLNYSVMALSMAVVGGMSRWWGPVLGAILIASSQQLAASASPELHLLVVGLLMVIFVIMAPEGLVGLAKLARKSLQPGAKSIRLVEGAKAHD

SEQ ID NO: 61011 - DNA, 1008 bp, Mycobacterium smegmatis str. MC2 155
  CDS (1)..(1008): transl_table=11
atgagcaagcgccccgcctcgggcggtaacccctacctgaatctcggcgtgctcgccgtcgtcgtcgccgtcatgtgcctgctgccgctgatgacgtcgccctattacgtgcgcgtcgccaccggcgtcgcgctatgggccgggatcgcgctgtcctggaacgtcatctgcggctacgccggctacatcagcttcggccacgtcgcgttcttcggcatcggcgcctacaccaccgcgatcctcatgcagccccagcacgattgggacttctgggccacgctgcccgtcgcggccgtcgtcgccggcgccgtcgcggccctggtcggctggcctgcgctgcgcctcaaaggcgcgtacttcgcgatcgccacgtgggcactcgcggaggccgtgcgcgaactcaccaccgtggtcaaattcaccggcggctcgggcggtctgagcaccccgatccgcgccgacgacaacttcttcttctacaccatgctcggtgcctcggccatcgcctacgcggtgtgctacctgctgctggaacgctcgaagttcgggttcaaggtcaaagccgtgcgcgacaacgagatcgccgcacgcgcccagggcatcaacaccaacctggtcaagatccaggcgttcgtgctcagcgcggtcatcccggccgtactcggcggcatcaacgcctactggatcacgttcatcaacccgcagagcgtgctgaacaccctgatcaccgaccagctggtggtcatggtgctcgtcggcgggctgggccacgcgtggggacccgccctcggcgcgaccgcgatgttcctgctgcaggaacaactccgggtcagctacggcgagaccaccgcctacatcatcatcgtcggggccatcgtgatgctgatcgtgctgttcttgcccgacggcctggtgagcctcggccgccgtgcgcgccgaatgcgcctgatacgccagtatctcgggcgggcccgcgacgacctcgtgaagacggaggcccggggatga

SEQ ID NO: 61012 - protein, 335 aa, Mycobacterium smegmatis str. MC2 155
MSKRPASGGNPYLNLGVLAVVVAVMCLLPLMTSPYYVRVATGVALWAGIALSWNVICGYAGYISFGHVAFFGIGAYTTAILMQPQHDWDFWATLPVAAVVAGAVAALVGWPALRLKGAYFAIATWALAEAVRELTTVVKFTGGSGGLSTPIRADDNFFFYTMLGASAIAYAVCYLLLERSKFGFKVKAVRDNEIAARAQGINTNLVKIQAFVLSAVIPAVLGGINAYWITFINPQSVLNTLITDQLVVMVLVGGLGHAWGPALGATAMFLLQEQLRVSYGETTAYIIIVGAIVMLIVLFLPDGLVSLGRRARRMRLIRQYLGRARDDLVKTEARG

SEQ ID NO: 61013 - DNA, 1068 bp, Azoarcus sp. BH72
  CDS (1)..(1068): transl_table=11
atgctttaccgtgaggccggccagttcaaggccagttaccaggaagaccagcagattttcccgatccgccaggaccggatcggcttcgcggccatcctggtgttcttcttcggcgtggtgccgctcgtcgccaaccagtactggctgcaggccatcctgatcccggtgctgatcttctcgctcgctgcgatcgggctgaacatcctcaccggctacgccggccagctgtcgctcgggtcggccgccttcatggcggtgggagccttcggcgcctacaacttcatgttgcgtatcgacggcatgcccttcctggtgggcatcgtgctgggcgggctgtgcgcggccgcggtcggggtggccttcgggctgccgtccctgcgcatcaagggcttctacctggcggtggcgacgctggcggcgcagtttttcatcgtctgggcgctggtcaagtttccgtggttctccaaccatgccagctcgggcgtgatcaccgcgcagcgggtcgagatcctcggctatgccttcgacagcccggtgagcaaatacctgctgacgctcgcggtggtggcggtgctggcgctgctcgccaagaacctcgtgcgcagcaccaccggccgcagctggatggcggtgcgcgacatggacgtcgccgccgaagtgatcggcatccgcccgatgcacgccaagctcacggccttcgcggtgtcgtccttctactgcggcgtggccggtgcgctgtatgcctacacctacctcggcaccgtggagccggaaggcttcagcctcgacctgtcgttcaagatcctgttcatgatcatcatcggcggcgtcggttcgatcatgggttccttcttcggcgcggccttcatcgtgctgatgccgatcttcctcaacgtcgtcatgcactcggtgttcggcggggcgatgcccgccggcatgggttccaacctcgaactgatcattttcggcgggctgatcatcttcttcctgatcgtcgagccgcacggcctcgcccgcctgtggcagctcggcaaggaaaagctgcggctgtggcccttcccgcactga

SEQ ID NO: 61014 - protein, 355 aa, Azoarcus sp. BH72
MLYREAGQFKASYQEDQQIFPIRQDRIGFAAILVFFFGVVPLVANQYWLQAILIPVLIFSLAAIGLNILTGYAGQLSLGSAAFMAVGAFGAYNFMLRIDGMPFLVGIVLGGLCAAAVGVAFGLPSLRIKGFYLAVATLAAQFFIVWALVKFPWFSNHASSGVITAQRVEILGYAFDSPVSKYLLTLAVVAVLALLAKNLVRSTTGRSWMAVRDMDVAAEVIGIRPMHAKLTAFAVSSFYCGVAGALYAYTYLGTVEPEGFSLDLSFKILFMIIIGGVGSIMGSFFGAAFIVLMPIFLNVVMHSVFGGAMPAGMGSNLELIIFGGLIIFFLIVEPHGLARLWQLGKEKLRLWPFPH

SEQ ID NO: 61015 - DNA, 1077 bp, Acidovorax sp. JS42
  CDS (1)..(1077): transl_table=11
atgttctaccgcgaaaacggccagttcaagaccacctacaaggccgaccagcagatctttcccatcacccaggaccgcatcgccatcctgctgctgttggccgtggccttcgtggcggtgcccgcgatggcgtcggactacttctaccgcgccatcctgatcccgctggtcatcatgtccatggccgcgctgggcgtgaacatcctcgtgggctactgcgggcagatctcgctgggctcgggcgccttcatggcggtgggcgcctacggggccttcaacttcttcgtgcgcttccccgggatgccgctggtcgcggccctcatcctgggcgggctgtgcgccacgttcttcggcatcctgttcgggctacccagcctgcgcgtgaaagggctatacctggccgtggccacgctggcggcgcagttcttcagcgactggatgttcctgcgcatcaaatggttcaccaacaattccgactccggctcggtctcggtcagcaacctgcaggtcttcggcatgccgctggacagcgccatggccaagtacctgttctgcctgacgctcctggtggtcgtggccctgctggccaagaacctggtgcgcggcgccatcggccgcgaatggatggccatccgcgacatggacgtggccgccgcggtgatcggcatccgcccgatgtacgccaagctcagcgccttcgctgtcagctccttcatcgtcggcatggcgggcgcgctgtgggccttcgtgcacctgggttcgtgggagccggcggcgttctcggtcgaggtgtcgttccgcctgctgttcatggtcatcatcggcggcatgggctccatcatgggcgcgttcttcggcgcggccttcatcgtggtgctgcccatcttcctgaaccagttcctgcccgcggtggccggcctgttcggcgtggacatctccaccgccgccgtgtcgcatgcggaactgatgatcttcggcgcgctgatcgtgtggttcctcatcgtggagccccacggcttggccaagctgtggtccatcggcaagcagaagatgcgcgtgtggcccttcccccattga

SEQ ID NO: 61016 - protein, 358 aa, Acidovorax sp. JS42
MFYRENGQFKTTYKADQQIFPITQDRIAILLLLAVAFVAVPAMASDYFYRAILIPLVIMSMAALGVNILVGYCGQISLGSGAFMAVGAYGAFNFFVRFPGMPLVAALILGGLCATFFGILFGLPSLRVKGLYLAVATLAAQFFSDWMFLRIKWFTNNSDSGSVSVSNLQVFGMPLDSAMAKYLFCLTLLVVVALLAKNLVRGAIGREWMAIRDMDVAAAVIGIRPMYAKLSAFAVSSFIVGMAGALWAFVHLGSWEPAAFSVEVSFRLLFMVIIGGMGSIMGAFFGAAFIVVLPIFLNQFLPAVAGLFGVDISTAAVSHAELMIFGALIVWFLIVEPHGLAKLWSIGKQKMRVWPFPH

SEQ ID NO: 61017 - DNA, 1071 bp, Magnetospirillum magnetotacticum MS-1
  CDS (1)..(1071): transl_table=11
atgatctcgtccagcctcattccctgcggccagttcaagaccacctacggggccgacaccaccatctttctgacgcccgcgtcgcgctactggtgcatggccggcatcctgctggccgccgccgcgcctttggtgctaagcaattacctgatggccctgctgatccagatcggcttttacggcatcgccgctttgggcctcaacatcctggtgggctgcaccggccagatcagcctcggccacgccgccttcttcggcttcggcgccttcgcctcggcctggctgaacaatacgttcggcattccggtgctgttggccattccgctggcgggcgtgatgaccaccctgctgggcctgttgttcggcattccggcaggaaggctgaagggcctgtatctggccatcgccaccttcgcctcccagttcatcctggaagacttctttgcgcgggccaactggttcaccggcggctcttcgggcgccatggccaatcccatcagcctgttcggctatgaggtgggcggcgacaagggcttcttctacgtggtcctggtcttcgtggtgatcatgtacgggcttggcaccaacctgctgcgcagccgcgacggccgggccttcgtggcggtgcgcgaccactatctgtcggcagaggtgatgggcatcaacctcaccaagtaccgcatcttgtcgtttggcatctcgtccttctatgccggagtgggcggcgcgctgtacggccattatctcggctatgtctcggccgaaggcttcaccatcctgctgtccatccagttcctcgggatgatcatcatcggcggcatgggcagcgtgatggggaccctgatgggcaccaccttcatggtgctgttgcccgaggccaccgaggccgccgtcagcacggtgaagcatttcaccggtgatatcccggcgctgaccagcgcgctggcctatatcaaggaagccagtatcggtctggccatcgttctgttcctgatcttcgagcccgatggcctggttcaccgctggcgcctgatcaagtcttattggaagctgtatccgttctcttactga

SEQ ID NO: 61018 - protein, 356 aa, Magnetospirillum magnetotacticum MS-1
MISSSLIPCGQFKTTYGADTTIFLTPASRYWCMAGILLAAAAPLVLSNYLMALLIQIGFYGIAALGLNILVGCTGQISLGHAAFFGFGAFASAWLNNTFGIPVLLAIPLAGVMTTLLGLLFGIPAGRLKGLYLAIATFASQFILEDFFARANWFTGGSSGAMANPISLFGYEVGGDKGFFYVVLVFVVIMYGLGTNLLRSRDGRAFVAVRDHYLSAEVMGINLTKYRILSFGISSFYAGVGGALYGHYLGYVSAEGFTILLSIQFLGMIIIGGMGSVMGTLMGTTFMVLLPEATEAAVSTVKHFTGDIPALTSALAYIKEASIGLAIVLFLIFEPDGLVHRWRLIKSYWKLYPFSY

SEQ ID NO: 61019 - DNA, 975 bp, Fusobacterium nucleatum subsp. vincentii ATCC 49256
  CDS (1)..(975): transl_table=11
atggataaaaataaaaaaataagttatatagctacttatgtattattaataatcctatattttatattattttctttaataaattcaggttttataagtagatatcaagttggaatattaattttgattttaataaatgtaattttggcagctagtttgaatgtgacagttggttgtttgggacaaattaccttaggacatgctggttttatgtcaataggggcatatacagcagcacttttaactaagtctggttttctttcaggttatccaggttatattgtagctttaataataggtggagttgtagcaggatttataggatttataataggaatacctgctttaagacttactggggattatcttgcaattataactttggcttttggagaaattataagagtgttgatagaatattttaaatttactggtggagcacaaggattaactggaataccaagaataaataattttacattaatatattttataacaatattttcagttatatttatgtattcaattatgacaagtagacatggtagagcagtcttggctatccgtgaagatgaaatagcaagtggagcttctggaataaatacaacttactataaaacttttgcttttgtattatcagcaatatttgcaggtatagcaggaggaatctatgcacataatttaggaattttaggggcaaaacagtttgactataattattctataaatatacttgttatggttgtacttggaggaatgggaagttttacaggttcaatattatcagcaatagtacttactattctaccagaagttctaagaagttttgcagaatatagaatgatagtttatccattgatactaattataatgatgttatttagaccaaaaggattacttggaagagaagaatttcaaataagtaaagtaatttcatattttaccaaaaaaagaggtgaagcagatggaaaataa

SEQ ID NO: 61020 - protein, 324 aa, Fusobacterium nucleatum subsp. vincentii ATCC 49256
MDKNKKISYIATYVLLIILYFILFSLINSGFISRYQVGILILILINVILAASLNVTVGCLGQITLGHAGFMSIGAYTAALLTKSGFLSGYPGYIVALIIGGVVAGFIGFIIGIPALRLTGDYLAIITLAFGEIIRVLIEYFKFTGGAQGLTGIPRINNFTLIYFITIFSVIFMYSIMTSRHGRAVLAIREDEIASGASGINTTYYKTFAFVLSAIFAGIAGGIYAHNLGILGAKQFDYNYSINILVMVVLGGMGSFTGSILSAIVLTILPEVLRSFAEYRMIVYPLILIIMMLFRPKGLLGREEFQISKVISYFTKKRGEADGK

SEQ ID NO: 61021 - DNA, 1077 bp, Sulfitobacter sp. EE-36
  CDS (1)..(1077): transl_table=11
atgttctatcgtgaagccggggatttcagcgcctcatacgaagaagacagccagacgtttccgatcaagttcgaccggtatcgctattatcttgtgttgttcatcgccattgccgtgatcccgtttgtgatcaatgactattgggtgaactcgctgttcctgccgttcctgatctacgccattgcggcgatcgggctgaacattctggtgggctattgcgggcaggtgagcttggggaccggtggctttatggccgtgggggcctatgcctgctacaaattcatgaccgcctttcccgacgtgagcatgctggtgcatgtgttgctgtcggggttggtgaccgccggtgtcggcgtgttgttcggcctgccatcgctgcggatcaaagggttctatctggccgtggcaacgctggcggcgcagttctttctggtatggctcttcaaccgtgtgccgtggttctacaactactctgcctcgggccagatcagcgcgccggagcggacattcttcgggatcgagatcaccggaccgaatacgcaggcctgggcgacctatctgttctgcctgatgttcgtgatcttcagcgcctatgtggcacgcaacctgacccgtgggtcggtggggcgcaaatggatggcgatccgtgatatggatatcgcggccgagatcatcggggtgaacccgctgcgggcgaaactgacggcctttgcggtcagctctttcttcatcggcatctcgggggcgctgttctttgcggtctatttgggtgcggtcgaagtgggcgaggcctttggcatccagaaatcgttccttgtgctctttatgatcatcatcggcgggctgggatcgatctttggcagctttgccggggccgcgttccttgtcctcttgccggttgcgttgaaaatcgtgggcgtcgactggttcggttggccgacggatatcgtggcgcatctgcagcttgtgatcgtgggcgggttgatcatcatcttcctgatcgcggaaccgcatgggctggcccagttgtggcgcgtcgccaaggaaaaactgagattgtggcccttcccgcactag

SEQ ID NO: 61022 - protein, 358 aa, Sulfitobacter sp. EE-36
MFYREAGDFSASYEEDSQTFPIKFDRYRYYLVLFIAIAVIPFVINDYWVNSLFLPFLIYAIAAIGLNILVGYCGQVSLGTGGFMAVGAYACYKFMTAFPDVSMLVHVLLSGLVTAGVGVLFGLPSLRIKGFYLAVATLAAQFFLVWLFNRVPWFYNYSASGQISAPERTFFGIEITGPNTQAWATYLFCLMFVIFSAYVARNLTRGSVGRKWMAIRDMDIAAEIIGVNPLRAKLTAFAVSSFFIGISGALFFAVYLGAVEVGEAFGIQKSFLVLFMIIIGGLGSIFGSFAGAAFLVLLPVALKIVGVDWFGWPTDIVAHLQLVIVGGLIIIFLIAEPHGLAQLWRVAKEKLRLWPFPH

SEQ ID NO: 61023 - DNA, 1077 bp, Roseovarius nubinhibens ISM
  CDS (1)..(1077): transl_table=11
atgctctaccgtgaagcaggcgatttcaagacgagctatgtcgccgatagccagacctttccgattaagttcgaccgctaccgctattacgcggtgttgatcatcggctttgccttcatcccctttgtcatcaacgactattgggtgaatgcgatcttcctgcccttcctgatctattcgatcgcggcgatcgggctcaacatcctgaccggctattgcgggcaggtgagccttgggaccggcgggttcatggcggtgggggcctatgcctgttacaagctgatgaccgcctttccggaggtgagcattctcatccatgtgctgttggccggggggatcaccgccggggtcggcgtgctctttggtctgccgagcctgcgcatcaaggggttttacctcgcggtggcgacgctggcggcgcagttctttctcgtctggctcttcaaccgggtgccgtggttctacaattattccgcctcggggcagatcaacgcgccggagcggaccatgttcggcgtgccggtcaccgggccggagacggcggcctgggcggcctatctcttttgtctggtgctgacggtgttctgtgcgctgatcgcgcgcaacctgacgcggggcatgatggggcgcaaatggatggccattcgcgacatggacattgcggccgagatcatcggggtcaatccgctgatggccaagctcagcgcctttgcggtgtcgtcgttcttcgtcggcgtggcgggggcgttgtttttcgcggtctatctgggtgcggtggaagtcggtgaggcctttggcatcaccaagtctttcctcgtgctgttcatggtgattatcggcgggttggggtcgattttcggctctttcgcgggggcggcgttcctggtgcttctgcccgtggtgctcaagctggtgggggtcgatctcttgggatggccgaccgatcttgtggcgcatctgcagctgatcatcgtgggggcgcttatcgtgctcttcctcatcgtcgagccgcatgggctggcccagctgtggcgggtggcgaaggaaaaactgagattgtggcccttcccgcattaa

SEQ ID NO: 61024 - protein, 358 aa, Roseovarius nubinhibens ISM
MLYREAGDFKTSYVADSQTFPIKFDRYRYYAVLIIGFAFIPFVINDYWVNAIFLPFLIYSIAAIGLNILTGYCGQVSLGTGGFMAVGAYACYKLMTAFPEVSILIHVLLAGGITAGVGVLFGLPSLRIKGFYLAVATLAAQFFLVWLFNRVPWFYNYSASGQINAPERTMFGVPVTGPETAAWAAYLFCLVLTVFCALIARNLTRGMMGRKWMAIRDMDIAAEIIGVNPLMAKLSAFAVSSFFVGVAGALFFAVYLGAVEVGEAFGITKSFLVLFMVIIGGLGSIFGSFAGAAFLVLLPVVLKLVGVDLLGWPTDLVAHLQLIIVGALIVLFLIVEPHGLAQLWRVAKEKLRLWPFPH

SEQ ID NO: 61025 - DNA, 1077 bp, Oceanicola batsensis HTCC2597
  CDS (1)..(1077): transl_table=11
atgttctatcgcgaagccggtgagttcaagacatcctatgtcgacgacaaccagacctttccgatccggttcgaccgctaccgctattacgccgttctggcggtcgccttcctgatcgtgcccttcgtcatcaacgactactgggccaatgcggtcctgctgccgttcctgatatacgccatcgcggcgatcggcctgaacatcctcgtgggctactgcggacaggtctcgctcgggacggggggcttcatggcggtcggggcctacgcgacctacaagctgatgactgccttccccgacatcaacatcttctttcacatcgtcatggcggggggcatcaccgccatcgtcggtgtgctgttcggcctgccgtcgctgcgcatcaaggggttctatctggcagtggccacgctggccgcgcagttcttcctggtgtggctcttcaacagggtcccgtggttctacaacaactcggcctcgggccagatcaacgcgcccgaacgcaccgtctttggccaggccgtgaccggccctgcgaccgaggcctgggcgacctatctcttctgcctcgtcttcaccgtcgcttcggcccttcttgcccggaacctcacccgcggcgccatgggccgcaggtggatggcgatccgggacatggacatcgcggccgagatcatcggcgtgaatcccctgatctccaagctgaccgccttcgccgtgtcgtccttcttcgtgggcatagcgggcgctctgttcttcgcggtctatctcggcgcggtcgaagtgggtgaggtctatggcatcaacaagtccttccttgtgctgttcatgatcatcatcggcggtctcggctcgatcttcggcagcttcgcgggggcggccttcctggtgctcctgcccgtactgctcaagaacgtgttggtcggcacattgggctggcccacggggctggcgtcacatttcgagatcatgatcctgggctttcttatcatcgtcttccttgtcgcggagccgcacgggctggcccagctgtggcgcgtcacgaaggagaaactccgactctggccgttcccccactga

SEQ ID NO: 61026 - protein, 358 aa, Oceanicola batsensis HTCC2597
MFYREAGEFKTSYVDDNQTFPIRFDRYRYYAVLAVAFLIVPFVINDYWANAVLLPFLIYAIAAIGLNILVGYCGQVSLGTGGFMAVGAYATYKLMTAFPDINIFFHIVMAGGITAIVGVLFGLPSLRIKGFYLAVATLAAQFFLVWLFNRVPWFYNNSASGQINAPERTVFGQAVTGPATEAWATYLFCLVFTVASALLARNLTRGAMGRRWMAIRDMDIAAEIIGVNPLISKLTAFAVSSFFVGIAGALFFAVYLGAVEVGEVYGINKSFLVLFMIIIGGLGSIFGSFAGAAFLVLLPVLLKNVLVGTLGWPTGLASHFEIMILGFLIIVFLVAEPHGLAQLWRVTKEKLRLWPFPH

SEQ ID NO: 61027 - DNA, 963 bp, Oceanicola batsensis HTCC2597
  CDS (1)..(963): transl_table=11
atggctctgatgctggcagcaccctatctggtgagcgggcgcatcatcgccatcctgaacatgatgctgatcagcgccgtcattgctgtcgggcttcagatctgcaccggttatgcgggccagatcaacctgggccaggcggcgttcatgggggtcggggcctatacggcttcgatactggcctccaagaccggtctgacattcctgctgacgattcccctggccgggatctcggccgccctgttcggttttctctttggcctgactgcggcacggatcaagggattttacctggctctgaccacgattgcggcgcagttcatctttcactttgccgtcctgaacctgccatcgagctggatgggcgggtcaaacgggatcaccgtcccgccggcagaacttttaggactgcgctttgtcggcgagacttctcagttctacctgaatcttgcagtcgcggcaatcatgatcgcgggcgcgttcgggatcgtgcgatcccgctttggccgcgcatttgtggcggtccgggacgacgacgtggcagcggggatcatggggatcaatgtcgcggccacaaaggcgaatgcctttctgatcggagcgttctatgccggcgtcggcggggcgctgtgggcctatctgatccgctttgtcggggtggatcagttcaccctgttccattcgatcttcttcgtggcaatgatcatcgtcggcggcatgggctcgatcgtgggggctctggtcggggtcttcgtcatccgcatcattcaggaaatcatcgcgacggttggccccaatatcgccgagtcggtgtcctttcttggcggcgatatcgtgttcgccggcatgaatgtcgttcttggcggcgtgatcgcgatgttcatgatccttgaacccaaggggctgatgcaccgctggaacatcctgaaatcatcataccgtatctggccgtttccttactga

SEQ ID NO: 61028 - protein, 320 aa, Oceanicola batsensis HTCC2597
MALMLAAPYLVSGRIIAILNMMLISAVIAVGLQICTGYAGQINLGQAAFMGVGAYTASILASKTGLTFLLTIPLAGISAALFGFLFGLTAARIKGFYLALTTIAAQFIFHFAVLNLPSSWMGGSNGITVPPAELLGLRFVGETSQFYLNLAVAAIMIAGAFGIVRSRFGRAFVAVRDDDVAAGIMGINVAATKANAFLIGAFYAGVGGALWAYLIRFVGVDQFTLFHSIFFVAMIIVGGMGSIVGALVGVFVIRIIQEIIATVGPNIAESVSFLGGDIVFAGMNVVLGGVIAMFMILEPKGLMHRWNILKSSYRIWPFPY

SEQ ID NO: 61029 - DNA, 1074 bp, Oceanicola batsensis HTCC2597
  CDS (1)..(1074): transl_table=11
atgttttatagactttccggtgtccaccacgcgaactatgtctcggacagccgtatcttcaaggtccctgccgaccggaacctggccgcgttcatcctcctgttgggccttgctgcgccattcatcataccttcgctctacctgaacagttacatgctcccgtggctgatctggacggcagccgcactcgggctgaacctggtgacaggttgggctgggcagctgcacctgggctatgccgcggtgatggcggtcggggcgtactcggcgatccacgccgctcgatttggggtgccgtgggaatttgccctgatcatcggcgggctgatgtcatccgtgattggcagcctgttcgcctttgccgcattgcgggtcaagggtctctacctcgccctcacgactcttgcgatgcagtttgtgatggattgggttctgacccattcgccaatgatctcagggggctcgcacgcatcgctgcaatcgccgacacttgcgctgctcgggcaggacatcacgtcggataccgggtattactatgtcgcttttggatggtgtgtgttggtcacgatcttcatgctcaacctcaagcgctgcgggcttggacgtgccctggtcgccgtgcgggaaaaggattttgccgccgcgatcctgggtgtgaacagcttctactacaagatcctggccttcgcgacatcgtcgtttatcgccggcgtcagcggtgcgttgcttgttgccaccttcttctttcttgccgcgccagagcagttctcggttgccgtttcgatccaggttcttgcgatggtgatcgttggcgggcttggcagcatcatcggatcctatttcggtgttgccctgatcctgctggttcccggtcttgtgaacggtcttgtcgtttcgataagcgaagggctgggcatgcaagtgaacatcgaaacgctcgcccatatcccgaacgcggtctatggcgcgctgatcgtcgttatccttctgatcgaaccgcttggtctggggaaactctacggcaacatcagggactacctgatggtctggcccttcgatcagttcaagaaatga

SEQ ID NO: 61030 - protein, 357 aa, Oceanicola batsensis HTCC2597
MFYRLSGVHHANYVSDSRIFKVPADRNLAAFILLLGLAAPFIIPSLYLNSYMLPWLIWTAAALGLNLVTGWAGQLHLGYAAVMAVGAYSAIHAARFGVPWEFALIIGGLMSSVIGSLFAFAALRVKGLYLALTTLAMQFVMDWVLTHSPMISGGSHASLQSPTLALLGQDITSDTGYYYVAFGWCVLVTIFMLNLKRCGLGRALVAVREKDFAAAILGVNSFYYKILAFATSSFIAGVSGALLVATFFFLAAPEQFSVAVSIQVLAMVIVGGLGSIIGSYFGVALILLVPGLVNGLVVSISEGLGMQVNIETLAHIPNAVYGALIVVILLIEPLGLGKLYGNIRDYLMVWPFDQFKK

SEQ ID NO: 61031 - DNA, 1401 bp, Xanthobacter autotrophicus Py2
  CDS (1)..(1401): transl_table=11
gtggatggtggccggcttcgtcgccatcgccgcggcggcggtttggggctcgaaggtgggggtgcagttctccctcgtctacgtggcgctcaaggccttgccggtcatcatcgtcggcggcctcacctccatccccggcgccatcgtcggcggcctgctcatcggcgccggagagaagctggccgaggtctatctcggtccttccgtcggcggcgggatcgagcactggtttgcctatgtcgtcgccctcctggtcctcctggtgcgcccgcaggggctattcggggaccgtatcatcgagcggatctgagcatgttctaccgtgaggccggccacttccacgacaagtaccgggacgagatggcgatcttccagatccgggaggaccgcatcggcatccgcctgctgctgatcgctgcctttgtcgccgtgccgcttctccacgcggccggcgtgccgcccttcgccggcgactatctcttcagcgcggtgctgacgccgctcctgatcctcgccaccgccgccatcggcctcaacctgctcgtcggctattgcgggcagatctccctcggcgccggtgccttcatgggggtgggggcctacgctgcctacaacgtgtcggtccacctgccgggactgccgctcctcgccaccttcctgctggcgggtgcggcaagcgccgtcgtgggcctcgtcttcggcatcccctcgctgcgcatcaagggtctctacctcgcggtcgcgacgctcgccgcgcaattcttcctggactgggcgttcctgcgcgtcgggtggatcaccaattattccgcctccggctcggtcactgcgccgcccctcgtcatcgccggctggcacgtggactcgccggtggaacgctatctgctcgtcctcgccgtcgcggccatcgtggcgctcggcgccgcgaacctggtgcggggcaatctcggccggcaatggatggcgatccgcgacatggacatcgcggccgaaatcatcggcatccgccccatgcagtcgaagctgaccgcgttcgccatctcctccttcatcctggggctcgcgggggcgctgtgggcgttcgtcaacctgcgcgcgtgggagccctacgccttctccatcgaccgctcgttccagctgctgttcatcgtcatcatcggcgggctcggctccatcatcggctgctttttgggggcggccttcatctggctgctgccgctcgcggtcgaaggcatcccgcgctggctctcgatccccatcgctgcggatgccgcggcgaacctgacgctcggcgtgttcggcgcgctgatcctcatcacgctgatcttcgagccccacggcctcgcccgcatctgggccatcatgaaacacaaactccgacgctggcccttcccctactga

SEQ ID NO: 61032 - protein, 466 aa, Xanthobacter autotrophicus Py2
MDGGRLRRHRRGGGLGLEGGGAVLPRLRGAQGLAGHHRRRPHLHPRRHRRRPAHRRRREAGRGLSRSFRRRRDRALVCLCRRPPGPPGAPAGAIRGPYHRADLSMFYREAGHFHDKYRDEMAIFQIREDRIGIRLLLIAAFVAVPLLHAAGVPPFAGDYLFSAVLTPLLILATAAIGLNLLVGYCGQISLGAGAFMGVGAYAAYNVSVHLPGLPLLATFLLAGAASAVVGLVFGIPSLRIKGLYLAVATLAAQFFLDWAFLRVGWITNYSASGSVTAPPLVIAGWHVDSPVERYLLVLAVAAIVALGAANLVRGNLGRQWMAIRDMDIAAEIIGIRPMQSKLTAFAISSFILGLAGALWAFVNLRAWEPYAFSIDRSFQLLFIVIIGGLGSIIGCFLGAAFIWLLPLAVEGIPRWLSIPIAADAAANLTLGVFGALILITLIFEPHGLARIWAIMKHKLRRWPFPY

SEQ ID NO: 61033 - DNA, 1068 bp, Vibrio sp. Ex25
  CDS (1)..(1068): transl_table=11
atggctcaacttagcatgcgcccatgtggggattttcgaaccacatacaaaagtgatacgccaatttttgaaaccaaaaccatcagaagccttgcgattgctggtgttatcgccatgctggcagcaccgctggtcttggatatttacttcctcaacctgtttattcagattgcatacctcggtatcgcggcattgggcttaaacattctggttggttttacaggacaaatctcgctaggtcacggtgcgttctttggctttggcgcctttgcatcggcttggctaaataaccagttcaacattccagtcgtgtttgcgattccgcttgcgggttacttaaccatgattgtcgggatgctctttggtctgccagctgcgcgaattaaaggcttatacctcgcgattgcgactttggctgcgcagtttattttagaggacttctttgctcgcgcagactggttcagtggcggctcatatggtgctggtgcaaaccctataaatctgtttggctttgagtttacgaccgatgaaagcttcttctacattgctctgtttgcgttgatctttatgtacatgtgggcatcgaacttgatccgttctcgtgatggtcgcgcgtttgtctcggtacgagatcactacctgtcggcagaaatcatgggcatcaacctaaccaaatatcgtctgctctcatttggtgtgtgcgcattctatgcgggcatcgggggcgcactctacggacattatctaggttttgtatcagcagaaggtttcaccatcatgatgtctatccagttcttggcaatgatcatcattggtggcttgggttccgtcaaaggcacattgatgggcacgatatttatcgtattactgccagaagtgttggagtttggcgtgacggggttggctgcgtttagcaataacacttcgttcgttgatgggcttgcttacttcaaagaaatggcgatcggcttggtcatcatgctgttccttattttcgaacctcaagggttatcgcatcgctggcaacagattagagcatattggaaacactatccgttctcatattaa

SEQ ID NO: 61034 - protein, 355 aa, Vibrio sp. Ex25
MAQLSMRPCGDFRTTYKSDTPIFETKTIRSLAIAGVIAMLAAPLVLDIYFLNLFIQIAYLGIAALGLNILVGFTGQISLGHGAFFGFGAFASAWLNNQFNIPVVFAIPLAGYLTMIVGMLFGLPAARIKGLYLAIATLAAQFILEDFFARADWFSGGSYGAGANPINLFGFEFTTDESFFYIALFALIFMYMWASNLIRSRDGRAFVSVRDHYLSAEIMGINLTKYRLLSFGVCAFYAGIGGALYGHYLGFVSAEGFTIMMSIQFLAMIIIGGLGSVKGTLMGTIFIVLLPEVLEFGVTGLAAFSNNTSFVDGLAYFKEMAIGLVIMLFLIFEPQGLSHRWQQIRAYWKHYPFSY

SEQ ID NO: 61035 - DNA, 1074 bp, Alteromonadales bacterium TW-7
  CDS (1)..(1074): transl_table=11
atgtctagcttaactatgcgcccgtgtggcgactttagaaccagttacaaacaagacaataccatttacgaaactaaaaccattcgcaacgtagctattattgccattgcactactatgctgcgcaccatttttggtcgatgcatactttttaacgctgtttattcaaatttcatatttaggcattgcggcactaggccttaacattttagtcggttatacagggcaaatatcattaggccatggcgcattttttggctttggtgcgtttgcctcagcttggctgaatatgtccttcgggatccctgttttattgtgtatccctatcgcaggctttttaactatgttggtaggcatgctatttggccttcctgcttcacgcattaaagggctttatttggctattgccactttagccgctcagtttattctcgaagatttttttgctcgtgcccaatggtttactggtggctcagcaggatcgtcagccgacccagtctctatttttggctttgtgtttaataccgaccaaagctttttttacattgcgttatttgcccttgtctttatgtatatctggggatgtaacttaatgcgcagccgagaaggtcgcgcctttattgcagtaagagatcattacctgtcagcagaaattatgggaataaaacttaacaagtaccgtttgctgtcatttggggtttcatctttctatgcgggtattggcggtgcgttatacgctcattacctaggatacgtttcagctgaaggatttacattattcatgtcgattcaatttctagcgatgatcatcattggtggcttaggttctattaaaggcacccttatgggcgttgtatttatggtgtttttacctgaaatgttagaaagcggcgttggattaatgaaaatgactgattggggcaatattcctatggtggttgatggccttgcttacattaaagaaatggctataggcctagtcattattttatttttaatttttgaaccagaaggcatggcgcatcgctgggcacaaattaaaaactattggaagttttacccgttttcttactaa

SEQ ID NO: 61036 - protein, 357 aa, Alteromonadales bacterium TW-7
MSSLTMRPCGDFRTSYKQDNTIYETKTIRNVAIIAIALLCCAPFLVDAYFLTLFIQISYLGIAALGLNILVGYTGQISLGHGAFFGFGAFASAWLNMSFGIPVLLCIPIAGFLTMLVGMLFGLPASRIKGLYLAIATLAAQFILEDFFARAQWFTGGSAGSSADPVSIFGFVFNTDQSFFYIALFALVFMYIWGCNLMRSREGRAFIAVRDHYLSAEIMGIKLNKYRLLSFGVSSFYAGIGGALYAHYLGYVSAEGFTLFMSIQFLAMIIIGGLGSIKGTLMGVVFMVFLPEMLESGVGLMKMTDWGNIPMVVDGLAYIKEMAIGLVIILFLIFEPEGMAHRWAQIKNYWKFYPFSY

SEQ ID NO: 61037 - DNA, 1113 bp, Candidatus Desulfococcus oleovorans Hxd3
  CDS (1)..(1113): transl_table=11
atgccggggtcacccggacatcttcattctttttcatacgggatactgctcatggatatgaagcgcaattattatgaggatgtcgagattttttcctcgggcgcggttgttttctggtttgtggtcctggggtgttttctggcggccttcccttttctgtgcaagcactacaattacaactactacatctatgtggccaactacatcgccattcagattatcgtggtggtgggcctcaacatgctggtgggatttaccggtcagatatccctgggccatgccggtttttatgccgtgggggcctatggcaccatcaccctgatgaccgaggctcacctgccttttctggcggccctggtgcttgcggccctgatcgcggggctgctggggtttctgctgggcctgcccgcccttcggctggaagggccctacctggctattgccaccctgggcttcggcctcaccatcacccaggtgatcggcaaaatcgagttgctgggggggcgccaggggcttaacgccccggacctggtggttttcgggcgcgagctcaagaccgaccaggatttttattttctggcggtgcccattgccgtgctgctggtgctgtttgcccggaatgtgatcaaaacaaaggtaggccgggcctttatcgccattcgggacgccgacatcgccgccgaaaccatgggcatcaacctggtgttctacaagaccctggcctttgccgtcagcgccttttacgccggcattgccggcgggctgtacgcctttgtgctgggctttatcgaccccgagctcttcagcctgttcctttccatcatgtttctcaccatggccgtggtggggggcctggggtcgatcatgggtcccattgccggcgccctggtgctgggctgggtggacctggagcttcgcaatatcttaagcattccctaccttggcgactggctgcggagcctctcctcctcctatttttctttgaccggggtctccaatattcagttcatcgtctttggggtgatcctggtcagtatcatgctgtttgagccgcttggtatttacggcatctggatacgagcgaaaaaatactggaaaacatggccgttttaa

SEQ ID NO: 61038 - protein, 370 aa, Candidatus Desulfococcus oleovorans Hxd3
MPGSPGHLHSFSYGILLMDMKRNYYEDVEIFSSGAVVFWFVVLGCFLAAFPFLCKHYNYNYYIYVANYIAIQIIVVVGLNMLVGFTGQISLGHAGFYAVGAYGTITLMTEAHLPFLAALVLAALIAGLLGFLLGLPALRLEGPYLAIATLGFGLTITQVIGKIELLGGRQGLNAPDLVVFGRELKTDQDFYFLAVPIAVLLVLFARNVIKTKVGRAFIAIRDADIAAETMGINLVFYKTLAFAVSAFYAGIAGGLYAFVLGFIDPELFSLFLSIMFLTMAVVGGLGSIMGPIAGALVLGWVDLELRNILSIPYLGDWLRSLSSSYFSLTGVSNIQFIVFGVILVSIMLFEPLGIYGIWIRAKKYWKTWPF

SEQ ID NO: 61039 - DNA, 1080 bp, Pseudomonas putida GB-1
  CDS (1)..(1080): transl_table=11
atgaaccagccactgcttgtcaccgctacgcaaaaggccgggccacgcctgaccctggccatcggcgccgtcgtcgtgctgctgctcgtcgccctgccgctgctctcgctgctgccggcggaccatgccctgcaggtgtcggcctacaccctgaccctggtcggcaagatcctctgttacgccatcgtcgccctggccctggacctggtctggggctatgccgggctgctgtcgctgggccatggcctgttcttcgccctgggcggctatgccatgggcatgtacctgatgcgccaggcggccggcgacggcctgccggggttcatgacctttctttcgtggaccgagctgccgtggtactgggccggcacccagcattttgcctgggccctgtgcctggtggtgctggcaccggggctgctggcgctggtgttcggctggttcgccttccgctcgcggatcaagggcgtgtacttctcgatcatgacccaagccctgaccttcgccggcatgctgctgttcttccgcaacgaaaccggttttggcggcaacaacgggtttaccaacttccgcaccatcctcggcttcgacattaccgcgcaaggcactcgcgcggtgctgttcctgctcacggtcggccttttgctggccagcttgtacctgtgctggcgcctgacccgcagcaagttcggccgcctgctcacggcggtgcgcgatgccgaaaaccgcatgatgttctgcggctacgacccacgcggcttcaagctgctggtgtgggtcctgagcgccgtgctgtgcggcctggccggggcgttgtatgtgccacaggtgggcatcatcaaccccagcgaaatgtcgccgaccaactccatcgaagccgccgtgtgggtggccttgggcgggcgcggcacgctaatcggcccgttgctcggcgccggcctggtcaatggcatgaaaagctggttcaccgtggccttcccggagttctggctgttcttcctgggcgcactgttcattcttgtcaccctgtacctgcccaagggcgtggtcggcctgttgaagaaaaggagccagccatga

SEQ ID NO: 61040 - protein, 359 aa, Pseudomonas putida GB-1
MNQPLLVTATQKAGPRLTLAIGAVVVLLLVALPLLSLLPADHALQVSAYTLTLVGKILCYAIVALALDLVWGYAGLLSLGHGLFFALGGYAMGMYLMRQAAGDGLPGFMTFLSWTELPWYWAGTQHFAWALCLVVLAPGLLALVFGWFAFRSRIKGVYFSIMTQALTFAGMLLFFRNETGFGGNNGFTNFRTILGFDITAQGTRAVLFLLTVGLLLASLYLCWRLTRSKFGRLLTAVRDAENRMMFCGYDPRGFKLLVWVLSAVLCGLAGALYVPQVGIINPSEMSPTNSIEAAVWVALGGRGTLIGPLLGAGLVNGMKSWFTVAFPEFWLFFLGALFILVTLYLPKGVVGLLKKRSQP

SEQ ID NO: 61041 - DNA, 1302 bp, Pseudomonas putida GB-1
  CDS (1)..(1302): transl_table=11
atgtccgttgccaaaactgcctctgttagcgaaaccaagggtttcgacattaaacgcagcctgctggagaccctcgtcgctggcctgctggcactcatcgtgtttggcccggtcgttggcgtggtgctcgacggctacaccttcaatgccgagccgcgccgcgtggcgtggctggtcggtggtgtgatggtcgggcgcttcctgctcagcctgttcctgcagaccgcccctgggcagcgcatgctccagagcttcgacagcggtggctcgggcgtgcatgtgaatgccccggactacaagtcgcgcctgcgctacatcatccctgcactgatcgtgattgccatcgtcttcccgatcttcgccaacaagtacctgctgaccgtggtcatcctcggcctgatctacgtgctgctgggccttggcctgaacatcgtggtcggcttggccggcctgctcgacctgggctacgtggcgttctacgccatcggtgcctacggcctggcgctgggttaccagtacctcggcctgggcttctggagcgtgctgccgctggcggccatcgctgcggcgctggcgggctgcatccttggtttcccggtgctacgaatgcacggtgactacctggcgatcgtgaccctgggctttggcgagattatccgcctggtgctgaacaactggctgtcgttcaccggtggccccaacggcatgccggcgccttcgccaaccttcttcggcctggagttcggccgccgggccaaggatggcggggtgccgatccacgagttcttcggcttcgagtacaacgccaacctcaagttcgtgttcatctacgccgtgctgttcctggttgtgctggccgtgctgtacatcaagcaccgcctgactcgcatgccggtcggccgggcctgggaagcgctgcgcgaagacgaaatcgcctgccgttcgatgggcttgaaccacgtgctggtcaagctttcggcgtttaccttgggtgcctccaccgccggcttggccggggtgttcttcgccacctaccagggcttcgtcaacccgtcgtcattcaccttcttcgagtcggcgctgatcttggccatcgtcgtactgggtggcatggggtcgaccgtgggcgtggtcatcgcggcgttcgtgcttacagtggcgccggagctgctgcgcagcttctccgagtaccgggtgttgctgttcggcgtgttgatggtgctgatgatgatctggcgaccgcgtgggctgatccgcatcagccgtaccggtgtgaccccgcgtaaaggagtggcgccatga

SEQ ID NO: 61042 - protein, 433 aa, Pseudomonas putida GB-1
MSVAKTASVSETKGFDIKRSLLETLVAGLLALIVFGPVVGVVLDGYTFNAEPRRVAWLVGGVMVGRFLLSLFLQTAPGQRMLQSFDSGGSGVHVNAPDYKSRLRYIIPALIVIAIVFPIFANKYLLTVVILGLIYVLLGLGLNIVVGLAGLLDLGYVAFYAIGAYGLALGYQYLGLGFWSVLPLAAIAAALAGCILGFPVLRMHGDYLAIVTLGFGEIIRLVLNNWLSFTGGPNGMPAPSPTFFGLEFGRRAKDGGVPIHEFFGFEYNANLKFVFIYAVLFLVVLAVLYIKHRLTRMPVGRAWEALREDEIACRSMGLNHVLVKLSAFTLGASTAGLAGVFFATYQGFVNPSSFTFFESALILAIVVLGGMGSTVGVVIAAFVLTVAPELLRSFSEYRVLLFGVLMVLMMIWRPRGLIRISRTGVTPRKGVAP

SEQ ID NO: 61043 - DNA, 1020 bp, Pseudomonas putida GB-1
  CDS (1)..(1020): transl_table=11
atgagcgagaaaaacccattgccagtcgccaagggccgcgccccggcactgctgttgctggtggttgccagcctggtggcgctgccgttgctgctgccttcggccaccctggccaccgaaatcctgatctttgccctggccgccctggcctgcaacctgctgctcggctacaccggcctgctgtcgttcggccagggcatcttctttggcgtgggcgcctatggcgcggcgctgctgatgattcacctgcactggggcatgttcgccgcgctgcttggcgcagccgtgttcggcgccttcctggcactgctggtgggcgcattggcgatccgccgcacgggcatctacttcgtcatgctgaccctggccttcagccagatggcctatttcctggcttataccctaagcggctggaccggcggcgacaacggcctgctcgatgtgccccggcccaacatcgaaatcgccggccatgtgctggtcgacctggctgaccctcggcatttctatgtgttcgtcgccgggctgttcctgttgattttcgccgctgccttgcgggtgatccgctcgccattcggcagcaccctgctggctatccgcgagaacgagacccgcgctgccgccattggctacgacacccgccacttcaagatcctggtgttcatgctgtcgggcgccatcaccggcatcgccggcgcgctgtacgccatgctgctgcactttgcgccgctgtcgaacatcgacctgatgatgagcgagaacatcctgatcatgaccatcgtcggcggcaccggctcgttgttcggctcactgctgggggccggcgccatcgtgctgctgggtgacgtgctgtcggagctgtggccacgctggctgatgctgctgggggtcatcctgattctggtggtggtgttcatgcggggcggcctgtggggtggactggccgaactgggcaagcgcctgctggccacccgcagtgccaatgacaaatcccaggccaagaccaaggagaccctatga

SEQ ID NO: 61044 - protein, 339 aa, Pseudomonas putida GB-1
MSEKNPLPVAKGRAPALLLLVVASLVALPLLLPSATLATEILIFALAALACNLLLGYTGLLSFGQGIFFGVGAYGAALLMIHLHWGMFAALLGAAVFGAFLALLVGALAIRRTGIYFVMLTLAFSQMAYFLAYTLSGWTGGDNGLLDVPRPNIEIAGHVLVDLADPRHFYVFVAGLFLLIFAAALRVIRSPFGSTLLAIRENETRAAAIGYDTRHFKILVFMLSGAITGIAGALYAMLLHFAPLSNIDLMMSENILIMTIVGGTGSLFGSLLGAGAIVLLGDVLSELWPRWLMLLGVILILVVVFMRGGLWGGLAELGKRLLATRSANDKSQAKTKETL

SEQ ID NO: 61045 - DNA, 1257 bp, Pseudomonas putida GB-1
  CDS (1)..(1257): transl_table=11
atgaacaaaaatctcaaacaggcgttcttcagcgccttgctggtatgggccgtggccttcccggtactgggcctgaaactgagcatcgacggcatcagcctggccgtgcacagccagggctcgttcaccatcagcatcatcgccgtgtgttcggtgctgatgttcctgcgtgtgctgttcgacaagcagtggagctcggtgatgggccgccgttcggatcgcaagctgatcccgccggccgtcagcaactacctgaccctgcccaagacccagcgctatgtgatcatcgggttgatcgtggcggcactggtgtggccgttcttcggctcgcgcggtgcggtcgacattgccacgctgatcctgatctacgtgttgctgggccttggcctgaacatcgtggtcggcctggcgggcctgctcgaccttggctatgtcggcttctacgccgtcggcgcctacagctacgccatgctctcgcactacctgggctggagcttctgggtgtgcctgccgattgccggcctgatggccgccaccttcggcttcctgctcggcttcccggtactgcgcctgcggggtgactacctggcgatcgtgaccctcggcttcggcgagatcatccgcctgttcctgcgtaacctcaccgactggaccggcggccccaacggcatcagcaacatccccaagccggagttcttcggcctgaccttcgaacgccgcgccgccgagggcatgcagaccttccacgagttcttcggcctggaatacaactcgatcaacaaggtcatcttcctctacctggtggccctgctgctggcgctgctggcgctgttcgtcatcaaccgcctgctgcgcatgccgatcggccgcgcctgggaagccctgcgcgaagacgagatcgcctgccgcgcactgggcctcaacccgaccgtgatcaaactctcggcgttcaccctgggtgcctgcttcgccggtttcgccggtagcttcttcgccgcgcgccaaggcctggtgacgccggagtcgttcaccttcatcgagtcggcgatcatcctcgccatcgtcgtgcttggcggcatgggctcacaactgggcgtgattctcgcggccatcgtgatgatcctgctgcccgagctgatgcgtgagttcagcgaataccggatgctgatgttcggtgcgctgatggtgttgatgatgatctggcgtccgcaaggcctgctgcctatgcaacgtccacacatggagctgcgtcgatga

SEQ ID NO: 61046 - protein, 418 aa, Pseudomonas putida GB-1
MNKNLKQAFFSALLVWAVAFPVLGLKLSIDGISLAVHSQGSFTISIIAVCSVLMFLRVLFDKQWSSVMGRRSDRKLIPPAVSNYLTLPKTQRYVIIGLIVAALVWPFFGSRGAVDIATLILIYVLLGLGLNIVVGLAGLLDLGYVGFYAVGAYSYAMLSHYLGWSFWVCLPIAGLMAATFGFLLGFPVLRLRGDYLAIVTLGFGEIIRLFLRNLTDWTGGPNGISNIPKPEFFGLTFERRAAEGMQTFHEFFGLEYNSINKVIFLYLVALLLALLALFVINRLLRMPIGRAWEALREDEIACRALGLNPTVIKLSAFTLGACFAGFAGSFFAARQGLVTPESFTFIESAIILAIVVLGGMGSQLGVILAAIVMILLPELMREFSEYRMLMFGALMVLMMIWRPQGLLPMQRPHMELRR

SEQ ID NO: 61047 - DNA, 1008 bp, Marinobacter sp. ELB17
  CDS (1)..(1008): transl_table=11
atggtcgcgaaactctccgaattccgtttgaagggcttggtgtttttggccattgtggtttttgctttgcctttgttcatttccaacccgtttcattacagcctggccacgcaaatcgcgttgattgccggtgccgtggtggggcttaacctgctagtaggctttgccggccaaatcagcctggggcatgctggcttttttggtctgggtgcctatttcagcgcgatcatgaccagtcattatggctggtctgccataccggcgctgattgttggcgcttttggtgtgggcattattgcctgggtggtcggccgcccgattctgcgcctgaaaggccattacctatctatggcaaccctcgccgtgggcttcattattgccatcattttgaataatgagcgggagatgacgggtgggccggatggtatgccggtgcctgcctttgatgtgtttggctgggagcttagcccatttggccaatactccctgtttggcatggatatcagcggtgatctggcctggtacctttttgcaggcgtggtgctgttggtcgccgtctggctggcacagaacctgattgactcgcctatcggtcgcgccttgcgctcggtacacggctcagaggtggcagccagcgtggtgggtgttaacaccacgaagtacaagagcctggtgtttgttatctcggcagtttacgccagcgtaatgggtgcgctttacgcgcattttcagggctttataacgcccgcagtggcaggttttgagttttccattttgttgatcacgatggtggtgctgggcggcatggggtcaaccataggggtgatcattggcgctgtggtgctggagttactgccgcaagtgctggctgattttcaagagtttgagatggtgctgtttggtttgattctgatgctgacgatgattttcatgcccaaagggctgcttccaacggtggctaatttcctggcaaaacgacgctcaaagtccgccggaggtgacgcatga

SEQ ID NO: 61048 - protein, 335 aa, Marinobacter sp. ELB17
MVAKLSEFRLKGLVFLAIVVFALPLFISNPFHYSLATQIALIAGAVVGLNLLVGFAGQISLGHAGFFGLGAYFSAIMTSHYGWSAIPALIVGAFGVGIIAWVVGRPILRLKGHYLSMATLAVGFIIAIILNNEREMTGGPDGMPVPAFDVFGWELSPFGQYSLFGMDISGDLAWYLFAGVVLLVAVWLAQNLIDSPIGRALRSVHGSEVAASVVGVNTTKYKSLVFVISAVYASVMGALYAHFQGFITPAVAGFEFSILLITMVVLGGMGSTIGVIIGAVVLELLPQVLADFQEFEMVLFGLILMLTMIFMPKGLLPTVANFLAKRRSKSAGGDA

SEQ ID NO: 61049 - DNA, 1044 bp, Marinobacter sp. ELB17
  CDS (1)..(1044): transl_table=11
atgcgcatcggtgacgccaaacagaactatgaggccgatgaggccattttgagcagttccacgcagaaaatctggttcgcgcttttcctgcttgcgctgctgatttttccgtttatggcggactcctacctgatgtatctgggttgtctggtcggcattgcggttataagtaccacggggctgaacatactgaccggatttactggcctgatctcccttggccaggccggcttcatgggtgtgggcggttataccgtagcctggttatccatgaacaccgggttacctttcccggtaacgctcttgcttgccgggctgctggcggccgccgtcggtattctggtggggctcccttctctccgggtaaaagggctttatttggcgattgctacgctggcagccagtgttttcctgcattttattttcgccgagtgggagtccgtaaccggaggcatgggtggcttgagcctggagccggcgcatctgttcgggctgacgttccagaccgattttgcgatgtacttcatcattgttccgctggcggtactgatggtgcttgccgccaaaaatgtgttccgcacccgcatcggccgggcgtttatcgccatccgggaccgggatatttcggccgaaattctgggtattaacctgctgcattacaaattgatgtcgttcgcgctcagctcattttatgccggtgttgccggtggcctgtttgcttatttcttccgggttgtgacaccggaaagcttcccgctctccatgtctattttctatctggcggccgtcattgttggcggcatgggcaacctgctgggcggaatcctgggtgctgctttcatgacgctgattccagaggttctccaactgctcaccgcagccctgacaccgttttacccgaacgcaccgatattcatgtcgccgatgcttgaaatcattttcggcgcgctgattgtcggtttccttatttttgaaccgcacgggctggcggagatctggcatcgaattcggcgctttttcagcttatggcctttcagaaattag

SEQ ID NO: 61050 - protein, 347 aa, Marinobacter sp. ELB17
MRIGDAKQNYEADEAILSSSTQKIWFALFLLALLIFPFMADSYLMYLGCLVGIAVISTTGLNILTGFTGLISLGQAGFMGVGGYTVAWLSMNTGLPFPVTLLLAGLLAAAVGILVGLPSLRVKGLYLAIATLAASVFLHFIFAEWESVTGGMGGLSLEPAHLFGLTFQTDFAMYFIIVPLAVLMVLAAKNVFRTRIGRAFIAIRDRDISAEILGINLLHYKLMSFALSSFYAGVAGGLFAYFFRVVTPESFPLSMSIFYLAAVIVGGMGNLLGGILGAAFMTLIPEVLQLLTAALTPFYPNAPIFMSPMLEIIFGALIVGFLIFEPHGLAEIWHRIRRFFSLWPFRN

SEQ ID NO: 61051 - DNA, 1074 bp, Magnetospirillum gryphiswaldense
  CDS (1)..(1074): transl_table=11
atgatctcctccagccttatcccctgcggtcagttcaagacctcgtacgccaaggacaccaccattttcgacacgccggtcatgcgggcgtgggcggtgctcagcgtattgttcctgatcgccgcccccagcttcctcaacaattatcacctgagcatcctgatccagatcggcttcatgggcatcgccgccctgggcctcaacatcctggtcggctataccgggcagatctcgctgggccatgccgggttcttcggcttcggcgccttcgcttccgcctggctcaacaattccttcggcgtccccgtggtgctggccatgccgctggccgccgtcatgaccaccgtgctggggctgctgttcggcattcccgccgggcggttgaagggtctgtatctggccatcgccaccttcgcctcgcaattcatcctggaagacttcttcgcccgtgccgattggttctcgggtgggtcgtcgggcgccgccgccgccccggtcaatctgttcggctatgaattgtcgggcgacaagggcttcttctacgtggtgctgttctgggtggtggtgatgttcctgatcgggagcaacctgctgcgcacccgcgacggccgcgccttcatcgccgtgcgcgaccattatctgtcggccgaggtcatgggcatcaacctgaccaagtaccgcatcctgtcgtttggcctgtcgtcgttctatgccgggctgggcggggcgctgtacggccattacctgggcttcgtctcggccgagggcttcaccatcctgatgtccatcgaattcctgggcatgatcatcatcggtggcctgggctcggtcgccggcacgctgatgggcaccaccttcatggtgctgctgccggaagtgatggaaggcggcgtcagcatcgccaaaagcctgatcggcggcgatgtcagctggctgaacgagggtctggcctatatcaagcaggcctccatcggtctggccatcatcttgttcctgatcttcgaacccgacgggttgatccaccgctggcggttgggccgctcgtactggaagctttatccgttctcgtactaa

SEQ ID NO: 61052 - protein, 357 aa, Magnetospirillum gryphiswaldense
MISSSLIPCGQFKTSYAKDTTIFDTPVMRAWAVLSVLFLIAAPSFLNNYHLSILIQIGFMGIAALGLNILVGYTGQISLGHAGFFGFGAFASAWLNNSFGVPVVLAMPLAAVMTTVLGLLFGIPAGRLKGLYLAIATFASQFILEDFFARADWFSGGSSGAAAAPVNLFGYELSGDKGFFYVVLFWVVVMFLIGSNLLRTRDGRAFIAVRDHYLSAEVMGINLTKYRILSFGLSSFYAGLGGALYGHYLGFVSAEGFTILMSIEFLGMIIIGGLGSVAGTLMGTTFMVLLPEVMEGGVSIAKSLIGGDVSWLNEGLAYIKQASIGLAIILFLIFEPDGLIHRWRLGRSYWKLYPFSY

SEQ ID NO: 61053 - DNA, 1296 bp, Pseudomonas putida
  CDS (1)..(1296): transl_table=11
atgggctgcttggcgaacgccaggctgaccgggcgtgaggaggcagtcatgaaaaacctcaagacccagtacctgttgttgattctcggcttcatcgccttgccgttcctggtcgaggccattcccatgctgggccctacctgggtgcgcattcttggctttgccatgctctacgtgctgctggcgttgggcctgaacattgtcatcggttatgccggcctgctcgacatgggctacatcggcttctacgccattggtgcctacctgtacgcactgctggcttcgccccacctgcaaatggccggcctgcttgaggctgtgctggactggccggtgtgggtgatcatcccgttggctgccgtggctgcggccatttgcggggtgctgatcggtgcgccggtactcaagttgcgcggcgattacctggccatcgtcaccctgggcttcggcgagatcattcgcatcttcatgaacaacctggaccagccggtgaacctcaccaacggtccccagggcatcagcaacattgccccgatgcacgtcgacttcggggcatgggcgcacgcgccaggtgccggggcaacgccggtgctgtcgctgcagcaaagctggagcctgttcggcctgcccgtgtcgccggtgatcagctactacctgttcttcctgttcgtcgtcattctctgcatcgtactgtccaagcgcctggaagtgtcgcgtatcggccgcgcctggatggccctgcgcgaagacgaagtggcggccgaggccatgggcctgaacaagcgcaacctcaagctgctggcctttgccatgggggcgacctttggcggggtatccggtgtgctgttctccagctaccagggtttcgtcagccccgaatcgttcaccctgatggagtcgatcatggtcctggccatggtggtgctcggaggcatgggctcgatccggggcgtggtgctgggggcgctgatcctgtcggtgatgcccgaactgttccgcgacctggtcaactgggtccagccgtgggtgatggacaacgtcaccttcatcagtcgcgatatcctgcgcaacgtgctggatgcctcaaccctgcgcatgctggtattcggcctggcgctgatcctggtgatgcgttttcgccccgaaggactctggccgtccagtcgccgccgtgccgaactgcacgatgacgaccctgaagccgagccggcgcctgcggtgctcagcactacaatcaatggaccggccagcgaagcctccttcgaactcccgatcaaacaggcggacaaggcatga

SEQ ID NO: 61054 - protein, 431 aa, Pseudomonas putida
MGCLANARLTGREEAVMKNLKTQYLLLILGFIALPFLVEAIPMLGPTWVRILGFAMLYVLLALGLNIVIGYAGLLDMGYIGFYAIGAYLYALLASPHLQMAGLLEAVLDWPVWVIIPLAAVAAAICGVLIGAPVLKLRGDYLAIVTLGFGEIIRIFMNNLDQPVNLTNGPQGISNIAPMHVDFGAWAHAPGAGATPVLSLQQSWSLFGLPVSPVISYYLFFLFVVILCIVLSKRLEVSRIGRAWMALREDEVAAEAMGLNKRNLKLLAFAMGATFGGVSGVLFSSYQGFVSPESFTLMESIMVLAMVVLGGMGSIRGVVLGALILSVMPELFRDLVNWVQPWVMDNVTFISRDILRNVLDASTLRMLVFGLALILVMRFRPEGLWPSSRRRAELHDDDPEAEPAPAVLSTTINGPASEASFELPIKQADKA

SEQ ID NO: 61055 - DNA, 945 bp, Burkholderia cepacia
  CDS (1)..(945): transl_table=11
atggatatgaatcgccttcgcctgatcctgattggattgttcacgctggcttggctggtgctacccatgcaggccgagcgccatctggtggatgggctgaacttcgcggccttgcttgccatcggcgggctgggtgtgggcatgctgttgggacagtgcggcatcgtcaatctagggcaagcggcgttctacggcattggcgcgtacgccacgggctatggcaccacggtcttggggtggcattggttgccaagcatgctgatgggcatggcgttgagcggcggcgtcgccgcgctcatcggcctcccgatacttcgcctgagcggattttttctggcgttggccacgctggccgtgggcagcatcgccggtgtgttgttcttcgagtgggattggctgacgggcggcacgctcggcgtcggcggcattccaaagcttggcctgatgggcttcgagttgtcggacccgacccgcttccactacttcatctggccgctggttgcgctgcttctctggttggccagcaatctggtcaacagccgccagggcttggccatgcgcgccatgcgggatgccgcgccagccgcggaggtgttgagtgtcgacatgcaccgcatcaagaccgtgatgttcgtgctctgcgccatgctcggtgccttggccgggtccttgtttgcacactatgtgtcgttcgtgagtgtgcagagcttcactgtggagcggtccatcctgtttctgctggtcccggtggtggcgggcgcccggtcggttctcggcatcgtcatcggtgcgctgttcgtcgccctcatgcccgaggcgctcagcaccttgggcgacatgcatcaggttctgttcggcctggcgctggtgctggtagtgaccttactgccgagcggactgacgggcctcgcaacgcgcctggtggcgcgcaaggagggcgcatga

SEQ ID NO: 61056 - protein, 314 aa, Burkholderia cepacia
MDMNRLRLILIGLFTLAWLVLPMQAERHLVDGLNFAALLAIGGLGVGMLLGQCGIVNLGQAAFYGIGAYATGYGTTVLGWHWLPSMLMGMALSGGVAALIGLPILRLSGFFLALATLAVGSIAGVLFFEWDWLTGGTLGVGGIPKLGLMGFELSDPTRFHYFIWPLVALLLWLASNLVNSRQGLAMRAMRDAAPAAEVLSVDMHRIKTVMFVLCAMLGALAGSLFAHYVSFVSVQSFTVERSILFLLVPVVAGARSVLGIVIGALFVALMPEALSTLGDMHQVLFGLALVLVVTLLPSGLTGLATRLVARKEGA

SEQ ID NO: 61057 - DNA, 1041 bp, Agrobacterium tumefaciens
  CDS (1)..(1041): transl_table=11
atgttcaccgtcttttcccgtctggggacaagtacctggatcgtctccgcgatcatccttgcattgaccatattgctgccggcgacgctcgatcttttcaccatccttcaactgacggtcttcgtcgtcatgggcgtactggccttaagccttgctctctcctgggggctgggcggcatcctttgtttcggccaggccgcgttcttcggactggggggctacacctacgccatcgccgtgatcaatttcggtgaaagcacgttgcccgtcctgcttgcgatcgcggtgccggcgctcttcgcgctcgtgctgggctggttcatgttcatgggccgcctttcagaactctatgtcggtgtcattacgctctgcgtttcgctcatcctttataacttcatcaattcgacatcggatccctggtatcggatcggcaaggcgcagatcaacggcttcaacggaatgtcgtcagtgccgaccctgaacattccgttctcgccggatgcctggctgacacccaaccagatgttcgtgctggtcatggtgtccttgctgctcgtctatctgatgtgcaagttcgtcgcggcctcgtcatgggggcgggtcgtcgcggcgacgcgccagaacgaggtgagagcggaactgctgggctatgacacggcgcgtatcaagcttggcatctttgttctcggcagcgcggttgcgggctatgccggatgcctgttcaccaactggaacgcattcatatcgccgaacgtcttctcgttatccatgtccgcccagatcatcatctggatgatcgtcggcgggcgcgaaaccttcatcggacctgtgatcggcgccatcgcgcttcaatatctcacgacccgtctgggcagcagcggcctgaatgccaatgttgcgctcggggcgattctcatgctgttcgtcgtcctcgtgccgcgtggactcgtaccgacgatggggcagtttttagctcgctggtggtcgtccaggcataacgatgcttccggatccgcagtagccaggggagaagcgagatga

SEQ ID NO: 61058 - protein, 346 aa, Agrobacterium tumefaciens
MFTVFSRLGTSTWIVSAIILALTILLPATLDLFTILQLTVFVVMGVLALSLALSWGLGGILCFGQAAFFGLGGYTYAIAVINFGESTLPVLLAIAVPALFALVLGWFMFMGRLSELYVGVITLCVSLILYNFINSTSDPWYRIGKAQINGFNGMSSVPTLNIPFSPDAWLTPNQMFVLVMVSLLLVYLMCKFVAASSWGRVVAATRQNEVRAELLGYDTARIKLGIFVLGSAVAGYAGCLFTNWNAFISPNVFSLSMSAQIIIWMIVGGRETFIGPVIGAIALQYLTTRLGSSGLNANVALGAILMLFVVLVPRGLVPTMGQFLARWWSSRHNDASGSAVARGEAR

SEQ ID NO: 61059 - DNA, 1389 bp, Rhizobium leguminosarum bv
  CDS (1)..(1389): transl_table=11
atggcaaacatcgaaaattctgcaggcaagcccgatgccggacttgtccgcaaaggccttaccgaagctcttttcgccgccgtcctgtcgttcggcatgttcgttctctatgtcggcctcaagactgaccagaacatcagcaacgagctgatcattgtccagcgctggggcctgcttgcgatcttcgtcgcggtcgccgccatcggccgttcgccacggtggttttcgcggccgcatctcgatagccgcaagctggcaaagtcgagacagggcgaactcgacatctcaaccgagaagagcttcttccaccggcatttcctgaagatcgcgctgatcgcgctgctgctttatcccatggtggtggtggcgttcaaaggccctcagggctcgctgacatatgtcgacaatttcggcatccagatcctgatctatgtaatgctcgcctgggggctgaacatcgtcgtcggcctcgccggcctgctcgacctcggttatgtcgccttctatgctgttggcgcttattcctacgcgctgctttcgagctatttcggcctgtccttctgggtgctgctgccgctttcgggcatcttcgcggcactctggggcgtcattctcggcttcccggtgctgcgcctgcgcggcgattacctggccatcgtgacgcttgccttcggtgaaatcattcgtctcgtcctcatcaactggactgaagtgacgaagggcactttcggtatctcgagcatcccgaaggcaacactcttcggcattcccttcgatgcgacggccggcggctttgccaagctctttcacctgccgatctcctcggcctattacaagatcttcctcttttacctgatcctggcgctctgcatgctgacggcctatgtcaccaattccgtgcgccgcatgccgatcggacgcgcctgggaagccttgcgcgaagacgagatcgcctgccgttcgctcggcatcaacacggtcacgaccaagctcaccgcctttgcgacgggcgcgatgtttgccggtttcgccggctcgttcttcgccgcccgccagggcttcgtctcgccggaatccttcgtcttcctggaatcggccgtcattctcgctatcgtcgttctcggcggcatgggttcgttgaccggcatcgcgattgccgccatcgtcatggtcggcggcaccgagttgttgcgcagcatggacttcctaaaactcatctttggacccgattttacgccggaactctaccgcatgttgatcttcggcctcgccatggtcgtcgtcatgctgttcaagccgcgcggcttcgtcggctcgcgtgagccgacagccttcctcagagagcgcaaggcgatatccggaagcttcatcaaggagggccatggttga

SEQ ID NO: 61060 - protein, 462 aa, Rhizobium leguminosarum bv
MANIENSAGKPDAGLVRKGLTEALFAAVLSFGMFVLYVGLKTDQNISNELIIVQRWGLLAIFVAVAAIGRSPRWFSRPHLDSRKLAKSRQGELDISTEKSFFHRHFLKIALIALLLYPMVVVAFKGPQGSLTYVDNFGIQILIYVMLAWGLNIVVGLAGLLDLGYVAFYAVGAYSYALLSSYFGLSFWVLLPLSGIFAALWGVILGFPVLRLRGDYLAIVTLAFGEIIRLVLINWTEVTKGTFGISSIPKATLFGIPFDATAGGFAKLFHLPISSAYYKIFLFYLILALCMLTAYVTNSVRRMPIGRAWEALREDEIACRSLGINTVTTKLTAFATGAMFAGFAGSFFAARQGFVSPESFVFLESAVILAIVVLGGMGSLTGIAIAAIVMVGGTELLRSMDFLKLIFGPDFTPELYRMLIFGLAMVVVMLFKPRGFVGSREPTAFLRERKAISGSFIKEGHG

SEQ ID NO: 61061 - DNA, 1278 bp, Escherichia coli
  CDS (1)..(1278): transl_table=11
atgaaaccgatgcatattgcaatggcgctgctctctgccgcgatgttctttgtgctggcgggcgtctttatgggcgtgcaactggagctggatggcaccaaactggtggtcgacacggcttcggatgtccgttggcagtgggtgtttatcggcacggcggtggtctttttcttccagcttttgcgaccggctttccagaaagggttgaaaagcgtttccggaccgaagtttattctgcccgccattgatggctccacggtgaagcagaaactgttcctcgtggcgctgttggtgcttgcggtggcgtggccgtttatggtttcacgcgggacggtggatattgccaccctgaccatgatctacattatcctcggtctcgggctgaacgtggttgttggtctttctggtctgctggtgctggggtacggcggtttttacgccatcggcgcttacacttttgcgctgctcaatcactattacggcttgggcttctggacctgcctgccgattgctggattaatggcagcggcggcgggcttcctgctcggttttccggtgctgcgtttgcgcggtgactatctggcgatcgttaccctcggtttcggcgaaattgtgcgcatattgctgctcaataacaccgaaattaccggcggcccgaacggaatcagtcagatcccgaaaccgacactcttcggactcgagttcagccgtaccgctcgtgaaggcggctgggacacgttcagtaatttctttggcctgaaatacgatccctccgatcgtgtcatcttcctctacctggtggcgttgctgctggtggtgctaagcctgtttgtcattaaccgcctgctgcggatgccgctggggcgtgcgtgggaagcgttgcgtgaagatgaaatcgcctgccgttcgctgggcttaagcccgcgtcgtatcaagctgactgcctttaccataagtgccgcgtttgccggttttgccggaacgctgtttgcggcgcgtcagggctttgtcagcccggaatccttcacctttgccgaatcggcgtttgtgctggcgatagtggtgctcggcggtatgggctcgcaatttgcggtgattctggcggcaattttgctggtggtgtcgcgcgagttgatgcgtgatttcaacgaatacagcatgttaatgctcggtggtttgatggtgctgatgatgatctggcgtccgcagggcttgctgcccatgacgcgcccgcaactgaagctgaaaaacggcgcagcgaaaggagagcaggcatga

SEQ ID NO: 61062 - protein, 425 aa, Escherichia coli
MKPMHIAMALLSAAMFFVLAGVFMGVQLELDGTKLVVDTASDVRWQWVFIGTAVVFFFQLLRPAFQKGLKSVSGPKFILPAIDGSTVKQKLFLVALLVLAVAWPFMVSRGTVDIATLTMIYIILGLGLNVVVGLSGLLVLGYGGFYAIGAYTFALLNHYYGLGFWTCLPIAGLMAAAAGFLLGFPVLRLRGDYLAIVTLGFGEIVRILLLNNTEITGGPNGISQIPKPTLFGLEFSRTAREGGWDTFSNFFGLKYDPSDRVIFLYLVALLLVVLSLFVINRLLRMPLGRAWEALREDEIACRSLGLSPRRIKLTAFTISAAFAGFAGTLFAARQGFVSPESFTFAESAFVLAIVVLGGMGSQFAVILAAILLVVSRELMRDFNEYSMLMLGGLMVLMMIWRPQGLLPMTRPQLKLKNGAAKGEQA

SEQ ID NO: 61063 - DNA, 1278 bp, Salmonella typhimurium
  CDS (1)..(1278): transl_table=11
atgaaaccgatgcatattgcgatggctctgttctctgcggcgatgttcttcgttctggctggcgtcttcatgggcgtacaactggagctggacggcaccaaactggtggtggataccgccgccgacatccgctggcagtggatctttatcggtacggcagtggtttttttctttcagttgctgcgtccgatgttccagaaagcggtgaagcacgtctccggaccgaagtttattctgccggcgatcgatggctctaccgttaagcaaaagctgtttctgatggcgctgctggttatcgccgtggcatggccgtttatggtgtcgcgcggtagcgtcgatatcgccaccatgaccatgatttatatcatcctcggtctggggctgaacgtggtggtggggctgtccggtctgctggtattgggctacggcggcttttacgccatcggcgcttatacctttgcgctgctcaaccactattatggtttgggtttctggacctgcctgccgctggcgggactggtctccgccgctgctggtttcctgctcggcttcccggtactgcgtctgcgcggcgactatctggcgattgtgacgctcggcttcggcgaaatcgtccgtatcctgctgctcaacaacactgaaattaccggcggcccgaacggcatcagccagatcccgaaaccgacgctgtttggtctggagtttagccgcagcacccgcgaaggcggctgggataccttcagcaatttctttggcgtgaagtacgacccatccgaccgggtcattttcctctatctggtggccctgttgctggtggtcctgtcgctgtttgtcattaaccgcctgctgcgtatgccgctgggccgggcgtgggaagcgttgcgtgaagatgagatcgcctgtcgctcattaggtttaagcccgacgcgcatcaagctgaccgcttttactatcagcgccgcgtttgccggtttcgccgggacgttgtttgccgcccgccagggctttgtcagcccggaatccttcactttcgccgaatccgccttcgtgctggcgattgtggtgctgggcggaatgggctcgcagtttgcggtgatcctggcggcggttctgctggtggtgtcgcgcgagttgatgcgcgacttcaacgaatacagcatgttgatgctcggcggtttgatggtgttgatgatgatctggcgcccgcagggattgctgccgatgacgcgtccgcagttgaagctgaaaagtggtcaggcgaaaggagagcaggcatga

SEQ ID NO: 61064 - protein, 425 aa, Salmonella typhimurium
MKPMHIAMALFSAAMFFVLAGVFMGVQLELDGTKLVVDTAADIRWQWIFIGTAVVFFFQLLRPMFQKAVKHVSGPKFILPAIDGSTVKQKLFLMALLVIAVAWPFMVSRGSVDIATMTMIYIILGLGLNVVVGLSGLLVLGYGGFYAIGAYTFALLNHYYGLGFWTCLPLAGLVSAAAGFLLGFPVLRLRGDYLAIVTLGFGEIVRILLLNNTEITGGPNGISQIPKPTLFGLEFSRSTREGGWDTFSNFFGVKYDPSDRVIFLYLVALLLVVLSLFVINRLLRMPLGRAWEALREDEIACRSLGLSPTRIKLTAFTISAAFAGFAGTLFAARQGFVSPESFTFAESAFVLAIVVLGGMGSQFAVILAAVLLVVSRELMRDFNEYSMLMLGGLMVLMMIWRPQGLLPMTRPQLKLKSGQAKGEQA

SEQ ID NO: 61065 - DNA, 20 bp, Artificial sequence
  primer
atgttcgccctctccaaacg

SEQ ID NO: 61066 - DNA, 23 bp, Artificial sequence
  primer
ttagtagggcaggggccaggtgc

SEQ ID NO: 61067 - protein, 356 aa, Artificial sequence
  consensus sequence
  Variant (3)..(5): Xaa in position 3 to 5 is any amino acid
  Variant (7)..(8): Xaa in position 7 to 8 is any amino acid
  Variant (10)..(13): Xaa in position 10 to 13 is any amino acid
  Variant (15)..(17): Xaa in position 15 to 17 is any amino acid
  Variant (19)..(21): Xaa in position 19 to 21 is any amino acid
  Variant (24)..(50): Xaa in position 24 to 50 is any amino acid
  Variant (51)..(85): Xaa in position 51 to 85 is any or no amino acid
  Variant (87)..(90): Xaa in position 87 to 90 is any amino acid
  Variant (91)..(93): Xaa in position 91 to 93 is any or no amino acid
  Variant (95)..(95): Xaa in position 95 is any amino acid
  Variant (96)..(96): Xaa in position 96 is any or no amino acid
  Variant (98)..(98): Xaa in position 98 is any amino acid
  Variant (101)..(103): Xaa in position 101 to 103 is any amino acid
  Variant (105)..(145): Xaa in position 105 to 145 is any amino acid
  Variant (146)..(198): Xaa in position 146 to 198 is any or no amino acid
  Variant (201)..(203): Xaa in position 201 to 203 is any amino acid
  Variant (205)..(205): Xaa in position 205 is any amino acid
  Variant (207)..(211): Xaa in position 207 to 211 is any amino acid
  Variant (213)..(215): Xaa in position 213 to 215 is any amino acid
  Variant (217)..(226): Xaa in position 217 to 226 is any amino acid
  Variant (228)..(234): Xaa in position 228 to 234 is any amino acid
  Variant (236)..(237): Xaa in position 236 to 237 is any amino acid
  Variant (239)..(255): Xaa in position 239 to 255 is any amino acid
  Variant (256)..(262): Xaa in position 256 to 262 is any or no amino acid
  Variant (264)..(266): Xaa in position 264 to 266 is any amino acid
  Variant (268)..(272): Xaa in position 268 to 272 is any amino acid
  Variant (275)..(275): Xaa in position 275 is any amino acid
  Variant (277)..(279): Xaa in position 277 to 279 is any amino acid
  Variant (280)..(280): Xaa in position 280 is any or no amino acid
  Variant (282)..(284): Xaa in position 282 to 284 is any amino acid
  Variant (286)..(307): Xaa in position 286 to 307 is any amino acid
  Variant (308)..(342): Xaa in position 308 to 342 is any or no amino acid
  Variant (344)..(353): Xaa in position 344 to 353 is any amino acid
  Variant (355)..(355): Xaa in position 355 is any amino acid
LNXXXGXXGXXXXGXXXFXXXGAXXXXXXXXXXXXXXXXXXXXXXXXXXXXXXXXXXXXXXXXXXXXXXXXXXXXXXXXXXXXXXGXXXXXXXRXXGXYLXXXTXXXXXXXXXXXXXXXXXXXXXXXXXXXXXXXXXXXXXXXXXXXXXXXXXXXXXXXXXXXXXXXXXXXXXXXXXXXXXXXXXXXXXXXXXXXXXXGRXXXAXRXXXXXAXXXGXXXXXXXXXXFXXXXXXXGXXGXXXXXXXXXXXXXXXXXXXXXXXXSXXXLXXXXXGGXGXXXXGXXXGXXXXXXXXXXXXXXXXXXXXXXXXXXXXXXXXXXXXXXXXXXXXXXXXXXXXXXXXXGXXXXXXXXXXPXG

SEQ ID NO: 61068 - protein, 19 aa, Artificial sequence
  protein pattern
  Variant (2)..(3): Xaa in position 2 to 3 is any amino acid
  Variant (5)..(6): Xaa in position 5 to 6 is any amino acid
  Variant (7)..(7): Xaa in position 7 is Ala, Asp, Asn, Ser, Thr or Val
  Variant (8)..(8): Xaa in position 8 is Phe, Ile, Leu, Met or Val
  Variant (10)..(12): Xaa in position 10 to 12 is any or no amino acid
  Variant (14)..(16): Xaa in position 14 to 16 is any amino acid
  Variant (19)..(19): Xaa in position 19 is Phe or Tyr
GXXGXXXXGXXXFXXXGAX

SEQ ID NO: 61069 - protein, 24 aa, Artificial sequence
  protein pattern
  Variant (2)..(11): Xaa in position 2 to 11 is any amino acid
  Variant (13)..(14): Xaa in position 13 to 14 is any amino acid
  Variant (15)..(15): Xaa in position 15 is Ala, Gly or Ser
  Variant (16)..(16): Xaa in position 16 is Ala, Cys, Gly or Ser
  Variant (17)..(19): Xaa in position 17 to 19 is any amino acid
  Variant (21)..(21): Xaa in position 21 is Phe, Ile, Leu, Met or Val
  Variant (22)..(22): Xaa in position 22 is Ala, Gly, Ser or Val
  Variant (24)..(24): Xaa in position 24 is Ala, Gly, Ser, Thr or Val
GXXXXXXXXXXFXXXXXXXGXXGX

SEQ ID NO: 61070 - DNA, 858 bp, Thermus thermophilus
  CDS (1)..(858): transl_table=11
atggagcttttcgcccagacccttctcaacggcgtgctgatggccggggtctacgccctggtggccacgggcctcgccctctccctgggggtggtgggcatcgtcaacttcgcccacggggagttcctcatgctcggggcctacctctcctacctcctcttcgccttccgcggcgtggaccccctcctttccctgggcctcgccttcctggccgccttcctggtgggcgcgctgacctaccacggcctgatccgcccggtgctcaaagctccggagctcaaccagatgctcctcaccttcggcctctccgtgttcctgcagaacctggccctcctcctcttcggggcggacacccgggtggtggccccgccctaccaggcggccaccctcgctttgggccccttcttcctgggggcggtgcccctcggggccttcctcctctccctggccctgcttctccttctccaggccttcctcacccgaagccgcctggggcttgcggtgcgggccgtggcccaaaaccgggtggcccccgggcttttagggatagaggcggaggcggtctacctcctcgccttcggcctctcggccgccctggccggggtcgccggggtgatgctctcggtgatgctctacgccagccccacggtgggcttcctcttcaccctaaagtccttcgccatcgtggccttggcggggctcgggaacctcaagggggtgatcccggcggctttggtcctggccctggccgaggccctggtgagcacctacgtccccgggggcggggggctggtggaggccgtcttcttcctggtgctcttcctggccctggtgggccgggcctggagggcggcataa

SEQ ID NO: 61071 - protein, 285 aa, Thermus thermophilus
MELFAQTLLNGVLMAGVYALVATGLALSLGVVGIVNFAHGEFLMLGAYLSYLLFAFRGVDPLLSLGLAFLAAFLVGALTYHGLIRPVLKAPELNQMLLTFGLSVFLQNLALLLFGADTRVVAPPYQAATLALGPFFLGAVPLGAFLLSLALLLLLQAFLTRSRLGLAVRAVAQNRVAPGLLGIEAEAVYLLAFGLSAALAGVAGVMLSVMLYASPTVGFLFTLKSFAIVALAGLGNLKGVIPAALVLALAEALVSTYVPGGGGLVEAVFFLVLFLALVGRAWRAA

SEQ ID NO: 61072 - DNA, 900 bp, Klebsiella pneumoniae subsp. pneumoniae MGH 78578
  CDS (1)..(900): transl_table=11
atggacggcgccatttttctccagcaagtggtcaatggaatgagtcttgggggcatgtacgccctgattgccatcggttatacgatggtttatggcgtgctgcggctgatcaacttcgcccatgcggacgtgatgatggtcggcgcgtttagtacgctgtttttattttcttcggttgggctacccttcggggtagccgttttcctgaccctcgggctgtgcggcctgtttggtatgctgattgaccgggtcgcctatcgtccgctgcgtcaggcctcgaaaatctccatgctgatcactgccatcggcgtcagcttttttctcgaaaacctgtttaacgtactgtttggcggcagctcgcgcttcttctccgcccctgactttttcaaccagacccgggccttcggcagcgtcatcattaccaacgtggcgtggattgtgccgctgatcaccgtcctgctgctgctggcgatcctctggctgctgtaccgcacccgctatgggatggcgatccgcgcggtggcctttgacgtcaacaccgtgcgcctgatgggcattgacgccaaccggatcatctccctggtcttcgccctcggcagtagtctcgcggcgctcggcggcgtgttctactccatcagctacccgacgatcgatcccctgatgggcgtgcttatcggcctgaaggccttcgccgccgccgtgctgggcgggatcggcagcgtcaccggcgcggtgctgggcggctttatcctcggttttaccgaggtggtcgccgtggcgatcttccccgaactgggcggctataaagacgctttcgccttcctgttcttgattctggtcctcttgttccgcccggtcggcattatgggcgacgaacgtctggaaaggagccgtttctga

SEQ ID NO: 61073 - protein, 299 aa, Klebsiella pneumoniae subsp. pneumoniae MGH 78578
MDGAIFLQQVVNGMSLGGMYALIAIGYTMVYGVLRLINFAHADVMMVGAFSTLFLFSSVGLPFGVAVFLTLGLCGLFGMLIDRVAYRPLRQASKISMLITAIGVSFFLENLFNVLFGGSSRFFSAPDFFNQTRAFGSVIITNVAWIVPLITVLLLLAILWLLYRTRYGMAIRAVAFDVNTVRLMGIDANRIISLVFALGSSLAALGGVFYSISYPTIDPLMGVLIGLKAFAAAVLGGIGSVTGAVLGGFILGFTEVVAVAIFPELGGYKDAFAFLFLILVLLFRPVGIMGDERLERSRF

SEQ ID NO: 61074 - DNA, 1575 bp, Klebsiella pneumoniae subsp. pneumoniae MGH 78578
  CDS (1)..(1575): transl_table=11
atgaacgcattgcgtctcatgagtgtgttggcgctattgctgaccttgctgccatggcgggcgcaggccgcggaggcggacgacttcgttgccgccagtcgcagccagcaggcgcagctgttgacccagtgggcggcagcgccgcaggcggatcgtctgccgctgctgcgggcgttgaccaccgagagcctggtgatggacgacggaaaacatgctttccgcacccgacagggcggattacagccattgggcgctgtcgccgcgccgcagggcgaaacccgaccggtccgtctgaccaacaggctgcgcaatctggctgccggcgcgctggccagccaccttattttaagtgacaacgtcacagagcgagcttccgccgcacgaacgctacagcgggaagcgaccccggccatggccgcgctgctgcaacagcggctgcaggcggaaaccgatgataatgtgcggggtctgctggaggtggcgctggcgcgcctgcagctcactcagcctgaggccagcgcgcggctggccgccgtgacgctgctcggccattccgcggacccggaaacccaggcgctgctgatcccctttaccgatgcccagcatgagccggatgcggcggtgcgcgaggcggccagcgatagcctgcaaaagatcaaacatcgtctgctgctcggcgatctgctgggccaggcctttatggggctgtcgctgggctcggtgctgctgctggccgcgctggggctggcgatcacctatggcctgctgggggtgattaacatggcccacggcgagatgttaatgatcggcgcctacagctgctggctggtacagcaggcgctggcgcagctcgcgccgcaatggctggccttttatccgctggtcgcgctgccggtggcgtttctggtgaccgccgggatcggcatggcgctggagcgcaccattattcgtcatctgtatggtcggccgctggaaacgctgctcgccacctgggggatcagcctgatgctaatccagctggtgaggatgctgtttggcgcgcagaacgtggaggtggcaaacccggcctggctctccggcggcgtgcaggtcctgccgaacctgatcctgccgtggaaccggctggcggtgctggcgttcgtcctgctggtgctgtgctttacctggctcatcctgaaccgcacccgtctggggatgaacgtccgcgccgtgacgcagaaccgggcgatggccgcctgctgcggcgtacctaccgggcgggtggatatgctggcctttggcctcggctccggtattgccgggctgggcggcgtggcgctgtcgcagcttggcaacgtcgggcctgaactgggtcagggatacatcatcgactcgtttctggtggtggtgctgggcggcgtcggccagctggccggcagcgtggcggcggcctttgggctgggcattttcaacaaaattctcgaaccgcaaatgggcgcggtgctgggcaagatcctgatcctggtgatgattattctgtttattcagaaacgaccgcagggtctgttcgcgctgaaagggagggttatcgactaa

SEQ ID NO: 61075 - protein, 524 aa, Klebsiella pneumoniae subsp. pneumoniae MGH 78578
MNALRLMSVLALLLTLLPWRAQAAEADDFVAASRSQQAQLLTQWAAAPQADRLPLLRALTTESLVMDDGKHAFRTRQGGLQPLGAVAAPQGETRPVRLTNRLRNLAAGALASHLILSDNVTERASAARTLQREATPAMAALLQQRLQAETDDNVRGLLEVALARLQLTQPEASARLAAVTLLGHSADPETQALLIPFTDAQHEPDAAVREAASDSLQKIKHRLLLGDLLGQAFMGLSLGSVLLLAALGLAITYGLLGVINMAHGEMLMIGAYSCWLVQQALAQLAPQWLAFYPLVALPVAFLVTAGIGMALERTIIRHLYGRPLETLLATWGISLMLIQLVRMLFGAQNVEVANPAWLSGGVQVLPNLILPWNRLAVLAFVLLVLCFTWLILNRTRLGMNVRAVTQNRAMAACCGVPTGRVDMLAFGLGSGIAGLGGVALSQLGNVGPELGQGYIIDSFLVVVLGGVGQLAGSVAAAFGLGIFNKILEPQMGAVLGKILILVMIILFIQKRPQGLFALKGRVID

SEQ ID NO: 61076 - DNA, 975 bp, Klebsiella pneumoniae subsp. pneumoniae MGH 78578
  CDS (1)..(975): transl_table=11
atgacggcggttgaccgggaacggaacccggcggccgtctgcctggcggctggaggggctatgacggcgttttttctgcaacaactgatcaatgggctgacgctgggcgcggtgtacggcttaatcgccatcggctacaccatggtgtatgggatcatcggcatgatcaacttcgcccacggcgaggtgtatatggtctccgcctacctgtgcgccatcggcctggcgctgctctctttcttcgggatccactcctttccgctgctgattttcgccaccctggtgttcaccatcgtggtcaccggcgtatacggctgggcgatcgagcgcatcgcctatcggccgctgcgcaactcgacgcggctggcgccgctgatctcggctatcgggatgtcgctgatcctgcagaactatgtccagctgagccaggggccgaaccagcaggggatcccgacgctgcttagcggcgcgttgcgcatgacggtgggcgatggggtggtgcagatcacctggaccaaggtgtttattctcgtcgcggcgctggtggggatgcttatcctgacctggattattcagtatacccggctggggcgcatctgccgcgccacccagcaggaccggcgcatggcggcgatccttggcatcaataccgaccgggtgatctccctggtgtttgtcatcggcgcggcgatggccggtctggccggcgtgctggtgaccatgaactacggcaccttcgacttctatatcggatttattatcggcatcaaagccttcaccgccgcggtgctgggcgggatcggctcgctgcctggcgcgatgctgggtggtctgctgcttggggtggccgaagcccagttcgccgggctggtgaattcggattacaaagatgtcttttcctttgcgctgctggtggcgatcctgatttttcgcccgcaggggctgctgggacgtccgctggtggccaaggtctaa

SEQ ID NO: 61077 - protein, 324 aa, Klebsiella pneumoniae subsp. pneumoniae MGH 78578
MTAVDRERNPAAVCLAAGGAMTAFFLQQLINGLTLGAVYGLIAIGYTMVYGIIGMINFAHGEVYMVSAYLCAIGLALLSFFGIHSFPLLIFATLVFTIVVTGVYGWAIERIAYRPLRNSTRLAPLISAIGMSLILQNYVQLSQGPNQQGIPTLLSGALRMTVGDGVVQITWTKVFILVAALVGMLILTWIIQYTRLGRICRATQQDRRMAAILGINTDRVISLVFVIGAAMAGLAGVLVTMNYGTFDFYIGFIIGIKAFTAAVLGGIGSLPGAMLGGLLLGVAEAQFAGLVNSDYKDVFSFALLVAILIFRPQGLLGRPLVAKV

SEQ ID NO: 61078 - DNA, 927 bp, Klebsiella pneumoniae subsp. pneumoniae MGH 78578
  CDS (1)..(927): transl_table=11
atgtccgagcagtttctctattttctgcagcagatgtttaacggcgtcacgctgggcagtacctatgcgctgatcgccatcggctatacgatggtgtacggcattatcggcatgatcaacttcgcccacggcgaggtctatatgattggcagctatgtctccttcatgatcatcgccgcgctgatcatgatgggcattgacactagctggctgctggtcgccgccggattcgtgggcgccattgtgattgccagcgcctacggctggagcattgagcgcgtggcctatcggccggtgcgtaactccaagcgcctgattgcgctgatctccgccatcgggatgtctatcttcctgcagaactacgtcagcctgacccagggctcccgcgacgtggcgctgccgagcttgtttaacggccagtgggtcgtcggccacagcgacagcttctccgcgacgatcaccaccatgcaactggtgatctgggtggtgacctttatcgccatgctggccctgacgctgtttattcgctactcgcggatggggcgcgcctgccgcgcctgcgcggaagatctgaaaatggccagcctgctcgggattaacaccgaccgcgtcattgccctgacctttgtcatcggcgcagcgatggcggcggtggccggcgtgctgctggggcagttctacggcgtgattaacccctacatcggctttatggccgggatgaaggcgttcaccgccgccgtgctcggcgggatcggcagtatccctggcgcgatgatcggcggcctgatcctgggtattgccgaggcgctctcttccgcctatctcagcaccgaatataaggacgtcgtttccttcgcgctgctgattctggtgctgttagtgatgccgaccggcattctgggccgcccggaggtggaaaaagtatga

SEQ ID NO: 61079 - protein, 308 aa, Klebsiella pneumoniae subsp. pneumoniae MGH 78578
MSEQFLYFLQQMFNGVTLGSTYALIAIGYTMVYGIIGMINFAHGEVYMIGSYVSFMIIAALIMMGIDTSWLLVAAGFVGAIVIASAYGWSIERVAYRPVRNSKRLIALISAIGMSIFLQNYVSLTQGSRDVALPSLFNGQWVVGHSDSFSATITTMQLVIWVVTFIAMLALTLFIRYSRMGRACRACAEDLKMASLLGINTDRVIALTFVIGAAMAAVAGVLLGQFYGVINPYIGFMAGMKAFTAAVLGGIGSIPGAMIGGLILGIAEALSSAYLSTEYKDVVSFALLILVLLVMPTGILGRPEVEKV

SEQ ID NO: 61080 - DNA, 852 bp, Xanthobacter autotrophicus Py2
  CDS (1)..(852): transl_table=11
atgcttcaggcccttgtcgatggtctcctcctgggtggcgtctatggcgtcatcgccaccggcctctcgctggtgttcggcgtgctcggggtggtcaatttcgcccatgccgaattcctcatgctcggaatgtacgtggcctggttcgcctggcgctatctggggctcgatccgctgatcggatcggtgctgtccttcgtcgtggtgttcgccgtgggctatggggtccagcgcacgctcattcagcgcgtgctgaaggcgccgccggcggcgcaggtttttctcaccgtgggcctgatgatcgtcatcgagaatgccgctctgatggtcttcggctccgacttccggtcggtgagcgtgccctatcaggtggaaggctacaggctcggcgacatcttcatcggcgcgccctacctctacgccttcatcgccgccgtcattctggccgccgcactttggctgttcctcgaccgctcctggatgggccgggccatccgcgccgtggcgcaggatcccatggccgcgacgctggtgggcgtggatacacggcgcacctatgggctggccttcggcctcggcgtagccctcaccgccttcggcggcgcggtcatcctgccctacatcacggtcagccccaccatcggcgggcagttcgtggtgctcatgttcacggtggtggtgctgggtggcctgggctcggtggcgggggcgctggcgggcgggatcatggtgggcatcgtgcagtccttgtccaccctcgtcttccccatccagctgcagaacctctgcctgttcgtgatcttcatcgccgttctcgccctgcgcccgcagggcctcatcaagggcgcctga

SEQ ID NO: 61081 - protein, 283 aa, Xanthobacter autotrophicus Py2
MLQALVDGLLLGGVYGVIATGLSLVFGVLGVVNFAHAEFLMLGMYVAWFAWRYLGLDPLIGSVLSFVVVFAVGYGVQRTLIQRVLKAPPAAQVFLTVGLMIVIENAALMVFGSDFRSVSVPYQVEGYRLGDIFIGAPYLYAFIAAVILAAALWLFLDRSWMGRAIRAVAQDPMAATLVGVDTRRTYGLAFGLGVALTAFGGAVILPYITVSPTIGGQFVVLMFTVVVLGGLGSVAGALAGGIMVGIVQSLSTLVFPIQLQNLCLFVIFIAVLALRPQGLIKGA

SEQ ID NO: 61082 - DNA, 873 bp, Xanthobacter autotrophicus Py2
  CDS (1)..(873): transl_table=11
atggacgttcttattcagctggtgctcaacggcatcctgctcggcagcatgtatgccatcatcagcgtcggcctcaccctcatcttcggcatcgtccgggtggtgaacttcgcccatggcgagttcctgatggtcggcatgtatgcggcctacctgctcgccgcgaagttcggcctgcatccctatgcgtccgcgatccccgtggtgctgctgctgttcgccctcggcgcgctggtgcagcgcttcctgatccagccgctcttgtccgccgatgaacacatccagatcttcgccacggtgggcctctccaccgcgctggtgaacctcgccctgctgctgttcggtgccgacctttattcggtgccaccctccgctgcgcagggctcggtccaggtcgccggcttcactttggtgaaggggcagatcgtgatgttcgtctgcgcgctggcactggtggcggggcttcacctgttcatgcagtccaccgcgctcggccgtgccatccgcgccacggcgcagaaccgcaacgcggcgctgctgatgggcgtgaaagtggacaagatctacgtcatcgctttcggcatgggcgcggcttgcgtgggccttgccagcgcgctggtgatgccgctttacccggtgacgcccaccatcggcacctatttcgtgctcaccgccttcgtggtggtggtgctgggcggcatgcgctccatgtatggcgccttcttcggggccatgatcatcggcctcgtggacagcctctccggctactacatcgcgcccgacctgaaagaggtcgtctacttcgcgctgttcctcctgatcctcatcttcaagcccaccggcctgttcggcctcggccgcggcacggagtga

SEQ ID NO: 61083 - protein, 290 aa, Xanthobacter autotrophicus Py2
MDVLIQLVLNGILLGSMYAIISVGLTLIFGIVRVVNFAHGEFLMVGMYAAYLLAAKFGLHPYASAIPVVLLLFALGALVQRFLIQPLLSADEHIQIFATVGLSTALVNLALLLFGADLYSVPPSAAQGSVQVAGFTLVKGQIVMFVCALALVAGLHLFMQSTALGRAIRATAQNRNAALLMGVKVDKIYVIAFGMGAACVGLASALVMPLYPVTPTIGTYFVLTAFVVVVLGGMRSMYGAFFGAMIIGLVDSLSGYYIAPDLKEVVYFALFLLILIFKPTGLFGLGRGTE

SEQ ID NO: 61084 - DNA, 885 bp, Xanthobacter autotrophicus Py2
  CDS (1)..(885): transl_table=11
atggatcccctcatcctgtctttcgccgtggtcaacgggctgctgcagggcggcatctacggcggcatcgcgctgggcctcagcctgatcttcggcgtgctgcgcgtcgtgaacttcgcccacggctcgttcctgatgctgtcgctttatctgtcgttctggtgctggtcgctcctcggcatggacccgtacctgagcgcgctcgtcaccgtccccgccatgttcgctctcggctacctggtgcagcgcgtcatcatctccccgctcatcgtgcgcgagcgggcgctggtggtggagccgctctccgcgctgctgctcacctgcggcatcttcctggtggtggataatcttgcgctcatggccttcgggccggacgtgcgctcggttcaactgtcctattacatgccctctgtgatgctggggccgatcccggtggacacgccgcggctgattgcggccgcctcatccatcggcgtcgcggtcgcggtgtcgatgtggctgcgctattcccacctcggccgggccatccgcgccacggcgcagaaccgcgatgccgccgccatgtccggcatcgacgtgccgcaggtctatgcggtcaccttcggcctcggctgcgccatcctcggcctgttcggggcgctgatcgcgccgttcatcccggtcaatccgcagatcggagtcgccttcggaatcaagagcttcatcgtggtggtgctgggcggcatgggctcgctgccgggctccatcatcggcgggctggtgatcggcgtgttcgaggcggtcgcctcgcagttcgtcactgccacctcggccgccatcttctccctcggcctcttcatcctcgtcctgctggtgcgcccggcgggcatcatgggcagagcatga

SEQ ID NO: 61085 - protein, 294 aa, Xanthobacter autotrophicus Py2
MDPLILSFAVVNGLLQGGIYGGIALGLSLIFGVLRVVNFAHGSFLMLSLYLSFWCWSLLGMDPYLSALVTVPAMFALGYLVQRVIISPLIVRERALVVEPLSALLLTCGIFLVVDNLALMAFGPDVRSVQLSYYMPSVMLGPIPVDTPRLIAAASSIGVAVAVSMWLRYSHLGRAIRATAQNRDAAAMSGIDVPQVYAVTFGLGCAILGLFGALIAPFIPVNPQIGVAFGIKSFIVVVLGGMGSLPGSIIGGLVIGVFEAVASQFVTATSAAIFSLGLFILVLLVRPAGIMGRA

SEQ ID NO: 61086 - DNA, 1638 bp, Xanthobacter autotrophicus Py2
  CDS (1)..(1638): transl_table=11
atgatgcgccctcccgttccgccggccctcgcgcggatcctcgcgcttccccttctcgcccttcttctggctgtcctcctccccgcctgcgcggtgcgcgcgcaggcacaggccgatatttcggccatcgtcgcgaaattcgcgaacgacagctattcggatacgaccgacgcgctggttgagctttcggccaccggcagcgcccaggccgccgccgtggtggaggcgctcggtgccggccggctgatgttcgatccggccaccaaggcggtctatatccgcacccccgccggcatggccgatgctgccaccggcaccatcgtcgccaatgcgccgaccaacctctccgtggtgcgcgccaacaaccgggtgcgccgcgccatcgatgcggcttccggcgcgctctcgctgctcaatcccgatccggtccgccgcgccgaggctgcagccgccgtcttcaagtcgcgcgatgccgctgcgctggcgacggtggaggccgccatcgccaaggagacggtgggaagcgtgaaggatgcgctggagcaggcccgcgccgccattctcgtcggcaagtccgaggtgcccgaggcggtgcggctcctcgccatccagaagatcaccgcccgcggcgaccaggaggccatcagcctgctgcgcagcctgccggcggacgcccccgccagcctcaaggccgcggccgaggccggcatcgcgaaggtggagcagaatctcaagttctgggccgtggcgcagaatgtctggtacggcctgtcgctgggctcggtgctgcttttggcggccatcgggctggccatcaccttcggtgtcatgggcgtcatcaacatggcccacggcgagatggtgatgctgggtgcctacaccactttcgtggtgcaggacttcatccgccattcggcgcccggcctgttcgactggtcgctggccatcgccctgccgctggccttcctgttcaccggcctcgtgggcatcctcatcgagcgcacggtgatccgcttcctctacggccggccgctggaaaccctgctcgccacctggggtgtctcgctcatcctccagcaggcggtgcggtccgtgttcggccccaccaaccaggaggtgggggcaccatcctggatgtcgggcgcgttccaggtgggccagctctccatcacctataaccgcctgtggatcatcgtcttcgccctgctggtgttcttcgctctgctgctggtgctgaagcgcacgcccctcggcctctatgtgcgcgcggtgacgcagaaccggcgcatggcggcggccatgggcatccgcaccgggcgcatcgacgcgctcaccttcggcctcggctccggcatcgccggcatcgcgggcgtggcgctctcgcagatcgacaatgtgagccccaacctcgggcagggctacatcatcgacagcttcatggtggtggtgttcggcggggtcgggaacctctggggcacgctggtgggcgccttcacgctgggtatcgccaacaagctgctggagcccttcgccggcgcggtgctgggcaagatcctgctgctcgtcttcatcatcctgttcatccagaagcgcccgcgcggcctgttcgcgctcaagggccgggcggtggaatcgtga

SEQ ID NO: 61087 - protein, 545 aa, Xanthobacter autotrophicus Py2
MMRPPVPPALARILALPLLALLLAVLLPACAVRAQAQADISAIVAKFANDSYSDTTDALVELSATGSAQAAAVVEALGAGRLMFDPATKAVYIRTPAGMADAATGTIVANAPTNLSVVRANNRVRRAIDAASGALSLLNPDPVRRAEAAAAVFKSRDAAALATVEAAIAKETVGSVKDALEQARAAILVGKSEVPEAVRLLAIQKITARGDQEAISLLRSLPADAPASLKAAAEAGIAKVEQNLKFWAVAQNVWYGLSLGSVLLLAAIGLAITFGVMGVINMAHGEMVMLGAYTTFVVQDFIRHSAPGLFDWSLAIALPLAFLFTGLVGILIERTVIRFLYGRPLETLLATWGVSLILQQAVRSVFGPTNQEVGAPSWMSGAFQVGQLSITYNRLWIIVFALLVFFALLLVLKRTPLGLYVRAVTQNRRMAAAMGIRTGRIDALTFGLGSGIAGIAGVALSQIDNVSPNLGQGYIIDSFMVVVFGGVGNLWGTLVGAFTLGIANKLLEPFAGAVLGKILLLVFIILFIQKRPRGLFALKGRAVES

SEQ ID NO: 61088 - DNA, 855 bp, Archaeoglobus fulgidus DSM 4304
  CDS (1)..(855): transl_table=11
atgatcgagacgctggtcaagatagccgtatttggtgctgtggtggggggaatctgggggctcgtcgcctcaggattctccctaatttttggtgtgtcgaggattctgaacttcgcccacggtgcagcattcgtcagctccgcctttctggcatacgctctcataagcgaggggtacaacctttaccttgccatcctcgcaggcttgctgctttcagcgctaatcggtttggcggtttacgcattaacaaagcctgtgagggatagggaggtcatggttatcatcctgacgctcgcattcgcccttctggtgcagcaagtactcttggttttgtacggggacagaggcgtatccatcgagccatttgtaagcgggtttgcagagatagggggtgttaaggttacctatatgagaattctttcatttgtcctagcggtcctctgcctcactgcgcttgaggtttttgtgacgagaaccaagctcggaaagaaggttatagctacagctcaggacagcagagcggccatgatggtagggattgacatcgaaaagatatttctccttgtgatggttctttcatccgtccttgcaggattcgctgggattctctacgcccagatatttgcagtcagtcccgaagtctccctgagggctttaatttacgccttcgccatcgtaattctcggtgggcttggcagccttaggggcagtgttgttgcatcgttcatagtgggatacattctcgtgacgacgataaccttcctcggagcgagatggtccgagttcgtgatgcttctaacgatcgtggcgattctaattgtcaagccaacgggtctgttcggggtggaagaatga

SEQ ID NO: 61089 - protein, 284 aa, Archaeoglobus fulgidus DSM 4304
MIETLVKIAVFGAVVGGIWGLVASGFSLIFGVSRILNFAHGAAFVSSAFLAYALISEGYNLYLAILAGLLLSALIGLAVYALTKPVRDREVMVIILTLAFALLVQQVLLVLYGDRGVSIEPFVSGFAEIGGVKVTYMRILSFVLAVLCLTALEVFVTRTKLGKKVIATAQDSRAAMMVGIDIEKIFLLVMVLSSVLAGFAGILYAQIFAVSPEVSLRALIYAFAIVILGGLGSLRGSVVASFIVGYILVTTITFLGARWSEFVMLLTIVAILIVKPTGLFGVEE

SEQ ID NO: 61090 - DNA, 894 bp, Archaeoglobus fulgidus DSM 4304
  CDS (1)..(894): transl_table=11
atgatgattgaaataaattatttcatgaacctgctcttagggggactcgtagtggggttcatttatgccctaacggcactggggattacaataatctacggtattttgcagattccggatttctcccacgggaacagatacatgatcggtgcttacgcgggattccttgcagcctcagtagctggcagcatgcttgaaatcagctatgttgctgcaattctcggtgcagtagcagtctcttccgtaattgccgttctgagctaccttttcgtttacaagagattgctaagtgctcctcacataacgtcattcattgcagcaataggtcttttaatgctgctggaaggattcgccctggcagtcttcggtccgagataccagcgcattcacacacccttcgactacatggttgttattggagcactgagaattaacgcgcagaggcttatcgtccttttctgctccatcgccgccatagcgtctctgctgtactttttgagaaggacggtaaccggaatagctctcgaggctgttgctcaatcgccaataggagcgaagctcgttggaatcaacaccgataagatgacgctaatagcctttgccattgccggggcgcttgcaggtttcgcagcggcattaattgctccaataactcttgtgtatcctataatgggtgctgagctcaacttgaaggccttcgtaatctgcgtcgttggtgggcttgggaacatcccgggtgccatagccggagggctggtcctcggaattgttgaatccctctacggcggttattttgacatcaggtggaaaaacctcgttgcgtttgggattcttgtcgccatcctgattctcaagccagaaggtctgtttggtaagaaggagaggagagcatga

SEQ ID NO: 61091 - protein, 297 aa, Archaeoglobus fulgidus DSM 4304
MMIEINYFMNLLLGGLVVGFIYALTALGITIIYGILQIPDFSHGNRYMIGAYAGFLAASVAGSMLEISYVAAILGAVAVSSVIAVLSYLFVYKRLLSAPHITSFIAAIGLLMLLEGFALAVFGPRYQRIHTPFDYMVVIGALRINAQRLIVLFCSIAAIASLLYFLRRTVTGIALEAVAQSPIGAKLVGINTDKMTLIAFAIAGALAGFAAALIAPITLVYPIMGAELNLKAFVICVVGGLGNIPGAIAGGLVLGIVESLYGGYFDIRWKNLVAFGILVAILILKPEGLFGKKERRA

SEQ ID NO: 61092 - DNA, 1011 bp, Mesorhizobium loti MAFF303099
  CDS (1)..(1011): transl_table=11
ttgccaaatggtggaacgcgaacaaggacgcggcgctcccggtcctcgcacagggcggtcaggttccggccaacaagtagaaaccccagcaagcgaagtggtcgcgctgatgcgaccacttctacgccgcagaggtggtcgacgctcatgcaaatcgtcctgaattgtctctcgctcacgtcgttctacctttgcttcgccctgggcctggcattggtgttcggagtgatgcggatcatcaacttcgctcacggcgagttcttcatgatcggcgcctacgcgacgtatttgtgcgtcgccacgcttgcaccccaaatcggaggaccaagcgcctggctcgtcggcgcaatcgtggcagcagggataaccgggctgctaggtgccgtgctttacaggacggtggtcgttccattggctgacaagccgcttgcgattttcattgcgacgctcgcgctctcgtacgttctgcagacgattgtcgtccagatattcggtccggttggcctctccatctcgcccccactgcgcggcgtcgtgagcgtgggaggggcaatcctcccagcctcgcgggcaatggtcattgtagccgcggccgccctttcaataggtttatggatctacctcatgagaactgaatcaggtcgtcgcatccgcgcggtcgctcagaatcctcgaggcgcattgctgcagggcattaagacgcggaatgttggcaatctgacgctgattatcggatcggggatcgcaggcatctgcggggcagcgatgggaccgataagccagatatcgccctacatgggtggtcctgctctctggaaagcgttcatcatcataattgtgggcgggatcggcaatgtctggggagcggtggcggcggcggcaatctttggggtgcttgatacacttatgtcgcagttcggcggcgggcgctttcttgctctgacgagtgcggccatcatgctgttcgtccttagcgtaaaaccctccggtctattcggggaaaaagaatga

SEQ ID NO: 61093 - protein, 336 aa, Mesorhizobium loti MAFF303099
MPNGGTRTRTRRSRSSHRAVRFRPTSRNPSKRSGRADATTSTPQRWSTLMQIVLNCLSLTSFYLCFALGLALVFGVMRIINFAHGEFFMIGAYATYLCVATLAPQIGGPSAWLVGAIVAAGITGLLGAVLYRTVVVPLADKPLAIFIATLALSYVLQTIVVQIFGPVGLSISPPLRGVVSVGGAILPASRAMVIVAAAALSIGLWIYLMRTESGRRIRAVAQNPRGALLQGIKTRNVGNLTLIIGSGIAGICGAAMGPISQISPYMGGPALWKAFIIIIVGGIGNVWGAVAAAAIFGVLDTLMSQFGGGRFLALTSAAIMLFVLSVKPSGLFGEKE

SEQ ID NO: 61094 - DNA, 954 bp, Mesorhizobium loti MAFF303099
  CDS (1)..(954): transl_table=11
gtgaaggacgccgcgacggctgcgatcgccaacatcaactcgacgctggccttctgggacgccggacaaaacatctggtacggcatttcgctgggctcggtgctgctgctcgcggcgatcgggcttgccatcaccttcggcgtcatgggcgtcatcaacatggcgcatggcgagatggtgatgctcggcgcctacacgaccttcgtcgtccagcaggtgatccgcacatcctttcccggcctgttcgactggtcgctggtcatcgcgctgccgcttgcctttctggtcgccgccctcgtcggtctcgccatcgaacgcggcgtcatccgcttcctctatggccggccgctggagacgctgctggcgacctggggcgtgtcgctgatcctgcagcaggctgtgcgctcgatcttcgggccgaccaaccaggaggtcggcaacccctcctggatgtcggggtcgttcgatatcggccagctggccatcacctggaaccggctctggatcctggtgttcgcgctcaccgtcttcggcgtgctgctctacgtgatgaagcgcacgccctggggcctgcagatgcgcgccgtcaccgccaaccgccgcatggccgcctccatgggcatcaggacaccgtgggtcgatgcgctgaccttcgcgttgggatccggcattgccggtatcgccggcgtcgcgctcagccagatcgacaatgtctcgcccaatctcggccgcggctacatcatcgacagtttcatggtcgtcgtcttcggcggcgtcggcaatctctggggcacgctggtcggcgccttttcgctgggcatcgtcaacaagttcctcgagccatatgccggcgcggtgctgggcaagatcgtcgtgctggtgctgatcatcctgttcatccagaagcgcccgcgcggcctgttcgcgctcaagggcagggcggtggaagcatga

SEQ ID NO: 61095 - protein, 317 aa, Mesorhizobium loti MAFF303099
MKDAATAAIANINSTLAFWDAGQNIWYGISLGSVLLLAAIGLAITFGVMGVINMAHGEMVMLGAYTTFVVQQVIRTSFPGLFDWSLVIALPLAFLVAALVGLAIERGVIRFLYGRPLETLLATWGVSLILQQAVRSIFGPTNQEVGNPSWMSGSFDIGQLAITWNRLWILVFALTVFGVLLYVMKRTPWGLQMRAVTANRRMAASMGIRTPWVDALTFALGSGIAGIAGVALSQIDNVSPNLGRGYIIDSFMVVVFGGVGNLWGTLVGAFSLGIVNKFLEPYAGAVLGKIVVLVLIILFIQKRPRGLFALKGRAVEA

SEQ ID NO: 61096 - DNA, 903 bp, Mesorhizobium loti MAFF303099
  CDS (1)..(903): transl_table=11
atgcagtattttgtccagcagcttatcaacgggctgacgctgggatcgatctatgggctgatcgcaatcggctacacgatggtctacggcatcatcggcatgatcaacttcgcccatggcgacattttcatggtgggcgccttcacggcgctgatcgtcttcctcatcctcggcgcgctgttctattcggtgcccgtggtcatcgcgctgctggtcatgatgatcgtggcgatgctgctcaccagcctctacaactggacgatcgagaaggtggcctaccggccgctgcgcggttcgttccggctggcgccgctgatcaccgccatcggcatgtcgatcgcgctgtcgaacttcgtccaggtgacgcaaggtccgcgcaacaagccgatcccgccgatggtcagccaagtctacaacatcgacggcgtcagcgtgtcgctgaagcagatcatcatcgtcatcgtcaccgcgctgctcctggtggtgttctggtacctggtcaacaggacctcccttggccgggcgcaacgcgcctgcgaacaggaccgcaagatggccgcgctgctcggcgtcgacgttgaccgcaccatctcgatcaccttcatcatgggtgcctcgcttgccgctgtcgccggcacgctgttcctgatgtattatggcgtggtggctttctccgacggttttgtgccgggtgtgaaggcattcaccgcggcggtgcttggcggcatcggctcgttgccaggcgccgtgctgggcgggctgctgatcggcttcatcgaaagcatgtggtcggcctatttctcgatcgactacaaggacgtcgcggcgttctcgatcctggccatcgtgctgatcttcctgccttccggcatattgggccggcctgaagtcgaaaaggtctga

SEQ ID NO: 61097 - protein, 300 aa, Mesorhizobium loti MAFF303099
MQYFVQQLINGLTLGSIYGLIAIGYTMVYGIIGMINFAHGDIFMVGAFTALIVFLILGALFYSVPVVIALLVMMIVAMLLTSLYNWTIEKVAYRPLRGSFRLAPLITAIGMSIALSNFVQVTQGPRNKPIPPMVSQVYNIDGVSVSLKQIIIVIVTALLLVVFWYLVNRTSLGRAQRACEQDRKMAALLGVDVDRTISITFIMGASLAAVAGTLFLMYYGVVAFSDGFVPGVKAFTAAVLGGIGSLPGAVLGGLLIGFIESMWSAYFSIDYKDVAAFSILAIVLIFLPSGILGRPEVEKV

SEQ ID NO: 61098 - DNA, 882 bp, Mesorhizobium loti MAFF303099
  CDS (1)..(882): transl_table=11
atgcacttcggaccgcatctcctccttgccgccctcgaaggcctcgtcacatcagccgtgctggcgctgacggcgcttggactgtcgctggtgttcggcgtgatgcgggtggtcaacgtcgcgcatggcgagttcttcatgctgggcgccgtgctcgcctgggcaatcacatcagcaatcggcggccatccggcgctcggcttcctagcggcgctggtgatcgcgccgctgatcgtcggtgccattgcgctggtcgccgaacggctggtgttgcgccggctgaactacaatccggaagccaccatcgttgccaccatcggcatgctttacatcatccagcagctggcactgagcttctatggtcccgaagcgcggccggtggagccgccgttcagctaccgcatccttttgccgtggttcggctattccggctacaaactgtcgatcattgccgcctcggcgcttctcttgatcgctacatggctggtgctgacgcgcaccaggatcggcctgatcatgcgcgccacgcagtatgacagcgagacggcgcaagctttcggcattccggtcgaccgcgtctatggcggcgtcttcgcgctcggcgccatgctggcggcgatcgccgcggtgctgatcgtgccgatcagccaggcgcattacctgatggggcaggatccgctgctcttgtccttcatcgtcgtcatcatcggcggcctcggctcgctgcgcggcaccgtcgtcgccgccgtgctgatcggcctgtccgacggcatcatctcgatgttcttctcgccgaccttggccaagatgatcgccacgctgctggtcgccatggtgctggtgttccgcccgcaaggcctgttcgggacggcagcgcgatga

SEQ ID NO: 61099 - protein, 293 aa, Mesorhizobium loti MAFF303099
MHFGPHLLLAALEGLVTSAVLALTALGLSLVFGVMRVVNVAHGEFFMLGAVLAWAITSAIGGHPALGFLAALVIAPLIVGAIALVAERLVLRRLNYNPEATIVATIGMLYIIQQLALSFYGPEARPVEPPFSYRILLPWFGYSGYKLSIIAASALLLIATWLVLTRTRIGLIMRATQYDSETAQAFGIPVDRVYGGVFALGAMLAAIAAVLIVPISQAHYLMGQDPLLLSFIVVIIGGLGSLRGTVVAAVLIGLSDGIISMFFSPTLAKMIATLLVAMVLVFRPQGLFGTAAR

SEQ ID NO: 61100 - DNA, 900 bp, Mesorhizobium loti MAFF303099
  CDS (1)..(900): transl_table=11
atgatcgccgatttcgactaccagttcttcatcgaagtgctcgtcggcggcctgctctccggcgtcatgtactcgctggtcgcgatcggcttcgtgctgatctacaagacatcaggcgtgctcaatttcgcgcaaggcgcgctgctcttgttcgcggcactcaccttcgtcagcctcgtcgaacgcggtgttcccttcgcgctggcgctggtggccaccttcgccatcatggtggcgatcggcatcgccatcgagcgcacggtgctcaggccgctcaccaacaagccgccgatcacgctcttcatggccacgctcggcctgtcctacatcatcgagggcgccgcccagttgatctggggcacgcaggtccatggcctcgacctcggcatcgaggatgtgccgctggaagtcggcggtgtgctgatcagccagttcgacatcttcgcggctgtggtcgccgccggcatggttctgctgctgtcgctgttcttccgctacacccgcatcggcctctccttccgcgccgtcgccgacgatcagttcgccgccctagcggtcggcctcaggctgccgctgatctgggcgaccgtctgggccgcggccggcctcgtcgcgctggtcgcgggactgctctggggcgcccgcctcggcgtgcagttctcactgtccctggtggtgctcaaggcgctgccggtgctggtgcttggcggcttcgattcgatcctcggcgccatcgtcggcggcctcttgatcggcgccagcgagaagctcgccgaggtctatatcggcgactatttcggcggcggcatcgagagctggttcgcctatgtcgtggcgcttgccttcctcctgatccgtccctccggcctgttcggccagaagctcgtggagagggtctga

SEQ ID NO: 61101 - protein, 299 aa, Mesorhizobium loti MAFF303099
MIADFDYQFFIEVLVGGLLSGVMYSLVAIGFVLIYKTSGVLNFAQGALLLFAALTFVSLVERGVPFALALVATFAIMVAIGIAIERTVLRPLTNKPPITLFMATLGLSYIIEGAAQLIWGTQVHGLDLGIEDVPLEVGGVLISQFDIFAAVVAAGMVLLLSLFFRYTRIGLSFRAVADDQFAALAVGLRLPLIWATVWAAAGLVALVAGLLWGARLGVQFSLSLVVLKALPVLVLGGFDSILGAIVGGLLIGASEKLAEVYIGDYFGGGIESWFAYVVALAFLLIRPSGLFGQKLVERV

SEQ ID NO: 61102 - DNA, 885 bp, Aeropyrum pernix K1
  CDS (1)..(885): transl_table=11
gtggccggcctcctggagcagtgggggaacctggttttccagggcgtcctcatggggctcctatactccctcatagccctaggctacaacatcgtctacagggtcaacaagtccataaacttcgcagtacccgaggttgtgctactagcagcctacctggcttggatagcctcgatagccacgggcaacctcctggcggctgtggccatagctctagccgccagcatcgccgtcagcatggccatggagaggttcgtcgcgaagcctctgctaggccgtccccccatagccttgattggagcaaccctgggactattctacatgcttaagggtgttgtcctaatagttggaaagggcgaggtcgcggtactccccttctaccccgaagtgtacaggctgggcttcctgacgctcggcacaaacgatgttatagcccttctaggctcgatagccgtgctagccggcatcatcgtcctccataggaaaactagcttcggcgctgctatgaggggtgtggcggaggacgcagagggcgcagccgcctacgggctccctgtgaggaggctcatgctggccggctgggctcttgccggcctcgtgagcggcctcgcagccctcctcctctcaatcaaaacacaggtgtcgccggacctcgagttcttcgcgataatagccctagcagctagccttatagcgggtctcgacagcctgggaggaatagtcgtgggaggcgtcttcctcggcctggccgagcagatagccagcaaaactctggacccctacctgcccggtatagggagggatatcgcgttcttcatactattcctagtactcctagtcaagccctacggcctcttcggcagtgagaggatagagaggctctag

SEQ ID NO: 61103 - protein, 294 aa, Aeropyrum pernix K1
MAGLLEQWGNLVFQGVLMGLLYSLIALGYNIVYRVNKSINFAVPEVVLLAAYLAWIASIATGNLLAAVAIALAASIAVSMAMERFVAKPLLGRPPIALIGATLGLFYMLKGVVLIVGKGEVAVLPFYPEVYRLGFLTLGTNDVIALLGSIAVLAGIIVLHRKTSFGAAMRGVAEDAEGAAAYGLPVRRLMLAGWALAGLVSGLAALLLSIKTQVSPDLEFFAIIALAASLIAGLDSLGGIVVGGVFLGLAEQIASKTLDPYLPGIGRDIAFFILFLVLLVKPYGLFGSERIERL

SEQ ID NO: 61104 - DNA, 870 bp, Aeropyrum pernix K1
  CDS (1)..(870): transl_table=11
ttggaagctgaggctgtaacgtcagctatagtcgatgggttactcatcggaggagcctatgccctcgtagcgatgggtcttgccatgatctggggcgttatggagatcattaacttcgcgcatggcgattttatgatgcttggagctctggcagcctactatgcgttcacgctaatggggttagaccccttggctggtggtgtattagcgtttgtaatggtgttcgcactgggtgtgggggtgcagcgcggcgttataaataggatattagatgctccgttattgacgcagatagccgctacattcgctgtcctccttataatacggtatggggtgcaggctgtcctgggcccctacactaggaggcttgtcacgtggtatcaggactattacgtggggctgggattcactactgtacccctctctaagcttcttatattcctggtatcactcgtcatattggccctactatatatattgctgaacaggactgacatggggatagccattagggctacatcacagaataggatggtggcgcagctgatgggaataaatgtatctagggtttacgacgtaaccttcgggattggtgtcggtgtagctgcagtagggggcgccctggtagcgttgttctacccaatattccctgagatggggggattcttcgcgttaatagcatttatagcggtcgtcctcggaggctttggcaacgtgtatggagcctatgtgggaggtttgattataggcgttacggagagtgttagcgcgttatttatagagcccgcattgaaggatgtagtagccttcctactattcatactcatcataatgattaagccgacaggattatttggtaggggtgaatga

SEQ ID NO: 61105 - protein, 289 aa, Aeropyrum pernix K1
MEAEAVTSAIVDGLLIGGAYALVAMGLAMIWGVMEIINFAHGDFMMLGALAAYYAFTLMGLDPLAGGVLAFVMVFALGVGVQRGVINRILDAPLLTQIAATFAVLLIIRYGVQAVLGPYTRRLVTWYQDYYVGLGFTTVPLSKLLIFLVSLVILALLYILLNRTDMGIAIRATSQNRMVAQLMGINVSRVYDVTFGIGVGVAAVGGALVALFYPIFPEMGGFFALIAFIAVVLGGFGNVYGAYVGGLIIGVTESVSALFIEPALKDVVAFLLFILIIMIKPTGLFGRGE

SEQ ID NO: 61106 - DNA, 894 bp, Bacillus halodurans C-125
  CDS (1)..(894): transl_table=11
atgatcgtacaactttttaacggtataagcttaggctccattcttcttttaatcgctcttgggcttgccataacgttcggaatgatgcgagtcattaacatggcacacggggaattaattatggttggagcctatgctacttacgttgttcagcttctttttagtcaatatgttcctccggcttattttgatctttactttttactcgcagtcccgttatcgtttgtcatttcagctcttatcggtattctcattgaacttaccgttattcgccacttatacggccgacctctagatagtttattagccacgtttggtgttggactcatcttgcaacaaacagcgcggacaatctttggggcaccaaatgtaggcgtccaaagcccatcgtttttacgtggcgggctagagattgccggagtgacactccctttctctcggttgtttattatcactctcgtcctcgtaagcttttgtttgttagcctggtttttttataaaactcggaatggccgaaaaattcgcggggtgatgcaaaaccggagcatggccacatgtttagggatctctacacgcaaagtggatgtgatgacatttgcgattggttctggttgtgctggtttagctggtgctgcactgacgctgttagggccgatcgggccaaccatcggtacctattatattgtagatgcctttatggtcgtcgttgttggcggggtcggcatgttagtaggaacggtggctggtgcgttaggaatcgggatgtttaacaccttatttgaatattggacgaatgcctctttaggaaaagtactcgtctttgcctgcatcattctctttttacaatggcgcccgcaaggcttgttttccttaccaactcgttctttagattaa

SEQ ID NO: 61107 - protein, 297 aa, Bacillus halodurans C-125
MIVQLFNGISLGSILLLIALGLAITFGMMRVINMAHGELIMVGAYATYVVQLLFSQYVPPAYFDLYFLLAVPLSFVISALIGILIELTVIRHLYGRPLDSLLATFGVGLILQQTARTIFGAPNVGVQSPSFLRGGLEIAGVTLPFSRLFIITLVLVSFCLLAWFFYKTRNGRKIRGVMQNRSMATCLGISTRKVDVMTFAIGSGCAGLAGAALTLLGPIGPTIGTYYIVDAFMVVVVGGVGMLVGTVAGALGIGMFNTLFEYWTNASLGKVLVFACIILFLQWRPQGLFSLPTRSLD

SEQ ID NO: 61108 - DNA, 954 bp, Pseudomonas aeruginosa PAO1
  CDS (1)..(954): transl_table=11
gtgcgcatcgccgccgccaccagcctggcccaggtcaagcgccggctgctggtcggcgacctgctcggccaggccttcagtggcctgtcgctgggctcgatcctgctgctcgcggcgctcggcctggcgatcacctacggcctgctcggggtgatcaacatggcccacggcgaaatgctcatgctcggcgcctactccacctacgtggtgcaactgctgttccagcgcctggcgccggaatggctggcgctctacccgttgctggcgctaccggtggcgttctgcgtcagcgccgccatcggcatggccctggagcgcacggtgatccgccatctctacggccggccactggaaaccctgctcgccacctggggcatcagcctggtgctgatccaactggtgcggatgctgttcggcgcgcagaacgtcgaggtagccaacccggcctggctgtccggcggcatccaggtgctgccgaacctggtgctgccgtggaaccgtatcgtcatcatcggcttcgccctgttcgtgctgctcctcacctggctgctgctgaaccgcacgcggctcggcctgaacgtccgcgcggtgacccagaaccgcaacatggcggcctgctgcggggtgcccacagggcgcgtggacatgctcgccttcggtctcggctcgggcatcgccgggctcggcggggtagccctgtcgcaggtcggcaacgtcggcccggacctcggccagggctacatcatcgactccttcctggtggtggtgctcggcggcgtcggccagctcgccggcagcgtcctcgccgccttcggcctcggcgtggcgaacaagatcctcgaaccgcagatcggcgcggtgctgggcaagatcctgatcctcgcgctgatcgtcctgttcatccagaaacgcccgcagggactgttcgccctgaaagggagggtcatcgattga

SEQ ID NO: 61109 - protein, 317 aa, Pseudomonas aeruginosa PAO1
MRIAAATSLAQVKRRLLVGDLLGQAFSGLSLGSILLLAALGLAITYGLLGVINMAHGEMLMLGAYSTYVVQLLFQRLAPEWLALYPLLALPVAFCVSAAIGMALERTVIRHLYGRPLETLLATWGISLVLIQLVRMLFGAQNVEVANPAWLSGGIQVLPNLVLPWNRIVIIGFALFVLLLTWLLLNRTRLGLNVRAVTQNRNMAACCGVPTGRVDMLAFGLGSGIAGLGGVALSQVGNVGPDLGQGYIIDSFLVVVLGGVGQLAGSVLAAFGLGVANKILEPQIGAVLGKILILALIVLFIQKRPQGLFALKGRVID

SEQ ID NO: 61110 - DNA, 897 bp, Campylobacter jejuni subsp. jejuni NCTC 11168
  CDS (1)..(897): transl_table=11
atggattctactttatttttacaacaacttgttaatggacttagtttgggcagtatgtatgctcttattgctgttggctatacgatggtttatggtgtgttaagacttattaattttgctcacggcgatattatgatggttggtgcttatgcggctcttttttgcatgactaatctaaatgttccttttctaggagctttgtctttagcaatgatttttgctgcttgtgttggaatagctacagatagaatcgcttataaacctttaagacaggctcctagaatttcattgttgattacagcaatcggtattagttttttcttgcaaaatctttttaatatgctttttacttcaacacctagaacttttacaccgccaagttattttgaggaaagtgttaattttggtggagtgataacaacttatggttctttaatggttcctgctcttacatttgttattttaatagcagtgttatggattttgtataaaagcaaatatggtatagctattcgtgctttggcatttgatatacaaacagtaaatttaatgggtatagatgcaaatcgtattattgctatagtttttgccctaggttcagctttggcagcagttgggggtgttttttgggctgcaaattattactctgttgaacctactatgggaactttaataggtttaaaagcttttgctgctgcagttttaggaggtataggttctgtagtaggtgcagttttgggtggacttattataggatttactgaagttgttgttgtggctttttttccagatttatcaggctttaaagatgcatttgcttttatttttttggtgtttatattgttatttaggcctacgggaattttaggtataaattttgaaaagagtaggttttaa

SEQ ID NO: 61111 - protein, 298 aa, Campylobacter jejuni subsp. jejuni NCTC 11168
MDSTLFLQQLVNGLSLGSMYALIAVGYTMVYGVLRLINFAHGDIMMVGAYAALFCMTNLNVPFLGALSLAMIFAACVGIATDRIAYKPLRQAPRISLLITAIGISFFLQNLFNMLFTSTPRTFTPPSYFEESVNFGGVITTYGSLMVPALTFVILIAVLWILYKSKYGIAIRALAFDIQTVNLMGIDANRIIAIVFALGSALAAVGGVFWAANYYSVEPTMGTLIGLKAFAAAVLGGIGSVVGAVLGGLIIGFTEVVVVAFFPDLSGFKDAFAFIFLVFILLFRPTGILGINFEKSRF

SEQ ID NO: 61112 - DNA, 903 bp, Deinococcus radiodurans R1
  CDS (1)..(903): transl_table=11
atggacctgaccttccttgccaaccaactgttcaccgggctctcggtggcgtccatcctgctgctggcggcgctggggctggcgctgaccttcgggctgatgcgggtcatcaacatggcgcacggcgaatttctgatggtgggcggttacctgacctacctcgcggcccgctggaccggccccgccctgggcgacggctacctgtgggtcgcttttccgctcgccttcgtgggcacggcgctgctgggcgccctgctggaagtgctggtcatccggcggctctacgggcgcccgctcgacacgctgctggcaaccttcggcatcagcttgatcctgcaacaggccgcgcggcaggtgttcggcagcacgggcgtgccggtcacggctcccgcctggctgtcgggcagcgtgacgctgggcgccgtgaccatgccgggcagccgcctgttcgtcatcgcgctttccctgctggtgatcggcgcggtgtggtggctgctctcgcgcacccgcttcggcatggtggtgcgggcggtcaaccagaaccgtgagatggcggcggcgctgggcgtcaacacccgggcactcgacctgctcgtcttttccctcggcgcgggcattgcgggggtggcgggcgtgggcctcgcgctgcttgccccagttaaccctaccgtcggcgcggcgtacatggtcaatgcctttctcgtcgtggtggtcggcggcgtgggcagcgtgctcggcgcgggcgtcgcggccatattgctcggcagcctcacggcgttggccgagggcctgaccagcgagagcctcgcgcaggccgcgctgctggtgctggtggtggcgttcttgcagtggaaaccgcgcggcctgtttcccaccgagtcccgcgctctggaggacgcatga

SEQ ID NO: 61113 - protein, 300 aa, Deinococcus radiodurans R1
MDLTFLANQLFTGLSVASILLLAALGLALTFGLMRVINMAHGEFLMVGGYLTYLAARWTGPALGDGYLWVAFPLAFVGTALLGALLEVLVIRRLYGRPLDTLLATFGISLILQQAARQVFGSTGVPVTAPAWLSGSVTLGAVTMPGSRLFVIALSLLVIGAVWWLLSRTRFGMVVRAVNQNREMAAALGVNTRALDLLVFSLGAGIAGVAGVGLALLAPVNPTVGAAYMVNAFLVVVVGGVGSVLGAGVAAILLGSLTALAEGLTSESLAQAALLVLVVAFLQWKPRGLFPTESRALEDA

SEQ ID NO: 61114 - DNA, 858 bp, Deinococcus radiodurans R1
  CDS (1)..(858): transl_table=11
ttgaccacagttttgcaacaacttttcaacgcgctcgcgctcggcggggtgtacgccctggtcgcgctggggctgacgctggtctacggcgtgatgaaaattcccaacttcgcccacggcggactgtacatgctcggcgcttacctttcttacgcgggcatcagctcgctggggctggggtacgtgcccgcgctgctgctctctgccgtcgtcgtggcgctgctcgctgccctgatggaacgggtcattttcttcccgctgcgcaacgcgccgcacgtgcagcccatgattgccgcgctgggcgtgctgttttttctggaagccggggtgcagctcatctggggcgccgacttcaagcaggtggccgagccaatcccaggcatcctcaatatcggcggcgtcacgatcacctggcagcgcctgatcgtgctcgtcgccagcgtggtcgccatgctggggctgaacttcttcctgcgccgcaccctgaccggcgccaccatcgaggcgatggcgcaaaaccgtgagggcgcacggctcgtcggcatcaacaccgggcgggtcgggatgctcaccttcgccatctcgggggcactcgcggccatcggggcatctctcatcgcgcccatcgtgtcggtcaccccggcgatgggtgaaatcatgaacctcaaggtcttcgccatcatcatcctgggcggcatgggcagcattcccggcgccatcgtgggggcttttttgctcgccttcgctgaagtgttcggcggctacatcaacctcgactttgctgaggtcatcggcttcgcggtgctggtggtcgtgctcgccattcgtccgcagggcctgttccggagggccgcatga

SEQ ID NO: 61115 - protein, 285 aa, Deinococcus radiodurans R1
MTTVLQQLFNALALGGVYALVALGLTLVYGVMKIPNFAHGGLYMLGAYLSYAGISSLGLGYVPALLLSAVVVALLAALMERVIFFPLRNAPHVQPMIAALGVLFFLEAGVQLIWGADFKQVAEPIPGILNIGGVTITWQRLIVLVASVVAMLGLNFFLRRTLTGATIEAMAQNREGARLVGINTGRVGMLTFAISGALAAIGASLIAPIVSVTPAMGEIMNLKVFAIIILGGMGSIPGAIVGAFLLAFAEVFGGYINLDFAEVIGFAVLVVVLAIRPQGLFRRAA

SEQ ID NO: 61116 - DNA, 1071 bp, Deinococcus radiodurans R1
  CDS (1)..(1071): transl_table=11
ttgccaagctcccccgctgacttttttgggccggggagcgcaccgggggcggcttatgccgcaggcgaacgaaaggaaactatggacataaacacggtgctcacgattctggctcaggtcttcgtcggcggcctgagcctcggcgtgctgtacgccatcatcgcgctgggctacacgatggtgtacggcgtgctgcaactgatcaacttcgcgcactcggaggtctttatcaccgggggcgtggtcgcctacttcgtctttgaggcgctcaaggagtcgcccatgaacgggctgctcaagctgctgatcgcggcgctcgcggcgatggccgtgtcgggcgggctcaacgtgctgatcgagcgcctcgcctaccggcccattcggggagcgcagcgcttggtgcccttgattaccgccatcggcgtgtcgctgattttgcaagacctgctgcgcctcatcgtcggcctacgcgggctgttcgacctcagcgtgacgctgccgcagggctttgccgaccccatcaccaaagtcggcggggtgaacatctcggtgctgaacttgcaggtcaaggacatcatcctgatcgtggtggccgggctgatgctcatagggctcaacctgctcgtcaaccacacccggctgggccgcgccattcgcgccgtggcgcacgaccggcagacgtcgggcctgatgggcatcgactcgaaccgcatcatcagcttgaccttcttgatcgggggcgcgctgggcggcctcggcggggcgatgttcgccatgaaatatcaagcactcaacgcctactcgggcatggtgccgggcatcaaggcctttacggcggcggtgctcggcggcatcggcaacattcccggcgcggtgctcggcgggctggtgctcggctggctcgaaacgctgctcggcaccattgacctctttcaggtggtgccggggctgggctggctgaaatacatcacttccgactacaaagacctcggcgccttcttagcgctgctgctgattctctttttcaagcctgccggtctgctcggcaaggccaccacggagaaggtgtaa

SEQ ID NO: 61117 - protein, 356 aa, Deinococcus radiodurans R1
MPSSPADFFGPGSAPGAAYAAGERKETMDINTVLTILAQVFVGGLSLGVLYAIIALGYTMVYGVLQLINFAHSEVFITGGVVAYFVFEALKESPMNGLLKLLIAALAAMAVSGGLNVLIERLAYRPIRGAQRLVPLITAIGVSLILQDLLRLIVGLRGLFDLSVTLPQGFADPITKVGGVNISVLNLQVKDIILIVVAGLMLIGLNLLVNHTRLGRAIRAVAHDRQTSGLMGIDSNRIISLTFLIGGALGGLGGAMFAMKYQALNAYSGMVPGIKAFTAAVLGGIGNIPGAVLGGLVLGWLETLLGTIDLFQVVPGLGWLKYITSDYKDLGAFLALLLILFFKPAGLLGKATTEKV

SEQ ID NO: 61118 - DNA, 1047 bp, Deinococcus radiodurans R1
  CDS (1)..(1047): transl_table=11
gtgcgtcggccgtccggcggcagcgctcccggtgggcgctcgccccgggcggccccgacgttgggggtggcaatggaacccagtcagctgatccagaatctggtcaacggcctggcgatcggcagcgtctacgcgattttcgcgctgggctacacgctgatcttctcgattctgggcatcatcaatttcgcgcagggggccgtgtttacgctgggcgcctacctgacctacaccctggtgtcggggcagttcgagaacaacgggctgctcaagggcatcaatctctttcccgacggctcaccgctggcaggcaatccctgggcctttgggctcgccaccctgctcggctcggcgctggcgggtttgatcgcggtggtgatcgagcgcctcgccttccggcccatgcgggcgcgcggggccgagccgctgctggcgctggtgagcagcctgggggtggcgctggtgatcgtcaacctcattcaactgctcgtcggcgccgagagctacagcttcccggccaatgcctacggcgagtttccgcccgcgctgacctttcatgtgggcgacaaggtggtggcggtccgcaccgtgcaactggtgattttcgccgtcagcatggtgatgctgggcattctgggctacgtcatcgggcgcaccaagatcggcaaggcgttgcgggcggtggccgaaaatcccggcacggcgagcctgctcggcatcagcgtggaccgctacgtgctgatcacttttttcctctcgggctttttgggtgggctggcgggcacgctggtgtcgctggcgttcggcatcggcgggccgtacttcgggcaggccttcgggctcaaggggctggcggtcatcgtgctcggcgggctgggcagcattcccggcgcggtgctcggcggtctggtgatcggcctggccgaggcgttcgtgcccgccgactacagcgcctacaaggacgcggtggccttcgcgctgctgtttatcgtgctgctgctgcggccccaggggctgctcggcaaggcccaggttcagaaggtgtga

SEQ ID NO: 61119 - protein, 348 aa, Deinococcus radiodurans R1
MRRPSGGSAPGGRSPRAAPTLGVAMEPSQLIQNLVNGLAIGSVYAIFALGYTLIFSILGIINFAQGAVFTLGAYLTYTLVSGQFENNGLLKGINLFPDGSPLAGNPWAFGLATLLGSALAGLIAVVIERLAFRPMRARGAEPLLALVSSLGVALVIVNLIQLLVGAESYSFPANAYGEFPPALTFHVGDKVVAVRTVQLVIFAVSMVMLGILGYVIGRTKIGKALRAVAENPGTASLLGISVDRYVLITFFLSGFLGGLAGTLVSLAFGIGGPYFGQAFGLKGLAVIVLGGLGSIPGAVLGGLVIGLAEAFVPADYSAYKDAVAFALLFIVLLLRPQGLLGKAQVQKV

SEQ ID NO: 61120 - DNA, 1851 bp, Agrobacterium tumefaciens str. C58
  CDS (1)..(1851): transl_table=11
ttgaaaactgaacaagcatgcccccctctgccctgccgggcatctcccccacaggtggggagatcgactcgtggcgaggccccgcatttctcttcggtagagatagagcgatgcgagcgcaccttgccgatctccctccttgtgggggagatgcccggcaggacagagggggtgagccgcatattccagcagcgccaaaataaacgccccatcgcaaaccgctccaaggaccctgacatgacgatccgatcttttctcggagccatcttcctctggttcaccatggggatcgcagcccacgccgtcgcgcagagcgatccgaaggcgctgattgaccagcttggcacggctgatttcaagcaggccgaagtgctgatcgggcagatcgccgcaacgggcgatgcgcgcgtcgttccagcgctggaggctttcgcggcgggcgatctttacgtgcgcaaatccgacaatctcgtcttcatgaccaagcccgccggctccgatttcacgctgatcgacccgctgacgggtgaaagcgccggctcggcgcccaaggctgccgtcaccaagatcagggtcaacaataatcttcgccgcgtcattcgcgccgcgatgggtggcctgacgctgctcagcccggaacgcgcggtgcggctttccgccgccgatgcggttctgaaagcccccagcgccgaaaatctggaattgctggaagcggccatatcaaaggaaaccgacaatgaggtgcggacccggatggaggaggcgcgggctgtctcgctgctctcctccgaccgccccctcgaggtgaagaaagaagcgatcgccaccatcaagaagctcggtgggcgcgatgcgatcagcattctcatggcggcgacgccctcggtcgatccgagcctgaagcctgatgtggacgaggcgatttccagcatcgagagcgcactggccttctgggattatgcgcagaatgtctggtatggcctgtcgctcggttccgtgctgctgctggccgccatcggccttgccatcaccttcggcgtgatgggcatcatcaacatggcacatggcgagatggtgatgatcggcgcttactccaccttcatggtgcaggaagtgatccgcagtcacttccccggcctgttcgactggtcgctggcgattgccttgccagtcgcctttctggtgacaggttttgtcggcctcgtgatggaacgaggcgtcatccgcttcctctacgggcggcctttggaaacgctgctcgccacctggggcatctcgctgatgttgcaacagggcgtacgctccattttcggccccaccaaccgggaggttggcagccccggctggatgtccggctccttcagcgtcggttatctcaatttcacctggaaccgggtgtggatcgtctgcttctcgctgtcggtgttcttcgcgctgctggtgcttctgaagcgctccgccttcggtctgcagatgcgcgccgtgactcagaaccgccgcatggcctcctccatgggcattcgcacgccctgggtggatgccttcaccttcgcgctcggttcaggcgttgccgggcttgccggcgttgcgctatcgcagatcgacaatgtctcgcccaatctcggccagagctacatcatcgacagtttcatggtggtggtgttcggcggcgtcggcaatctctggggaacgctggtgggtgcattgtcgctcggcgtgctcaacaagttcctcgagccgacggtgggcgccgtgctcggcaagatcctcgtgctcgttctcatcatcctgttcatccagaagcggccgcgcggtctcttcgcactcaagggaagggcgatcgaagcatga

SEQ ID NO: 61121 - protein, 616 aa, Agrobacterium tumefaciens str. C58
MKTEQACPPLPCRASPPQVGRSTRGEAPHFSSVEIERCERTLPISLLVGEMPGRTEGVSRIFQQRQNKRPIANRSKDPDMTIRSFLGAIFLWFTMGIAAHAVAQSDPKALIDQLGTADFKQAEVLIGQIAATGDARVVPALEAFAAGDLYVRKSDNLVFMTKPAGSDFTLIDPLTGESAGSAPKAAVTKIRVNNNLRRVIRAAMGGLTLLSPERAVRLSAADAVLKAPSAENLELLEAAISKETDNEVRTRMEEARAVSLLSSDRPLEVKKEAIATIKKLGGRDAISILMAATPSVDPSLKPDVDEAISSIESALAFWDYAQNVWYGLSLGSVLLLAAIGLAITFGVMGIINMAHGEMVMIGAYSTFMVQEVIRSHFPGLFDWSLAIALPVAFLVTGFVGLVMERGVIRFLYGRPLETLLATWGISLMLQQGVRSIFGPTNREVGSPGWMSGSFSVGYLNFTWNRVWIVCFSLSVFFALLVLLKRSAFGLQMRAVTQNRRMASSMGIRTPWVDAFTFALGSGVAGLAGVALSQIDNVSPNLGQSYIIDSFMVVVFGGVGNLWGTLVGALSLGVLNKFLEPTVGAVLGKILVLVLIILFIQKRPRGLFALKGRAIEA

SEQ ID NO: 61122 - DNA, 936 bp, Agrobacterium tumefaciens str. C58
  CDS (1)..(936): transl_table=11
ttgtcgggccgccaagagcggcccgtctccggcccggatgggcatcgctgcaccgggaggagttttttcagcatgcagacggtcttcagcatcctcatcgatgcgcttgcctatggcatggtcctgttcatcatctccatcggcctttccgtcacaatggggctgatgcgggtggtcaatctggcacacggcgcgttcgcgatgatcggcggttatctcgcgtcttatgccgcccacggcctcggccttggttatgcgatggcgatcctcgttgcgattgtcggcaccatcgtcatcgccataccgctcgaacgtttcctctatcgccgcatctatggcgcgccagagctgacgcaggtgctgatgaccatcggcatcaccttctgcatcatcggcatcgccaattacgtcttcggccccacattgaagaccattcctctgccgcagcagctcgccggccccaccgatctcggcttccgcaccatcgccacccatcgcatcttcgccattgcctgcgggctggccgtggccggcgcgctgtggttcaccttcgaaaagaccgccttcggtatcaagctgcgtgccgccgtcgataatgccgccatggcggcggcactcggcgtgcgcacggaaatcatctatgccgtcagctttgccatcgccgtcggccttgccgcgatgggcggcgtcatcggcgcggaactgctgccggtcgaaccctattacgcgctgcgctacatggtcaccttcctcgtggtggtttcggtcggcggcgcgggctccatacccggcgcgctgatcgcctgcctgctgctcggcgcgatcgatacgaccgggcggtatctcgccccggaatatggcgagttcttcttttatctggcggtcatcgtgatcatcaccttgttcccgcgcggccttctcggaagggcgaaatga

SEQ ID NO: 61123 - protein, 311 aa, Agrobacterium tumefaciens str. C58
MSGRQERPVSGPDGHRCTGRSFFSMQTVFSILIDALAYGMVLFIISIGLSVTMGLMRVVNLAHGAFAMIGGYLASYAAHGLGLGYAMAILVAIVGTIVIAIPLERFLYRRIYGAPELTQVLMTIGITFCIIGIANYVFGPTLKTIPLPQQLAGPTDLGFRTIATHRIFAIACGLAVAGALWFTFEKTAFGIKLRAAVDNAAMAAALGVRTEIIYAVSFAIAVGLAAMGGVIGAELLPVEPYYALRYMVTFLVVVSVGGAGSIPGALIACLLLGAIDTTGRYLAPEYGEFFFYLAVIVIITLFPRGLLGRAK

SEQ ID NO: 61124 - DNA, 888 bp, Agrobacterium tumefaciens str. C58
  CDS (1)..(888): transl_table=11
atgacgatgatcttcggcattccaattcaggccctgctcgggcaattgctgatcggcctgatcaacggctcgttttatgcgctgctgtcgctcggccttgccgtcattttcggcctgctgcgcgtcatcaattttgcccatggggcgcaatatatgctcggggcttttgtcgccttcctcggcctgcaatatttcggcatcaatttctggatggcgctcatcgttacgccgctcgtcgtcgcgcttttcggtgcgatcgtcgaacgtttcatgctgtcgcggctttatgatctcgatccgctttacgggctgcttttcaccttcggtctggcgctggtggtggaaggcacgttccgctggctttatggtgcggcgggccagccctattcggtgccgcgtgagcttgccggcggcaccaatctcggcttcatgttcctgccgaattatcgcgccttcgttgtcgtcatttcgctggtcgcctgcatcgccacctgggcgttgatcgaaaagacgcggctcggctcctatctgcgggcggcgacggaaaatccgacgctggtgcaggctttcggcatcaacgtgccggtgctgctgacgctgacttatgcgctgggtgccggccttgccgggttcaccggcgtgctggccgcacccatctatcaggtctcgccgctgatgggcaccaacctcatcatcgtcgttttcgccgtggtcgtcgtcggcggcatggggtcgatcatgggtgccatcgtcaccggttacatgctgggtatcgccgaaggcctgaccaaggtgttttaccctgaggcctccaatatcgtcatcttcgtcatcatggcctttgtgctgctcatccgccccgccggacttttcggaaaggacgcctga

SEQ ID NO: 61125 - protein, 295 aa, Agrobacterium tumefaciens str. C58
MTMIFGIPIQALLGQLLIGLINGSFYALLSLGLAVIFGLLRVINFAHGAQYMLGAFVAFLGLQYFGINFWMALIVTPLVVALFGAIVERFMLSRLYDLDPLYGLLFTFGLALVVEGTFRWLYGAAGQPYSVPRELAGGTNLGFMFLPNYRAFVVVISLVACIATWALIEKTRLGSYLRAATENPTLVQAFGINVPVLLTLTYALGAGLAGFTGVLAAPIYQVSPLMGTNLIIVVFAVVVVGGMGSIMGAIVTGYMLGIAEGLTKVFYPEASNIVIFVIMAFVLLIRPAGLFGKDA

SEQ ID NO: 61126 - DNA, 879 bp, Streptococcus pneumoniae R6
  CDS (1)..(879): transl_table=11
gtgaatcttatgctccaacaactcgtaaatggtttgattctaggtagtgtttacgcgctgttagccctaggatataccatggtttacggaattatcaagctcatcaacttcgcccatggtgatatttatatgatgggagcctttatcggttatttcttgatcaattctttccaaatgaatttctttgtagcgcttattgtagctatgctagcgacagctattcttggtgtcgtgattgagtttcttgcttaccgacctttgcgccactctactcgtattgctgttttgattacggctattggggtttctttcctattggagtatggaatggtctatctggttggtgccaatacccgtgccttccctcaagcgattcaaacagttcgatatgatttgggaccaattagcttaacaaatgtgcagttaatgattttgggcatttccttgattttgatgattttgttacaagtcattgtccaaaagactaagatggggaaagccatgcgtgcagtatcagtagatagcgacgcggcgcaattgatggggatcaatgtaaaccgtacgattagctttaccttcgctttgggttctgctcttgcgggtgcggctggtgttctgattgctctttattataactctcttgagcctttgatgggggttactccaggtcttaaatctttcgttgccgcagtacttggtggtatcggaattattcctggtgcggctcttggtggctttgtgattggtctattggaaacctttgcgacagcctttgggatgtcagatttccgtgatgccattgtttatggaatcttgttgttgatcttgattgtccgcccagctggtatccttggtaagaatgtgaaagagaaggtgtaa

SEQ ID NO: 61127 - protein, 292 aa, Streptococcus pneumoniae R6
MNLMLQQLVNGLILGSVYALLALGYTMVYGIIKLINFAHGDIYMMGAFIGYFLINSFQMNFFVALIVAMLATAILGVVIEFLAYRPLRHSTRIAVLITAIGVSFLLEYGMVYLVGANTRAFPQAIQTVRYDLGPISLTNVQLMILGISLILMILLQVIVQKTKMGKAMRAVSVDSDAAQLMGINVNRTISFTFALGSALAGAAGVLIALYYNSLEPLMGVTPGLKSFVAAVLGGIGIIPGAALGGFVIGLLETFATAFGMSDFRDAIVYGILLLILIVRPAGILGKNVKEKV

SEQ ID NO: 61128 - DNA, 903 bp, Sinorhizobium meliloti 1021
  CDS (1)..(903): transl_table=11
atggagtattttgtccagcagctcgtcaacgggctgacgcttgggtctatttatggtatgatcgcgatcggttataccatggtctacggcatcatcggcatgatcaacttcgcccacggcgatattttcatgcttggcggctttgccgcattgatcgtcttcttgcttctcacgacatttattgccggcgtgccggttgtactggcgcttttgatcatgatggtcgtcggtatgctgacggctgcgctttggaactggaccatcgagcgcgtggcctatcgcccgcttcgcggctccttccgtctggcgccgctgatcacggcgatcggcatgtcgatcgtgctgtcgaacttcattcaggtgacgcagggtccgcggaacaagccgatcccgccgctggtctcctcggtctatgacctgttcggcatctcggtttcgctgaagcagatcatcatcgtcgtcatcacggcaatcctgctttcggtcttctggtacatcgtcaaccgaactccgctcggacgagcccagcgtgcgaccgaacaggaccgcaagatggcagccttgctcggtgtcgatgtcgatcggacaatctcggtgaccttcatcatgggagccgcactcgccgccgtcgccgggacgatgtacctgatgtattacggcgtggtcgtgttcaccgacggtttcgctccgggtgtcaaggcgtttaccgctgccgttctcggtgggatcggttcgctgcccggcgccgtgctcggcggcttgctgatcggtctcatcgagtcgctgtggtccgcctacttcaccatcgactacaaggatgtcgcgaccttctcgattctcgcgatcgtcctgatcttcaagccgtcgggtattctcggacgaccggaagtcgagaaggtatag

SEQ ID NO: 61129 - protein, 300 aa, Sinorhizobium meliloti 1021
MEYFVQQLVNGLTLGSIYGMIAIGYTMVYGIIGMINFAHGDIFMLGGFAALIVFLLLTTFIAGVPVVLALLIMMVVGMLTAALWNWTIERVAYRPLRGSFRLAPLITAIGMSIVLSNFIQVTQGPRNKPIPPLVSSVYDLFGISVSLKQIIIVVITAILLSVFWYIVNRTPLGRAQRATEQDRKMAALLGVDVDRTISVTFIMGAALAAVAGTMYLMYYGVVVFTDGFAPGVKAFTAAVLGGIGSLPGAVLGGLLIGLIESLWSAYFTIDYKDVATFSILAIVLIFKPSGILGRPEVEKV

SEQ ID NO: 61130 - DNA, 891 bp, Sinorhizobium meliloti 1021
  CDS (1)..(891): transl_table=11
atggctttcgcgatccagttcgtcatcgacgtcctgagcctcggcggcgcctatgcgctcatggcactcggcctcgtcatcatctacggcatcctgcgcctcgtgaacttcgcctatggcgaactcatcatggtggccggctacacgatgtttctcgccagcggctcgggcctgccctggatcgtcatggcggtgctcgccgtcggcatggccatcctcttcggcatcatcaccgactatgccgccttccgtccggtgcgggccaaatcggtgacggcggtgctgatcacatccttcgccttctccaacctgctgcagaacgcggcgctcctcttcatctcgccgcgccctcgcaacgtgccgctcccggatatcttctcgcagaccgtctcgatcggcggtgcgatcaccccggtccgcaatctcatcaccatcgccgcctccatcgcactgctcgccggcgtcgccttcctgatgcgcaggacgacgctcggcatcgccatgcgcgcagcggcgacgaacttcaccatggcgcgcatgctgggagtgccggcgaacctcatcatctcgtccgccttcgccctttccggcttcctcgccggcgtcgtcggcattctctggatcggccgcatcggcaccgtcgttccgggcatcggcctggagccgctgctcgtcgccttcatcgccacggtcatcggcggcatgcggagcctgcccggcgccgttgtcgggggcttcctgctcgccctcatcgacaccacgctcaactacaccctgtcgcaggacctgctgaaattccgcgacgccttcaccttcagcctcgtcatcctgatcctgctctggcgccccgacggcctcatcaggggtccggcgagcggacagcggacctga

SEQ ID NO: 61131 - protein, 296 aa, Sinorhizobium meliloti 1021
MAFAIQFVIDVLSLGGAYALMALGLVIIYGILRLVNFAYGELIMVAGYTMFLASGSGLPWIVMAVLAVGMAILFGIITDYAAFRPVRAKSVTAVLITSFAFSNLLQNAALLFISPRPRNVPLPDIFSQTVSIGGAITPVRNLITIAASIALLAGVAFLMRRTTLGIAMRAAATNFTMARMLGVPANLIISSAFALSGFLAGVVGILWIGRIGTVVPGIGLEPLLVAFIATVIGGMRSLPGAVVGGFLLALIDTTLNYTLSQDLLKFRDAFTFSLVILILLWRPDGLIRGPASGQRT

SEQ ID NO: 61132 - DNA, 888 bp, Sinorhizobium meliloti 1021
  CDS (1)..(888): transl_table=11
atgacgatgattttcggaattcccctccaggccttcctcgggcagctgctgatcgggctcatcaacggctccttctatgcgctcctgagcctcggcctcgccatcatcttcgggctcctgcgcgtcatcaacttcgcccacggtgcgcagtatatgctcggcgccttcatggcctggctgctgctctcctatttgggcatcggctattggccggcgctcattctcgcgccccttctcgtcggcctcatcggcgccgttatcgaacgcacgatgctgagacggctctatacgctcgatccgctctacggcctcctcttcaccttcggcctggcgctcaccatcgaaggcaccttccgctatctctacggcgcgtccggccagccctatgcgacgccggcgctgcttatgggcggggccaatctcggcttcatgttcctgccaatctatcgcggctgggtcatcgtcttttcgctggtgatctgcctcggcacctggctcatgatcgagaagaccaagctcggctcctatctgcgcgccgctacggagaatccggtcctggtgcaatccttcggcatcaacgtgccctttctgctgacgctgacctacgggctcggcgcggcgctcgccgcaattgccggagttctcgcggcgccgatctaccaggtctcgccgctgatgggatcgaacatcatcatcgtcgtcttcgcagtggtcgtcgtcggcggcatgggctcgatcatgggcgcgatcgtcaccggttatctgctgggcatcgccgaaggactgaccaaggtcttctatccggaggcctccaacatcgtgatcttcgtgatcatggccatcgttctcctgctgaggcccgcgggtctcttcggtcgggatgcttga

SEQ ID NO: 61133 - protein, 295 aa, Sinorhizobium meliloti 1021
MTMIFGIPLQAFLGQLLIGLINGSFYALLSLGLAIIFGLLRVINFAHGAQYMLGAFMAWLLLSYLGIGYWPALILAPLLVGLIGAVIERTMLRRLYTLDPLYGLLFTFGLALTIEGTFRYLYGASGQPYATPALLMGGANLGFMFLPIYRGWVIVFSLVICLGTWLMIEKTKLGSYLRAATENPVLVQSFGINVPFLLTLTYGLGAALAAIAGVLAAPIYQVSPLMGSNIIIVVFAVVVVGGMGSIMGAIVTGYLLGIAEGLTKVFYPEASNIVIFVIMAIVLLLRPAGLFGRDA

SEQ ID NO: 61134 - DNA, 897 bp, Agrobacterium tumefaciens str. C58
  CDS (1)..(897): transl_table=11
atggccgagttcgactggcttttctttatcgaggtgctgatcggcgggctgctctccggggtcatgtattcgctcgtcgcgatcggtttcgtgctgatctacaagacatcgggtgttctaaacttttcgcagggagcgcttctcctgttcgccgcgctgactttcgtcagccttgtcgaacgtggcgtaccctttgcccccgcgttcgcgattacgtttgccatcatggtggtcatcggtattgcgatcgaacgtgtggtgctccggccgctcaccaacaaaccgccgatcacgctgtttatggcaacgctcggtctttcctacatcatcgagggtgcggcccaactcctttgggggacgcaggttcacggcctcgatctcggcatcgaggatattcctttcgatgtcggcggggtgttcatcagccagttcgacatctttgccgcgctcgtcgcggccggcatggtggcggctctctcggcctttttccgttatacccgcattggcctcggtttccgtgctgtcgccgatgaccagttcgcggctctggctgtcggtctgaggttgccctggatatgggcgagcgtctgggcggcggcaggtctcgttgctctggttgcgggactgctctggggcgcgcgcgtcggcgtgcagttctcgctgtcgctggtggtgctgaaagcgctgccggtgctggttctcggcggcttcgattccattctcggcgcgatcattggtggtctgcttgtcggcgcgtcggaaaagctcgccgaggtctatatcggcgaatatttcggcggcggcatcgagggctggtttgcctatgtcgtggcgcttgcctttctgctgatccgtccctccggcctgttcggtcaaaagttcgtggaaagggtctga

SEQ ID NO: 61135 - protein, 298 aa, Agrobacterium tumefaciens str. C58
MAEFDWLFFIEVLIGGLLSGVMYSLVAIGFVLIYKTSGVLNFSQGALLLFAALTFVSLVERGVPFAPAFAITFAIMVVIGIAIERVVLRPLTNKPPITLFMATLGLSYIIEGAAQLLWGTQVHGLDLGIEDIPFDVGGVFISQFDIFAALVAAGMVAALSAFFRYTRIGLGFRAVADDQFAALAVGLRLPWIWASVWAAAGLVALVAGLLWGARVGVQFSLSLVVLKALPVLVLGGFDSILGAIIGGLLVGASEKLAEVYIGEYFGGGIEGWFAYVVALAFLLIRPSGLFGQKFVERV

SEQ ID NO: 61136 - DNA, 1158 bp, Agrobacterium tumefaciens str. C58
  CDS (1)..(1158): transl_table=11
atgcctatccggcgccgatcaaaccgctgccctattcggcctatggggagacggaaagcaatctgttctgcaccaccaacggtctcgacgcagcaaagctcaaaggctgacccctccccgcgtggtcccgccgaaccatgtttggcgggacaaagtctcggcaaggcggatctgcgttttttgtctgctcggcaccaacccgatttcggcaatggtaagaagcagaacaaagtctggtccgcccttctcacgaacggtggcgttatgctcgacattctctttatcggtctcagtctcggctcgatccttcttctggtggcactcggtctcgccatcacctacggcgccatgggcgtcatcaatatggcccatggcgaaatggtcatgatcggcgcttatgtcgccgtcctctcaggtatctggctgaaaactagccttctgcttgcaatacccctggcttttgtcgtgacggcgttgctcggcctgataatcgagcgggtggttgtgcggcgactctacggccgcctgctggacacgcttctcgccacctggggcattgccatccttctgcagcaagccgtaaggctcgaactgggcctcacctttttaggcattcatatagaagggctgggagctggactgcaaaatgtggccgtgccttcatatctgcagggcactttcaggttcgccggcgccgacatcaacgcgtatcgcaccttcatcatcgcggtgaccgccgcgctgacgctggcgacatggttcatcctctaccggacgacagccggcatgcaggtgcgcgccatcattcgcaacccgaagatggctgcggcctgcggcatcgatgtaaaacgcattaacgcgctcactttcgccttcggttccggtctcgccggtgttgcgggggtcatgatgtccggcttcaagaccgtgttcccggatatgggcacaacgatggtcgtggacggtttcatggtcgtggtaacgggcggcgtcggcagtctcttcggtacggccctgtcttccgggcttctcggcgaaatcaacgcgctggtggccatcggcacgaacgacattctggcgcgcgccgtcgttttcggggtcgtcatcctcgtcattctcgtaaagcccagcgggctgttctccttcaaggggcgctga

SEQ ID NO: 61137 - protein, 385 aa, Agrobacterium tumefaciens str. C58
MPIRRRSNRCPIRPMGRRKAICSAPPTVSTQQSSKADPSPRGPAEPCLAGQSLGKADLRFLSARHQPDFGNGKKQNKVWSALLTNGGVMLDILFIGLSLGSILLLVALGLAITYGAMGVINMAHGEMVMIGAYVAVLSGIWLKTSLLLAIPLAFVVTALLGLIIERVVVRRLYGRLLDTLLATWGIAILLQQAVRLELGLTFLGIHIEGLGAGLQNVAVPSYLQGTFRFAGADINAYRTFIIAVTAALTLATWFILYRTTAGMQVRAIIRNPKMAAACGIDVKRINALTFAFGSGLAGVAGVMMSGFKTVFPDMGTTMVVDGFMVVVTGGVGSLFGTALSSGLLGEINALVAIGTNDILARAVVFGVVILVILVKPSGLFSFKGR

SEQ ID NO: 61138 - DNA, 1614 bp, Sinorhizobium meliloti 1021
  CDS (1)..(1614): transl_table=11
atgtaccgcatcatcccaaccgtgctggctgccctgttccttttcgttgcgatggctccggggcttcgcgcggaagagggactgcgcgatctggtgaacgcgctcggcgaggcgaagctgtccgagatggacgagcatatcgcggcactggcgaagaccggaaagcccgaagtcgtcgccatcctcgaggcgctcggggaaggcgagctctatgcgcgcaaggcggacggccaggtcttgttgacgaaggagagcggttcgaacctgacccttacggatccgatctccggcgacagcgccggcgaagcgccgaaggcggcactttcgaagatcagggtgaacaacagcgtgcggcgcgccgtgcgcaccgccctcggcagcctgacgctcctcagccccgatcgcaatcagcgcctcagggccgcgcagtcggtgctgcaatcgcccgatgccgacgcgctcggcgtcatcgagaatgcactggctgccgagaaggatggagccgttcgtgcggttctcgaacaggcgcgcgccacgatgctgcttctctccgaccggccggtcgaggagaagaaggaggcggtgcggctgctggaggaaaacggcggccgcgaggcgctgccgatcctttctgccgcgctcggctctgccgacgaaagcctgaagccggacatcgaggcggcgctcgccagcatcgaacaggcgcaagccttctggaatgcgggccagaacatatggtacggcctgtcgctcggctcggtgctgctcttggcggcgatcggtctcgccatcaccttcggcgtcatgggcatcatcaacatggcgcatggcgagatggtgatgctcggggcctatacgaccttcctcgttcaagatgtcgtgcgcacctcctttcctcatcttttcgagtggtccttggcgatcgcgctgccgctcgcctttcttgttacaggcgccgtgggcctcgcactggaacgcggcgtcatccgctttctctacgggcgcccgctcgaaacgctgcttgccacctggggcatatcgctcatcctccagcagacggtgcggacgatcttcggccccaccaaccgtgaggtcggcaatccgtcctggatgtccggcgccttcgagctcggcggactggcgatcacctggaaccgtctctggatcatcgtctttgcgcttgcggtgtttgcggcacttctctttctgctcaagaagacgccgatgggcctgcagatgcgcgcggtaacgcagaaccggcgcatggcctcttccatgggcatccgcacgccctgggtcgatgcgctgaccttcgcgctcggctccggcatcgccggcattgcgggtgtggcgctttcgcagatcgacaacgtctcgccgaacctcgggcagggctacataatcgacagcttcatggtcgtggtcttcggcggcgtcggcaatctctggggcacgcttgtcggcgccttctcgctcggcatcctcaacaagttcctggagccctatgccggcgccgtgctcggcaagatcctcgtgctcgtgctgatcatcctcttcatccagaagcggccgcgcgggctcttcgcactcaagggccgggcggtggaagcatga

SEQ ID NO: 61139 - protein, 537 aa, Sinorhizobium meliloti 1021
MYRIIPTVLAALFLFVAMAPGLRAEEGLRDLVNALGEAKLSEMDEHIAALAKTGKPEVVAILEALGEGELYARKADGQVLLTKESGSNLTLTDPISGDSAGEAPKAALSKIRVNNSVRRAVRTALGSLTLLSPDRNQRLRAAQSVLQSPDADALGVIENALAAEKDGAVRAVLEQARATMLLLSDRPVEEKKEAVRLLEENGGREALPILSAALGSADESLKPDIEAALASIEQAQAFWNAGQNIWYGLSLGSVLLLAAIGLAITFGVMGIINMAHGEMVMLGAYTTFLVQDVVRTSFPHLFEWSLAIALPLAFLVTGAVGLALERGVIRFLYGRPLETLLATWGISLILQQTVRTIFGPTNREVGNPSWMSGAFELGGLAITWNRLWIIVFALAVFAALLFLLKKTPMGLQMRAVTQNRRMASSMGIRTPWVDALTFALGSGIAGIAGVALSQIDNVSPNLGQGYIIDSFMVVVFGGVGNLWGTLVGAFSLGILNKFLEPYAGAVLGKILVLVLIILFIQKRPRGLFALKGRAVEA

SEQ ID NO: 61140 - DNA, 861 bp, Synechocystis sp. PCC 6803
  CDS (1)..(861): transl_table=11
atggatctatcacagttaatctttaatggcattgcggtgggaagcattatcgccctgggggcagtggggttgaccctgacctatggcattttacgcctgtctaattttgcccatggtgattttatgactttggcggcctatttaacttggtgggccaacaccagcggcattaatttgtggttatccatggccctgggttgtgtcggtaccatcattgccatgttcattggtgaatggttgctctggaagcccatgcgggcccggcgggctacggcaacaacgctgatcattatttccattggtctagccctatttctccgcaacggcatcctcttgatctggggtggcaataaccaaaattaccgagtgcccattgtccctgcccaggattttatgggcattaaatttgagtattaccgtctactggtcattgctatggcgatcgccgccatggtggtgttgcatttgattttgcaaaggacgaaagtgggcaaagcgatgcgggccgtggcggacaatgttgatctggcgaaagtatccggcatcaacgtggaatgggtagtgatgtggacctgggtaatgaccgcagtgttaacagccctaggaggatccatgtatggcctgatgaccaccctgaaaccgaatatggggtggtttttgattttgcccatgtttgcttcggtgattctagggggcattggtaatccctacggggcgatcgccggggggataattattggcgtagcccaggaagtgagcgtgccttggtttggcaccagttacaaaatgggggtggcattgctgttgatgatcatcattttgttcattcgtccccaaggtttgtttaaaggcactcaataa

SEQ ID NO: 61141 - protein, 286 aa, Synechocystis sp. PCC 6803
MDLSQLIFNGIAVGSIIALGAVGLTLTYGILRLSNFAHGDFMTLAAYLTWWANTSGINLWLSMALGCVGTIIAMFIGEWLLWKPMRARRATATTLIIISIGLALFLRNGILLIWGGNNQNYRVPIVPAQDFMGIKFEYYRLLVIAMAIAAMVVLHLILQRTKVGKAMRAVADNVDLAKVSGINVEWVVMWTWVMTAVLTALGGSMYGLMTTLKPNMGWFLILPMFASVILGGIGNPYGAIAGGIIIGVAQEVSVPWFGTSYKMGVALLLMIIILFIRPQGLFKGTQ

SEQ ID NO: 61142 - DNA, 867 bp, Nostoc sp. PCC 7120
  CDS (1)..(867): transl_table=11
atggacatacaaacgattcaactgattgtcaatggtattgctgtaggtagtattatcgctcttgcagctgtgggactgactttaacttatggaattttacggttgtctaattttgcccacggtgatttcttaactttaggggcttatctgactttttttgtcaacacttttggggtaaatatttggttatcgatgatagtggcagtagtgggaacggtgggagtaatgttactgtcagaaaaattgctatggtctagaatgcgctcgattcgagctaattccactactcttattattatctcaattgggctggcattattcctgcgtaacgggattattttaatttggggtggcaggaaccaaaattataatttacccatcacccccgccttagatattttcggagtgaaagtaccacaaaatcaattgctggtgttggcattggcagtattatccatcggcgcactgcactacctcttacaaaacacaaaaattggtaaggcgatgcgtgctgttgctgacgatttggatttagccaaggtttcaggtattgatgtagagcaagtaattttttggacttggctaattgccggcacagtcacctctttaggtggcagtatgtatggcttaattacggcagtgcgtcccaatatgggttggttcttgattctgccgctattcgcttctgtaatcttgggcggtattggcaacccttacggtgcgatcgccgcagcttttatcattggtattgttcaagaagttagtacacccttcttaggttcccaatacaaacaaggtgtagccctactaatcatgattttggtgttgctcattcgtcctaaaggtttatttaaaggcacgatgtga

SEQ ID NO: 61143 - protein, 288 aa, Nostoc sp. PCC 7120
MDIQTIQLIVNGIAVGSIIALAAVGLTLTYGILRLSNFAHGDFLTLGAYLTFFVNTFGVNIWLSMIVAVVGTVGVMLLSEKLLWSRMRSIRANSTTLIIISIGLALFLRNGIILIWGGRNQNYNLPITPALDIFGVKVPQNQLLVLALAVLSIGALHYLLQNTKIGKAMRAVADDLDLAKVSGIDVEQVIFWTWLIAGTVTSLGGSMYGLITAVRPNMGWFLILPLFASVILGGIGNPYGAIAAAFIIGIVQEVSTPFLGSQYKQGVALLIMILVLLIRPKGLFKGTM

SEQ ID NO: 61144 - DNA, 951 bp, Nostoc sp. PCC 7120
  CDS (1)..(951): transl_table=11
atggatattagtgtatttttacaacaattattgaatgggttatctattggcagcgtttatgcaatctttgccttaggttatacattggtttattccattttgggaattattaatttagcacatggggcaatttttactctgggagcatattttacttatgctcttatgggtggaacctttgggtttaatggtttgctggctaacgctactttgccgatacaattaccatttgctatggcattgattatgggtagtagtttagctggtttagtgggagtagcaatggaaagaattgcttttcaacctttacgaaaaaaaggatctgacaccttactaactgtggtttctagcttaggggtagcagtggtaattgtgaacctaattcaatatttagtaggtgcagaaagttatacatttccagcaaatacttttgggaatttacccccagcgtttaactttggaactttggaaaaaccgattcctattcgtagcgtacaggtggtaatttttactgtatctgttgtgattgtggctattcttacttactttattaatcgtactaaatacggtaaagcaattcaggcgatcgccgaagatgccactactgctagtttattaggtatcaatagcgatcgctttattgtcttaactttttttatcagcagttttctcgctggcttggcgggtacattagtcgcttctagtgtaagcattgcaggcccttattttgggattggctttgggttgcggggtttagcggtgattgttttgggtggcttaggtagcattcctggcgcagtgctgggaggtttactgattggtgtggttgaggcgctggttccctctgattactctggttataaagacgctgtagctttcggcattttgtttatcatgctattagttagaccccaaggattattaggtcgtcggtttattcagaaagtctga

SEQ ID NO: 61145 - protein, 316 aa, Nostoc sp. PCC 7120
MDISVFLQQLLNGLSIGSVYAIFALGYTLVYSILGIINLAHGAIFTLGAYFTYALMGGTFGFNGLLANATLPIQLPFAMALIMGSSLAGLVGVAMERIAFQPLRKKGSDTLLTVVSSLGVAVVIVNLIQYLVGAESYTFPANTFGNLPPAFNFGTLEKPIPIRSVQVVIFTVSVVIVAILTYFINRTKYGKAIQAIAEDATTASLLGINSDRFIVLTFFISSFLAGLAGTLVASSVSIAGPYFGIGFGLRGLAVIVLGGLGSIPGAVLGGLLIGVVEALVPSDYSGYKDAVAFGILFIMLLVRPQGLLGRRFIQKV

SEQ ID NO: 61146 - DNA, 936 bp, Ralstonia solanacearum GMI1000
  CDS (1)..(936): transl_table=11
atggatatctttatccagcagatcgtgaacggcctggtgctcggcagcatttacgcgctgatcgcacttggctacaccatggtctacggcattctcggcatcatcaacttcgcccacggcgatgtcctgatgatcggcgcgatgtccgcactgaccgccatcaacttcctccagaagttcttccccaacctgcctgactggctgacgctggtcctggcgctgctgtttgcgatgccggtctgcgccgtcgtcgcatacaccatcgaacgggtcgcctaccggccgctgcgcaatgcgccgcgcttggcgccgctgatcaccgccatcggcgtgtcgatcgtgctgcagaccctggcgatgatgatctggtcgcgcaacccgctgaccttcccgcaactgctgccctcgtcgccgatcgacatcggttcgaccggcgcgacgatcacgggcaaggagatcgccatcatcctggtgtcgctggcggtcatgaccgggctgacgctgctggtcaaccgcaccaagctcggccgcgccatgcgcgccactgccgagaaccagcgcgtggccggcctgatgggtgttaaccccaacttcgtcatctccgccacgttcatgatcggcgctgccatggcagccgtcgccggcgtgatgatggccaccaactacggcaatgcccacttctacatgggcttcattcccggcctgaaggcgttcaccgccgcggtgctgggcggcatcggcaacctggcgggcgccatggtgggcggtgtgctgctgggcctgatcgaggccctgggtgccggctatatcggcgatctgactggcggtgtgttcggttcgaactaccaggatgtgttcgcgttcattgtgctgatttgcgtgctgctgttccgcccgtccggcatcatgggcgaacgcgttgcagaccgtgcataa

SEQ ID NO: 61147 - protein, 311 aa, Ralstonia solanacearum GMI1000
MDIFIQQIVNGLVLGSIYALIALGYTMVYGILGIINFAHGDVLMIGAMSALTAINFLQKFFPNLPDWLTLVLALLFAMPVCAVVAYTIERVAYRPLRNAPRLAPLITAIGVSIVLQTLAMMIWSRNPLTFPQLLPSSPIDIGSTGATITGKEIAIILVSLAVMTGLTLLVNRTKLGRAMRATAENQRVAGLMGVNPNFVISATFMIGAAMAAVAGVMMATNYGNAHFYMGFIPGLKAFTAAVLGGIGNLAGAMVGGVLLGLIEALGAGYIGDLTGGVFGSNYQDVFAFIVLICVLLFRPSGIMGERVADRA

SEQ ID NO: 61148 - DNA, 882 bp, Ralstonia solanacearum GMI1000
  CDS (1)..(882): transl_table=11
atgctggaacagcaactcgtcaacgcgctgtcgctcggttgcgtgtatgcgttgttcgcgctgggattcacgctggttttcggcatcctgggcgtgatcaacctgtcgcacggcgcagtgttcatgctgggcgcctacgcggcgctgcagttcgtggcgcatttcgaactgccgctgtgggcggcgctgctggtcggctttgccgcaagcggcgtggcgggcctcatcatcgatgtgctgctgctgcgcccgctgcgccgccgcaacgctccccacctgatcccgatgatcgccaccatcggcgcgggcatcgccatcaacaacgccatgcagggcgtgttcggcgcggagaacctgcgctttccggccgggctcgtctccgatgcgtcgctcgacctgggcggtgttcacctgacgccgctggagctgggcatcatcgtgctgtcgttcgcgctgatggcggcgctgatgctgctgctcaagcgcacgcagctgggccgcgcgctgcgcgccatcgcggagtcgcccaaggcggcggcgctgctgggcatcaatgtcgagggcctgttcctgctgacgtcgttcgcggcggcggcgctgggcgggctggccggcgtgctgattggcctgtattcgaacgcggtgtttccgctgatgggccagccgatgctgcacaagggcatcgcggtcatcatcctgggcggcctgggcgacattcgcggcgcgatgctgggcgggctgttcctcgggttcgccgaggtgctgtcggtggcctacatcggctcgaccatgcgcgacgcggtggcgttcggcctgctgttcctgatcctgctggtgcgcccgcaagggctgttcggcaaggtgctcgaacgcaaggcctga

SEQ ID NO: 61149 - protein, 293 aa, Ralstonia solanacearum GMI1000
MLEQQLVNALSLGCVYALFALGFTLVFGILGVINLSHGAVFMLGAYAALQFVAHFELPLWAALLVGFAASGVAGLIIDVLLLRPLRRRNAPHLIPMIATIGAGIAINNAMQGVFGAENLRFPAGLVSDASLDLGGVHLTPLELGIIVLSFALMAALMLLLKRTQLGRALRAIAESPKAAALLGINVEGLFLLTSFAAAALGGLAGVLIGLYSNAVFPLMGQPMLHKGIAVIILGGLGDIRGAMLGGLFLGFAEVLSVAYIGSTMRDAVAFGLLFLILLVRPQGLFGKVLERKA

SEQ ID NO: 61150 - DNA, 942 bp, Agrobacterium tumefaciens str. C58
  CDS (1)..(942): transl_table=11
gtggacgaggcgatttccagcatcgagagcgcactggccttctgggattatgcgcagaatgtctggtatggcctgtcgctcggttccgtgctgctgctggccgccatcggccttgccatcaccttcggcgtgatgggcatcatcaacatggcacatggcgagatggtgatgatcggcgcttactccaccttcatggtgcaggaagtgatccgcagtcacttccccggcctgttcgactggtcgctggcgattgccttgccagtcgcctttctggtgacaggttttgtcggcctcgtgatggaacgaggcgtcatccgcttcctctacgggcggcctttggaaacgctgctcgccacctggggcatctcgctgatgttgcaacagggcgtacgctccattttcggccccaccaaccgggaggttggcagccccggctggatgtccggctccttcagcgtcggttatctcaatttcacctggaaccgggtgtggatcgtctgcttctcgctgtcggtgttcttcgcgctgctggtgcttctgaagcgctccgccttcggtctgcagatgcgcgccgtgactcagaaccgccgcatggcctcctccatgggcattcgcacgccctgggtggatgccttcaccttcgcgctcggttcaggcgttgccgggcttgccggcgttgcgctatcgcagatcgacaatgtctcgcccaatctcggccagagctacatcatcgacagtttcatggtggtggtgttcggcggcgtcggcaatctctggggaacgctggtgggtgcattgtcgctcggcgtgctcaacaagttcctcgagccgacggtgggcgccgtgctcggcaagatcctcgtgctcgttctcatcatcctgttcatccagaagcggccgcgcggtctcttcgcactcaagggaagggcgatcgaagcatga

SEQ ID NO: 61151 - protein, 313 aa, Agrobacterium tumefaciens str. C58
MDEAISSIESALAFWDYAQNVWYGLSLGSVLLLAAIGLAITFGVMGIINMAHGEMVMIGAYSTFMVQEVIRSHFPGLFDWSLAIALPVAFLVTGFVGLVMERGVIRFLYGRPLETLLATWGISLMLQQGVRSIFGPTNREVGSPGWMSGSFSVGYLNFTWNRVWIVCFSLSVFFALLVLLKRSAFGLQMRAVTQNRRMASSMGIRTPWVDAFTFALGSGVAGLAGVALSQIDNVSPNLGQSYIIDSFMVVVFGGVGNLWGTLVGALSLGVLNKFLEPTVGAVLGKILVLVLIILFIQKRPRGLFALKGRAIEA

SEQ ID NO: 61152 - DNA, 903 bp, Agrobacterium tumefaciens str. C58
  CDS (1)..(903): transl_table=11
atggagtattttatccagcagctcatcaacgggctgactcttggatcgatctatggcctcatcgctatcggctacacgatggtttacggcatcatcggcatgatcaacttcgcccatggcgatattttcatgcttggcggctttgccgcgctgatcgtatttctgatcgcaacatcgtttttcgccggcattccggtggcgcttcttctgcttttgatgatgatcgtcgccatgctgatgaccggcctgtggaactgggtgatcgagcgtgttgcctaccgcccgctcagaggttccttccgccttgcgccgctgatcactgccatcggcatgtcgatcgcgctgtccaacttcattcaggtcacccagggcccgcgcaacaagccgatcccgtcgatggtgacggaaagctatcatttcggcgccatcaccgtgtcgctgaagcagctgatcatcatggtcgttacctcggtactgcttttcgccttctggtatatcgtcaacaagaccccgctcggccgggcgcagcgcgccaccgagcaggaccgcaagatggccgcccttttgggggttgatgtggacaagacgatttccatcaccttcatcatgggtgcggcgctggctgcggtcgcgggcaccatgtatctgatgtattacggtgttgcttcgttcagcgacggcttcgttcccggcgtcaaggccttcaccgcggccgtcctcggcggcatcggctcgcttccgggcgccgttcttggtggcctgctgatcggtctcatcgaatcactgtggtcggcctatttctccattgcctacaaggatgttgcggcattcggcatcctggcattcgtgctgatcttcaagccgaccggtattctcggtcgtccggaagtcgagaaggtgtga

SEQ ID NO: 61153 - protein, 300 aa, Agrobacterium tumefaciens str. C58
MEYFIQQLINGLTLGSIYGLIAIGYTMVYGIIGMINFAHGDIFMLGGFAALIVFLIATSFFAGIPVALLLLLMMIVAMLMTGLWNWVIERVAYRPLRGSFRLAPLITAIGMSIALSNFIQVTQGPRNKPIPSMVTESYHFGAITVSLKQLIIMVVTSVLLFAFWYIVNKTPLGRAQRATEQDRKMAALLGVDVDKTISITFIMGAALAAVAGTMYLMYYGVASFSDGFVPGVKAFTAAVLGGIGSLPGAVLGGLLIGLIESLWSAYFSIAYKDVAAFGILAFVLIFKPTGILGRPEVEKV

SEQ ID NO: 61154 - DNA, 864 bp, Agrobacterium tumefaciens str. C58
  CDS (1)..(864): transl_table=11
atgcagacggtcttcagcatcctcatcgatgcgcttgcctatggcatggtcctgttcatcatctccatcggcctttccgtcacaatggggctgatgcgggtggtcaatctggcacacggcgcgttcgcgatgatcggcggttatctcgcgtcttatgccgcccacggcctcggccttggttatgcgatggcgatcctcgttgcgattgtcggcaccatcgtcatcgccataccgctcgaacgtttcctctatcgccgcatctatggcgcgccagagctgacgcaggtgctgatgaccatcggcatcaccttctgcatcatcggcatcgccaattacgtcttcggccccacattgaagaccattcctctgccgcagcagctcgccggccccaccgatctcggcttccgcaccatcgccacccatcgcatcttcgccattgcctgcgggctggccgtggccggcgcgctgtggttcaccttcgaaaagaccgccttcggtatcaagctgcgtgccgccgtcgataatgccgccatggcggcggcactcggcgtgcgcacggaaatcatctatgccgtcagctttgccatcgccgtcggccttgccgcgatgggcggcgtcatcggcgcggaactgctgccggtcgaaccctattacgcgctgcgctacatggtcaccttcctcgtggtggtttcggtcggcggcgcgggctccatacccggcgcgctgatcgcctgcctgctgctcggcgcgatcgatacgaccgggcggtatctcgccccggaatatggcgagttcttcttttatctggcggtcatcgtgatcatcaccttgttcccgcgcggccttctcggaagggcgaaatga

SEQ ID NO: 61155 - protein, 287 aa, Agrobacterium tumefaciens str. C58
MQTVFSILIDALAYGMVLFIISIGLSVTMGLMRVVNLAHGAFAMIGGYLASYAAHGLGLGYAMAILVAIVGTIVIAIPLERFLYRRIYGAPELTQVLMTIGITFCIIGIANYVFGPTLKTIPLPQQLAGPTDLGFRTIATHRIFAIACGLAVAGALWFTFEKTAFGIKLRAAVDNAAMAAALGVRTEIIYAVSFAIAVGLAAMGGVIGAELLPVEPYYALRYMVTFLVVVSVGGAGSIPGALIACLLLGAIDTTGRYLAPEYGEFFFYLAVIVIITLFPRGLLGRAK

SEQ ID NO: 61156 - DNA, 894 bp, Agrobacterium tumefaciens str. C58
  CDS (1)..(894): transl_table=11
atgctcgacattctctttatcggtctcagtctcggctcgatccttcttctggtggcactcggtctcgccatcacctacggcgccatgggcgtcatcaatatggcccatggcgaaatggtcatgatcggcgcttatgtcgccgtcctctcaggtatctggctgaaaactagccttctgcttgcaatacccctggcttttgtcgtgacggcgttgctcggcctgataatcgagcgggtggttgtgcggcgactctacggccgcctgctggacacgcttctcgccacctggggcattgccatccttctgcagcaagccgtaaggctcgaactgggcctcacctttttaggcattcatatagaagggctgggagctggactgcaaaatgtggccgtgccttcatatctgcagggcactttcaggttcgccggcgccgacatcaacgcgtatcgcaccttcatcatcgcggtgaccgccgcgctgacgctggcgacatggttcatcctctaccggacgacagccggcatgcaggtgcgcgccatcattcgcaacccgaagatggctgcggcctgcggcatcgatgtaaaacgcattaacgcgctcactttcgccttcggttccggtctcgccggtgttgcgggggtcatgatgtccggcttcaagaccgtgttcccggatatgggcacaacgatggtcgtggacggtttcatggtcgtggtaacgggcggcgtcggcagtctcttcggtacggccctgtcttccgggcttctcggcgaaatcaacgcgctggtggccatcggcacgaacgacattctggcgcgcgccgtcgttttcggggtcgtcatcctcgtcattctcgtaaagcccagcgggctgttctccttcaaggggcgctga

SEQ ID NO: 61157 - protein, 297 aa, Agrobacterium tumefaciens str. C58
MLDILFIGLSLGSILLLVALGLAITYGAMGVINMAHGEMVMIGAYVAVLSGIWLKTSLLLAIPLAFVVTALLGLIIERVVVRRLYGRLLDTLLATWGIAILLQQAVRLELGLTFLGIHIEGLGAGLQNVAVPSYLQGTFRFAGADINAYRTFIIAVTAALTLATWFILYRTTAGMQVRAIIRNPKMAAACGIDVKRINALTFAFGSGLAGVAGVMMSGFKTVFPDMGTTMVVDGFMVVVTGGVGSLFGTALSSGLLGEINALVAIGTNDILARAVVFGVVILVILVKPSGLFSFKGR

SEQ ID NO: 61158 - DNA, 924 bp, Brucella melitensis 16M
  CDS (1)..(924): transl_table=11
atgggtggcttctctatggaatatttcttccagcaggtgatcaacgggcttgcgctcggttcgatttatggcctgatcgccatcggttatacgatggtctatggcattatcggcatgatcaactttgctcatggcgatatcttcatgctcggcgcgttcatggcgctgattgttttcctcattatcacgaccttcatcggaatgctgccggttgcactgatgctgcttttgatgatgatcgtcgccatgcttctgacgggtctgtggagctgggcgatcgagcgcgtggcctatcaaccgctgcgtggttcgttccgccttgcgccgctgatcacggctatcggcatgtcgattgccttgtcgaacttcgttcaggtcacgcagggtccgcgcaacaagccggttccccagcttctgaatggttcctacgagctgttcggcagcggcggcacgatctcgctcaagcagatcgtggtgatcgtggttacggcaatattgctcacgatcttctggtatgtcgtcaaccgcacctcgctggggcgcgcgcaaagggcttgcgagcaggatcgcaagatggcggcccttcttggcatcaatgtcgaccgtgtcatctcgctcaccttcgtgatgggcgccatgctggcggccgtagccgggacgctttacctctccttctatggcgtgatttcgttcgctgacgggttcatccccggtgtgaaggcgttcacggcggcggttctgggcggcatcggctcgcttccgggggctgttgtcggcgggttgcttatcggtctcatcgaagcgttgtggtcggcctatttctcgatcgactacaaggacgtcgccgcgttctcgatcctggctatcgtgctgatcttcatgccgtccggcattcttggccgacctgacgtcgaaaaggtgtaa

SEQ ID NO: 61159 - protein, 307 aa, Brucella melitensis 16M
MGGFSMEYFFQQVINGLALGSIYGLIAIGYTMVYGIIGMINFAHGDIFMLGAFMALIVFLIITTFIGMLPVALMLLLMMIVAMLLTGLWSWAIERVAYQPLRGSFRLAPLITAIGMSIALSNFVQVTQGPRNKPVPQLLNGSYELFGSGGTISLKQIVVIVVTAILLTIFWYVVNRTSLGRAQRACEQDRKMAALLGINVDRVISLTFVMGAMLAAVAGTLYLSFYGVISFADGFIPGVKAFTAAVLGGIGSLPGAVVGGLLIGLIEALWSAYFSIDYKDVAAFSILAIVLIFMPSGILGRPDVEKV

SEQ ID NO: 61160 - DNA, 999 bp, Brucella melitensis 16M
  CDS (1)..(999): transl_table=11
gtggaccgctcccctgttcgagctgaacttccaatcacggaccagaccatggatcagattctctttgccgtattgaacggcgcgatctacggattgctgctgttcatggtttcggcgggtctcaccctcattttcggcatgatgggggttctcaacttcgcacatgcttccttctatatgatgggagcctatttcgcttacacgcttcagccgcttaccggcttctggcttgcaatcctgattgcgcccgtgatcgtcggcattgtcggcattgtcggcgttctggttgaacgcttcattttgcgccgtgtccacgctttcggccatgcgcatgaattgctggtcacgttcggcctctcggtggtcattgctgaagtcatcaagattttctacggcaatttcgccgtcgaataccgcattcccgcagcactgcaattttcggctttcgatcttggcggggtgagctatccattctaccgcctgttcataggtgccgtggcgctggtgatgttcctgctgatctatctgctgctcacgcgcacccgcatcggcatcgtcgttcgctcggcaatctatcgcccgcgcatggtggaggcgctcggccacaatgttccgctggtcttcatgggcgtgttcggcgtcggcgcattccttgccggccttgccggttcggtggcgggcgcgttctatacgacaaacccgaacatggcgctggaactgggcgtcatggtcttcgtggtcgtcgtcgtgggcgggcttggctcgcttggcggagccatgtttgcttcgcttctgatcggcattctttcctccgtcgccgttggcgtgaaggtctcgatcgcaagcctcctcgattatgtggggcttggcgattatgcccgtgaaatcggcggcgtgctgacgctggaagtctccagcattgcagccaccctgccattcttcctgatgcttatcgttctcctggtacgtccaagcggactgttcggggcaaaggagtaa

SEQ ID NO: 61161 - protein, 332 aa, Brucella melitensis 16M
MDRSPVRAELPITDQTMDQILFAVLNGAIYGLLLFMVSAGLTLIFGMMGVLNFAHASFYMMGAYFAYTLQPLTGFWLAILIAPVIVGIVGIVGVLVERFILRRVHAFGHAHELLVTFGLSVVIAEVIKIFYGNFAVEYRIPAALQFSAFDLGGVSYPFYRLFIGAVALVMFLLIYLLLTRTRIGIVVRSAIYRPRMVEALGHNVPLVFMGVFGVGAFLAGLAGSVAGAFYTTNPNMALELGVMVFVVVVVGGLGSLGGAMFASLLIGILSSVAVGVKVSIASLLDYVGLGDYAREIGGVLTLEVSSIAATLPFFLMLIVLLVRPSGLFGAKE

SEQ ID NO: 61162 - DNA, 864 bp, Brucella melitensis 16M
  CDS (1)..(864): transl_table=11
atgaatcttttcttacagatcgtcatcaatggcattcttctgggcgggctctatgccatcatggcgcagggcctcgctctggtctggggcgtgctgaacatcgtcaacctcgcccacggcacgatgattatgctgggtggttacgttacctggctggtatttgccaattttggcatcgatccattcatcggcgtatttgcagcagcagccgtgatgttctgtttcggttacgccctgcaacgctgcgtcctcaatcttgtcgcacgcgggccgatgtttaatgcgctgctcatcacattcggcattgaaattatctttacagacgtggcgcaacacgtcttctcggccgattttcgcgctattattccctcctattcggcggtgaatttcaacgtctacggcatcaccatcccgctgatgaacctgctcgccttcatcgcagccttcgtggtttccggcttcatgttctttttcatgatgacgacgaaactcggccgcgccattcgcgccacggcgcaaaacctcaccgcagcacggctttacggtgttgaaccgcgccatctttatgccgtcacctttggcatcggtgtggcaatcgctggtgttgcgggcgggctttacgcaaccgtcaaccagctcaatccctatatcggtgtgccgctgacggccaaaagcttcgcaatcaccatcattggcggcctcgacaatccgctcggcgtcatcctgggtgggctgatcctcggtgtcatcgaatcccttaccgtgctctatctcggcgacacttaccgcaacgtggtcagcttcagtattctcgttctcgtactgatcattcggcccggtgggcttttggggaaaacggcatga

SEQ ID NO: 61163 - protein, 287 aa, Brucella melitensis 16M
MNLFLQIVINGILLGGLYAIMAQGLALVWGVLNIVNLAHGTMIMLGGYVTWLVFANFGIDPFIGVFAAAAVMFCFGYALQRCVLNLVARGPMFNALLITFGIEIIFTDVAQHVFSADFRAIIPSYSAVNFNVYGITIPLMNLLAFIAAFVVSGFMFFFMMTTKLGRAIRATAQNLTAARLYGVEPRHLYAVTFGIGVAIAGVAGGLYATVNQLNPYIGVPLTAKSFAITIIGGLDNPLGVILGGLILGVIESLTVLYLGDTYRNVVSFSILVLVLIIRPGGLLGKTA

SEQ ID NO: 61164 - DNA, 873 bp, Pyrobaculum aerophilum str. IM2
  CDS (1)..(873): transl_table=11
atggatataatcccctattttttaactggattggtaattggatctatttacggcttgacgacgctggggcttagccttatttttggcgtgttgcgtgtggcaaatgtggcccacggatcgtttataatgattggggcgtacgtggcttatacctttttcgtggcatgggcaattccgccgattgtctcagcaacggcggctttgttaataggaatggcggctgggtatttagtatacgtaggcgttatcaagcctcttggaaaagccgagctgaacatattagttgccctatttgccctaggggcgttgctggcagaggtggcgaggctgatttggggccccgatttcgtgggctataggtggagtataggctctatagaaatcgcaggcctccagctggagatcacaaagctgatgggggccgtggcctctctgataatcgccgtattgttagagttgacgttgaggcggacgtacttcggccgcgctattaaggcagtagttcaagacccaataggcgcaatggtagtggggataaacgtggagagaatactggctttaagcgccgccgttggaataggcgtaaccgcattaggaggagtgttgctaacgttgttcataccagttgggattaacccttacatgggcgggccctataccctaataggctttgtcattgcagttttgggcgggctcggctctgtaatgggggcttacattgccgggttgttgtttggagttttcgagtcagtggggttttacgtcttctcgtcgctgggcttcgccgagccgtcacaaatggcgcttttcttatcctttgtactgctgttgctactgttattattcaagcctacaggtctgtttaggatatga

SEQ ID NO: 61165 - protein, 290 aa, Pyrobaculum aerophilum str. IM2
MDIIPYFLTGLVIGSIYGLTTLGLSLIFGVLRVANVAHGSFIMIGAYVAYTFFVAWAIPPIVSATAALLIGMAAGYLVYVGVIKPLGKAELNILVALFALGALLAEVARLIWGPDFVGYRWSIGSIEIAGLQLEITKLMGAVASLIIAVLLELTLRRTYFGRAIKAVVQDPIGAMVVGINVERILALSAAVGIGVTALGGVLLTLFIPVGINPYMGGPYTLIGFVIAVLGGLGSVMGAYIAGLLFGVFESVGFYVFSSLGFAEPSQMALFLSFVLLLLLLLFKPTGLFRI

SEQ ID NO: 61166 - DNA, 885 bp, Corynebacterium glutamicum ATCC 13032
  CDS (1)..(885): transl_table=11
atggacattttactcaatcagctcgtagccgggctttcagttggatcggtccttctattggtcgcagtgggattgtcactgacctttggacagatgggcgttattaatatggcgcacggagagttcatcatggtcggcgcatacaccgcatatgtggtgcagctggtcgtcggttctgccggtttatccctactgatcagcattccgctggcctttattatcggtgggcttttcggagttctcctcgaacaattcctgctgaagtatctttatcacaggccactagacacgctgctggccacattcggtgtcggtttgatccttcagcagctggcccgaaacattttcggagctcccgcagtggatgtcagggcaccggaatttctccgcggaaacgtcgaagttctaggcgtcttggtgccgaccgcgcgactattcatcctggcgctggccatcgcatcagtgactgcactagctgtgttcctaaatcgcactgcctggggccgacgcatccgcgccgtggttctgaaccgcgacctcgcggaaaccgcaggtattgatacccgagctactgaccgaatgacgttctttgtgggctccggtcttgccggaatcgccggggtagctatcacattgattggcgcgaccggccccaccatcggtcagaactacatcgtggatgccttccttgttgttgccgccggtggcatcggccgggtgaagggcgctgtgatcatggctttcgtgctgggaattactcaagcattcgtggaatatacgacaggtgcgagcatcgcgaagttcatcgtactcatcgctgttgttgccttcctgcagtttaggcctcaaggactcttccaaacccaaactaggagcctcgtatga

SEQ ID NO: 61167 - protein, 294 aa, Corynebacterium glutamicum ATCC 13032
MDILLNQLVAGLSVGSVLLLVAVGLSLTFGQMGVINMAHGEFIMVGAYTAYVVQLVVGSAGLSLLISIPLAFIIGGLFGVLLEQFLLKYLYHRPLDTLLATFGVGLILQQLARNIFGAPAVDVRAPEFLRGNVEVLGVLVPTARLFILALAIASVTALAVFLNRTAWGRRIRAVVLNRDLAETAGIDTRATDRMTFFVGSGLAGIAGVAITLIGATGPTIGQNYIVDAFLVVAAGGIGRVKGAVIMAFVLGITQAFVEYTTGASIAKFIVLIAVVAFLQFRPQGLFQTQTRSLV

SEQ ID NO: 61168 - DNA, 900 bp, Streptomyces coelicolor A3(2)
  CDS (1)..(900): transl_table=11
atgaccggcttcctggacagtctgctgggcggcctcgcgctgggctccgtgtacgccctgatcgccctcggcttcgtcaccatcttcaaggcctccggagtcctgagcttcacccacggctcgctgctgctgctcggcgggtacctcgtcgccgtcctccacgacgacctcggcttcgccggggcactcgccgtcgcggtgctcgtgacggcggccgtggccggggccctggaccggctggtgctgcaacgcgtcggcgggagcgacccgcacgccgcccacgtccagaccatcgtcaccatcggcgtcgacatcgtcctggtcaccgacctcgcccggcgcatcggcggcgacctgctgccgctcggcgacccctggggctccgccgtgaccgacctcggcccggtgaccgtggccgacagccgcatcgccgcgatcctggtgtccgccgtcgccatcggcggcgccttcgccctcttccggtacaccccctggggcctgtcgctgcgcgcggcggccgaggaccgggaggccgccgccctcatgggcgtacgcctcacccgcgtacgcaccgccgcctggtgcctggccggcgccctcgccgccctcgccgccgtcttcctggtcgccttcccggcgcccggcctcgaacgcaccaccggccagatcgcgctgaaggccttccccgccgccatcctcggcggcatgacctccccggtcggcgccctggtcggcagcatgctgatcggcctcaccgaggcgttcgtcgccggttaccagtccgacctgcacgtcctcggcgagggcttcggcgacgtcgctccgtacgccgtgatggtgctggtgctgctggtgcgtccggccggactcttcgcggcgaagggagcggcccgtgtctga

SEQ ID NO: 61169 - protein, 299 aa, Streptomyces coelicolor A3(2)
MTGFLDSLLGGLALGSVYALIALGFVTIFKASGVLSFTHGSLLLLGGYLVAVLHDDLGFAGALAVAVLVTAAVAGALDRLVLQRVGGSDPHAAHVQTIVTIGVDIVLVTDLARRIGGDLLPLGDPWGSAVTDLGPVTVADSRIAAILVSAVAIGGAFALFRYTPWGLSLRAAAEDREAAALMGVRLTRVRTAAWCLAGALAALAAVFLVAFPAPGLERTTGQIALKAFPAAILGGMTSPVGALVGSMLIGLTEAFVAGYQSDLHVLGEGFGDVAPYAVMVLVLLVRPAGLFAAKGAARV

SEQ ID NO: 61170 - DNA, 933 bp, Streptomyces coelicolor A3(2)
  CDS (1)..(933): transl_table=11
gtgaacgaactgccgcagcagctggtcaacggcctgctactgggatccatgtacgggctcgtcgccatcggctacacaatggtctacggcatcgtccagctcatcaacttcgcccacggcgagatcttcatgaccggtgccttcggcgcactcacggtctacatgtacatcctgcccgacggcacctccatgctgatcgccctgcccctgatgctcatcggcgcggtgatcgtctccaccaccgtcgccgtcggggcggaacggttcgcctatcgccccctgcgcggcgcaccccggctcgcgcccctcatcaccgcgatcggcctctccctcgccctgcagcaggcggtgtgggcctggtacccggacgcgaagtccgcgcggcccttcccgcagatcgacggcgggcccttccacatcggcaacgtcaccctccagaccggcgacatcttcctgttcgtcgtcgccccggtgagcatggccatcctcggcttcttcgtgatgcgcacccgcaccggacggggtatgcaggccaccgcccaggacccggacaccgccaagctgatgggcgtcgacacggaccgcatcatcgtgatcgccttcgccctcggcgccgtcttcgccgccgtcggaggcgtcgcctacggcctcaggtacggccagatcgagttcaagatgggcttcatcctcggtctcaaggccttcacggcggcggtcctcggcggcatcggcaacatctacggcgccatgatcggcggtgtcgtcctcggcgtcgccgagaccctggccaccgcctacatcgccgacgtccccggcctggacaagttcggcagccagtcctgggcggacgtctgggccttcatcctcctcatcctcgtgctgttgttcaggccacagggcctgctcggcgaacgcgttgcggacagggcgtga

SEQ ID NO: 61171 - protein, 310 aa, Streptomyces coelicolor A3(2)
MNELPQQLVNGLLLGSMYGLVAIGYTMVYGIVQLINFAHGEIFMTGAFGALTVYMYILPDGTSMLIALPLMLIGAVIVSTTVAVGAERFAYRPLRGAPRLAPLITAIGLSLALQQAVWAWYPDAKSARPFPQIDGGPFHIGNVTLQTGDIFLFVVAPVSMAILGFFVMRTRTGRGMQATAQDPDTAKLMGVDTDRIIVIAFALGAVFAAVGGVAYGLRYGQIEFKMGFILGLKAFTAAVLGGIGNIYGAMIGGVVLGVAETLATAYIADVPGLDKFGSQSWADVWAFILLILVLLFRPQGLLGERVADRA

SEQ ID NO: 61172 - DNA, 873 bp, Streptomyces coelicolor A3(2)
  CDS (1)..(873): transl_table=11
atgtcgcagttcttcgacttcaccctctccggactcggagccggcaccacctacgcactggtcgggcttggggtcgccctggtgtaccaagtcaccggcgtgatcaacttcgcgcagggcgacttcgtcatgctcggcgggctgggctgcgcggtgctgcacgaggcgggcacgcccctgtgggcggcggccctgaccgcgatcgccgccaccgctgccgtcggtgccctgctggatctcgtcgtcgtccgacgagcccgggacgccgacggcgaacggctcatcatcttgacgatcggcgcctcggtgacccttgagggcgcggcgctcctcgtgttcggccccgactcccacttcgtcccgtccttctccgagggccgcgcgttcgaggtgttcggcgcccatgtggtccgccagtacgtgtggtgcggggtggccactggggtggcggtcctgctgatgtggctgttcctcaccagaaccctgtggggcaccgcgatgcgcgccacggccatggagccggaggcggtccgcctcgtgggtgtctcgccggcccggatgagcctgctggcgttcaccctggccgcggcgctcggcgcgctcgccggagtgttcctggctccgctccagccgccggacgcgtccgtgggcatccccttcgggctcaagggcttcaccgcggcggtcatcggcggactcgtctccccggcgggtgccgtggccggcgggctgctggtcggactggtggaggcgttcgccaccggatatctcagcagcgagtacaaggacacgctcacctacgggctgctgctcgcggtgctgctgctgcggcccaccgggctgctgcgccgggcgtcggtggtgcgggtatga

SEQ ID NO: 61173 - protein, 290 aa, Streptomyces coelicolor A3(2)
MSQFFDFTLSGLGAGTTYALVGLGVALVYQVTGVINFAQGDFVMLGGLGCAVLHEAGTPLWAAALTAIAATAAVGALLDLVVVRRARDADGERLIILTIGASVTLEGAALLVFGPDSHFVPSFSEGRAFEVFGAHVVRQYVWCGVATGVAVLLMWLFLTRTLWGTAMRATAMEPEAVRLVGVSPARMSLLAFTLAAALGALAGVFLAPLQPPDASVGIPFGLKGFTAAVIGGLVSPAGAVAGGLLVGLVEAFATGYLSSEYKDTLTYGLLLAVLLLRPTGLLRRASVVRV

SEQ ID NO: 61174 - DNA, 870 bp, Thermosynechococcus elongatus BP-1
  CDS (1)..(870): transl_table=11
atggatattcaactgattcaacttttcgttaatggcttggcggtggggagtattattgcccttgcagccgtgggtttaacgctcacctttggcattttgcgcctgcccaactttgcccatggtgatttcatgacggcgggagcctacctgacgttggtggccaatgcaacaggactgaatatttggctctcaatggcgattgggggcttggggacggccgggttgatgctcctaagtgagaagctcctgtggcagccgatgcgcgatcgccgcgcaacctcaacaactctgattattatttccatcggtctgtcattcctgctgcgcaatgctgtgatcctcatttggggcagtgaaaaccaaacctatcggctacccgtcatccctgcccttgatgttggcggggtgaaaattatttactcgaaggtgattgtaatgattttggcggtggtagcgatcgccactgtgcatttgatcctccaacgcaccaaggtaggcaaggccatgcgagccgtagctgatgatctcgacttggcgcgggtttccgggattgatgtcgagtgggtggtgctgtgcacttggcttttggcaggggtactcacaggggtggcggggggtctctatggcctgattaccgctgtgcggccaacgatgggttggtttttgatcttgcccctctttgccagtgtgattctgggtggcattggtaacccctacggggcgatcgccggcgccctgatcattggtgttgcccaagagatgagtacacggatgatccctgctgaatacaagctggctgttgccctagggatgatgatggcagtgcttttagtgcgcccccaagggctatttcgtggcaccctcagctag

SEQ ID NO: 61175 - protein, 289 aa, Thermosynechococcus elongatus BP-1
MDIQLIQLFVNGLAVGSIIALAAVGLTLTFGILRLPNFAHGDFMTAGAYLTLVANATGLNIWLSMAIGGLGTAGLMLLSEKLLWQPMRDRRATSTTLIIISIGLSFLLRNAVILIWGSENQTYRLPVIPALDVGGVKIIYSKVIVMILAVVAIATVHLILQRTKVGKAMRAVADDLDLARVSGIDVEWVVLCTWLLAGVLTGVAGGLYGLITAVRPTMGWFLILPLFASVILGGIGNPYGAIAGALIIGVAQEMSTRMIPAEYKLAVALGMMMAVLLVRPQGLFRGTLS

SEQ ID NO: 61176 - DNA, 936 bp, Thermosynechococcus elongatus BP-1
  CDS (1)..(936): transl_table=11
gtggtaaccaacgccttgcaagtccttgtggatggactagccacagggagtgtttatgccatttttgccctcggctatacccttgtcttctcgattttgggcatcattaactttgctcacggcgctgtttttgcccttggggcttatctcacctatgccctcttgggaggacgctttggctttaatggcctgttggccaatgggcagcttcccgttgccttgccctttgccccggccttggccttgagtgcccttggctgtgggctgttgggggtgggcattgactggattgtctttcgaccgttgcggcagcagggcaccgataccctcttgacggtggtggccagtcttggcgctgccgttttcctcaccaacttgatccagtatttagtgggtgccgaagtctatacctatcccgatcaactctggggtggattgccccttaccctgcaatggggggacattaccctgcgcactagccaattgattatctttgccgtggccgtggttttgatgattgccctgacctattgggtgaaagggacgcgcatggggaaaggattgcaggccgtggctgaaaatccaactgccgccacattgctgggcattgatggcgatcgcattattcaagtgacattttttgttagcagtgctttggctgctgttgctggcaccctcatcgccttgagtgttgggattacaggaccacagtttggggtgatctttggcctcaaggggttagcggtgattgttctggggggcctcggcagtttaccagggacaatgttggccggctttttgctgggattggtggaggcaatggtgcctgcggctgcttcggggtttcgcgatgctgctgcctttgccatccttttcctagtgctgctggcgcgcccccaagggctcttgggtcagccccccgttgaaaaagtctag

SEQ ID NO: 61177 - protein, 311 aa, Thermosynechococcus elongatus BP-1
MVTNALQVLVDGLATGSVYAIFALGYTLVFSILGIINFAHGAVFALGAYLTYALLGGRFGFNGLLANGQLPVALPFAPALALSALGCGLLGVGIDWIVFRPLRQQGTDTLLTVVASLGAAVFLTNLIQYLVGAEVYTYPDQLWGGLPLTLQWGDITLRTSQLIIFAVAVVLMIALTYWVKGTRMGKGLQAVAENPTAATLLGIDGDRIIQVTFFVSSALAAVAGTLIALSVGITGPQFGVIFGLKGLAVIVLGGLGSLPGTMLAGFLLGLVEAMVPAAASGFRDAAAFAILFLVLLARPQGLLGQPPVEKV

SEQ ID NO: 61178 - DNA, 864 bp, Oceanobacillus iheyensis HTE831
  CDS (1)..(864): transl_table=11
atggagatattaatacaacagttattcaatggtttaacgatcggtagtgtatatagtttagtagcattaggtctcacacttgtttatggaattttgcatgtacccaattttgctcatggagccatttatatgattggtggctacgtaacattaacgatgatggtctatttgggattatcttattggctatcgatgcttatttctgtattagtagttggaaccctagcattattaatggaacgtcttatattccatcctctaagaaattctatctccattaatagtatgattgctgcaattggaatgttgttatttttagaagcgtttgctcagctgttctggggtccagattttcgagagatgccaacaccatacaatgaagtagtcaatgtatttggattaacatttacggttcagagaatcttgattgttgtggcagcaattgttgttatgatattactttatgcttttcttaagaaaacgtttataggtcgaactatcattgcattgtcgcaaaatcgagaaggtgcgtttttggttggtattaatgcgaataaagtagcgatgttgactttctttatagctggcgctttagcggcaattgcagcatcacttacatcgccaatcaatcttgtatttcccggcatgggacacctcgttatcttaaaggcatttgttattattattatcggtggtatgggtagtatacctggtgctattgtaggtggttatattttaggatttagtgaaagtattggggcaacctatatctctagtgattataaagatattattgctttcgttcttctgatcattattctctctatcaagcctaatggcatatttgctaagggggaacactaa

SEQ ID NO: 61179 - protein, 287 aa, Oceanobacillus iheyensis HTE831
MEILIQQLFNGLTIGSVYSLVALGLTLVYGILHVPNFAHGAIYMIGGYVTLTMMVYLGLSYWLSMLISVLVVGTLALLMERLIFHPLRNSISINSMIAAIGMLLFLEAFAQLFWGPDFREMPTPYNEVVNVFGLTFTVQRILIVVAAIVVMILLYAFLKKTFIGRTIIALSQNREGAFLVGINANKVAMLTFFIAGALAAIAASLTSPINLVFPGMGHLVILKAFVIIIIGGMGSIPGAIVGGYILGFSESIGATYISSDYKDIIAFVLLIIILSIKPNGIFAKGEH

SEQ ID NO: 61180 - DNA, 927 bp, Bifidobacterium longum NCC2705
  CDS (1)..(927): transl_table=11
atgaccgatcagatcatcatgttcatcagccagctgttcaacggtctgaaaatcggcagcgtgtacgcgctggtggcattgggctacaccatggtctacggcatcatccgactgatcaactttgcccacggcgatttcatcatggtcggagcctacgtgctcatgctcaccattccggccatcgtggccatgggactgcccgcctgggtggcggtcattcccgccatcctggtatgcgtggccgtcggcgtgatcgtcgaaaaggccgcctataagccggtgcgtgaaaagggcaactccatgaccgccctgatcaccgccatcgccatgtcgttgctgctggagaacggctcacaggccatcttcggcgccgacttccagaccgtcccgaccatcttccacctgccgtccatcgcgttcggcaagctcaagctgccgggagacaccctgctgaccatcgtcatcggcctggtcatcatggtgggcctgcagctgttcgtcaaattcaccaggcagggcaaggccatgcgcgccgtctccgaagacaaggaggccgccgtgctcatgggtatcaacgtgaactccaccatcgccctgacattcgccatcggctccggtctggccgcggtcgcctcgctgatgtactgcgccgcctacccgcaggtctcgcctatgatgggcgccatgctgggcctgaaggcgttcgtcgccgccgtgctcggcggcattggttccatcccgggcgccatgatcggtggtctggccatcggtctgatcgaaagcctgaccaaggcgtatatcggcaccatcacggcgggcatcatcacctcggcgttctccgacgccatcgtgttcgccatcctgatcatcgtgctgctcgtcaaaccgtccggcattatgggcaagaacgaaggggagaaggtctga

SEQ ID NO: 61181 - protein, 308 aa, Bifidobacterium longum NCC2705
MTDQIIMFISQLFNGLKIGSVYALVALGYTMVYGIIRLINFAHGDFIMVGAYVLMLTIPAIVAMGLPAWVAVIPAILVCVAVGVIVEKAAYKPVREKGNSMTALITAIAMSLLLENGSQAIFGADFQTVPTIFHLPSIAFGKLKLPGDTLLTIVIGLVIMVGLQLFVKFTRQGKAMRAVSEDKEAAVLMGINVNSTIALTFAIGSGLAAVASLMYCAAYPQVSPMMGAMLGLKAFVAAVLGGIGSIPGAMIGGLAIGLIESLTKAYIGTITAGIITSAFSDAIVFAILIIVLLVKPSGIMGKNEGEKV

SEQ ID NO: 61182 - DNA, 885 bp, Brucella suis 1330
  CDS (1)..(885): transl_table=11
atgactacctttctgcaaattcttctgaacggcctgatgcttggcgggctattcgcgattgtcgccgtcggcctgacgctcatcttcggcatcgtcaaggtcgtgaatttcgctcatggcgaattcctgatggcgggcatgttcgtgacgtggctgataaccacaaagctggggcttcatccttatgcggcggttatcattgttctgcctgcgatgttcattctgggtgcgctgacccagcgccttctcattcagccgctaatggcttctgatgacggtcatgcacagattttcgcaaccgttggcctgtccacggcgatgattaatctggccctgctgatcttcggtgcggatatagccaatacaccgaatttcggactgcggaccccaatcgaaatcgggccgcttcgcgtacttaccgggcaggtctttatttttctgggcgccattgtgcttgtcgttgcgcttcaactgttcctgaagaacagccagactggccgcgcaatccgcgccgttgctcagcatcgcagtgcggcggaattgatgggggtcaatgtttcgcgcatctacattctctgttttggcctgggagccgcctgtgtcggactggctgcggttctgattgcaccgctctatccgacttcttcaaatatcggcacctatttcgtgctgacggccttcgtggttgtggtgctcggtggccttggctcgatccctggagccttcgttggtgcgctgatcatcggcgtgatcgacaccatgtcgggctactacatcggatcagacctgcgggaagccgtcgtattcggcattttcctcctgatcctcatcctcaagccttctggcctctttggcaagcagcttaatctttcgcatttgtcctga

SEQ ID NO: 61183 - protein, 294 aa, Brucella suis 1330
MTTFLQILLNGLMLGGLFAIVAVGLTLIFGIVKVVNFAHGEFLMAGMFVTWLITTKLGLHPYAAVIIVLPAMFILGALTQRLLIQPLMASDDGHAQIFATVGLSTAMINLALLIFGADIANTPNFGLRTPIEIGPLRVLTGQVFIFLGAIVLVVALQLFLKNSQTGRAIRAVAQHRSAAELMGVNVSRIYILCFGLGAACVGLAAVLIAPLYPTSSNIGTYFVLTAFVVVVLGGLGSIPGAFVGALIIGVIDTMSGYYIGSDLREAVVFGIFLLILILKPSGLFGKQLNLSHLS

SEQ ID NO: 61184 - DNA, 927 bp, Shigella flexneri 2a str. 301
  CDS (1)..(927): transl_table=11
atgtctgagcagtttttgtatttcttgcagcagatgtttaacggcgtcacgctgggcagtacctacgcgctgatagccatcggctacaccatggtttacggcattatcggcatgatcaacttcgcccacggcgaggtttatatgattggcagctacgtctcatttatgatcatcgccgcgctgatgatgatgggcattgataccggctggctgctggtggcggcgggattcgtcggcgcaatcgtcatcgccagcgcctacggctggagtatcgaacgggtagcttaccgcccggtgcgtaactctaagcgcctgattgcgcttatttccgcaatcggtatgtccatcttcctgcaaaactacgtcagcctgaccgaaggttcgcgcgacgtggcgctgccgagcctgtttaacggtcagtgggtggtgggccatagcgaaaacttctctgcctctattaccaccatgcaggcggtgatctggattgtcaccttcctcgccatgctggcgctgacgattttcattcgctattcccgtatggggcgcgcctgtcgtgcctgcgcggaagatctgaaaatggcgagcctgcttggcatcaacaccgaccgggtgattgctttgacctttgttattggcgcggcgatggcggcagtggctggcgtactgctcggtcagttctactgcgtcattaacccctatatcggctttatggccgggatgaaagcctttaccgctgcggtgctcggtgggattggcagcattccaggggcgatgattggcgggctgatcctggggattgcggaggcgctctcttctgcctatctgagtacggaatataaagatgtggtctcattcgccctgctgattctggtgctgctggtgatgccgaccggtattctgggtcgcccggaggtagagaaagtatga

SEQ ID NO: 61185 - protein, 308 aa, Shigella flexneri 2a str. 301
MSEQFLYFLQQMFNGVTLGSTYALIAIGYTMVYGIIGMINFAHGEVYMIGSYVSFMIIAALMMMGIDTGWLLVAAGFVGAIVIASAYGWSIERVAYRPVRNSKRLIALISAIGMSIFLQNYVSLTEGSRDVALPSLFNGQWVVGHSENFSASITTMQAVIWIVTFLAMLALTIFIRYSRMGRACRACAEDLKMASLLGINTDRVIALTFVIGAAMAAVAGVLLGQFYCVINPYIGFMAGMKAFTAAVLGGIGSIPGAMIGGLILGIAEALSSAYLSTEYKDVVSFALLILVLLVMPTGILGRPEVEKV

SEQ ID NO: 61186 - DNA, 885 bp, Corynebacterium efficiens YS-314
  CDS (1)..(885): transl_table=11
atggacattctactcaatcagctagtagcgggcctgtcagtggggtccgttctgctgctggtggcggttggtctttccctgaccttcggtcagatgggggtcatcaacatggcccacggcgagttcatcatggttggggcctacacggccttcgttgtgcagggggttatcaactctgcagggttctcgcttttgatcagtattccactggcatttgccatcggagggctcctcggggttctccttgaacagaccttgctacgccatctctaccaccggcctttggacacactgcttgcgacctttggcgttggtctgatcctgcagcagctggccagggatattttcggcgcaccagcagtagacgtacgtgcgcctgaatggttgcgtggtcataccgaaattctggggactctggtgccggtgtcccgactgttcattctctttctcgccttggcctcagtggccggattggcggtgtttctcaaccgttccatctggggtcggagaatcagggcagtcgtgatcaatcgcgatctcgccgagactaatggcatcaatacccgggccacggaccgtatgaccttttttatcgggtctggtctcgccggaattgcaggcgtcgccatcactctcattggagccaccgggccgaccatcggtcagaactacattgtcgacgctttccttgtcgtggccgcgggtggaatcggcaagatcaagggcgcggtgatcatggcgtttgttctgggcataatgcaagccttcattgagtactcaaccggtgcgagtattgcgaagttcattgtgctgattgcagtggtcgcctttcttcagttccgcccccaagggctgtttcaaacccgaacaaggagcctcgtatga

SEQ ID NO: 61187 - protein, 294 aa, Corynebacterium efficiens YS-314
MDILLNQLVAGLSVGSVLLLVAVGLSLTFGQMGVINMAHGEFIMVGAYTAFVVQGVINSAGFSLLISIPLAFAIGGLLGVLLEQTLLRHLYHRPLDTLLATFGVGLILQQLARDIFGAPAVDVRAPEWLRGHTEILGTLVPVSRLFILFLALASVAGLAVFLNRSIWGRRIRAVVINRDLAETNGINTRATDRMTFFIGSGLAGIAGVAITLIGATGPTIGQNYIVDAFLVVAAGGIGKIKGAVIMAFVLGIMQAFIEYSTGASIAKFIVLIAVVAFLQFRPQGLFQTRTRSLV

SEQ ID NO: 61188 - DNA, 861 bp, Pseudomonas putida KT2440
  CDS (1)..(861): transl_table=11
atgctcgatttgtacctgttccaactgctcaacggcctgggcctggggatgatctacttcctcatcgccgtaggcctgacgatcattttcggcctgctcaacttcgtcaacttcgcccacggcgcgtttttcttgctgggcgcctacctgtgctacaccgccgtggccgtcaccggcaacttctggctggcgctgctgattgcgccactggtggtggccgcgctggcctgggcggtcgagcgcctgttgatcaaacgcatctaccacctgccgcacaccttccagatcctcgtcaccctcggcatcgcgctgatcatccaggaagcgtcggtgctgatctggggcccggtgggcaaaaacattgccgtgccacccgaactgcgcggggtgctgatactcggcgacttcatctacccctactaccgcttgttcctgatcggcttcgcagcgctgatcggtattggcctgtggctgctgctggaacgcacccgtttcggcgcactggtgcgggccggtagcgaaagcaccgagaccgtgtcgctgttgggcaccaacattttccgcctgttctccctgacattcgccctgggcgtgggcctggcaggtgtggcgggtgtgctatttgcgccgctacggggcgcccagcccttcgtcggcccggaaatcctcggcattgccttcgtggtggtggtgattggcggcatggggtcgttcggcggggcgctggttggcggcctgctggtgggtgtggtgcaaagcatgatgaccagtctctggccgcaaggcgccagcctgatgatctacggcgccatggcagcagtgattctggtccgtccctacggcctgttcgggagagcctga

SEQ ID NO: 61189 - protein, 286 aa, Pseudomonas putida KT2440
MLDLYLFQLLNGLGLGMIYFLIAVGLTIIFGLLNFVNFAHGAFFLLGAYLCYTAVAVTGNFWLALLIAPLVVAALAWAVERLLIKRIYHLPHTFQILVTLGIALIIQEASVLIWGPVGKNIAVPPELRGVLILGDFIYPYYRLFLIGFAALIGIGLWLLLERTRFGALVRAGSESTETVSLLGTNIFRLFSLTFALGVGLAGVAGVLFAPLRGAQPFVGPEILGIAFVVVVIGGMGSFGGALVGGLLVGVVQSMMTSLWPQGASLMIYGAMAAVILVRPYGLFGRA

SEQ ID NO: 61190 - DNA, 924 bp, Pseudomonas putida KT2440
  CDS (1)..(924): transl_table=11
atgcctgagatctaccatttcttccaacaactggttaatggattgaccatcggcagcacctatgccttgatcgccatcggctacacgatggtgtacggcatcattggcatgatcaacttcgcccacggcgaggtgtacatgatcggttcctacgtggccttcatcgccctggcgggcctggccatgatgggtatccattcgctgccgatcctgatgaccgtcgccttcgtcgcgacgatcttcgtcaccagtgcctatggctacagtatcgaacgggttgcctaccgccccctgcgcaacagcaaccgtctgatcccgctgatttctgccatcggcatgtcgatcttcctgcagaacacggtcttgctttcgcaggactccaaggacaagtccatccccaacctgatccccgggagtttctccttcgggccaggcggtgctgaagaagtactgatcagctacatgcaaatcctggtgttcgtcgtcaccctggtggccatgaccctgctcaccctgttcatctctcgttcccgcctaggccgcgcctgccgcgcctgcgccgaggacatcaagatggccaacctgctgggcatcaacaccaacaacatcatcgccctcaccttcgtcatcggtgccgccctggctgccgtggcggccgtgctgctgagcatgcagtacggggtgatcaaccccaacgccggtttcctggtgggcctgaaggctttcaccgcggcggtactgggtggcatcggcagcatcccgggcgccatgctcggcgggctggtgctgggcgtggccgaagcgttcggtgccgatatcttcggcgaccagtacaaggacgtggtggcattcggcttgttggttcttgtcctgctattccggccgaccggcattctgggccgcccggaggttgaaaaagtatga

SEQ ID NO: 61191 - protein, 307 aa, Pseudomonas putida KT2440
MPEIYHFFQQLVNGLTIGSTYALIAIGYTMVYGIIGMINFAHGEVYMIGSYVAFIALAGLAMMGIHSLPILMTVAFVATIFVTSAYGYSIERVAYRPLRNSNRLIPLISAIGMSIFLQNTVLLSQDSKDKSIPNLIPGSFSFGPGGAEEVLISYMQILVFVVTLVAMTLLTLFISRSRLGRACRACAEDIKMANLLGINTNNIIALTFVIGAALAAVAAVLLSMQYGVINPNAGFLVGLKAFTAAVLGGIGSIPGAMLGGLVLGVAEAFGADIFGDQYKDVVAFGLLVLVLLFRPTGILGRPEVEKV

SEQ ID NO: 61192 - DNA, 882 bp, Pseudomonas putida KT2440
  CDS (1)..(882): transl_table=11
atgaacttcttcctggagaccttgatcggcggcttgctcgccgggaccctgtattcgctggtggccatcggcttcgtgctgatctacaaggccagcggcgtgttcaactttgcccagggcgcgatgctgctgtttgctgcgctgacattcgttagcttgcacgagcagggcctgccgttcgccctggcgttggccctgaccgtactggtgatgatcgtcggcgcgctgctgatcgagcgcctggtgctgcggcccctggtcaatcgctcgcagatcaccctgttcatggccacccttggcctgtcgttcatcatcgagggcctggcccagggcttgatgggcgcccaggtacgtgcgctggatctgggcatcgaggacgtcccgctgttcgtcggcgagctgatgatcagccagttcgacctagtcgcctctggcgtttccgccttgttggtggcagtgctggcgctgctgttcaacaagacccgcatcggtgtggccttgcgtgcggtggccgacgatacccgcgcggcgctgtcgctgggcatcaacctcaaccgcatctggcagatcgtctgggccgtggccggcatggtcgggctggtggccgggctgctctggggggcgcgccagggggtgcagttctcgctctcgctggtagtgctcaaggcgctgccggtgctgatcatcggcggcttcacctcaattggcggagccatcgtcggcgggctgatcgtcggcgccgccgagaacctcgccgaagcctacatcggcccactgatcggcggcggcatcacgccctggttcgcttatttcctcgccctgatattcctttacatccgtccggccggcctgttcggcgaccgggccatcgaacgggtatga

SEQ ID NO: 61193 - protein, 293 aa, Pseudomonas putida KT2440
MNFFLETLIGGLLAGTLYSLVAIGFVLIYKASGVFNFAQGAMLLFAALTFVSLHEQGLPFALALALTVLVMIVGALLIERLVLRPLVNRSQITLFMATLGLSFIIEGLAQGLMGAQVRALDLGIEDVPLFVGELMISQFDLVASGVSALLVAVLALLFNKTRIGVALRAVADDTRAALSLGINLNRIWQIVWAVAGMVGLVAGLLWGARQGVQFSLSLVVLKALPVLIIGGFTSIGGAIVGGLIVGAAENLAEAYIGPLIGGGITPWFAYFLALIFLYIRPAGLFGDRAIERV

SEQ ID NO: 61194 - DNA, 882 bp, Pseudomonas putida KT2440
  CDS (1)..(882): transl_table=11
atggcattctttttcgaagtgctgatcggtggcctgctggccggggtgatgtactccctggtggccatcggtttcgtactgatctacaaagccagcggtgtgttcaacttcgcccagggggcgatggtactgttcgccgcgctgaccttcgtcagcctgctggagcgcggcgtgccgttctggctgtcctttctcgtcaccctggcgacgatgatcgccctggcgctgctgatcgaacgggcggtactgcggccattggtcgggcgttcgccgataaccctgttcatggccacgctcggcctggcctacatcatcgagggcgccgcccaggccttatggggcgcccaggttcacggcctggagctggccatcagcgacgccccgctggagctgggcggcctgctgctgtcgcagttcgacctgttcgccgccgcaacggcggcggccctggtggtgcttctgtccttgctgttcaaccgcacgcgcatcggcctggcgctgcgtgcggtggccgacgatccccgcgcggcgatgagcgtcggtatccgcctgccgagggtgtgggcggtggtctgggcggtggccgggtttgtcgggttggtggccgggctgctctggggcgcacgcctgggggtgcagttctcgctctcgctggtggtgctcaaggccctgccggtgctgatcatcggcggttttacctcgatcagcggggcgatcgtcggcggcctgatcatcggcgcttcggagaagctcgccgaggtgtatttcgggccgctcatcggcggcggcatcgaaaactggtttccctatgtgctggccctgctgttcctgctggtgcgtccggctgggctgttcggcgagcgcgccatcgagcgagtctga

SEQ ID NO: 61195 - protein, 293 aa, Pseudomonas putida KT2440
MAFFFEVLIGGLLAGVMYSLVAIGFVLIYKASGVFNFAQGAMVLFAALTFVSLLERGVPFWLSFLVTLATMIALALLIERAVLRPLVGRSPITLFMATLGLAYIIEGAAQALWGAQVHGLELAISDAPLELGGLLLSQFDLFAAATAAALVVLLSLLFNRTRIGLALRAVADDPRAAMSVGIRLPRVWAVVWAVAGFVGLVAGLLWGARLGVQFSLSLVVLKALPVLIIGGFTSISGAIVGGLIIGASEKLAEVYFGPLIGGGIENWFPYVLALLFLLVRPAGLFGERAIERV

SEQ ID NO: 61196 - DNA, 1041 bp, Pseudomonas putida KT2440; identical to SEQ ID NO: 60901
  CDS (1)..(1041): transl_table=11

SEQ ID NO: 61197 - protein, 346 aa, Pseudomonas putida KT2440; identical to SEQ ID NO: 60902

SEQ ID NO: 61198 - DNA, 915 bp, Pseudomonas putida KT2440
  CDS (1)..(915): transl_table=11
atggatggtattttcctgcagcaactggtcaacggcctgaccctcgggtcggtctatggcctgatcgccatcggctacacaatggtctatggcattatcggcatgatcaacttcgcgcacggcgaggtgtacatgatctccgcttacctcgcggcgatcagcctggcattgctggcttacttcggtgtcgaatcgttccccctgctgatgctgggcaccttgttgttcaccatcgtcgtcaccggcgtttatggtttcaccatcgagcgcatcgcctacaaaccgctgcgtaactccacccgcctggcaccgctgatcagtgccatcggcatttcgctgatcctgcagaactacgcacagatcagccagggcgcccgccagcaaggcgtgccaaccctgctggaaggcgccatgcgtgtcgaagtcgggtccggcttcgtgcaactgacttataccaagatcttcatcctggtggcggcctttgtcggcatgggcctgctgacctacgtgatcaagtacaccaagctcggccgcatgtgccgtgctacccagcaagaccgcaagatggcctcgatcctgggtatcaacaccgaccgggtaatctcctacgtgttcgtcatcggtgcagtgatggccgccctggccggcgtgctcatcaccatgaactacggcaccttcgacttctacgccggcttcatcatcggtatcaaggcgttcactgccgcagtgctcgggggtatcggctcgctgccgggtgccatgctcggcgggatcatcctgggaatttccgagtcgctgttctcaggcctgatcaactccgactacaaggatgtgttcagcttctcgctgctggtgatgatccttatcttccgcccacaaggcctgctgggtcgcccgctcgtggctaaggtgtga

SEQ ID NO: 61199 - protein, 304 aa, Pseudomonas putida KT2440
MDGIFLQQLVNGLTLGSVYGLIAIGYTMVYGIIGMINFAHGEVYMISAYLAAISLALLAYFGVESFPLLMLGTLLFTIVVTGVYGFTIERIAYKPLRNSTRLAPLISAIGISLILQNYAQISQGARQQGVPTLLEGAMRVEVGSGFVQLTYTKIFILVAAFVGMGLLTYVIKYTKLGRMCRATQQDRKMASILGINTDRVISYVFVIGAVMAALAGVLITMNYGTFDFYAGFIIGIKAFTAAVLGGIGSLPGAMLGGIILGISESLFSGLINSDYKDVFSFSLLVMILIFRPQGLLGRPLVAKV

SEQ ID NO: 61200 - DNA, 927 bp, Escherichia coli CFT073
  CDS (1)..(927): transl_table=11
atgtctgagcagtttttgtatttcttgcagcagatgtttaacggcgtcacgctgggcagtacctacgcgctgatagccatcggctacaccatggtttacggcattatcggcatgatcaacttcgcccacggcgaggtttacatgattggcagctacgtctcctttatgatcatcgccgcactgatgatgctgggcattgataccggctggttgctggtggcggcgggattcgtcggcgcaatcgtcattgccagcgcctacggctggagtatcgaacgggtagcctatcgcccggtgcgtaactctaagcgcctgattgcactcatctcggcaatcggcatgtctatcttcctgcaaaactacgtcagcctgaccgaaggttcgcgcgatgtggcgctgcccagcctgtttaacggtcagtgggtggtgggccatagcgaaaacttctctgcgtctattaccaccatgcaggcggtgatatggattgttactttcctcgccatgctggcgctgacgattttcattcgctattcccgtatggggcgcgcctgccgtgcctgcgcggaagatctgaaaatggcgagcctgcttggcatcaacaccgaccgggtgattgcgctgacctttgtgattggcgcggcgatggcggcagtggcgggcgtgctgctcggtcagttctacggcgtaattaacccttacatcggctttatggccgggatgaaagcctttaccgctgcggtgctcggtgggattggcagcattccgggggcgatgattggcgggctgatcctggggattgcggaggcgctctcttctgcctatctgagtacggaatataaagatgtggtctcattcgccctgctgatcctggtgctgctggtgatgccgaccggtattctgggtcgcccggaggtagagaaagtatga

SEQ ID NO: 61201 - protein, 308 aa, Escherichia coli CFT073
MSEQFLYFLQQMFNGVTLGSTYALIAIGYTMVYGIIGMINFAHGEVYMIGSYVSFMIIAALMMLGIDTGWLLVAAGFVGAIVIASAYGWSIERVAYRPVRNSKRLIALISAIGMSIFLQNYVSLTEGSRDVALPSLFNGQWVVGHSENFSASITTMQAVIWIVTFLAMLALTIFIRYSRMGRACRACAEDLKMASLLGINTDRVIALTFVIGAAMAAVAGVLLGQFYGVINPYIGFMAGMKAFTAAVLGGIGSIPGAMIGGLILGIAEALSSAYLSTEYKDVVSFALLILVLLVMPTGILGRPEVEKV

SEQ ID NO: 61202 - DNA, 906 bp, Bradyrhizobium japonicum USDA 110
  CDS (1)..(906): transl_table=11
atgagggcgtattgtgggggacgacttttgacagctcaagccattatccagagtctcgcgagcggcctgctcatgggcctgctctacggactgatcgccgtcggcctcgcgctgatcttcggcctgatggacgtcgtgaacttcgcccatggcgagttcctgatgatcgcgatgtatgtgagcttcttcctgttcgcgttcttcgccatcgaccccctgctgtcggcgccgctggtcgccgcggccctgttcgtgttcggggcggtcgtctacctcttgattgtacgcttcgcgatgcgcgccaaggcaaacgccggcatggtgcagatcttctcgaccttcggccttgccatcgtgatgcgcgggctcgcgcagttcttcttcacgccggactatcgcagcattccgcagtcctggctcggcggcaagacgatctcgatcggcggcatcttcctgccggagccgcagttgatcggcgcgctggtctcgatcgcggctttcgccggcctctatttcttcatcaaccgcactgacttcggccgcgcgctcgaagccacccgcgaagatcccggtgcagtcgcactcgtcggcatcgacaagaaccgcgtgttcgcgctgggctggggcctgggcgccgcactggtcggtctcgccggcgcgatcatggcggtgttcttctacatctatccggacgtcggcgcctccttcgcgctgatcgcctatgtcacggttgcgctcggtggtttcggcagtgtgttcggcgcgttcgccggcggcatcatcgtcggcctcgtcgaggcgaccaccgccctggtgctgccgccttcgctgaaatcggtcggcatctacgcggtctatctgctcgtcgtcttcatccggccgcgcggcctgttcggatcgatgtga

SEQ ID NO: 61203 - protein, 301 aa, Bradyrhizobium japonicum USDA 110
MRAYCGGRLLTAQAIIQSLASGLLMGLLYGLIAVGLALIFGLMDVVNFAHGEFLMIAMYVSFFLFAFFAIDPLLSAPLVAAALFVFGAVVYLLIVRFAMRAKANAGMVQIFSTFGLAIVMRGLAQFFFTPDYRSIPQSWLGGKTISIGGIFLPEPQLIGALVSIAAFAGLYFFINRTDFGRALEATREDPGAVALVGIDKNRVFALGWGLGAALVGLAGAIMAVFFYIYPDVGASFALIAYVTVALGGFGSVFGAFAGGIIVGLVEATTALVLPPSLKSVGIYAVYLLVVFIRPRGLFGSM

SEQ ID NO: 61204 - DNA, 894 bp, Vibrio parahaemolyticus RIMD 2210633
  CDS (1)..(894): transl_table=11
gtgaatacggatttattactgcaactcgtcattaatggcgtgatcgtcggcatgttgtatggcgtggtcgccatgtgctttgtactgatttacaaatcaactcaggtggtgaactttgctcagggtgagtttctactgatcggcgcgtgggtgtgttgggctgcattggttcatctacaactgccatttttcgtcggcttcttactcacgctcgcctttatgatggtgtttggtatcgccgtgcaaaccattgtgctcaggcctttaattggtgagccgatcatctcggtgatcatggtgacgattggtttgtcgatgttcttccaagcactgatgaagtggatgtttggtgtgtcagcggtgtcgtacccgcaggtattcgaaaccaacgtcgtcaatattggtggtttgaacgtagaatttgcttacatactgagcttgatcttctcgatgatcatcatgggcgcgttctactggttctttaaattcagcaaaatgggcttggcgatgcgtgcgaccgcatttaaccagcaggtcgcccagagtcttggcatttccatcaagaaagtgtttgcgatcagttgggctatttcggcgatggtatccgcgacagcagggattgttatcgggatcgtcaacggcgtatcggacgcgctatctatcatcggcatcaaagtgttcccagcggttattttaggtggcttggattcagtggtcggcgcaatcgtcggtggcatcaccatcggggtgctggaaaacttagctgagttctttgatagccaatacctgcaagtgggtaacctttacaacatcgcaccgttctatgtgctgttaatcattcttgccttcaagccatacggcctgtttggtaccaaagatattgagcgtatttaa

SEQ ID NO: 61205 - protein, 297 aa, Vibrio parahaemolyticus RIMD 2210633
MNTDLLLQLVINGVIVGMLYGVVAMCFVLIYKSTQVVNFAQGEFLLIGAWVCWAALVHLQLPFFVGFLLTLAFMMVFGIAVQTIVLRPLIGEPIISVIMVTIGLSMFFQALMKWMFGVSAVSYPQVFETNVVNIGGLNVEFAYILSLIFSMIIMGAFYWFFKFSKMGLAMRATAFNQQVAQSLGISIKKVFAISWAISAMVSATAGIVIGIVNGVSDALSIIGIKVFPAVILGGLDSVVGAIVGGITIGVLENLAEFFDSQYLQVGNLYNIAPFYVLLIILAFKPYGLFGTKDIERI

SEQ ID NO: 61206 - DNA, 897 bp, Streptomyces avermitilis MA-4680
  CDS (1)..(897): transl_table=11
atgaccgtcatcttcggtcagaccttcaccggcatcagcatcggtgccgttctgctgctcatcgcgctcggcctctcgctcaccttcggtcagatgaacgtcatcaacatggcccacggcgagttcatcatggccggcgcctacaccacatacgtcctgcagaagtccatttccagcgccggattgtcgcttctggtcgcgctgcccgtcgcatttctcgtctcgggcgcactcggggcgttgctggaatggctgctgatccgccggctgtatctgcggccgctcgacacacttctcgtcacctggggcgtctccctgatgctccagcaactcgcccgggacatcttcggcgcaccgaatgtgcagacacgggcgcccgagctcctcaccgggaacatcacggtcatcggcggtgacgacccgctcaccttcgccaacagccggctgttcatcctcgggctggccatcgccgcggtggtcgcgctgtcgctgacgctgcggctgaccccgctcggccggcgcatccgggccgtggtgcagaaccgggatctggccgaggtgtccggcatctccaccggccgggtcgatcgcacggccttcttcatcggctccgggctcgccggggtcgccggggtcgcgctgacgctggtcggtccgatcgggcccaccatgggcaccaacgtgatcatcgacgccttcctggtgatcgtggtcggcggcatcgggcagctcaagggcagtgtgatcgtcgccttcgtgctcggcgtgctccagtcggtcctcgagtactcgaccacggtcagcgtcgcgaaggtgctggtgctggtcgccatcgtcgctttcctccagtggcggccccaggggctgtacaccctgcgcacgaggagtctcgtatga

SEQ ID NO: 61207 - protein, 298 aa, Streptomyces avermitilis MA-4680
MTVIFGQTFTGISIGAVLLLIALGLSLTFGQMNVINMAHGEFIMAGAYTTYVLQKSISSAGLSLLVALPVAFLVSGALGALLEWLLIRRLYLRPLDTLLVTWGVSLMLQQLARDIFGAPNVQTRAPELLTGNITVIGGDDPLTFANSRLFILGLAIAAVVALSLTLRLTPLGRRIRAVVQNRDLAEVSGISTGRVDRTAFFIGSGLAGVAGVALTLVGPIGPTMGTNVIIDAFLVIVVGGIGQLKGSVIVAFVLGVLQSVLEYSTTVSVAKVLVLVAIVAFLQWRPQGLYTLRTRSLV

SEQ ID NO: 61208 - DNA, 927 bp, Bordetella pertussis Tohama I
  CDS (1)..(927): transl_table=11
atgtcagacctcatcccacaacttacccagcagttcttcaacggactgtccctgggggcgatctacgcgttgattgccattggctacacaatggtctacggcatcatcggtatgatcaacttcgcccacggcgagatctacatgatcggcgcctacgtcggcctggtcacgctgacggccatcggcaccaacagcggcctgccgctgcctttcatcatcgccgccatgctggtggtcgccatcttcgtgaccggcgtctacggctatagcgtcgaacgcgtggcgtaccggcccgtgcgcggcagcccccgcctggtggcgctgatctcggccatcggcatgtcgatcttcctgcagaactgggtcgccctcgggcagggcgcgcgcgacatggccgtgccggcgctggtctcgggcgcggtgcagttccacatgggttccagcttcgacgtcaccgtaccgtattcgcgcatcatgatcatcgtggtgactgtggtgctgatggtggcgctcacgctgttcatcaagtattcgcgcatggggcgcgcctcgcgcgcctgctcgcaggacatgcacatggccaacctgctgggcatcgacaccaaccgggtgatttccttcaccttcgtgctgggcgccatgctggccgcggtgggaggcgtgctgatcgccatcaccatcggcaagctgaatccgttcatcggcttcctggcgggcatcaaggcgttcaccgccgcggtgctgggcggcatcggcagcattcccggcgcgatgctgggcggcgtgctgctgggcctggccgaaaccttcgcggccgcctacatctcatcgcaatacaaggacatcgtggcttttgcgctgctggtgctgatcctgctgttccgtcccaccgggctgctcggcaaacctgaggtggaaaaagtctga

SEQ ID NO: 61209 - protein, 308 aa, Bordetella pertussis Tohama I
MSDLIPQLTQQFFNGLSLGAIYALIAIGYTMVYGIIGMINFAHGEIYMIGAYVGLVTLTAIGTNSGLPLPFIIAAMLVVAIFVTGVYGYSVERVAYRPVRGSPRLVALISAIGMSIFLQNWVALGQGARDMAVPALVSGAVQFHMGSSFDVTVPYSRIMIIVVTVVLMVALTLFIKYSRMGRASRACSQDMHMANLLGIDTNRVISFTFVLGAMLAAVGGVLIAITIGKLNPFIGFLAGIKAFTAAVLGGIGSIPGAMLGGVLLGLAETFAAAYISSQYKDIVAFALLVLILLFRPTGLLGKPEVEKV

SEQ ID NO: 61210 - DNA, 1950 bp, Bordetella pertussis Tohama I
  CDS (1)..(1950): transl_table=11
atggatctgacaggttttctggcccagctgctcaacgggctggccgaggcatcgtcgctgttcctggtggcggcggggctttcgctgattttcggcgtgacgcgcatcgtcaatttcgcgcacggctcgctctacatgctgggcgtgtacgtggcgtattcgatcgtcgagcgcgtgggcggcaccgcgctgggcttctggttcggcctggtggccgcgtcgctggccgtcggcgtggtgggcgcggcgatcgaggtcgtgctgttgcgccgcatctatcgcgcgccggagctgttccagttgctggcgaccttcgccctggtgctggtcatcaacgacgccgcgctgtggatctggggcgccgaggatctgctggggcggcgcgcgccgggcctgaccggcgcgatcgacctgctgggccgccggtatccggtctacaacctggtgctgatcgtggtcgggccggtggtgctggggctgctctggctgctgctgacgcgcacgcgctggggcaccctggtgcgcgcggccacgcaggaccgcgagatgctcggcgcgctgggcgtgaaccaggcctggctgttcaccggcgtgttcgcgctgggcgccatgctggccgggctgggcggcgcgctgcagctgccgcgcgagccggccagcctgagcctggacctgcgcaccatcggcgatgcgttcgtcatcgtggtggtgggcggcatgggatcgattccgggggcctatgtggccgcgctcatcatcgccgagatcaaggcgctgtgcatcggcctgggcaccgtgaccctgctgggcttgagcatttcgttttccaagctgacgctggtggtggagttcgccttcatggcgctggtgctggtgttccgcccctggggcctgttcggacgcccgcagggcgccagccgcaactcggcgcccatcgaggcgccgctgcggccggccgcgccgcgcctgcgcatcctgtggggcgtcctgctggcctccctggcggtgctgccgctgctggcgcagtggcttccgtacgcggtggtgctgacgcaggacatcctgatcgccgtgctgttcgccgttagcctgcatttcatgatggggccgggcggcatgcattcgttcggccacgcggcgtacttcgggctgggcgcgtacggcgcggccttgctgctgaaggccgcctcgctgcccatggaggccgcgctggccttcgcgccgctggtgggcgcgctgggcgcgctggtcttcggctggttctgcgtgcgcctgtcgggcgtctatctggccatgctgaccctggcgttctcgcagatcgtctggtcggtggtgttccagtgggacgacttcaccggcggctccaacggcatgatcggcgtctggccggccgagtggctgtccggcaccgcctactactatctggcgctggcggtggtcgcggccgccgtgctgggcctgcggcgcgtgctgttctcgccattcggctacgcaatgcgcgccgggcgcgattccagcctgcgcgccgacgccatcggcatcgacgtcaagcgggtgcagtgggcggctttcgtggtggccggcgcgttcggcgggctggccggagcgctgtatgcgttttccaagggcagcatttcgcccgacaccatggcggtcagcaaatcggtggacggcctggtgatggtgctgctgggcggcatccagaccctgatcggcccggtggtgggcgcgacggcgttcaacgtgctgcaggattacatcatgcgcgccaccgagtactggcgcgcgctgttcggcggcgtcatcctcctgctggtgctggtgttcccgcaagggatcgcgggattctgccggcaggcggggcaatggtggagcgcgcgcgccggcaaggaccggccgccgcgcaagggcggcgccttcatcggcggaccgcgggagaagcaggcatga

SEQ ID NO: 61211 - protein, 649 aa, Bordetella pertussis Tohama I
MDLTGFLAQLLNGLAEASSLFLVAAGLSLIFGVTRIVNFAHGSLYMLGVYVAYSIVERVGGTALGFWFGLVAASLAVGVVGAAIEVVLLRRIYRAPELFQLLATFALVLVINDAALWIWGAEDLLGRRAPGLTGAIDLLGRRYPVYNLVLIVVGPVVLGLLWLLLTRTRWGTLVRAATQDREMLGALGVNQAWLFTGVFALGAMLAGLGGALQLPREPASLSLDLRTIGDAFVIVVVGGMGSIPGAYVAALIIAEIKALCIGLGTVTLLGLSISFSKLTLVVEFAFMALVLVFRPWGLFGRPQGASRNSAPIEAPLRPAAPRLRILWGVLLASLAVLPLLAQWLPYAVVLTQDILIAVLFAVSLHFMMGPGGMHSFGHAAYFGLGAYGAALLLKAASLPMEAALAFAPLVGALGALVFGWFCVRLSGVYLAMLTLAFSQIVWSVVFQWDDFTGGSNGMIGVWPAEWLSGTAYYYLALAVVAAAVLGLRRVLFSPFGYAMRAGRDSSLRADAIGIDVKRVQWAAFVVAGAFGGLAGALYAFSKGSISPDTMAVSKSVDGLVMVLLGGIQTLIGPVVGATAFNVLQDYIMRATEYWRALFGGVILLLVLVFPQGIAGFCRQAGQWWSARAGKDRPPRKGGAFIGGPREKQA

SEQ ID NO: 61212 - DNA, 873 bp, Bordetella pertussis Tohama I
  CDS (1)..(873): transl_table=11
atgtcggaattcatgcagttcattttctcgggggtgaccgtgggcgcggtctacgcgctcgtcgccctcgggttcgcgatcatcttcaacgcgaccggcgtggtgaactttgcccagggcgagttcgtcatgctgggtggcatgatcactgtcttcgcgcacggcgcgggcctggcgctgccgctggccgcgctgctcgccatcgccgtgaccgccgcgacaggcgtggcgttgaaccgcctggcgatcgagccggcgcgcggcgcccccgtcgtctcgctcatcatcatcaccatcggcgcctcgatcttcatccggggcgcggtgcaaagcctgttcggcaagcagatccacagcctgcccgcgttctcgggcgacgacccgatacacgtgctgggcgccaccatcctgtcgcaaagcctgtggatgatcggcggcgcggtggcggtattcatcgtcctgtggctgttcttcaccaggacactgataggccgcgcggtgctggccacctcgaacaaccgcctggcggcccgcctggtcgggatcaacacccgattcatcatgaccctgtcgttcgcgctgtcggcggccatcggcgccctggccggcgtgctgatcacgccgatcacgctgacctcgtacgacgtggacctgaccctggcgctcaagggctttgccgccgccatgctgggcggcatgggcagccccaagggcgcgctggccggcggcatcctgctcggcctgctggaatccctgaccgccggctacctgtcgtcgcagtacaaggacgcggcggccttcctcaccattctcgcggtgctgttcttcatgccgcagggactgttcggacacaagtccacggatcgcgtataa

SEQ ID NO: 61213 - protein, 290 aa, Bordetella pertussis Tohama I
MSEFMQFIFSGVTVGAVYALVALGFAIIFNATGVVNFAQGEFVMLGGMITVFAHGAGLALPLAALLAIAVTAATGVALNRLAIEPARGAPVVSLIIITIGASIFIRGAVQSLFGKQIHSLPAFSGDDPIHVLGATILSQSLWMIGGAVAVFIVLWLFFTRTLIGRAVLATSNNRLAARLVGINTRFIMTLSFALSAAIGALAGVLITPITLTSYDVDLTLALKGFAAAMLGGMGSPKGALAGGILLGLLESLTAGYLSSQYKDAAAFLTILAVLFFMPQGLFGHKSTDRV

SEQ ID NO: 61214 - DNA, 930 bp, Bordetella pertussis Tohama I
  CDS (1)..(930): transl_table=11
atggatattttcactcaacagataatcaatggcctgacgctgggcagcgtgtatgcgctggtcgcgctgggctatacgatggtgtacggcatcatcggcctgatcaacttcgcgcatggcgacgtggtcatgatcggcgcgatggcggcgaccatggtcgccgccgccctggtgggcggcgatccgtccacctcggccttcgccgtcctcggcgccggcctgctggtctcggtgcccctgtgcatggccgtgggctggaccgccgaacgcgtggcgtaccggcccttgcgccgcgcgccgcggctggccgcgctgatcaccgccatcggcgtatccatcatcctgcagaacgtggcgatgatggtgtggggccgcaattacctcaactttccccaggtgctcacgcccaccgtgttcgagatcggcggggcgcgcatgagcatgctgcagatcgccatcgtggtcatcgccgcgctgatcatgggcgcgctgctgctggtcgtgcacaagacgcggctgggtaccgccatgcgggccaccgcgcagaaccgcgaagtggccggcctgatgggcgtgaacatcaacaccgtgatctcggcggccttcctgatcggttcggcgctggcggccatcgccggcatgatggtcaccacctattacggcgtgtcgcagtacaccatgggcttcatgctgggcctgaaggcgttcaccgcggccgtgctgggcggcatcggcaacctggtcggggccatggccggcggcctgctgctgggcatcatcgagtcgctgggctcgggctacatcggcgacctgaccggcggcttcctcggcagccactaccaggatgtcttcgccttcgtggtgctggtgatggtgctgatcttccggccttcgggcttgctgggcgagcgcgtgggagaccgagcatga

SEQ ID NO: 61215 - protein, 309 aa, Bordetella pertussis Tohama I
MDIFTQQIINGLTLGSVYALVALGYTMVYGIIGLINFAHGDVVMIGAMAATMVAAALVGGDPSTSAFAVLGAGLLVSVPLCMAVGWTAERVAYRPLRRAPRLAALITAIGVSIILQNVAMMVWGRNYLNFPQVLTPTVFEIGGARMSMLQIAIVVIAALIMGALLLVVHKTRLGTAMRATAQNREVAGLMGVNINTVISAAFLIGSALAAIAGMMVTTYYGVSQYTMGFMLGLKAFTAAVLGGIGNLVGAMAGGLLLGIIESLGSGYIGDLTGGFLGSHYQDVFAFVVLVMVLIFRPSGLLGERVGDRA

SEQ ID NO: 61216 - DNA, 882 bp, Bordetella pertussis Tohama I
  CDS (1)..(882): transl_table=11
atgagcggactgattatccagggcctggtcaacggcctgatcctgggcgccatctacggcctgatcggcgtgggcctgaacgtgatcttcggcgtgctgcgcgtggtgaacttcgcgcacggcgagttcctggtgctgggcgcctactttgcctactacctgctcgaatacgccggcatcgacccgctgctggcattgccgctggccttcggcgccttcttcctggccggctacgtgctgtatttcgtgctgatcccgcgcctgtccaaggccgacgaccccgaaatcagctcgctgctgctcatgttcggcgtgtccatcatgctgggagccatcatgctgctggccttcgaggccgacgcacgttcgctgccctacgagatcgaaccggtgttcttcaagatcgggccggtgctgatcccgaccgtgcgcctgatcgccctggccatcgcgctggccgtggtcgccgtgctggcctggttcctgtaccgcacccagttgggcaaggcgctgcgcaccatcatcatgaaccgcgacgccgtgcgtatcgtcggcatcaacgtcgagcggctgtcggccgtggcgttcggcctgggcatcggcctggccgccgtcacgggcgtgctggtggccatggtgttcccggcattttcccccttcatgggcaacgactacaccctgatcggcttcatcgtcatcgtgctgggcgggctgggccatcccgtgggtgcgctggtcggcgccatgctgttcggcgtcaccgaacaggtttcggtggtgttcttcaacccctccatcgccacgatctgcggcttcgtgctgatggtggccatgatcttcgtgcggcccaccgggctgttcggccaccgcgccctgcgctga

SEQ ID NO: 61217 - protein, 293 aa, Bordetella pertussis Tohama I
MSGLIIQGLVNGLILGAIYGLIGVGLNVIFGVLRVVNFAHGEFLVLGAYFAYYLLEYAGIDPLLALPLAFGAFFLAGYVLYFVLIPRLSKADDPEISSLLLMFGVSIMLGAIMLLAFEADARSLPYEIEPVFFKIGPVLIPTVRLIALAIALAVVAVLAWFLYRTQLGKALRTIIMNRDAVRIVGINVERLSAVAFGLGIGLAAVTGVLVAMVFPAFSPFMGNDYTLIGFIVIVLGGLGHPVGALVGAMLFGVTEQVSVVFFNPSIATICGFVLMVAMIFVRPTGLFGHRALR

SEQ ID NO: 61218 - DNA, 876 bp, Bordetella bronchiseptica RB50
  CDS (1)..(876): transl_table=11
ttggacgtctacatgcaattgaccatgaacagtctgcagatcgccgcggcgtacatactgttctcgttgggcctgacgctgatcttcggcgtcatgcggatcgtgaacttcgcgcacggcgagttcttcaccctgcctctgctggtcatgggcgtgctggtgccgctgctggtcggcgcgcagctgccgctcatcgtgtcctatgcgctgagcggcgtgctgggcatcgcggccacgctgctgctgggcgggcttatctacaagttcgccctcaagcgcttccagcgcgacatgaccggctctttcgtggtgtcggtcggcctctcgctgctgctgcaaggggtcttcctggagactttcggcggcgtgccgaccaagctgcctacgctggtggagggcacggtgaacatcctgggcgcgttcgttaccgtccagcgcctcatcatcaccggctgcgcgctgctggtggccgtgttcatgtgctggacgatcgtttccagccgcctgggcaaggccttgcgcgcggtggccgaggaccatgaggccgccatgctccagggcattccctaccgccgcatcgccctggccggcttcctcatcgcgaccgtgctcgcggcgatcgccgcggtcctgctttcgccggtcacggtatcgagcccgatcatcggcaacgactacctcatccgcggcttcatcgccatcgtgatcggcggcctgggcagcattcccggcgccatcctgggcagcgtcctgatcgcggtcatagagagcctgggcgggtattacttcgaccccacctgggccaccatcacgatgttcgccctgaccatgtttgtactgctcgttcgtccgaaggggatcctgggaaatggctaa

SEQ ID NO: 61219 - protein, 291 aa, Bordetella bronchiseptica RB50
MDVYMQLTMNSLQIAAAYILFSLGLTLIFGVMRIVNFAHGEFFTLPLLVMGVLVPLLVGAQLPLIVSYALSGVLGIAATLLLGGLIYKFALKRFQRDMTGSFVVSVGLSLLLQGVFLETFGGVPTKLPTLVEGTVNILGAFVTVQRLIITGCALLVAVFMCWTIVSSRLGKALRAVAEDHEAAMLQGIPYRRIALAGFLIATVLAAIAAVLLSPVTVSSPIIGNDYLIRGFIAIVIGGLGSIPGAILGSVLIAVIESLGGYYFDPTWATITMFALTMFVLLVRPKGILGNG

SEQ ID NO: 61220 - DNA, 882 bp, Bordetella bronchiseptica RB50
  CDS (1)..(882): transl_table=11
atgagcggactgattatccagggcctggtcaacggcctgatcctgggcgccatctacggcctgatcggcgtgggcctgaacgtgatcttcggcgtgctgcgcgtggtgaacttcgcgcacggcgagttcctggtgctgggcgcctattttgcgtactacctgctcgaatacgccggcatcggcccgctgctggcattgccgctggctttcggcgccttcttcctggccggctacgtcctgtatttcgtgctgatcccgcgcctgtccaaggccgacgaccccgagatcagctcgctgctgctgatgttcggcgtgtccatcatgctgggggccatcatgctgctggccttcgaggccgacgcacgctcgctgccctacgaaatcgaaccggtgttcttcaagatcggaccggtgctgatcccgaccgtgcgcctgatcgccctggccatcgcgctggccgtggtcgccgtactggcctggttcctgtaccgcacccagatgggcaaggccctgcgcgccatcatcatgaaccgcgacgccgtgcgcatcgtcggcatcaacgccgagcggctgtcggccgtggcgttcggcctgggcatcggcctggccgccgtcaccggcgtgctggtggccatggtgttcccggcgttctctcccttcatgggcaacgactacaccctgatcggcttcatcgtcatcgtgctgggcggattgggccaccccgtgggcgcgctggtcggcgccatgctgttcggcgtcaccgaacaggtgtcggtggtgttcttcaacccctccatcgccacgatctgcggcttcgtgctgatggtggccatgatcttcgtgcggcccaccgggctgttcggccaccgcgccctgcgctga

SEQ ID NO: 61221 - protein, 293 aa, Bordetella bronchiseptica RB50
MSGLIIQGLVNGLILGAIYGLIGVGLNVIFGVLRVVNFAHGEFLVLGAYFAYYLLEYAGIGPLLALPLAFGAFFLAGYVLYFVLIPRLSKADDPEISSLLLMFGVSIMLGAIMLLAFEADARSLPYEIEPVFFKIGPVLIPTVRLIALAIALAVVAVLAWFLYRTQMGKALRAIIMNRDAVRIVGINAERLSAVAFGLGIGLAAVTGVLVAMVFPAFSPFMGNDYTLIGFIVIVLGGLGHPVGALVGAMLFGVTEQVSVVFFNPSIATICGFVLMVAMIFVRPTGLFGHRALR

SEQ ID NO: 61222 - DNA, 876 bp, Bordetella bronchiseptica RB50
  CDS (1)..(876): transl_table=11
atgatgttcctgactctgttattggtgggtatcgtcagcggcgtgctgggagggctgatactggccctcctgtccaccggcttcaaccttgccctcggggtgtcccgcgtcgtgaacttccagcacggcgccgtggtgctttggtcgatgtacgcggcctacgtgctgtgggaggctaccggcatcaatccctatctcggcctgctgctgatcgtgccggtggctttcgccatcggctacttcctgcatcgctggctgatcatccgctcgctccagacccctgaagacagccagatcctgttctccatcggactgctgatcgccttccagtacctggcccagttcgtctattccacggacgcccgctcgctgaccgaggaaagcctgcagcattccctgatcatcggcccggtcatcctgcaatacacccagctcgccgccgccgccgtctcgctgctggtgctggtgttgctgcatctgatgctgacccgcaccgatctgggacgcaagctgcatgcgtgcgcccagaaccccgtcggcgcgcgggtggccggcctgaacgtcgagcacctttcggcggtggcgctgggcatcgcggccgcctgcgcggcggtcagcggcaccgccctggccaccatggcgcccatcttcccggaacgggctttcgagtactcgctggccgcggtggtggtgtcggtgctcggcgggatgggcagcatgagcggcagcatcctgggcggattgatcgtgggcgtcatcatcgccgtctcgcaggtcaccggccatggcgatctcgcgctcgccatcgtctatgcgctggttttcctcatcttcctggtccgcccgacggggctgatcagtgcggtcaaacgttga

SEQ ID NO: 61223 - protein, 291 aa, Bordetella bronchiseptica RB50
MMFLTLLLVGIVSGVLGGLILALLSTGFNLALGVSRVVNFQHGAVVLWSMYAAYVLWEATGINPYLGLLLIVPVAFAIGYFLHRWLIIRSLQTPEDSQILFSIGLLIAFQYLAQFVYSTDARSLTEESLQHSLIIGPVILQYTQLAAAAVSLLVLVLLHLMLTRTDLGRKLHACAQNPVGARVAGLNVEHLSAVALGIAAACAAVSGTALATMAPIFPERAFEYSLAAVVVSVLGGMGSMSGSILGGLIVGVIIAVSQVTGHGDLALAIVYALVFLIFLVRPTGLISAVKR

SEQ ID NO: 61224 - DNA, 864 bp, Bordetella bronchiseptica RB50
  CDS (1)..(864): transl_table=11
atggatctgctcgcgcaaatcctcgtcaacggcatcctgctgggcgggctgtatgccgtgatggcgcagggcctggcgctggtgtggggcgtgctgaatatcgtcaacctggcgcacggcgcgttcatcatgctgggcgcctacgtatcctggtacctgtacaccgacctcggcgtcgatcccttcctgggcctgccggtcacggccgccgtgctgttcgtgctgggctatgtcctgcagcgcgggctgctgaacctggtggtgcgcgcgcccatgttcaatacgctgctcatcaccttcggcctggaggtcgtgctgacctacctggcgcagctggcgttctcggccgatttccgcaccatcaacccgccctacgcgggcgacagctacgtcctcggcccggtgacgctgcccgtggcgcggctggccgccttcggcgtggcgctggcgctcacgctggggatgtggctgttcctgctgcacagccgcctgggccgcgccatccgcgccaccgcgcagaacctgatcgcggcgcggctctacggcgtggagccgcgccacctctatgcggtcacgttcggactgggcctggcgctggccggcgcggccggcgggctgtacgggaccgtctcgcagatcaacccctacatcggcgcgacgctgaccgcgaagtgcttcgccatttccatcatcggcggcctggacaatccattgggcgtcatggtgggaggattgttcctgggcatcgtcgaatcgctcaccacgctgtacgtggggccgaccttcgccgacgtggccagcttcggcatcctggtgctggtgctgttcctgcggcccagcgggctgctcggcagagcggcatga

SEQ ID NO: 61225 - protein, 287 aa, Bordetella bronchiseptica RB50
MDLLAQILVNGILLGGLYAVMAQGLALVWGVLNIVNLAHGAFIMLGAYVSWYLYTDLGVDPFLGLPVTAAVLFVLGYVLQRGLLNLVVRAPMFNTLLITFGLEVVLTYLAQLAFSADFRTINPPYAGDSYVLGPVTLPVARLAAFGVALALTLGMWLFLLHSRLGRAIRATAQNLIAARLYGVEPRHLYAVTFGLGLALAGAAGGLYGTVSQINPYIGATLTAKCFAISIIGGLDNPLGVMVGGLFLGIVESLTTLYVGPTFADVASFGILVLVLFLRPSGLLGRAA

SEQ ID NO: 61226 - DNA, 873 bp, Bordetella bronchiseptica RB50
  CDS (1)..(873): transl_table=11
atgaccgacttcattcttcaactgatcatcaacggcctggccatcggcgccatctatgcgctggtggccgtcggcctttccctgatctatggcgtgctggaaatcgtcaacttcgcgcatggcgaactcgtcatgctgggcggtttcgcggcctttttcgccgtctccacgctgggcttgggctactggcccagcatcctggtggccacgctgctggtcgccgcggcggggctgctgctgttcgacagcgtgctgttcacgctcaagtcggacgacttccagaaaggcatcctgctgacgctgggcctggccatgatcatccagaacggcgcgctctacctgctgcgcgccacgccccgcaccatcaccacggaatacggcttcgacgcctttcaggtgggcaacctcagcatcggcgtgctgcggctgatcgccttctgcctggccatcgccgccatcgtgctgctgcacgccttcctgaaatggacccgcagcggcaagtccatgcgcgccctggcgcagaaccgcgaggccgcgctgatggtcggcatgcggccgcgcaccatcgcgcgcacggtgttcgtgctgggcgcggccctgtgcgggctggccggcggcgtactggcgccgctgtacaccgtgcatccgctgatgggcatgccgttcgtgttcaaggcgttcgccatcatcatcatcggcggcctgggcaacatctggggcgccatcatcgccgcgctgatcgtcggcatgaccgaaagcctggccggcggcttcggctcggtcgtgctgcaggacgcgctggctttcatcatcatgattcttatcctgctggtgcgcccgctgggcctgttcggcaaggggatgcgagtatga

SEQ ID NO: 61227 - protein, 290 aa, Bordetella bronchiseptica RB50
MTDFILQLIINGLAIGAIYALVAVGLSLIYGVLEIVNFAHGELVMLGGFAAFFAVSTLGLGYWPSILVATLLVAAAGLLLFDSVLFTLKSDDFQKGILLTLGLAMIIQNGALYLLRATPRTITTEYGFDAFQVGNLSIGVLRLIAFCLAIAAIVLLHAFLKWTRSGKSMRALAQNREAALMVGMRPRTIARTVFVLGAALCGLAGGVLAPLYTVHPLMGMPFVFKAFAIIIIGGLGNIWGAIIAALIVGMTESLAGGFGSVVLQDALAFIIMILILLVRPLGLFGKGMRV

SEQ ID NO: 61228 - DNA, 1950 bp, Bordetella bronchiseptica RB50
  CDS (1)..(1950): transl_table=11
atggatctgacaggttttctggcccagctgctcaacgggctggccgaggcatcgtcgctgttcctggtggcggcggggctttcgctgattttcggcgtgacgcgcatcgtcaatttcgcgcacggctcgctctacatgctgggcgtgtacgtggcgtattcgatcgtcgagcgcgtgggcggcaccgcgctgggcttctggttcggcctggtggccgcgtcgctggccgtcggcgtggtgggcgcggctatcgaggtcgtgctgttgcgccgcatctatcgcgcgccggagctgttccagctgctggcgaccttcgccctggtgctggtcatcaacgatgccgcgctgtggatctggggcgccgaagacctgctggggcggcgcgcgccggggctgaccggcgcggtcgacctgctgggccgccagtacccggtctacaacctggtgctgatcgtgatcgggccggtggtgctggggctgctctggctgctgctgacgcgcacgcgctggggcaccctggtgcgcgcggccacgcaggaccgcgagatgctcggcgcgctgggcgtgaaccaggcctggctgttcaccggcgtgttcgcgctgggcgccatgctggccgggctgggcggcgcgctgcaattgccgcgcgagccagccagcctgagcctggacctgcgcaccatcggcgacgcgttcgtcatcgtggtggtgggcggcatggggtcgatcccgggcgcctatgtggccgcgctcatcatcgccgaaatcaaggcgctgtgcatcggcctgggcaccgtgaccctgctgggcttcagcgtgtcgttctccaagctgacgctggtggtggagttcgccttcatggcgctggtgctggtgttccgcccctggggcctgttcggacgcccgcagggcgccagccgcaactcggcgcccatcgaggcgccgctgcggccggccgcgccgcgcctgcgcatcctgtggggcgtcctgctggccgccctggcgacgctgccgctgctggcgcagtggctgccgtacgcggtggtgctgacgcaggacatcctgatcgccgcgctgttcgccgtcagcctgcatttcatgatggggccgggcggcatgcattcgttcggccacgcggcgtacttcgggctgggcgcgtacggcgcggccttgctgctgaaggccgcctcgctgcccatggaggccgcgctggccttcgcgccgctggtggccgccctgggcgcgctgatcttcggctggttctgcgtgcgcctgtcgggcgtctatctggccatgctgaccctggcgttctcgcagatcgtctggtcggtggtgttccagtgggacgacttcaccggcggctccaacggcatgatcggcgtctggccggccgagtggctgtccggcaccgcctactactatctggcgctggcggtggtcgcggccgccgtgctgggcctgcggcgcgtgctgttctcgccattcggctacgcaatgcgcgccgggcgcgattccagcctgcgcgccgacgccatcggcatcgacgtcaagcgggtgcagtgggcggctttcgtggtggccggcgcgttcggcgggctggccggagcgctgtatgcgttttccaagggcagcatttcgcccgacaccatggcggtgagcaagtcggtcgacggcctggtgatggtgctgctgggcggcatccagaccctgatcggcccggtggtgggcgcgacggcgttcaacgtgctgcaggattacatcatgcgcgccaccgagtactggcgcgcgctgttcggcggcgtcatcctcctgctggtgctggtgttcccgcaagggatcgcgggattctgccggcaggcggggcaatggtggagcgcgcgcgccggcaaggaccggccgccgcgcaagggcggcgccttcatcggcggaccgcgggagaagcaggcatga

SEQ ID NO: 61229 - protein, 649 aa, Bordetella bronchiseptica RB50
MDLTGFLAQLLNGLAEASSLFLVAAGLSLIFGVTRIVNFAHGSLYMLGVYVAYSIVERVGGTALGFWFGLVAASLAVGVVGAAIEVVLLRRIYRAPELFQLLATFALVLVINDAALWIWGAEDLLGRRAPGLTGAVDLLGRQYPVYNLVLIVIGPVVLGLLWLLLTRTRWGTLVRAATQDREMLGALGVNQAWLFTGVFALGAMLAGLGGALQLPREPASLSLDLRTIGDAFVIVVVGGMGSIPGAYVAALIIAEIKALCIGLGTVTLLGFSVSFSKLTLVVEFAFMALVLVFRPWGLFGRPQGASRNSAPIEAPLRPAAPRLRILWGVLLAALATLPLLAQWLPYAVVLTQDILIAALFAVSLHFMMGPGGMHSFGHAAYFGLGAYGAALLLKAASLPMEAALAFAPLVAALGALIFGWFCVRLSGVYLAMLTLAFSQIVWSVVFQWDDFTGGSNGMIGVWPAEWLSGTAYYYLALAVVAAAVLGLRRVLFSPFGYAMRAGRDSSLRADAIGIDVKRVQWAAFVVAGAFGGLAGALYAFSKGSISPDTMAVSKSVDGLVMVLLGGIQTLIGPVVGATAFNVLQDYIMRATEYWRALFGGVILLLVLVFPQGIAGFCRQAGQWWSARAGKDRPPRKGGAFIGGPREKQA

SEQ ID NO: 61230 - DNA, 930 bp, Bordetella bronchiseptica RB50
  CDS (1)..(930): transl_table=11
atggatattttcactcaacagataatcaatggcctgacgctgggcagcgtgtatgcgctggtcgcgctgggctatacgatggtgtacggcatcatcggcctgatcaacttcgcgcatggcgacgtggtcatgatcggcgcgatggcggcgaccatggtcgccgccgccctggtgggcggcgatccgtccacgtcggccttcgccgtcctcggcgccggcctgctggtctcggtgcccctgtgcatggccgtgggctggaccgccgaacgcgtggcgtaccggcccttgcgccgcgcgccgcggctggccgcgctgatcaccgccatcggcgtatccatcatcctgcagaacgtggcgatgatggtgtggggccgcaattacctcaactttccccaggtgctcacgcccgccgtgttcgagatcggcggggcgcgcatgagcatgctgcagatcgccatcgtggtcatcgccgcgctgatcatgggcgcgctgctgctggtcgtgcacaagacgcggctgggtaccgccatgcgggccaccgcgcagaaccgcgaagtggccggcctgatgggcgtgaacatcaacaccgtgatctcggcggccttcctgatcggttcggcgctggcggccatcgccggcatgatggtcaccacctattacggcgtgtcgcagtacaccatgggcttcatgctgggcctgaaggcgttcaccgcggcggtgctgggcggcatcggcaacctggtcggggccatggccggcggcctgctgctgggcatcattgaatcgctgggctcgggctatatcggcgacctgaccggcggcttcctcggcagccactaccaggatgtcttcgccttcgtggtgctggtgatggtgctgatcttccggccttcgggcttgctgggcgagcgcgtgggagaccgggcatga

SEQ ID NO: 61231 - protein, 309 aa, Bordetella bronchiseptica RB50
MDIFTQQIINGLTLGSVYALVALGYTMVYGIIGLINFAHGDVVMIGAMAATMVAAALVGGDPSTSAFAVLGAGLLVSVPLCMAVGWTAERVAYRPLRRAPRLAALITAIGVSIILQNVAMMVWGRNYLNFPQVLTPAVFEIGGARMSMLQIAIVVIAALIMGALLLVVHKTRLGTAMRATAQNREVAGLMGVNINTVISAAFLIGSALAAIAGMMVTTYYGVSQYTMGFMLGLKAFTAAVLGGIGNLVGAMAGGLLLGIIESLGSGYIGDLTGGFLGSHYQDVFAFVVLVMVLIFRPSGLLGERVGDRA

SEQ ID NO: 61232 - DNA, 873 bp, Bordetella bronchiseptica RB50
  CDS (1)..(873): transl_table=11
atgtcggaattcatgcagttcattttctcgggagtgacagtgggcgcggtctacgcgctcgtcgccctcgggttcgcgatcatcttcaacgcgaccggcgtggtgaactttgcccagggcgagttcgtcatgctgggcggcatgatcactgtcttcgcgcacggcgcgggcctggcgctgccgctggccgcgctgctcgccatcgccgtgaccgccgcgacaggcgtggcgctgaaccgcctggcgatcgagccggcgcgcggcgcccccgtcgtctcgctcatcatcatcaccatcggcgcctcgatcttcatccggggcgcggtgcaaagcctgttcggcaagcagatccacagcctgcccgcgttctcgggcgacgacccgatacacgtgctgggcgccaccatcctgtcgcaaagcctgtggatgatcggcggcgcggtggcggtattcatcgtcctgtggctgttcttcaccaggacactgatcggccgcgcggtgctggccacctcgaacaaccgcctggcggcccgcctggtcgggatcaacacccgattcatcatgaccctgtcgttcgcgctgtcggcggccatcggcgccctggccggcgtgctgatcacgccgatcacgctgacttcgtacgacgtgggcctgaccctggcgctcaagggctttgccgccgccatgctgggcggcatgggcagccccaagggcgcgctggccggcggcattctgctcggcctgctggaatccctgaccgccggctacctgtcgtcgcagtacaaggacgcggcggccttcctcaccattctcgcggtgctgttcttcatgccgcagggactgttcggacacaagtccacggatcgcgtataa

SEQ ID NO: 61233 - protein, 290 aa, Bordetella bronchiseptica RB50
MSEFMQFIFSGVTVGAVYALVALGFAIIFNATGVVNFAQGEFVMLGGMITVFAHGAGLALPLAALLAIAVTAATGVALNRLAIEPARGAPVVSLIIITIGASIFIRGAVQSLFGKQIHSLPAFSGDDPIHVLGATILSQSLWMIGGAVAVFIVLWLFFTRTLIGRAVLATSNNRLAARLVGINTRFIMTLSFALSAAIGALAGVLITPITLTSYDVGLTLALKGFAAAMLGGMGSPKGALAGGILLGLLESLTAGYLSSQYKDAAAFLTILAVLFFMPQGLFGHKSTDRV

SEQ ID NO: 61234 - DNA, 870 bp, Bordetella bronchiseptica RB50
  CDS (1)..(870): transl_table=11
atgaccgagttcctgcagtacctcgtctcgggcctggtggtgggctgcatctacggcctggtcgccatcggctttaccgccgtctacaacgtgaccaacatcgtcaatttcgcgcagggcgaggcctcgatgctgggcgcgctggcaaccgcctcgatgctggcggccggcgttcccctgccgctggccgtggtcgcctgcgtgctgctggtcggcgcgctgggcgtggtgctggagcgctttgcgctgcgcccggtgggcagccacgcgatccgcggcatcatcatcaccataggcatcagcgtggtactgcagggactcgccgtggtgacctggggcaccgacgcccagtcgctgcccgccttctccggctcgacgccgatcagcgtgtacggcgtgtcgatgcagccccaggcattctgggtgctgggcaccagcgtggtgctgatggcggtgctgtacgtctttctcacccgcacgtacctgggccgcagcttccgcgcctgtgcgatgaatccgcaggccgcggcgctgatgggcattccctcgtcggtgatgcgcggcctgggcttcttcctgtcgggcgcggtcggcgccatcgccggcatcatcatcgcgcccatcgcgctgatgcagtacgacagcggcgcggcgctgggcatcaagggcttcgtcgcctgcatcatgggcggcttcggcaacccggtgggcgcggccgccggcggcctgctgctggggctgctggaggccttctcggccggctacatcagttcggggttcaagaacgccatcgcgttcgtcctgctgctggccttcctgctggtgcgccccggcggactgttcggcgaattcgacaaggtgaagcgatga

SEQ ID NO: 61235 - protein, 289 aa, Bordetella bronchiseptica RB50
MTEFLQYLVSGLVVGCIYGLVAIGFTAVYNVTNIVNFAQGEASMLGALATASMLAAGVPLPLAVVACVLLVGALGVVLERFALRPVGSHAIRGIIITIGISVVLQGLAVVTWGTDAQSLPAFSGSTPISVYGVSMQPQAFWVLGTSVVLMAVLYVFLTRTYLGRSFRACAMNPQAAALMGIPSSVMRGLGFFLSGAVGAIAGIIIAPIALMQYDSGAALGIKGFVACIMGGFGNPVGAAAGGLLLGLLEAFSAGYISSGFKNAIAFVLLLAFLLVRPGGLFGEFDKVKR

SEQ ID NO: 61236 - DNA, 930 bp, Chromobacterium violaceum ATCC 12472
  CDS (1)..(930): transl_table=11
gtggacatttttctgcagcaaatcctgaacggtctcgttctgggtagcatctacgcgctgatcgcgctgggctacaccatggtgtacgggatcatgggcctgatcaacttcgcccacggcgaagtggtgatgttcggcgccatggtcaccatcaccgtcatcaccaccctgatggggatgggcatcaacctgccggggccggcgctggtgctgatcggccttctggtggccattcccgcctgcatgctgctcggcttcaccatcgagcgcgtcgcctaccgcccgttgcggggcaagcagcgcctggcgccgctgatcaccgcgatcggcgtgtccatcgtgctgcaacaggtcgccatcctgatctggggccgcaactacatccccttcccgcagattctggaccatgatgtggtgagcattttcggcgccagcatcaccaagctgcagatcgtgatcatcgcgctgtgcctggccatcatggccggcctgctgctgatggtggaaaagaccaagctcggccgcgccatgcgcgccaccagccagaacccggccgtggccggcctgatgggcgtcaacgtcaacaccatcatctccgccaccttcgtcatcggttccggcctgggcgctatcgccggcgtgatggtggccaccaactacgaacaggcccactactacatgggcttcatgatcggtctgaaggccttcaccgccgcggtgctgggcggcatcggcaacctgggcggcgcggtggccggcggcattctgctgggcatcatcgaaagcctgggcgccggctacatcggctcgctgaccggcggcttcctggggtccaactaccaggacatcatcgccttcatggtgctgatcctggtgctgatcttccgtccgtccggcctgctgggcgaaaaaatggccgaccgcgcctga

SEQ ID NO: 61237 - protein, 309 aa, Chromobacterium violaceum ATCC 12472
MDIFLQQILNGLVLGSIYALIALGYTMVYGIMGLINFAHGEVVMFGAMVTITVITTLMGMGINLPGPALVLIGLLVAIPACMLLGFTIERVAYRPLRGKQRLAPLITAIGVSIVLQQVAILIWGRNYIPFPQILDHDVVSIFGASITKLQIVIIALCLAIMAGLLLMVEKTKLGRAMRATSQNPAVAGLMGVNVNTIISATFVIGSGLGAIAGVMVATNYEQAHYYMGFMIGLKAFTAAVLGGIGNLGGAVAGGILLGIIESLGAGYIGSLTGGFLGSNYQDIIAFMVLILVLIFRPSGLLGEKMADRA

SEQ ID NO: 61238 - DNA, 903 bp, Wolinella succinogenes DSM 1740
  CDS (1)..(903): transl_table=11
ttgatggatattttaaccttttttcaacagttaattaatggcgtaagccttgggagcatgtacgctctcattgcgattggctatacgatggtttatggggtcttgcgcctcataaacttcgcgcacgcggatgtgatgatggtgggcgcttttttagtgttttttggggtctctagctttgctctccctttttgggcggctgcattgctttcgattcttttttcagcgcttcttggagtggtgatcgacaagattgcctacaaacccttaagaaacgccccccgaatctccatgctcatcacggctattggtgtgagctttttcttggagaacatcttcaacgtcttttttggaagcactcccaaatcctttgaggctcccgcttttttcaatgagaccctctcgctttcgcatctcgttttgacccatatcgctctgattgttcctttggtgacgctccttcttttggggatcttgctctatgtgctctatcgcaccaagcaagggatggccattagagcggtggcgtttgatgtgaacaccgtgaggctcatgggggtggatgccaatcaaattatctctatcgtctttatcatgggaagtgctctagcggccgtgggagggattttttatgcgattagctaccccaccattgatccgctaatgggggttcttattggccttaaggcgtttgcagccgcggttttgggcgggattggaagcgtgacgggcgcagtgcttggaggatttatccttggattcactgaggtggttgtggtggcgctatttcctgaattaagcggctataaggatgcctttgccttcctctttttaattctagtgcttctctttagacctgtgggaatcatgggggatgagcgcttggagaggagtcgattctaa

SEQ ID NO: 61239 - protein, 300 aa, Wolinella succinogenes DSM 1740
MMDILTFFQQLINGVSLGSMYALIAIGYTMVYGVLRLINFAHADVMMVGAFLVFFGVSSFALPFWAAALLSILFSALLGVVIDKIAYKPLRNAPRISMLITAIGVSFFLENIFNVFFGSTPKSFEAPAFFNETLSLSHLVLTHIALIVPLVTLLLLGILLYVLYRTKQGMAIRAVAFDVNTVRLMGVDANQIISIVFIMGSALAAVGGIFYAISYPTIDPLMGVLIGLKAFAAAVLGGIGSVTGAVLGGFILGFTEVVVVALFPELSGYKDAFAFLFLILVLLFRPVGIMGDERLERSRF

SEQ ID NO: 61240 - DNA, 927 bp, Photorhabdus luminescens subsp. laumondii TTO1
  CDS (1)..(927): transl_table=11
atgtcggagcaatttctctattttttacaacagatgttaaatggagtgactctgggtagtacttatgcattgattgccattggctatacgatggtttacggcattatcgggatgattaatttcgctcatggtgaaatttacatgattggtagctatgtctcctttatggtcattgcggctctgatcatgatgggaattgatttgggctggttgctgattactgctgcttttttaacatcaattgtcattgccgctgcttatggttggagtattgagcgagtagcttacaggccagttcgccattccaaacgcctgattgccctgatttcagcgattgggatgtctattttcttgcaaaactatgtcagtctgtcacaaagttctcgcgatctggcattgcctggcctgattaccgggcagtgggtattaggcgaaagtgatggattttctgccagtattagcgcaatgcaactgaccatctggatagtgacatttcttgccatgctgatactgacaatgtttatccgctactcccgcatgggacgtgcctgccgtgcttgtgcggaagatgtgaaaatggcgagtttgttgggaatcaatactaaccgagtgatttccttaacctttgttatcggtgcagtaatggctgcaatagccggtgttttgttggggcagttctacggtgtaataaatccgtatatcggttttatggcaggcatgaaagctttcaccgcagcagtattgggaggaattggcagtatcccgggggcgatgattggtggtttgatcttgggaatttctgaagccctaacttctgcttatctgagtacagaatataaagatgccgtttcctttgctctgctcattgttgtgctgttgtttatgccgactgggattttaggccgtccagaggtggaaaaggtatga

SEQ ID NO: 61241 - protein, 308 aa, Photorhabdus luminescens subsp. laumondii TTO1
MSEQFLYFLQQMLNGVTLGSTYALIAIGYTMVYGIIGMINFAHGEIYMIGSYVSFMVIAALIMMGIDLGWLLITAAFLTSIVIAAAYGWSIERVAYRPVRHSKRLIALISAIGMSIFLQNYVSLSQSSRDLALPGLITGQWVLGESDGFSASISAMQLTIWIVTFLAMLILTMFIRYSRMGRACRACAEDVKMASLLGINTNRVISLTFVIGAVMAAIAGVLLGQFYGVINPYIGFMAGMKAFTAAVLGGIGSIPGAMIGGLILGISEALTSAYLSTEYKDAVSFALLIVVLLFMPTGILGRPEVEKV

SEQ ID NO: 61242 - DNA, 1614 bp, Rhodopseudomonas palustris CGA009
  CDS (1)..(1614): transl_table=11
gtgcctctcatccatctgacgcgcattctatttgccgcagtcgcgatcgcgttcgtcactctggggagcctgccggcggtggccggtccctatgaggacgccatcgcgcaattcgcccaagattccttcaccgacagcgaggacgcgatcggcaagctggtcgccagcggcaatccgcgcgccgcggtgatcatcaccgcgctgcaggacggcaagctctacgccgacccggacagcaaagcggccttcatcaagaccgacgacggcaagatcgccaatgcggcgaccggcgaggcggtcggtgcgctgccggccaaggccagcgcggttcggctcaacaacaagctgcgccgcgtcgtcgccggcgcgatggccggcctgacgctgctgtcgccggatctcgacaagcggctgcaggctgcgcaatcggtattcaagtcgcacgacgagaccatgctgccgaccgtcgaggcggcgctgaaggcggaaaagaacgccgccgccaagcgcgccttcaccgaagcgcgggcgtcgatcctgctgttcaagcagggcgcctccgatgccgacaagctggacgcgatcgccaccatcaaggcgcgcggcgatcaggaggcgatggcgctgctcaccggcgcgccgtcgaaccagagcgccgccgtcgccagcggcatcgccggcgccaaggcggcgatcgagcgcaatctggcgatctggtcgatggtgcagaacgcctggtatggactgtcgctcggctcggttctactgcttgccgcgatcggcctcgccatcaccttcggtgtgatgggcgtcatcaacatggcgcatggcgagatggtgatgctcggggcctacaccaccttcgtggtgcaggaggcgatccgcacgcgttatccggcgctgttcgactattctttgttgattgcggtcccgctcgcgttcctcgttgccggcgcagtcggcgttctgatcgaacgcaccgtgatccgcttcctctacggccgtccgctggagaccttgctcgccacctggggactgtcgctgatcctgcagcaggcggtgcgcacgctgttcggccccaccaatcgcgaggtcggcaatccgagctggatgagcggtgcgttcgaactcggcgagatgaccatcacttacaaccggctgtggatcctgtgcttcacgctggcggtgttcgccctgctgctggcgatgctgcgctacacctcgctcggcctggagatgcgcgcggtgacgcagaaccgccgtatggccgcgtcgatgggcattgccacgtcgcgggtcgacgcgctgacgttcggactcggctccggcatcgccggcattgccggtgtggcgctgtcgcagatcgacaacgtctcgccgaacctcggccagagctacatcatcgacagcttcatggtggtggtgttcggcggcgtcggaaacctgtggggcacgctggtcggcgccttctcgctcggcatcgccaacaagttcctggagccggtcgccggcgccgtgctaggcaagatcgccatcctggtgctgatcatcctgttcatccaaaagcgcccccgcggcctgttcgcgctcaagggccgggcggtggaggcatga

SEQ ID NO: 61243 - protein, 537 aa, Rhodopseudomonas palustris CGA009
MPLIHLTRILFAAVAIAFVTLGSLPAVAGPYEDAIAQFAQDSFTDSEDAIGKLVASGNPRAAVIITALQDGKLYADPDSKAAFIKTDDGKIANAATGEAVGALPAKASAVRLNNKLRRVVAGAMAGLTLLSPDLDKRLQAAQSVFKSHDETMLPTVEAALKAEKNAAAKRAFTEARASILLFKQGASDADKLDAIATIKARGDQEAMALLTGAPSNQSAAVASGIAGAKAAIERNLAIWSMVQNAWYGLSLGSVLLLAAIGLAITFGVMGVINMAHGEMVMLGAYTTFVVQEAIRTRYPALFDYSLLIAVPLAFLVAGAVGVLIERTVIRFLYGRPLETLLATWGLSLILQQAVRTLFGPTNREVGNPSWMSGAFELGEMTITYNRLWILCFTLAVFALLLAMLRYTSLGLEMRAVTQNRRMAASMGIATSRVDALTFGLGSGIAGIAGVALSQIDNVSPNLGQSYIIDSFMVVVFGGVGNLWGTLVGAFSLGIANKFLEPVAGAVLGKIAILVLIILFIQKRPRGLFALKGRAVEA

SEQ ID NO: 61244 - DNA, 873 bp, Rhodopseudomonas palustris CGA009
  CDS (1)..(873): transl_table=11
atgtccgaactgctgcaatttctgatctcggggctgacggtcggagcggtgtatgcgctggtcgcactcggcttcacgctggtctatcacgcctccgacgtcgtcaatttcgcccagggcgaattcgtcatgctcggcggcatggtcaccgtgtttgcgtatgcggccggcttgccgctgccgctggcggccttgctggcggtgatcgtcgcggtggtcgtcggcctgttactgtattggctggcgattgcgccggcccgcggcgcctcggcggtatcgctgatcatcatcaccatcggcgcctcgatcctgctgcgcggtgcggcgcagatcgtgttcgacaagcagttccacaagctgccggccttctccggcgatgcgccgatccacctgctcggcgcggtgatccagccgcagagcctgtgggtgctcggcggcgcggcgctcgtggtgctgacgctttactacgtgatggagcgaacgctgatcggcaaagccgtggtcgcgaccgccgccaaccggctcgcggcgcggctggtcggcgtcaacgtcgccaccgtgatggcgctggcgttcggcggctcggccgcgatcggcgccatcgccggcattctgatcaccccgatcacgctgaccagctacgacgtcggcacgctgctggcgctgaagggctttgcggcagcgatgctcggcggcatgggcaatccgctcggtgccgtgatcggcggcctgttgctgggcctgttggagtcgttcggcgccggctacgtgtcgtcgacctacaaggacgccatcgccttcatcgtcatcctcgccgtgctgttcgtcgcgccgcaggggctggtcggccgtcgcactgtcgagcgggtctga

SEQ ID NO: 61245 - protein, 290 aa, Rhodopseudomonas palustris CGA009
MSELLQFLISGLTVGAVYALVALGFTLVYHASDVVNFAQGEFVMLGGMVTVFAYAAGLPLPLAALLAVIVAVVVGLLLYWLAIAPARGASAVSLIIITIGASILLRGAAQIVFDKQFHKLPAFSGDAPIHLLGAVIQPQSLWVLGGAALVVLTLYYVMERTLIGKAVVATAANRLAARLVGVNVATVMALAFGGSAAIGAIAGILITPITLTSYDVGTLLALKGFAAAMLGGMGNPLGAVIGGLLLGLLESFGAGYVSSTYKDAIAFIVILAVLFVAPQGLVGRRTVERV

SEQ ID NO: 61246 - DNA, 867 bp, Geobacter sulfurreducens PCA
  CDS (1)..(867): transl_table=11
atgaccattttcctccaatcgctcatcagcggcattctgatcggcggcgtctacgccctgatcggcataggactcaccatcatcttcggtgtcatgcgggtcatcaacttcgcccacggcgacatcatgatgatcggcatgtacctgacctataacttcttctccctggcgggggtcgatccgttcgtctccatcgccctcaccatcccgctcatgttcctcttcggagccattctccagaaaacattcatcaaccgcgtgctcggagccctgccccagaaccaaatactgcttaccatcggcctgggactgattatgagcaacacgatgatgttcatctatacctccgactacaagatcctgactacatcttattcgtcgagcagcttcaatatcggcaccatctccatttcatggccgctggccatctctttcctgatcaccgcggcgataacgctgctcctgtactggttcctgatgaagaccgacacgggtcaggcgatccgggcaacggcccaggaccgggaagcggcccagctcatggggatcaacgtgaagcggatgtcaatcctggccttcggcatgggtgcggccctggccggcacggctggtgcgctcatctcccctacctactacatcttcccccagatcgggagcaccttcaccctcaaggcattcgtcatcacggttctcgggggaatggggagcatcgtgggggccaccatcggcggcgtcatcatcggggtggcggagtccctcggggccgtctacatctcctccggctggaaggacgtggtcgtgttcgtcctcttcctcctggtgcttctcttcaagccggcgggtctgctcggcaaatccaaaatgtag

SEQ ID NO: 61247 - protein, 288 aa, Geobacter sulfurreducens PCA
MTIFLQSLISGILIGGVYALIGIGLTIIFGVMRVINFAHGDIMMIGMYLTYNFFSLAGVDPFVSIALTIPLMFLFGAILQKTFINRVLGALPQNQILLTIGLGLIMSNTMMFIYTSDYKILTTSYSSSSFNIGTISISWPLAISFLITAAITLLLYWFLMKTDTGQAIRATAQDREAAQLMGINVKRMSILAFGMGAALAGTAGALISPTYYIFPQIGSTFTLKAFVITVLGGMGSIVGATIGGVIIGVAESLGAVYISSGWKDVVVFVLFLLVLLFKPAGLLGKSKM

SEQ ID NO: 61248 - DNA, 876 bp, Geobacter sulfurreducens PCA
  CDS (1)..(876): transl_table=11
atgctcctgcagcagctcatcaacgggatcgccctcggcagcacctatgcgctcatcgccttgggctacaccatggtctacggcatcatcgccctcatcaacttcgcccatggagaaatattcatggcgggcgcgttcgtgggcctgctgatggtagccgtgttcaagatgaacatcttcgtggccatgatccttgccatggcaacctgcatggtcatgggggtggtcatcgagttgatcgcctaccggcccctcaggaagtcgtcgcggctgtcggcgctcatctcggccatcggcgtctccatcttcctctcgactctggcactcatgatcttcggtgccgacgccaagggtttccccgacaccgccttcccggtccggcaggtgaaggtccttggggccgagatctcgaccctccaactcctcatcatcggcgtttcggccctcctcatgctcggcctcgagttcatcgtccagaaaaccaagatcggcaaggccatgcgcgccacctccgaagactacaacacggcagccctcatggggatcaacgtgaaccgcgtgatctccttcacctttgccctcggatcctccctggcggctgccggcggggtgctggtggggctcctgttcaacgcggtaagcttcaacatggggctcatggcagggctcaaggctttctcggccgcagtcctcggcgggatcggctccattcccggcgccatgctcggcgggctgctcctgggcgtggctgaggtcatgggggtagctgccgggtattcgtcctaccgcgatgccatcgccttcgcgatacttgtcctggtcctcctggtaaagcccacgggcctgctggggcagaaaattcagaaaaaggtgtaa

SEQ ID NO: 61249 - protein, 291 aa, Geobacter sulfurreducens PCA
MLLQQLINGIALGSTYALIALGYTMVYGIIALINFAHGEIFMAGAFVGLLMVAVFKMNIFVAMILAMATCMVMGVVIELIAYRPLRKSSRLSALISAIGVSIFLSTLALMIFGADAKGFPDTAFPVRQVKVLGAEISTLQLLIIGVSALLMLGLEFIVQKTKIGKAMRATSEDYNTAALMGINVNRVISFTFALGSSLAAAGGVLVGLLFNAVSFNMGLMAGLKAFSAAVLGGIGSIPGAMLGGLLLGVAEVMGVAAGYSSYRDAIAFAILVLVLLVKPTGLLGQKIQKKV

SEQ ID NO: 61250 - DNA, 903 bp, Bdellovibrio bacteriovorus HD100
  CDS (1)..(903): transl_table=11
atgcaggatttcgtacagcatttgatcaacggagtgagccttggatccatctacgcattgatcgccctgggctacacgatggtgtacggaatcctgaaaatgatcaacttcgcccactcggatgtttacatggtgggcgcctttgccgcctactatttcgcccgctggctgggaattgaaaacaaccccggcttcagcactcttctgaccctgattgtaatcacgatgatctgctgcagccttctggggctggtgattgaacgcctggcgtaccgcccgcttagaaactcaccaaaactgaacgtcctgatcaccgccattggtgtcagcttgtttttgcagtattccggtcaggtggtttttggagccgatcccaaagtctttcctgaagtcatgaaagactttgtgatcttctctatcggcatcgttgaagtccgctcttttgatgtgacggttctgggtgtgggcattgttgccatgctgggactgcagttcctgctgttcaaaacaaaaatgggccgtgccatgcgggcggtgagcgccaacccgatggtggccagcctgatgggtgtgaacccggaccgcattattgccttcacgtttgttgtcggatcctctctggccggaattggcagtgttctggtcggcatgaagtatcccaagattgacccgctgatgggcatgatgatcggcatgaaggcgtttgtcgccgcagttctgggtggcatcggcaacgtcggtggtgcggtcctgggtgcgatgatcatgggcctttccgaagaaatggtcgtggcttatctttccagcacctaccgtgatgctttggcctttggaattctgattgtgattctgatctttaagccggcaggtctgctgggtaaatactctgtggagaaggtctga

SEQ ID NO: 61251 - protein, 300 aa, Bdellovibrio bacteriovorus HD100
MQDFVQHLINGVSLGSIYALIALGYTMVYGILKMINFAHSDVYMVGAFAAYYFARWLGIENNPGFSTLLTLIVITMICCSLLGLVIERLAYRPLRNSPKLNVLITAIGVSLFLQYSGQVVFGADPKVFPEVMKDFVIFSIGIVEVRSFDVTVLGVGIVAMLGLQFLLFKTKMGRAMRAVSANPMVASLMGVNPDRIIAFTFVVGSSLAGIGSVLVGMKYPKIDPLMGMMIGMKAFVAAVLGGIGNVGGAVLGAMIMGLSEEMVVAYLSSTYRDALAFGILIVILIFKPAGLLGKYSVEKV

SEQ ID NO: 61252 - DNA, 900 bp, Treponema denticola ATCC 35405
  CDS (1)..(900): transl_table=11
atgttattgcagcaattaattaatggtctggtcataggaagtacatatgcattggttacaataggttttaatatggtgtacggtgtgttggagctgactaattttgcccatagttctttttatatgctggctgcgtatataggtcaattcattttgttaaaattctttatgactgtatcggtccctattgctctgattataacatttttaacttccataattataacagcctttttgggtgctcttatggataaaattgctttggagcctataagaataaaaaaaggtgctcctatttcatctttaataagtactgtcggtgttcagactataatcaacaactccgttcttttaattttcggcacagttccattatactttcctgatttattaaagctgggtaaatttactatttatggcggaactgtggttcaatggattcaggttctcatattgattatgactttaattataatgcttgtattaacttttattgttacgcgtacacgcttaggaaagtcaatgcgggcaatttctcaaaatcaagttgctgcaagacttatgggaataaatataaatagagttataacccttacattctttataggaactacagttgccggtatttcaggtttaatggttgcaatgtattatcaaagagtagataccttaatgggggcatctgtaggattaaagtcatttgctgcagcagttcttggcggaatgggctctctccccggagcggctataggaggattattgataggcttacttgaaactctttttgccgcttatataagttcaggatatagggatattgttgcatttgtgatattgatattggttcttcttattcggccctcaggcttaatgggtaaaaaaagtgtagataaggtatag

SEQ ID NO: 61253 - protein, 299 aa, Treponema denticola ATCC 35405
MLLQQLINGLVIGSTYALVTIGFNMVYGVLELTNFAHSSFYMLAAYIGQFILLKFFMTVSVPIALIITFLTSIIITAFLGALMDKIALEPIRIKKGAPISSLISTVGVQTIINNSVLLIFGTVPLYFPDLLKLGKFTIYGGTVVQWIQVLILIMTLIIMLVLTFIVTRTRLGKSMRAISQNQVAARLMGININRVITLTFFIGTTVAGISGLMVAMYYQRVDTLMGASVGLKSFAAAVLGGMGSLPGAAIGGLLIGLLETLFAAYISSGYRDIVAFVILILVLLIRPSGLMGKKSVDKV

SEQ ID NO: 61254 - DNA, 909 bp, Clostridium thermocellum ATCC 27405
  CDS (1)..(909): transl_table=11
atggatagttatttactgcagatttttaacgggataagcgtaagctcggtgcttttactggcagccctgggattggcaataaccttcgggcttatgagaattatcaacatggcccatggtgagatgataatgataggtgcctataccacgtatatggtgcaaaacttatttatatcatttttgggagaaagatatttcgatctgtattttattgcggcaatacctctttcgttcctgattacaggatttgtcggttatttgctggagatttcaattgtaaaacgcctgtacggcaggactttggacagtttattggccacatggggaataagccttatacttcagcagttagccagaaacattttcggtgcacccaatgtagatgtgagaagtccaagatggctgaacggtggggtggttgtttttggaaatattcagctcccctacaaaaggctttttataatcctgctggctgccctttgcatagccggagtatatttattcctctttaaaagcgacagcggaagaaggataagagcggttatgcagaatagaagtatggccgaaagccttggtataaacacaagaaaggtggattccatgacctttgcaattgggtcgggattggcaggcattgccggatgtgccttgaccctgttaggctcaatcggaccaaccttaggaaccaactacattgtggatacctttatggttgtggtattgggcggtgtcggaagaattatcggcacagtggccggagcagcagcgatcggaatcggaaatacgactttcgaatattttaccaacgcctctttgggaaaggtacttgtatttcttgcggttattctctttcttcaatggaagcctcaggggttctttagcgtaagcagcagagtattggatgagtaa

SEQ ID NO: 61255 - protein, 302 aa, Clostridium thermocellum ATCC 27405
MDSYLLQIFNGISVSSVLLLAALGLAITFGLMRIINMAHGEMIMIGAYTTYMVQNLFISFLGERYFDLYFIAAIPLSFLITGFVGYLLEISIVKRLYGRTLDSLLATWGISLILQQLARNIFGAPNVDVRSPRWLNGGVVVFGNIQLPYKRLFIILLAALCIAGVYLFLFKSDSGRRIRAVMQNRSMAESLGINTRKVDSMTFAIGSGLAGIAGCALTLLGSIGPTLGTNYIVDTFMVVVLGGVGRIIGTVAGAAAIGIGNTTFEYFTNASLGKVLVFLAVILFLQWKPQGFFSVSSRVLDE

SEQ ID NO: 61256 - DNA, 882 bp, Herminiimonas arsenicoxydans
  CDS (1)..(882): transl_table=11
atggctccgtttttcaatatccttttggctggtgtgttccaggcagctgtcttgttcctggtggcgtccggcttgcaactcatcttcggcgtgcagcgcatcatcaatctggcgtgcggatcaatctatgcgctcggcgcatatttcggcatcttcgtcacatcatgggcgctgagcaaaggcctgccggttcatttgtttccattcgtcctgctgggagccggcatagtcatcggcctgatcggcattccgctggaaagactgatccgcactatttataaccgccctgaatccttccagttgctgctgaccttcgcagtgatgctgatgttccaggatgtactgcgcttcttctggggcgccgacccgcagcaattgcctaacgtctcgatgaccttcggcatcctgtctgccttcggcgtcagcatgcctacctataacgtgatggtgattgcagtcgcagtctcactggcgataggcatggcttacttcctcggcaaaaccaagaccggcaaaatcctgcgtgccaccgcagagaatcgcgaaaccagcgccgcgatgggcattaacgtgacccgcgtctacgtgatggtgttcacgctcggcaccatgctcggcacgataggcggtgccctggtgatcccgaatgcagcggcgtcgctggagatgggcgtcgaactggtggttgaagcatttgccgtggtcgtgatcggcggcctcggcagcatgaagggagccgcagtcggcgcgctgatcgtcggcctgatacgcgcactcagcgccatgtattatccggaagctgaaattctggctatctatgcaattgtgttggcagtcctcatctggaagccggcaggtctctatggaaaggcggaaacatga

SEQ ID NO: 61257 - protein, 293 aa, Herminiimonas arsenicoxydans
MAPFFNILLAGVFQAAVLFLVASGLQLIFGVQRIINLACGSIYALGAYFGIFVTSWALSKGLPVHLFPFVLLGAGIVIGLIGIPLERLIRTIYNRPESFQLLLTFAVMLMFQDVLRFFWGADPQQLPNVSMTFGILSAFGVSMPTYNVMVIAVAVSLAIGMAYFLGKTKTGKILRATAENRETSAAMGINVTRVYVMVFTLGTMLGTIGGALVIPNAAASLEMGVELVVEAFAVVVIGGLGSMKGAAVGALIVGLIRALSAMYYPEAEILAIYAIVLAVLIWKPAGLYGKAET

SEQ ID NO: 61258 - DNA, 930 bp, Herminiimonas arsenicoxydans
  CDS (1)..(930): transl_table=11
atggatatttttatccagcaaatcatcaacggcctggttctcggcagcatgtatgcattggtcgccctcggctatacgatggtgtacggcgtactcaatctgatcaattttgcacatggcgatgtcttgatgataggcgcgatggccggcctgaccattctcaagatgctcaatacggtggcgcccgatttgcctggcatagtcaagctgatcatcgcaatactcggtgcgataccggtatgcgtggcggtcaatgtcctgatagaacgcgtggcctatcgtcgtctgcgcaatgcaccgcgtctggcgcccctgattaccgctatcggcgtttccattttgctgcaaacctttgccatgatgatctggggccgcagtccgctgccattcccgcaggtgatgccgggcgagccgctgcacattctgggtgccctgatttcaccgacgcaggtcatgttgctgatcctggcagcagcatcaatgttgctgctggctttgctgattgaaaaaaccaagctgggccgcgcgatgcgcgccacggcagaaaatccgcgtgtggcaggattgatgggcgtggattccaatcgtgtgatcgtgatgaccttcgtcatcggtgctacgctggcagcgatcgccggcgtgatgtgggcggcgaattactcatccgcacaatttgcgatgggtttcgtgcctgggctgaaggcgttttcagccgcagtgctgggcggcatcggtaatatttacggcgccatgctgggcggcattctgctgggtctgatcgagagtctgggcgccggctacatcggcgatctgaccggtggcttcctcggcagtcactaccaggacatctttgccttcgtcgtgctgatcatcgtgctgaccctgcgaccgtccggcatcatgggcgagcgcgtggcggatcgggcataa

SEQ ID NO: 61259 - protein, 309 aa, Herminiimonas arsenicoxydans
MDIFIQQIINGLVLGSMYALVALGYTMVYGVLNLINFAHGDVLMIGAMAGLTILKMLNTVAPDLPGIVKLIIAILGAIPVCVAVNVLIERVAYRRLRNAPRLAPLITAIGVSILLQTFAMMIWGRSPLPFPQVMPGEPLHILGALISPTQVMLLILAAASMLLLALLIEKTKLGRAMRATAENPRVAGLMGVDSNRVIVMTFVIGATLAAIAGVMWAANYSSAQFAMGFVPGLKAFSAAVLGGIGNIYGAMLGGILLGLIESLGAGYIGDLTGGFLGSHYQDIFAFVVLIIVLTLRPSGIMGERVADRA

SEQ ID NO: 61260 - DNA, 876 bp, Herminiimonas arsenicoxydans
  CDS (1)..(876): transl_table=11
ttgagtaccttcctccagtatgttttaagtggcttgtcgattggtgccatctacagcttggtagcactcggcttctacattatgtggtcggcctgtcgctcggtaaattttgcccatggcgacgtaatgatggtcggtgcggtgttggctgtagtcagcaatgacttcggtttgtcaccatatatcgggattccattatccattgtcgcctgtgtgctctacggggtgttggtagagcgatttgctgtgcgtccatacaccaaggaagcgaatgcgatcggatggatgctgacgacgattgcgatcggcatcatggtcgagagtttcgtcactatcaaattcggttctttcgcgcgcgcactgccgtcgccgggagtcgataagcccatcaccattttcggtgcgggtatctatctgcaggaaatgctgattccactgttcgtgattttgttcatgatcggactggaagttttctatcgtcgcaccatgctcggccgcgccatgcgagcagtagcgttcaatcgcattgcggccggcatgatgggtatcaacgttggcatggtcacttccttctctttcgcgcttgctgccggtctcggcggtatcgccggcatcctgattggtccgattatccaggtctcttcgacgatgggtgtgttgatcggtttgaaaggatttgccgtcgctattatggccagcatcaccagcgctcgcggcgtcgtgattactgggctgttgtatggcgtacttgagaaattcgtcgaaggctacatcagctccgctgcccgtgaggtagtcggtttctccatcatgatcctggtcctgttgatgtttccgcagggtctgtttggacgtaaggaactcacaaaggtatga

SEQ ID NO: 61261 - protein, 291 aa, Herminiimonas arsenicoxydans
MSTFLQYVLSGLSIGAIYSLVALGFYIMWSACRSVNFAHGDVMMVGAVLAVVSNDFGLSPYIGIPLSIVACVLYGVLVERFAVRPYTKEANAIGWMLTTIAIGIMVESFVTIKFGSFARALPSPGVDKPITIFGAGIYLQEMLIPLFVILFMIGLEVFYRRTMLGRAMRAVAFNRIAAGMMGINVGMVTSFSFALAAGLGGIAGILIGPIIQVSSTMGVLIGLKGFAVAIMASITSARGVVITGLLYGVLEKFVEGYISSAAREVVGFSIMILVLLMFPQGLFGRKELTKV

SEQ ID NO: 61262 - DNA, 885 bp, Herminiimonas arsenicoxydans
  CDS (1)..(885): transl_table=11
atgatttacgccatggtcgcagtcggttttaccctgtttttcggtgtgctggatgtcatcaagttttcgcatggcgatactttgatggttggcgcttttgccggccttaccgcatcaaccggcgtgctgatgctggacatcggctcaccctggatacgcttgctggcagtcgtgctggcggcagtatgcgtgacaggattgctgggcgcggcgattgccaaatggctggtgctgccgctgcataaggcgccgccactgaataccctgctggcgacgctgatgctgggtacggtcatgcgcgaagcagtgcgtttgttttatcccgatggctcgaattcccagcctttcccttccttgctgccgaccgacgcgatcgaattcggtggtttcgccttgcgtgcagacaatgtgattcttctgctgagcggcctggccatcattgcgggggtgcacttcctgattacccgcacccgtctcggcatggcgatacgcgccgtggcgcaggacggcgaaactgcgcgcctgatgggcatcaattttgaagccgtcgtgctgctgacgttcgcactcggctccggcatggctgcgctggctggcgtgatgaacggactgtattacaacgagatcaatttcaacgtcggtttgctgttgggcgtgatcggatttgcggcggcgattctcggtggtctgggcaatatttacggcgcgatcatcggcggcttcctgtttgccggtctgcaggtattgggtagtgcaaccctgccggcgctgatcccgaatattccgagtgcctacaaggacgtcttcgcatttgcagtcgtcattattctgatggcctggaaaccaaccgggctgattgccgaaaaatctagcgaacgggtttga

SEQ ID NO: 61263 - protein, 294 aa, Herminiimonas arsenicoxydans
MIYAMVAVGFTLFFGVLDVIKFSHGDTLMVGAFAGLTASTGVLMLDIGSPWIRLLAVVLAAVCVTGLLGAAIAKWLVLPLHKAPPLNTLLATLMLGTVMREAVRLFYPDGSNSQPFPSLLPTDAIEFGGFALRADNVILLLSGLAIIAGVHFLITRTRLGMAIRAVAQDGETARLMGINFEAVVLLTFALGSGMAALAGVMNGLYYNEINFNVGLLLGVIGFAAAILGGLGNIYGAIIGGFLFAGLQVLGSATLPALIPNIPSAYKDVFAFAVVIILMAWKPTGLIAEKSSERV

SEQ ID NO: 61264 - DNA, 918 bp, Burkholderia vietnamiensis G4
  CDS (1)..(918): transl_table=11
atgtccgctaccgatattttcaacatcacgctgatgcagggctttgccggtctgagtctcttcagcgtcctgctcctgatggggctcgggctcgccgtgatcttcggccagatgggcgtgatcaacatggcgcacggcgaattcatgacgatcggcgcctatacggtctacctgttttcgtggttttcgcagaacgtctggcacgcgctcacgcccgtgtatttcttcttcgcgattctcgcggcgttcgcgctggccttcgcggcgggctggctcgccgaatgggcgctgatccgccatctgtacaagcgcccgctcgacacgctgctcgccacctggggcctgagcctcggcatgcagcaggtgttccgctcgaccttcgggccgaaggaagtgagtccggcgctgcccgactggctgatgggttcgtgggaacccacgcccggcctcgacataccggtgagcggcatgttcgtgatgggcctcgcgctgctgatgacgggcggcctgctgctcgcgctctatcgctcgcgctggggcttgcgcgtgcgcgccacggttgcgaaccggccgatggcgaacgcggcgggcatcaatacgcggcgcaccgaccgcatgacgtttgcgatcggctgtggcatcgcgggtgtggcgggcgcggccttcacggccatcggctcgacggggccgacgagcggctcgctctatatcgtcgattcgtttctcgtcgtgacgttcggcggcgcggcgagcctgctcggtaccgtggcatcggcgttcggcatcgcgcagatgcagtcgatcagcgagttcttcctgtcgggatcgatagcgcgcgtcctcacgctgctcaccgtcgtggtgattctcatgctgcgcccgcagggcctgttcgcctcgaaggtgcggcgcgtttaa

SEQ ID NO: 61265 - protein, 305 aa, Burkholderia vietnamiensis G4
MSATDIFNITLMQGFAGLSLFSVLLLMGLGLAVIFGQMGVINMAHGEFMTIGAYTVYLFSWFSQNVWHALTPVYFFFAILAAFALAFAAGWLAEWALIRHLYKRPLDTLLATWGLSLGMQQVFRSTFGPKEVSPALPDWLMGSWEPTPGLDIPVSGMFVMGLALLMTGGLLLALYRSRWGLRVRATVANRPMANAAGINTRRTDRMTFAIGCGIAGVAGAAFTAIGSTGPTSGSLYIVDSFLVVTFGGAASLLGTVASAFGIAQMQSISEFFLSGSIARVLTLLTVVVILMLRPQGLFASKVRRV

SEQ ID NO: 61266 - DNA, 927 bp, Burkholderia vietnamiensis G4
  CDS (1)..(927): transl_table=11
atgactgacttctttccccaattcgcccagcagctggtcaacggcctgacgctgggcgcgatctatgcgttgatcgccatcggctattcgatggtctacggcatcatcggcatgatcaacttcgcccacggcgagatctacatgatcggcgcgtacgtgggcctcgtgaccctcaccgcgatcggcatctccgccggctatccgctgccgctcgtgctcggcgccgcgctgatcgtgtcggtgctcgtcaccggcctgtacggcttcgcggtcgagcgcgtcgcgtaccggccgctgcgcggcggcccgcgcctcgtgccgctgatctcggcgatcggcatgtcgatcttcctgcagaactacgtgcagatcggccagggcgcgcgcgacgtgtccgtgccggtgctgatctccggcgcgttcgacatccatctcggcggcgactacgacgtgacggtgccgtatgcgcgcctgctgatcgtcggcgtgacgctcgtgctgatgatcgcgctcacgctgttcatctcgcattcgcggatgggccgcgcatgccgcgcgtgcgccgaggacatgaagatggcgaacctgctcggcatcgacacgaaccgcgtgatctcgttcacgttcgtgctcggcgcgatgctggcggccgtcggcggcgtgctgatcgggctgacgatcggcaagctcaatccgtacatcggcttcgtcgccggcatcaaggcgttcaccgccgccgtgctcggcgggatcggcagcatcccgggcgcgatgctcggcggcgtgctgctgggcctcgccgaaaccttcgccgcaggctacatgccggccgagtacaaggacgtggtcgcgttcggcctgctcgtgctgatcctgctcttccgcccgaccggcctgctcggcaagtcggacatcgaaaaggtctga

SEQ ID NO: 61267 - protein, 308 aa, Burkholderia vietnamiensis G4
MTDFFPQFAQQLVNGLTLGAIYALIAIGYSMVYGIIGMINFAHGEIYMIGAYVGLVTLTAIGISAGYPLPLVLGAALIVSVLVTGLYGFAVERVAYRPLRGGPRLVPLISAIGMSIFLQNYVQIGQGARDVSVPVLISGAFDIHLGGDYDVTVPYARLLIVGVTLVLMIALTLFISHSRMGRACRACAEDMKMANLLGIDTNRVISFTFVLGAMLAAVGGVLIGLTIGKLNPYIGFVAGIKAFTAAVLGGIGSIPGAMLGGVLLGLAETFAAGYMPAEYKDVVAFGLLVLILLFRPTGLLGKSDIEKV

SEQ ID NO: 61268 - DNA, 954 bp, Burkholderia vietnamiensis G4
  CDS (1)..(954): transl_table=11
atgatggacatctttatccaacaggttatcaacggactggtgcttggcagcgtctacgccatcatcgcgttgggctacacgatggtgtacggcattctcggcatcatcaacttcgcgcacggcgacgtgctgatggtcggcgcgatggtggcgctctcatgcatcggcttgttgcagaaccacttcccggatctcggcagcgtgccgacgctgtgcatcgcgctgtcggccgccgccgtcgtctgcgcggcggtcggctacacgatcgagcgggtggcgtaccggccgctgcgcaaggcgccgcgtctcgccccgctcattaccgcgatcggcgtatcgatcctgctgcagaccctcgcgatgatgatctggtcgcgtaacccgttggcgtttccgcagcttttgccgaccgatcccatcaatgtaatcaaagctaccgacaccactccgggcgccgtgatctcgatgactgaaatcgtcatcgtcgtcgtcgcgttcctcgtgatggcggggcttcttctcctcgtgcacaagacgaagctcggccgcgcgatgcgcgcgatcgccgagaacccgggcgtcgcctcgctgatgggagtgaacccgaactttgtgatttcggcgaccttcatgatcggctcggcgctggctgcgctggcgggcgtgatgatcgcgtcggaatacggcaacgcccacttctacatgggcttcattcccggcctgaaggcgttcacggcggcggtgctcggcggtatcggcaacctcggcggcgcaatggtcggcggcgtgattctcggtctgattgaacagctgggcgccggctacatcggcaacctcacgggtggcgtgttcggcagtaactaccaggacgtgttcgcattcatcgtgctgatcatcgtgctggtgttccgaccgtcgggcctgctgggcgaacgtgtcgcggaccgtgcttaa

SEQ ID NO: 61269 - protein, 317 aa, Burkholderia vietnamiensis G4
MMDIFIQQVINGLVLGSVYAIIALGYTMVYGILGIINFAHGDVLMVGAMVALSCIGLLQNHFPDLGSVPTLCIALSAAAVVCAAVGYTIERVAYRPLRKAPRLAPLITAIGVSILLQTLAMMIWSRNPLAFPQLLPTDPINVIKATDTTPGAVISMTEIVIVVVAFLVMAGLLLLVHKTKLGRAMRAIAENPGVASLMGVNPNFVISATFMIGSALAALAGVMIASEYGNAHFYMGFIPGLKAFTAAVLGGIGNLGGAMVGGVILGLIEQLGAGYIGNLTGGVFGSNYQDVFAFIVLIIVLVFRPSGLLGERVADRA

SEQ ID NO: 61270 - DNA, 951 bp, Burkholderia vietnamiensis G4
  CDS (1)..(951): transl_table=11
atggatattttcatccaacagatcctcaacgggctggtgctcggcagtgtgtacgccatcatcgcgttgggttacacgatggtgtacggcattctcggcatcatcaacttcgcgcacggcgacgtgctgatgatcggcgcaatggtcgccctgtcggcgatcaccgtgctgcagaatcacttcccccaactcggcaacgtcgcgacgctgacgatcggcctgggtatcgcggcggtcgtctgcgcgtgcgtgggctacacgatcgagcgcgtcgcataccggccgctgcgccgcgcgccgcgtctcgcaccgctgatcaccgcaatcggcgtgtcgatcctgctgcagacggccgcgatgatcatctggtcgcgtaacccgctgccgttcccgcaattgctgccgaccgatccgatcaacgtgatcaaggcaaccgacacgacgccgggcgccgtgatctcggtgaccgaaatcgtgatcatcgcggtggcgttcatcgtgatggccggcctgctgctgctggtgcacaagaccaagctcggccgcgcgatgcgtgcgatcgccgaaagccccaacaccgcgagcctgatgggcgtgaacccgaacttcgtgatctcggcgacgttcatgatcggctccgcgctcgccgcgctggccggcgtgatgatcgcgtccgaatacggcaacgtgcacttctacatgggcttcatccccggcatgaaggcgttcaccgcggcggtgctcggcgggatcggcaacctcggcggcgcgatggtcggcggcgtggtgctcggtctgatcgagcaactgggtgcgggctacatcggcaacctcacgggcggcgtgttcggcagtaactaccaggacgtgttcgcgttcgtggtgctgatcatcgtgctggtgttccgtccgtcgggcctgctgggcgaacgtgtcgcggaccgcgcgtaa

SEQ ID NO: 61271 - protein, 316 aa, Burkholderia vietnamiensis G4
MDIFIQQILNGLVLGSVYAIIALGYTMVYGILGIINFAHGDVLMIGAMVALSAITVLQNHFPQLGNVATLTIGLGIAAVVCACVGYTIERVAYRPLRRAPRLAPLITAIGVSILLQTAAMIIWSRNPLPFPQLLPTDPINVIKATDTTPGAVISVTEIVIIAVAFIVMAGLLLLVHKTKLGRAMRAIAESPNTASLMGVNPNFVISATFMIGSALAALAGVMIASEYGNVHFYMGFIPGMKAFTAAVLGGIGNLGGAMVGGVVLGLIEQLGAGYIGNLTGGVFGSNYQDVFAFVVLIIVLVFRPSGLLGERVADRA

SEQ ID NO: 61272 - DNA, 1563 bp, Bradyrhizobium sp. ORS278
  CDS (1)..(1563): transl_table=11
ttgatcgtcgcgaccgctccggcgtttgccgccagcttcgaagagtcggtcgccaaattcgcaaatgacgatttctccgacaccgacgatgcggtgggcgagatcgccgtgtccggcaatccgctggcctatccgatcatcagcgcgctgcaggacgagcggctgatgttcgatgccgagaccaagaaggtctatgtcaagcagaccgacggcaagatcatcgatgccgcgaccggcgcggccgtcgacaagctgcccgacaatgccgcggcggtgagcctcaacaaccgcctgcgccgcaccgtggacgccgcgctcggcggcctgacgctgctgtcgccggacaccaatacgcgcctgaccgctgcgaaatcggtgttcaagtcgcatgacgaggcgacgctgtcgaccgtagagtcggcgctcgccaaggagaccaaccgcacggtcaagcaggcgctggccgaggcgcgtgccgcgatcctgctgttcaagtccgacgccagcgaggtcgacaagctcgacgccgtcgccaccatcaggtcgcgcggcgaccaggaggcgctggcgctgctgaccgagatcagcggcggcgaccagcccgccaacgtcgccagggcggcggcgagcgcgatctcatcgatccagggctcgcttgctatctggtccggcgtgcagaacgcctggtacggcctgtcgctcggctcggtgctgctgctggccgccatcggcctcgccatcaccttcggtgtgatgggcgtcatcaacatggcccatggcgagatggtgatgctcggcgcctacaccaccttcgtcgtgcaggaggtcatccgcacgcgctatcccgcgctgttcgactactcgcttctgatcgccgcaccgctcgccttcctggtggccggcgcgatcggcgtgctgatcgagcgcaccatcatccgcttcctctatggccgtccgttggagacgctgctcgccacctggggcctgtcgctgatcctgcagcaggcggtccgctccgcgttcggtccgaccaaccgtgaggtcggcaatccctcctggatgagcggcgcgttcgagctggggcagattaccatcacctacaatcggctctggatcctctgctttaccatggccgtgttcgcgatcctgctggcgatgctgcgctacacggcgctcggccttgagatgcgcgcagtgacgcagaaccggcgcatggcggcctcgatgggcatcgcgacgtcgcgggtcgatgcgctgaccttcggcctcggctccggcatcgccgggattgccggggtggcgctgtcgcagatcgacaatgtcagcccgaacctcggtcagagctacatcatcgactccttcatggtcgtggtgttcggcggcgtcggcaatctctggggtacgctggtcggcgccttcacgctcggcatcgccaacaagttcctggagccggtcgccggcgcggtgctcggcaagatcgcgatcctggtgctgatcatccttttcattcagaagcgcccgcgcgggctgttcgcgctcaagggccgggcggtggaagcatga

SEQ ID NO: 61273 - protein, 520 aa, Bradyrhizobium sp. ORS278
MIVATAPAFAASFEESVAKFANDDFSDTDDAVGEIAVSGNPLAYPIISALQDERLMFDAETKKVYVKQTDGKIIDAATGAAVDKLPDNAAAVSLNNRLRRTVDAALGGLTLLSPDTNTRLTAAKSVFKSHDEATLSTVESALAKETNRTVKQALAEARAAILLFKSDASEVDKLDAVATIRSRGDQEALALLTEISGGDQPANVARAAASAISSIQGSLAIWSGVQNAWYGLSLGSVLLLAAIGLAITFGVMGVINMAHGEMVMLGAYTTFVVQEVIRTRYPALFDYSLLIAAPLAFLVAGAIGVLIERTIIRFLYGRPLETLLATWGLSLILQQAVRSAFGPTNREVGNPSWMSGAFELGQITITYNRLWILCFTMAVFAILLAMLRYTALGLEMRAVTQNRRMAASMGIATSRVDALTFGLGSGIAGIAGVALSQIDNVSPNLGQSYIIDSFMVVVFGGVGNLWGTLVGAFTLGIANKFLEPVAGAVLGKIAILVLIILFIQKRPRGLFALKGRAVEA

SEQ ID NO: 61274 - DNA, 927 bp, Bradyrhizobium sp. ORS278
  CDS (1)..(927): transl_table=11
atgttcggcgactattccatcggcgacctcggggccatcttcgcgatgcagggcttcgcgggcctcatcctgttttcggtctacgtgctgatggcgctcgggcttgccatcatcttcggccagatgggcgtcatcaacatggcgcatggcgaattcatgatcctcggtgcctacgtcacctggatgacgtcgaacgccttccagaatttcctgccatcgctgtttcccggctacttcttcgtcgctatggcgctcgccttcgtcgcgtccgggtcgctcggcatgctggtcgagtgggcgatgatccggcggctttacaagcgtccgctggatacgctgcttgccacctggggcctcagcttgatcctgcagcaggcctatcgctcggtattcggcgcacgcgaggtcggcgttgaattgccggagtggatgatgggctcgtggcaggccaccgactcgatccaaattccgatcaacggcatgttcgtgatgtgcctgacgatcctgatcaccattgtggtcgcctatgtcctgttcctgtctcgctgggggcgccaggtccgcgccgtggtgcagaaccgcgtgatggccggcgccgtcggcatcaacaccgagaaggtcgaccgctacaccttcggcctcggttgcggcatcgccggtgtcgcgggctccgccttcaccatgatcggttcgaccggtccgaccgccggccagctctacattgtcgacaccttcctggtcgtcgtgttcggcggggccgccagcctgctcggcaccatcgcctcggccttcaccatctcccaggcgcagtcgacgatggagttcttcatgtccggctcgatggccaaggtgctgacgctgctggcgatcgtcgccatcctgatgctgcggccgcaggggctgttcgccctcaaggtccgcaaatga

SEQ ID NO: 61275 - protein, 308 aa, Bradyrhizobium sp. ORS278
MFGDYSIGDLGAIFAMQGFAGLILFSVYVLMALGLAIIFGQMGVINMAHGEFMILGAYVTWMTSNAFQNFLPSLFPGYFFVAMALAFVASGSLGMLVEWAMIRRLYKRPLDTLLATWGLSLILQQAYRSVFGAREVGVELPEWMMGSWQATDSIQIPINGMFVMCLTILITIVVAYVLFLSRWGRQVRAVVQNRVMAGAVGINTEKVDRYTFGLGCGIAGVAGSAFTMIGSTGPTAGQLYIVDTFLVVVFGGAASLLGTIASAFTISQAQSTMEFFMSGSMAKVLTLLAIVAILMLRPQGLFALKVRK

SEQ ID NO: 61276 - DNA, 894 bp, Thermus thermophilus HB27
  CDS (1)..(894): transl_table=11
gtgagcttcttcctccagctcctcttctcgggggtggtcctggggctcgtctacgccctcgccgccttgggcttcgtcctcatctacaaggcgagccgggtggtgaacttcgcccaggggcagttcatcgccatcggggcctttttggcctactgggccatggtcgccttgggggcgccctttcttttggccgcggccttggccctggccttaaccgccctcttgggctttggggtggagcgggtcttcctgaagcgcatggtggggcagcccatcatctccgtcatcatggccaccatcggcctcgcctccctccttgacggcctgatccaccttacccccttcggggcgggcaacttcagctaccccgccttcctgccctcgggcggcgtcgccctcctgggggcgcaggtctcctacccccagctcctcgccctgggcttcaccctggccttcctcgccctcttcacctggtttttccagcgctccaccctggggatcgccatgcggagcgtggccgacgaccagatggcggccatgagcctcggggtctcggtggagaaggtcttcgccctggcctgggcggcggcggggctcacggcggcggcggccgggatcgtggtgggcaccatcgccggcctcaacctggacgggctggtgcacatcggccttagggtcttccccgtggtgatcctgggggggctggactccatccccggggcggtggtggcggggatcctcatcggcgtcttggaaaacctggcggcgggctacctggacccctttgtccccggcggggggacccgggacgtcttccccttcctggtcctccttttggttctctggttcaagccccatggcctcttcggcacggaggagattgagcgcgtatga

SEQ ID NO: 61277 - protein, 297 aa, Thermus thermophilus HB27
MSFFLQLLFSGVVLGLVYALAALGFVLIYKASRVVNFAQGQFIAIGAFLAYWAMVALGAPFLLAAALALALTALLGFGVERVFLKRMVGQPIISVIMATIGLASLLDGLIHLTPFGAGNFSYPAFLPSGGVALLGAQVSYPQLLALGFTLAFLALFTWFFQRSTLGIAMRSVADDQMAAMSLGVSVEKVFALAWAAAGLTAAAAGIVVGTIAGLNLDGLVHIGLRVFPVVILGGLDSIPGAVVAGILIGVLENLAAGYLDPFVPGGGTRDVFPFLVLLLVLWFKPHGLFGTEEIERV

SEQ ID NO: 61278 - DNA, 876 bp, Thermus thermophilus HB27
  CDS (1)..(876): transl_table=11
gtggcggacctccttccctacctcatcggcggcctggccaacggggccctctacagcctcctcgccttgggcttcgtcctcgtctaccgggcgaccagcgtggtgaacttcgccatcggggagttccttctcgtgggggcctacctcacctacaccttcgccctcctccttcccctccccttggccctcctcgccgccctgcccctcgccttcctcttcggggtcctggtggaacggggcttcgtgcggccccttctcggccggaacgtggtggcggtgatcatggcgaccatcggcctcgccgccgccctggatgggggggtgcagctcctctggggcccggacctcaagtacctgccgggaagcctccccgacctcggctttgaagcgggaggggtctacgtgtcctcccgggcggtctggaacctcctcctggccctgcccttggggctcggcctcctctggctcctccggaaaagccgctacggcgtcctggtccgggccatctccgagcgggaggtggccgccttggccctgggcatccccacggcccggatcctggccggggtctggggggtctccgccctcctcgccaccttggcgggggccctcctcgccgcggcgagcggggtggggcacaacctcgtcttcttcgggctcaaggtcttccccgtggccatcctgggggggcttgacgccgtgggcggggctctggcggcggggtttttgctcggggtcctcgaggccctctcccagcgctacctggaggcctacctccccggcttcaccgaggccctgcccttcgtggtggtcctcctcgtcctcctcgtgaggccctacggcctcttcggggagcggcagattgagagggtgtga

SEQ ID NO: 61279 - protein, 291 aa, Thermus thermophilus HB27
MADLLPYLIGGLANGALYSLLALGFVLVYRATSVVNFAIGEFLLVGAYLTYTFALLLPLPLALLAALPLAFLFGVLVERGFVRPLLGRNVVAVIMATIGLAAALDGGVQLLWGPDLKYLPGSLPDLGFEAGGVYVSSRAVWNLLLALPLGLGLLWLLRKSRYGVLVRAISEREVAALALGIPTARILAGVWGVSALLATLAGALLAAASGVGHNLVFFGLKVFPVAILGGLDAVGGALAAGFLLGVLEALSQRYLEAYLPGFTEALPFVVVLLVLLVRPYGLFGERQIERV

SEQ ID NO: 61280 - DNA, 969 bp, Thermus thermophilus HB27
  CDS (1)..(969): transl_table=11
ttgctagagcagatcctggtcctgctgccccaggtgctctttgacggcttcatcctgggcttcatctacgccatgatcgccctggggtacaccatggtctacggcgtcttggagctcatcaacttcgcccactccgagatcttcatgatcggggccgtggccggggtggaggtcttccgctacctcgcccccctgatccccaacggctacctcctcctcctggtggccgtggtggtgggggcggcggtggcgggcctcaccgccatcctggtggagcgcatggcctaccggcccctccgccgccggggcaccaccaaccgcctcgtgcccctggtgacggccatcggggtgagcttcttcctccaggacctggtgcggctcattgagggcctctggcacaacgagttcttcctgcgcatgcgcaccataccggacctcgagggctccttcaccctcttcgggggcgccatcttcatccagaccaagtcggtgatcgtcatcgtggtctccgtgctcatgctctgggggctcacctacctggtgaaccgcaccaagctggggatggccatccgggccgtggcccaggacctcaccacggcgagcctcatgggcatcaaccccgaccagatcatctcccgcaccttcctcatcggcggcgccttgggcggggtggccggggtcctcttcgccctcatctacaccaccatcaacccctacgtgggcttcctccccggcatcaaggccttcaccgcggcggtcctgggcgggatcggcaacatccccggggccatgctcgggggcctcgtcctggggcagctggagaacttcttcggcacctacctgcccatcctcaccgccggcaacttcgggacggagtacaaagacgtggtggccttcctcatcctcatcttcatcctcctcttccggccccaaggcctcctgggccagatggttaaggagaaggtatga

SEQ ID NO: 61281 - protein, 322 aa, Thermus thermophilus HB27
MLEQILVLLPQVLFDGFILGFIYAMIALGYTMVYGVLELINFAHSEIFMIGAVAGVEVFRYLAPLIPNGYLLLLVAVVVGAAVAGLTAILVERMAYRPLRRRGTTNRLVPLVTAIGVSFFLQDLVRLIEGLWHNEFFLRMRTIPDLEGSFTLFGGAIFIQTKSVIVIVVSVLMLWGLTYLVNRTKLGMAIRAVAQDLTTASLMGINPDQIISRTFLIGGALGGVAGVLFALIYTTINPYVGFLPGIKAFTAAVLGGIGNIPGAMLGGLVLGQLENFFGTYLPILTAGNFGTEYKDVVAFLILIFILLFRPQGLLGQMVKEKV

SEQ ID NO: 61282 - DNA, 906 bp, Desulfovibrio vulgaris subsp. vulgaris str. Hildenborough
  CDS (1)..(906): transl_table=11
atggaagaattcctgcaacagttgaccaacggcctcgcggtggggggcatctacgccctcatcgccctcgggtacaccatggtgtacggcgtgctcaaactcatcaacttcgcgcatggcgacctgttcaccatcggagcctatctcgggttcacggtgttcgccgcgctggggctttcggggcatgtctccggggcggtggccgtattgctggtcacgaccatggtcatggggcttgtggcactcatcggctatctgcttgaacgtgtggcctaccggccattgcgctcgtcaagccgcctctctgccgtggtctctgcgcttggtgcctccatcttcttccagaacgccgtgatgctcatctacggtgccaagttccaagtctaccccaacgacatcaggcccaccatggccgtgagcttcttcggcatggacatccctctggtgcgcatcatgatgttcggtgcttctgtggcgctcatgctgcttctgcatttcttcatccaccgcacccgcacgggcactgccatccgcgccgtggccatcgaccagggcgcggccaagctcatgggcatcgacgtgaaccgggtcatcgcgctggtgttcatgatcggccctgcactgggtggcgccgcaggcgtcatggtaggcctctactatgggcagatagacttcaccatggggtgggtgtacggcctcaaggccttcaccgccgccatcctcggtggcatcggcaacatccccggtgccatggtgggcggtcttctgctgggcgtcatcgaggccctcggtgcggcatacatctccatcgcgtggaaagacgccatcgccttcctcgtcctcatcctcatcctgatcatcaggcccacgggccttctcggcgaaagggtggccgacaagatatga

SEQ ID NO: 61283 - protein, 301 aa, Desulfovibrio vulgaris subsp. vulgaris str. Hildenborough
MEEFLQQLTNGLAVGGIYALIALGYTMVYGVLKLINFAHGDLFTIGAYLGFTVFAALGLSGHVSGAVAVLLVTTMVMGLVALIGYLLERVAYRPLRSSSRLSAVVSALGASIFFQNAVMLIYGAKFQVYPNDIRPTMAVSFFGMDIPLVRIMMFGASVALMLLLHFFIHRTRTGTAIRAVAIDQGAAKLMGIDVNRVIALVFMIGPALGGAAGVMVGLYYGQIDFTMGWVYGLKAFTAAILGGIGNIPGAMVGGLLLGVIEALGAAYISIAWKDAIAFLVLILILIIRPTGLLGERVADKI

SEQ ID NO: 61284 - DNA, 861 bp, Bacillus anthracis str. Sterne
  CDS (1)..(861): transl_table=11
atggatgtgttaatcaatttatttgtaaatgggatttcaacagggatgctcatttttttattagcatcaggtctttcgcttattttcggtttaatgagtgttctaaactttgcacatggtggtttatttgcgtggggagcctttacaggtgtttggttatttaatatgacaggtagttacgtattagcgttaattggagcaatagctatgggaatgttccttggattcattttagaaagattccttattagaccggtatatggaaatcatgttcgccagcttcttgttacgcttggaggaatgcttgtacttagtgaatgtattaaagtattttggggaccaaatccaattggggcaaagttaccgttatggctacaaggaagttttacattcggaggcgttatattaattaaatatcgtctatttgttattttaattgggattatcatttacgttgccttactattattgctcaaaaaaacaaagataggtcttatgatacgcgcaggtgtaatggataaagagatggttcaagcgctcggtattaacgtaaaagcgatattttctttcgtctttttattaggagcagggatggcagcgttgggaggtttcttattagcaccgtattcaggtgttattttcgccgaaatgggtatgcagtatgcgattttagcgttcatagtagtaatcattggaggattaggaagcgtacaaggttcagcaattgcttctttaattgtcggattagctggtgcttttacagcgtattttataccggatttatcacttgcaatcaatatgttaatgctactgtttttcttaatcgtgaagccaaatggacttgttggtgaaaaggggtga

SEQ ID NO: 61285 - protein, 286 aa, Bacillus anthracis str. Sterne
MDVLINLFVNGISTGMLIFLLASGLSLIFGLMSVLNFAHGGLFAWGAFTGVWLFNMTGSYVLALIGAIAMGMFLGFILERFLIRPVYGNHVRQLLVTLGGMLVLSECIKVFWGPNPIGAKLPLWLQGSFTFGGVILIKYRLFVILIGIIIYVALLLLLKKTKIGLMIRAGVMDKEMVQALGINVKAIFSFVFLLGAGMAALGGFLLAPYSGVIFAEMGMQYAILAFIVVIIGGLGSVQGSAIASLIVGLAGAFTAYFIPDLSLAINMLMLLFFLIVKPNGLVGEKG

SEQ ID NO: 61286 - DNA, 1065 bp, Bartonella henselae str. Houston-1
  CDS (1)..(1065): transl_table=11
atgttcatccagtatttttttaatgcacttgcattgggggctctttatgggcttatcgcaattggttacaccatggtctatggtattctaagactcattaatttcgctcatggtgatatctttatgctaggggcgtattttgttttcttttccacaatcagctttatgcctgcttgggctgctgttcttcttatattattggctcttttcatttattattcagtatttatagggtttaaaaaacgccctaaaatttattgggttgctgttttttttgcttttattttaacgttcatttattattttaaaattgctccacaagattttacaccgatttggattttagctctctgtttttcaatttttatcacaagtgcagtgggtattactattgaccagtttgcctataaaccactgcgtcatgctccacgtatttcagcgcttattggtgcaataggagtttccttttttattgaaaatcttgctactgtaatctttagtggtgtcccaaagggtgtaaaacagccagattttcttgtcacaccattcctatggcatttaggatcaggggaaaatggaattattagaattgctcccatgtctctgatcgttcccattgtttcatttattcttatcgtgttattgctatggattatccataagacaaaacctggtcttgctatgcgtgcaatttcccacgatattgaaacgactcgtttgatgggtgtttctgtcaataaagtcatcgcacttacctttgggataggctcagcacttgctgctattgcaggcatcatgtgggctttacgctatcctcaagttcaaccttatatgggtattcttcctggactcaaagcatttatagcagccgttatcggaggcattggttcaattccaggagcaatgttgggggggctgttactaggatttattgaaattatgattgtcgcattctttcctgctctatccggatatagagatgcttttgcctttattttattaattctgattttattagtaatgcccactggtttaatgggcaaaaaaaatcaggagaaaatctaa

SEQ ID NO: 61287 - protein, 354 aa, Bartonella henselae str. Houston-1
MFIQYFFNALALGALYGLIAIGYTMVYGILRLINFAHGDIFMLGAYFVFFSTISFMPAWAAVLLILLALFIYYSVFIGFKKRPKIYWVAVFFAFILTFIYYFKIAPQDFTPIWILALCFSIFITSAVGITIDQFAYKPLRHAPRISALIGAIGVSFFIENLATVIFSGVPKGVKQPDFLVTPFLWHLGSGENGIIRIAPMSLIVPIVSFILIVLLLWIIHKTKPGLAMRAISHDIETTRLMGVSVNKVIALTFGIGSALAAIAGIMWALRYPQVQPYMGILPGLKAFIAAVIGGIGSIPGAMLGGLLLGFIEIMIVAFFPALSGYRDAFAFILLILILLVMPTGLMGKKNQEKI

SEQ ID NO: 61288 - DNA, 927 bp, Erwinia carotovora subsp. atroseptica SCRI1043
  CDS (1)..(927): transl_table=11
atgtccgagcagttcctctactttcttcagcagatgttcaacggcctaacgttgggcagcacctatgcgctgatcgccattggctacaccatggtttacggcattatcggcatgattaacttcgcgcacggcgaggtttatatgatcggtagctatgtctcctttattgttattgcggccctgatgatgatgggcatcgatgctggctggctcctgattagtgtcgccttcgttgctgcggtggtgatttccagcgcctacggctggagtatcgaacgggtagcctaccgccccgtgcgaacgtcaaaacgtctgattgcactgatttctgccatcgggatgtcgattttcctgcaaaactacgtcagcctgaatcagggctcgcgtgatgttgcgctgccgagtctggtgaccggccagtgggtgttgggcgaaagcaatggctttgcggccaccattagcaccatgcagttgaccatctggattgttacgttccttgccatgctggcgctgacgctatttattcgctattcccgtatgggacgcgcctgccgcgcctgtgctgaagacctgaaaatggcaagcctgctgggtatcagcaccgatcgcgttatctcactgacattcgtcattggtgcgcttatggctgctgttgcaggcgtgctgttgggacaattttacggcgtaatcaacccctatatcggcttcatggctgggatgaaagcctttacggctgccgttctgggcgggattggcagtattcctggcgcgatgatcggcgggctggtcttgggtgtagccgaagcgctgacgtccgcttacctgagcacggaatacaaagatgcggtgtcatttgcgctgctgattgtggtgctgctggtgatgccaaccggcattctgggtcgcccggaggttgagaaagtatga

SEQ ID NO: 61289 - protein, 308 aa, Erwinia carotovora subsp. atroseptica SCRI1043
MSEQFLYFLQQMFNGLTLGSTYALIAIGYTMVYGIIGMINFAHGEVYMIGSYVSFIVIAALMMMGIDAGWLLISVAFVAAVVISSAYGWSIERVAYRPVRTSKRLIALISAIGMSIFLQNYVSLNQGSRDVALPSLVTGQWVLGESNGFAATISTMQLTIWIVTFLAMLALTLFIRYSRMGRACRACAEDLKMASLLGISTDRVISLTFVIGALMAAVAGVLLGQFYGVINPYIGFMAGMKAFTAAVLGGIGSIPGAMIGGLVLGVAEALTSAYLSTEYKDAVSFALLIVVLLVMPTGILGRPEVEKV

SEQ ID NO: 61290 - DNA, 891 bp, Desulfotalea psychrophila LSv54
  CDS (1)..(891): transl_table=11
atgagtagccagttatttgtccagtatttacttgccggtattacctatggttccatgtatgccattgtcgccataggctttaatattatttataataccacagggattataaattttgctcagggggagtttgtcatgctgggggggatgctctccatctctctcttgcagtttatgcccctgcctttggccattggcctggcagtggtgctgaccatggctgtcggcggtctggtggagatactgtttatccgttggttaaaaaatcccggtgtactgcgcatgattgtgatcaccgttggcctctctattctcctgcgggaaatcgccctccatatttggggtgagggtgtttattcactgccctatttttatggtaatgagatcagcacggtggttattttgggggcacgggtatcaccacagattttatgggtcataggtgtctgtctccttcttgttgtcctgcttcatctttttttcaagacttcccccatggggcgggagatgcgtgcctgtgcggtcaataaaaaggctgccctactctgcgggatcaatgcccgtaatatggtcaccttctcctttatgctcagtgccggtattggtgccctggccggtgcggttatgtcacctattacctatactcagtatgattcgggcgccgcccttgccattaagggttttaccgtggctattcttggtggtctgggcaatctctttggtgccgtggcggcgggaatattgctcggggtgttggaggcattttcggtctctgttctacccctggcctttcaggatgccatcgccattagcctgctccttgttattctctgtgtgcgtccccatggtctctttggctcagcaacggccgccggtttaaaggatttttag

SEQ ID NO: 61291 - protein, 296 aa, Desulfotalea psychrophila LSv54
MSSQLFVQYLLAGITYGSMYAIVAIGFNIIYNTTGIINFAQGEFVMLGGMLSISLLQFMPLPLAIGLAVVLTMAVGGLVEILFIRWLKNPGVLRMIVITVGLSILLREIALHIWGEGVYSLPYFYGNEISTVVILGARVSPQILWVIGVCLLLVVLLHLFFKTSPMGREMRACAVNKKAALLCGINARNMVTFSFMLSAGIGALAGAVMSPITYTQYDSGAALAIKGFTVAILGGLGNLFGAVAAGILLGVLEAFSVSVLPLAFQDAIAISLLLVILCVRPHGLFGSATAAGLKDF

SEQ ID NO: 61292 - DNA, 897 bp, Desulfotalea psychrophila LSv54
  CDS (1)..(897): transl_table=11
atggatatttttctacaacaactcgtcaacggtttgaccattggttcaatgtttgccatgattgctcttggctatacaatggtctacggcgtcatgaagttgattaactttgctcacggtgatctggttgctgcctccgcctttgttggcctttttgtttttacagagctctttggcgaaaatggctctatcctgacggctgtagctgtttttgccgttaccgcagttattgttgccatttgcggtgtccttttggaaagggttgcctatcggcctcttagaacggcgcctcggctctcggctgttgtctccgcccttggggcatcgatggtcattcaaaacggaattatgcttctttggggtccacaaatgaagatatttccagatctcattcctcagatatattgggagttgggcggagttgtgatcagtcttatccaggtaattatcatggttctctctctctttttgatgatagccctctatctgtttattgagaaaactaagatgggtacggcaattcgggcaagtgccatagatcaggatgcagccagactcatgggaattaatgttaataacatcattgttacaatctttgttattggtagttcactgggtgccgttggcggtctgtttataggtatgtattacaagggaattacctttgatatgggctggcagtacggcttaaatgcctttgtggcagctattataggtggtattggcaatattccgggcgctatgcttggtggtatgctccttggtctcttcaatgcatttatagcaggttatgtttcaagtacctgggccgatgcatttacctttaccctcctgattgtgattctgattgtacgaccaaccggaatattgggagaaagagtggcggaaaaagtatga

SEQ ID NO: 61293 - protein, 298 aa, Desulfotalea psychrophila LSv54
MDIFLQQLVNGLTIGSMFAMIALGYTMVYGVMKLINFAHGDLVAASAFVGLFVFTELFGENGSILTAVAVFAVTAVIVAICGVLLERVAYRPLRTAPRLSAVVSALGASMVIQNGIMLLWGPQMKIFPDLIPQIYWELGGVVISLIQVIIMVLSLFLMIALYLFIEKTKMGTAIRASAIDQDAARLMGINVNNIIVTIFVIGSSLGAVGGLFIGMYYKGITFDMGWQYGLNAFVAAIIGGIGNIPGAMLGGMLLGLFNAFIAGYVSSTWADAFTFTLLIVILIVRPTGILGERVAEKV

SEQ ID NO: 61294 - DNA, 888 bp, Symbiobacterium thermophilum IAM 14863
  CDS (1)..(888): transl_table=11
atgggccagtttgcagaacaggtggtcaatggcctccaactcggattcgtctacgccctgatcgcggtgggttataccatggtctacggcatcatcaagctgatcaacttcgcccacggggacgtcatcatggtgggcgcctttgtcaccttcttcgggctggtccggggcatcccctggcccgccgccatcctgaccggcatggccacgtgcgcgctgctgggcgtggtgatcgagcggctggcctaccggcctctgcgggtcaagggggcgccgcgcatcgccgccctcatcaccgcgatcggcgtgtcgctcttcctcgagaacttcgccagcctgcgcattgccttcgggccggaccaccgccagtttccggcgatggtcacccgcctgcagtggaacgtcttcggggtgaccatcagcagcgtgcaggtgctgatcgccggggtgaccatcgtcctggtgctcatcctgcagctggtggtctaccgcacgaagatcggcaaggcgatgcgggcggtggcgctggacttggacgccgcccggctgatgggcatcaacgtcgaccgggtgatcgccttcaccttcgccatcggttcggcgctggcggcagccgccggcgccctctgggcggcggcgtatccgcagatctggccctacatgggcatcccgcccggcctgaaggccttcaccgccgccgtgctcgggggcatcgggtcgatccccggggcgctgctgggggcggtgctgatgggccaggccgaggtgctgaccgcggcctacatcaccaccgacttccgggacgcggtggcctttgccctgctgatcctggtgctgctggtccgcccggcgggccttctgggcaaggccgggccggagaaggtgtag

SEQ ID NO: 61295 - protein, 295 aa, Symbiobacterium thermophilum IAM 14863
MGQFAEQVVNGLQLGFVYALIAVGYTMVYGIIKLINFAHGDVIMVGAFVTFFGLVRGIPWPAAILTGMATCALLGVVIERLAYRPLRVKGAPRIAALITAIGVSLFLENFASLRIAFGPDHRQFPAMVTRLQWNVFGVTISSVQVLIAGVTIVLVLILQLVVYRTKIGKAMRAVALDLDAARLMGINVDRVIAFTFAIGSALAAAAGALWAAAYPQIWPYMGIPPGLKAFTAAVLGGIGSIPGALLGAVLMGQAEVLTAAYITTDFRDAVAFALLILVLLVRPAGLLGKAGPEKV

SEQ ID NO: 61296 - DNA, 891 bp, Symbiobacterium thermophilum IAM 14863
  CDS (1)..(891): transl_table=11
atggaacacctgttggaacagacgctgaacgggctgcagctgggctttgtctacgccctcatcgccgtcggctacacgatggtctacggcatcatcaagctcatcaacttcgctcacggcgacgtcttcatggtcggcgcgttcctggcctacttcgggttcacgtcctggggactgccctggccggtcgcggtgctggtttccatggccggctgtgccgtgctcggcgtgggcatcgagcggctggcctaccggcccctccgtgcacggggcgcgccccgcatcgcggccctgatcacggccatcggcgtttcgctgttcatcgagtacttcaccagcctcaacttcgtcttcggctcggactaccggaacgttccccgggtactgcccgaccgccgctgggagctgggcgggatcacggtcaccaacgtgcagctcctggtgctggtcaccgtgctggtgctggtggcctccctgcagttcgtggtctaccgcacccgggtgggcaaggccatgcgggccgttgcccaggacacggacgctgcccggctgatgggcatcgacgtggaccggatcatcgcctgcaccttcgcgctgggctcggcgctggcggcagcagccggggccctgttcgccgtggcctatccgcagatccacccgttcatggggatcatgcccggcctcaaggcgttcaccgcggccgtgctcggcggcatcggctcgatccccggcgcgctgctcggggcgctcgtcatggggcaggtggaggtgctgacggcggcctacgtcaccaccgacttccgggacgccatcgccttcgcgctgctgattctggtcttgctgctccgtcccaccggtctgctgggcaagaccgccccggaaaaggtgtag

SEQ ID NO: 61297 - protein, 296 aa, Symbiobacterium thermophilum IAM 14863
MEHLLEQTLNGLQLGFVYALIAVGYTMVYGIIKLINFAHGDVFMVGAFLAYFGFTSWGLPWPVAVLVSMAGCAVLGVGIERLAYRPLRARGAPRIAALITAIGVSLFIEYFTSLNFVFGSDYRNVPRVLPDRRWELGGITVTNVQLLVLVTVLVLVASLQFVVYRTRVGKAMRAVAQDTDAARLMGIDVDRIIACTFALGSALAAAAGALFAVAYPQIHPFMGIMPGLKAFTAAVLGGIGSIPGALLGALVMGQVEVLTAAYVTTDFRDAIAFALLILVLLLRPTGLLGKTAPEKV

SEQ ID NO: 61298 - DNA, 861 bp, Symbiobacterium thermophilum IAM 14863
  CDS (1)..(861): transl_table=11
atgggtctgatcgcgtggctcacgctccaggggctgaccgtcgggatgctctggttcctgatcgcctcggggctcagcctcatcttcggcctcatgaacgtcctcaacttcgcccacggcgggctctacatgctgggcacctacggggccctcaccctctaccgggccaccggcagcttccccctggccctggtgggcggcgcgctcctgggagcgctgctcggggccgccatcgagctgctggcaatccgcccgctctacggccggcagctcttccaggtgctcatgaccctgggcgtgatgctcatcttcgacgaggcggtggaggcgatctgggggccccacccgctgcccttccagacgccggccctgctctcgggcacgctgcaggtctttgaccggccgttccccgtctaccggctgttcatcatcgccgtgggtctgcttgtctacctcgcggtccacctgttcctcacccgcacccggcttggcgtcatcgtccgggcgggggtggagaaccgggagatggtccagaccctgggcgtggacatccggaaggtcttcaccggagtcttcgccctgggcggtacgctggcggccctgggcggcgccgtggccggtcctttcgagggggcgcatccgacgctggcggcggagaacctgctgcccgccttcatcgtggtggtcgtgggcgggctgggcagcttcaccggctcgctgctggcggcgatcctcgtcgggctgctgcaggccttcgtggggttctacgcgccccagctcgcgctggcggtcaacatcgccctgatggccgtggtgctggtgctccggccccagggcctgctgggcgagcagagggggtga

SEQ ID NO: 61299 - protein, 286 aa, Symbiobacterium thermophilum IAM 14863
MGLIAWLTLQGLTVGMLWFLIASGLSLIFGLMNVLNFAHGGLYMLGTYGALTLYRATGSFPLALVGGALLGALLGAAIELLAIRPLYGRQLFQVLMTLGVMLIFDEAVEAIWGPHPLPFQTPALLSGTLQVFDRPFPVYRLFIIAVGLLVYLAVHLFLTRTRLGVIVRAGVENREMVQTLGVDIRKVFTGVFALGGTLAALGGAVAGPFEGAHPTLAAENLLPAFIVVVVGGLGSFTGSLLAAILVGLLQAFVGFYAPQLALAVNIALMAVVLVLRPQGLLGEQRG

SEQ ID NO: 61300 - DNA, 936 bp, Burkholderia mallei ATCC 23344
  CDS (1)..(936): transl_table=11
gtgcagtcggtcgtcctcgatctgctcaacggcctgagctacggcctgttgctgttcatgctgtgcgcggggctcacgctgatcttcggcatgctcggcgtgctcaatttcgcgcacgcgagcttctacatgctcggcgcgtacgcgggctacgcgatcgccgcgcgcacgagcttctgggtcgcgctcgtcgccgcgccgctcgccgtcggcgcgctcggcgcgctgtgcgagcgcacgctgctcaggcgggtgagggcgagcggccatctcgacgaattgctgctcacgttcgggctcgcgtatctgatcgccgagggcgtgaagctcgtctgggggctcgcgccgctcgccgcgccggtgcccgccgcgctcgacggcgcggcgttcaccgtctacggcgcggtgttttcgcgttatcgcgcgttcatgatgctcgtgtcgatcgcgatgctcggcgcgctgtgggcggtgctgcgcgcctcgcggacggggctcgtcgtgcgcgcggcgctcacgcggcgcgcggccgtcgaggcgctcggccacgacgtgccgcgcgtgatgacgctcgtgttcgccgcgggcaccgcgctcgccgcgctcgccggcgtgatcggcgcgccgctcgcggtgatcgagcccgcgatggcgcagacgctcggctcggtcgtgttcgcggtcatcgtgatcggcgggctcggctcgctcgcgggcgcgctcgtcgcgtcgctcgtgctcggctgcgcgcagacgttcgccgcggcgagccgcgcgtcgctgagcgacgcggcgcagttggcgggcatcgcgctgcctgacgcgtggcgcgcgttgacgctcgcgcagttcgcgccgttgattccgtatctgctgctgatcgtggtgctcgcgtgccgcgcgcgcggcctgttcggcgagcgcgccgatgtctag

SEQ ID NO: 61301 - protein, 311 aa, Burkholderia mallei ATCC 23344
MQSVVLDLLNGLSYGLLLFMLCAGLTLIFGMLGVLNFAHASFYMLGAYAGYAIAARTSFWVALVAAPLAVGALGALCERTLLRRVRASGHLDELLLTFGLAYLIAEGVKLVWGLAPLAAPVPAALDGAAFTVYGAVFSRYRAFMMLVSIAMLGALWAVLRASRTGLVVRAALTRRAAVEALGHDVPRVMTLVFAAGTALAALAGVIGAPLAVIEPAMAQTLGSVVFAVIVIGGLGSLAGALVASLVLGCAQTFAAASRASLSDAAQLAGIALPDAWRALTLAQFAPLIPYLLLIVVLACRARGLFGERADV

SEQ ID NO: 61302 - DNA, 936 bp, Burkholderia pseudomallei K96243
  CDS (1)..(936): transl_table=11
gtgcagtcggtcgtcctcgatctgctcaacggcctgagctacggcctgttgctgttcatgctgtgcgcggggctcacgctgatcttcggcatgctcggcgtgctcaatttcgcgcacgcgagcttctacatgctcggcgcgtacgcgggctacgcgatcgccgcgcgcacgagcttctgggtcgcgctcgtcgccgcgccgctcgccgtcggcgcgctcggcgcgctgtgcgagcgcacgctgctcaggcgggtgagggcgagcggccatctcgacgaattgctgctcacgttcgggctcgcgtatctgatcgccgagggcgtgaagctcgtctgggggctcgcgccgctcgccgcgccggtgcccgccgcgctcgacggcgcggcgttcaccgtctacggcgcggtgttttcgcgttatcgcgcgttcatgatgctcgtgtcgatcgcgatgctcggcgcgctgtgggcggtgctgcgcgcctcgaggacggggctcgtcgtgcgcgcggcgctcacgcggcgcgcggccgtcgaggcgctcggccacgacgtgccgcgcgtgatgacgctcgtgttcgccgcgggcaccgcgctcgccgcgctcgccggcgtgatcggcgcgccgctcgcggtgatcgagcccgcgatggcgcagacgctcggctcggtcgtgttcgcggtcatcgtgatcggcgggctcggctcgctcgcgggcgcgctcgtcgcgtcgctcgtgctcggctgcgcgcagacgttcgccgcggcgagccgcgcgtcgctgagcgacgcggcgcagtgggcgggcatcgcgctgcctgacgcgtggcgcgcgttgacgctcgcgcagttcgcgccgttgattccgtatctgctgctgatcgtggtgctcgcgtgccgcgcgcgcggcctgttcggcgagcgcgccgatgtctag

SEQ ID NO: 61303 - protein, 311 aa, Burkholderia pseudomallei K96243
MQSVVLDLLNGLSYGLLLFMLCAGLTLIFGMLGVLNFAHASFYMLGAYAGYAIAARTSFWVALVAAPLAVGALGALCERTLLRRVRASGHLDELLLTFGLAYLIAEGVKLVWGLAPLAAPVPAALDGAAFTVYGAVFSRYRAFMMLVSIAMLGALWAVLRASRTGLVVRAALTRRAAVEALGHDVPRVMTLVFAAGTALAALAGVIGAPLAVIEPAMAQTLGSVVFAVIVIGGLGSLAGALVASLVLGCAQTFAAASRASLSDAAQWAGIALPDAWRALTLAQFAPLIPYLLLIVVLACRARGLFGERADV

SEQ ID NO: 61304 - DNA, 879 bp, Azoarcus sp. EbN1
  CDS (1)..(879): transl_table=11
atgtccggtctagcgctcgtccaggtactcagcagcggcatcgcgaccggctgcatctacggactcgtcgcgctgtccttcgtgctgatctacaaagcgaccgggacggtcagtttcatgcagggcgagctgctgatggcgggtgcgttcgcagtgcttgcgctgcacctggcggcaggctggccgctcgcgtgggcggcggcaggcggcatcgccgggatggcggcgttcggcgccgtgctcgagcgcacgctgctgcgccgggcgctcggccaggcgcacctgactgcgctgctgctgactttcggtctcggcatgatgctgcgcggcgccatcggctcggtgccggcggcgacgcattcgatgcatcgcctggcgctgccgttcgccggcgagagctggcgcttcggcggcctggcgattgccgccgagcacatcgtcgtgatcggcgcgacggccgtgctcgcgctggcgctgacgctgttttttcgtcgcacgcgcgccggcatcgcgctgcgcgcctgttccgaaaaccccggagcggccgcgctgatgggagtatcggtggccggcatgcatacgctcgcgtgggcgctcggcgccggcctcgcagcggcggccgggctgctgctcgcgccggtcacgttcgtgcatccgaacatggggctcgtcgcgctgaaggcgtttcccgccgccgtgctcggcggcatgacgagccttccaggcgcgctggccggcggagtgttcatcggcgtcgtcgaagcgctcgccgggttcgcgttgcccgaaggggtgaaggacgtcgtgccgtacgtgctgctgatgctcgcgctgctgctgtttccgcacggccttgccggcggcttgcggcggcgatga

SEQ ID NO: 61305 - protein, 292 aa, Azoarcus sp. EbN1
MSGLALVQVLSSGIATGCIYGLVALSFVLIYKATGTVSFMQGELLMAGAFAVLALHLAAGWPLAWAAAGGIAGMAAFGAVLERTLLRRALGQAHLTALLLTFGLGMMLRGAIGSVPAATHSMHRLALPFAGESWRFGGLAIAAEHIVVIGATAVLALALTLFFRRTRAGIALRACSENPGAAALMGVSVAGMHTLAWALGAGLAAAAGLLLAPVTFVHPNMGLVALKAFPAAVLGGMTSLPGALAGGVFIGVVEALAGFALPEGVKDVVPYVLLMLALLLFPHGLAGGLRRR

SEQ ID NO: 61306 - DNA, 933 bp, Azoarcus sp. EbN1
  CDS (1)..(933): transl_table=11
atggaaatcttcctgcagcagctcgtcaacggcctggtcgtcggcagcgtctatgcgctcgtcgcgctcggctacacgatggtctacggcatcctcggcctgatcaacttcgcccacggcgacctcgtcatggtcggcgcgatgaccgcgctgcagacgatgctgttcctgatgggcgcagcgcccgggatgtcgccgctcgcgatgctgacgctgtcgctcgccgtcgcgattcccgtatgcatgctcctcggctacacgatggagcgcctcgcgtaccggcggctgaggaacgccccgcggctggcgccgttgatcaccgcgatcggcatgtcgttcctgctgcagacgatcgcgatgatgctgtggggacgcaattaccacactttcccgcagctcgtctcgaccgtgccgctgcagccggtcgcgggcgtgttcgtcacaccgatccaggtgacgatcgtcgtcggctcggcgctcatcatggccgcgctgatcgtgctcgtgacgaagacccggcttggccgggcgatgcgcgcgacggccgagaaccaccgcgtcgcggcgctgatgggcgtggacacgaacctcatcatcgcgctgactttcgtcatcggcgcggcactcgccgcagtcgcgggcgtgatgtacgcgagcaactacggcatcgcgcactacggcatgggtttcatgccggggctgaaggccttcaccgccgcggtgctcggcggcatcggcaacctcggcggcgcgatgctcggcggcatcgtgctcggcctcgtcgaatccttcggcgccggctacatcgagcacatgacgttcggcctgctgaattcgtcctaccaggacatcttcgcgttcatcatcctcggcctcgtgctcatcttccggcccaccggcctgctcggtgaacgcgtgtccgaccgcgcctga

SEQ ID NO: 61307 - protein, 310 aa, Azoarcus sp. EbN1
MEIFLQQLVNGLVVGSVYALVALGYTMVYGILGLINFAHGDLVMVGAMTALQTMLFLMGAAPGMSPLAMLTLSLAVAIPVCMLLGYTMERLAYRRLRNAPRLAPLITAIGMSFLLQTIAMMLWGRNYHTFPQLVSTVPLQPVAGVFVTPIQVTIVVGSALIMAALIVLVTKTRLGRAMRATAENHRVAALMGVDTNLIIALTFVIGAALAAVAGVMYASNYGIAHYGMGFMPGLKAFTAAVLGGIGNLGGAMLGGIVLGLVESFGAGYIEHMTFGLLNSSYQDIFAFIILGLVLIFRPTGLLGERVSDRA

SEQ ID NO: 61308 - DNA, 870 bp, Silicibacter pomeroyi DSS-3
  CDS (1)..(870): transl_table=11
atgagcatcgtcatcgacattctgatcaacgggctgtttctgggcgggctttacgcgctcttcggtcttggactgacactgatcttcggtgtcatgcgcatcgccaacatcgcccatggcgagatcgccgttgccggagcgctggcgctctttacccttggcggcaacctgccggtgcatccacttgttcttttgccggtcgtcatggtgctggctttcgggctggggtggctgctgcaagcgcagctcatcaaccgggtgctcagcgctgatccgatgccggcgctgcttttgacctttggtctttccgtggtgctgcagaatctgatggtcgaaatctacggcgccgacaaccgcagcatcgacatcggcaccatcaaaaccgccgggttccagatcggcggcgtgacgctgggctatctgccgcttgcgatatttctgctggcgctggtgctttttggcctgctgcaccttggcctgcaacacacacgcctgggtcgggcgatccgcgccacctctcaggatgccgacatcgtggcgctgttcggaatccggcagaaacgggtctttgcgctggtgatggcgctggcggcgggttttgccgcgctggccgggatgctgctggcgatgcgctcaaccatcacgcccttttccggcgccgagcggttgctgatcgccttcgaggtgatcgtgatcggcgggctaggttcgatctgggccagctacctgggcggcatcgcgctggctctggtgcatgtggccagcttctatttcgaccccgcgtcggggcttctttacgggcatctgacgctgctgctgttcctgctgctcaggccgcagggtatcgccggaaaggtggtgacacgatga

SEQ ID NO: 61309 - protein, 289 aa, Silicibacter pomeroyi DSS-3
MSIVIDILINGLFLGGLYALFGLGLTLIFGVMRIANIAHGEIAVAGALALFTLGGNLPVHPLVLLPVVMVLAFGLGWLLQAQLINRVLSADPMPALLLTFGLSVVLQNLMVEIYGADNRSIDIGTIKTAGFQIGGVTLGYLPLAIFLLALVLFGLLHLGLQHTRLGRAIRATSQDADIVALFGIRQKRVFALVMALAAGFAALAGMLLAMRSTITPFSGAERLLIAFEVIVIGGLGSIWASYLGGIALALVHVASFYFDPASGLLYGHLTLLLFLLLRPQGIAGKVVTR

SEQ ID NO: 61310 - DNA, 897 bp, Silicibacter pomeroyi DSS-3
  CDS (1)..(897): transl_table=11
atggattatgttgcgcaacaggcgatgaacgccctctctttcggtgccgaatacgcgctgctggcactggggctggccattgtgttctcgatcatggggttggtgaatttcgcccatggcgaaatcatcgcggtgggcggctataccatggtggccatggccgcgctggcgctgagcaatccgctgatcgtgatcggggcggcggtactggcggcggtagccgggtccatgctgctggaacgggtggcgttccgcccggtccgctatgccgacccgaccacggggctgctcacggcctttggtgtctcgatcgtgttgcagaacctgttcctgctgctggtctcgccccgaccgatcgcggtgacctctctctatttcctcgactggcccgtcgatctgggcgcgatccgggtctcctcgctgcaactgttcgaggcgctgaccacggcggtggtgatcgtggcgctgatgctgttcctgcgccgcaccgtgctgggactggcgatgcgggcggcgtcgctggatttcgagatggtgcggctgagcggtatccgcgccaaccgggtctttgccatggcgtttgccatctcgggcctgctggcggggatcgcctgcgtcttcatcatggcgcgccgcggttcggtcgatccgcatctggggttcgatccggtgctcaaggcctttgtcgcctgtgtggtgggcggctttggcagcctgcctggcgcggtgctgggcggcttcctgttgggggctgtcgaggtggcgatgctggtgatgctgccgcaatcgctgggggggatgaccgacgcattcgtgttcggcatcatcgcgatggtgctgatctggcggcctgacggcatcctgtcgccaccggtcgagaagggggacaagatatga

SEQ ID NO: 61311 - protein, 298 aa, Silicibacter pomeroyi DSS-3
MDYVAQQAMNALSFGAEYALLALGLAIVFSIMGLVNFAHGEIIAVGGYTMVAMAALALSNPLIVIGAAVLAAVAGSMLLERVAFRPVRYADPTTGLLTAFGVSIVLQNLFLLLVSPRPIAVTSLYFLDWPVDLGAIRVSSLQLFEALTTAVVIVALMLFLRRTVLGLAMRAASLDFEMVRLSGIRANRVFAMAFAISGLLAGIACVFIMARRGSVDPHLGFDPVLKAFVACVVGGFGSLPGAVLGGFLLGAVEVAMLVMLPQSLGGMTDAFVFGIIAMVLIWRPDGILSPPVEKGDKI

SEQ ID NO: 61312 - DNA, 879 bp, Silicibacter pomeroyi DSS-3
  CDS (1)..(879): transl_table=11
atggatgtgctcatccagattttctttacaggcgtgaccctgggcgcgatgtatgcgctggcctcggtcgggctgtcgctgatctttggcacgttgggcatgttcaacatggcccatgggctgttcatgacgctgggcgcttatgttgcctattcggcggcgaatgcatttcaactgcccttggttctgggatttgttgccgcgatggccgcaggtgcggtgatcggtgtgctgacgcatcttctgatcgtgcgcttcatgctgggctcgccggatttcggaatgaacgtcatggtcgcaacagcagggcttgggatcgtgctgcaggacatagttctcaagatctacggcgggtatccctatccgcaggtcgtgcgtgtcgagggcattgcccagcttggcggcgtgagcatcacgcttcaggcgctgaccaatgttgcggtggctttggcgttgatcctggggacggcctggctgctcatgaaaacccgctttggccgggcaattcgggcgacggcgatgaaccgcgaagccgcgatgctgatgggggtcaaggccgatacggtgtttttgcaggtcatggcactggcggggatgctggccggggtcgcggggctgatgatttcgacacaggcgacgctttcgccgcaaatggggggtgaccctctcttgaaggccttcgtgatctgcgtggtcgccgggctgggcaatgtctggggcgcgggtgtctgcgcctttggcctcgcgctgctggaggccgcgatcgggtattacttcggtgtgcggttcggatttccgaccatgctgatgctggtcatcctcctcttgatctggcggccacagggcctctttggccgggaaagggtggtgcgcctatga

SEQ ID NO: 61313 - protein, 292 aa, Silicibacter pomeroyi DSS-3
MDVLIQIFFTGVTLGAMYALASVGLSLIFGTLGMFNMAHGLFMTLGAYVAYSAANAFQLPLVLGFVAAMAAGAVIGVLTHLLIVRFMLGSPDFGMNVMVATAGLGIVLQDIVLKIYGGYPYPQVVRVEGIAQLGGVSITLQALTNVAVALALILGTAWLLMKTRFGRAIRATAMNREAAMLMGVKADTVFLQVMALAGMLAGVAGLMISTQATLSPQMGGDPLLKAFVICVVAGLGNVWGAGVCAFGLALLEAAIGYYFGVRFGFPTMLMLVILLLIWRPQGLFGRERVVRL

SEQ ID NO: 61314 - DNA, 954 bp, Synechococcus elongatus PCC 6301
  CDS (1)..(954): transl_table=11
atgacgagccaatccattgctgcctgcctctgtctgcgccttgatgataaaacttggaggacgttgcatcgagcgcttgggatggcaagcccagacctctcacaactggctcaattggccatcaatggactggcgaccggcagcctcctggccctagccgcaacgggtctgaccttgatctacggcatcctgcgactgaccaattttgcccaaggcgagtttttgaccctcggcgcttacttcacgttggttgccaacagccttgggctcagtctctggctggccattcctctcggggcgatcgcgacgatcgcactttgcttgctgggcgaagcagttttgtgggaaccgctgcggcggcaacgggtgaacaccaccactctgatcatcctgactattggcctgtcgctgttcctgcgcaatctggtgattttgatttggggcgcgggcaatcaggcctaccggctggcagtccaaccggccttaaccctctggggactcaggatcacgctcaatagcctcctcgtggtgattggggcagctgccgctttggttctgttgcactgggttttgcagcgcaccagcatcggcaagggcatgcgagcgatcgctgatgaccccgacctggcacgggtcagtggcgtaccagtcgaaaccgtgatccgctggacttgggtgattgcgggcggtctgacagcgatcgcagggggcctctacggattgatcactgctgtccgtcccactatgggctggaatttgatcctgccgctgtttgccagcgccatcctcggagggattggtagcccttacggtgcgatcgcaggagggctgattctgggatttgcccaagaactcagcacttactggctgccagcggaatacaagcttgccgttgcctttgtcatcttgattggcgtgctggtgatccggccccaaggcctatttgctcgctag

SEQ ID NO: 61315 - protein, 317 aa, Synechococcus elongatus PCC 6301
MTSQSIAACLCLRLDDKTWRTLHRALGMASPDLSQLAQLAINGLATGSLLALAATGLTLIYGILRLTNFAQGEFLTLGAYFTLVANSLGLSLWLAIPLGAIATIALCLLGEAVLWEPLRRQRVNTTTLIILTIGLSLFLRNLVILIWGAGNQAYRLAVQPALTLWGLRITLNSLLVVIGAAAALVLLHWVLQRTSIGKGMRAIADDPDLARVSGVPVETVIRWTWVIAGGLTAIAGGLYGLITAVRPTMGWNLILPLFASAILGGIGSPYGAIAGGLILGFAQELSTYWLPAEYKLAVAFVILIGVLVIRPQGLFAR

SEQ ID NO: 61316 - DNA, 903 bp, Pseudomonas syringae pv. syringae B728a
  CDS (1)..(903): transl_table=11
atgactctcgatacgctggtaatgcaagtcttcagcgggttctcgctgttttccgtgctggtgctgatggcactcgggctgaccatcgtgttcggcctgatgggcgtgatcaacatggcgcacggcgaactgatggcgatgggctcatacatgacctacgtcacctccgtggtgtttcagcgctactttcccgagctcatggactggtatttcatcatcggcatcgggatggcctttgtggtgacctttgccttcggtctactgctggaacgctgcttcatccgcttcatgtacaaccggccgctcgacaccctgctggcgacctgggggctgtctctggtcctgcagcagctgttccgccaggtcttcggccccaaggaagtcagcgtgcccaccgtgcagtggttgcagggcgcatggaaaatcagcgacgggctggagctgcccctcaaccggattttcatcatcggtctgaccttcgtgatagccgctgcggtgttcctgtttctctaccgcagccgctggggcctgcgcattcgcgccgtgacccagaaccgcgccatggccggtgcagccgggatcaacactgcgcgggtcgactcggtgaccttcgcgctgggctgtggccttgcgggcattgccggcagttcgttcaccatgcttgcgtccaccggcccggtcagcggtcagcagtacctggtggacaccttcatcgtcgtcgtgttcggcggcgtggaaagcctgctgggcaccttcctttcggcgttcgccattggccagacccaggtttcgctggaatacctgaccaccggttccatggccaaggcgatcaccctgctggtggtcatcgtgctgctgttcttccgccccaacggcctgttcgccacgaaagtgagacgttga

SEQ ID NO: 61317 - protein, 300 aa, Pseudomonas syringae pv. syringae B728a
MTLDTLVMQVFSGFSLFSVLVLMALGLTIVFGLMGVINMAHGELMAMGSYMTYVTSVVFQRYFPELMDWYFIIGIGMAFVVTFAFGLLLERCFIRFMYNRPLDTLLATWGLSLVLQQLFRQVFGPKEVSVPTVQWLQGAWKISDGLELPLNRIFIIGLTFVIAAAVFLFLYRSRWGLRIRAVTQNRAMAGAAGINTARVDSVTFALGCGLAGIAGSSFTMLASTGPVSGQQYLVDTFIVVVFGGVESLLGTFLSAFAIGQTQVSLEYLTTGSMAKAITLLVVIVLLFFRPNGLFATKVRR

SEQ ID NO: 61318 - DNA, 924 bp, Pseudomonas syringae pv. syringae B728a
  CDS (1)..(924): transl_table=11
atgcccgagttattccactacatgcagcagctggtcaatggcctgaccattggcagtacgtatgcattgatcgccatcggttacacgatggtgtacggcatcatcggaatgatcaacttcgcccatggcgaggtgtacatgatcggttcctatgtcgctttcatggcactcgccggtctggcgatgctgggtattcacagcctgccgctgctgatgattgccggttttgccgctgcgatcatcgtgaccagtgcctacggatacagcatcgagcgtgtggcctaccgtccgttgcgcaacagcaaccgtctgatccccctgatttctgccatcggcatgtcgatctttctgcagaactcggtccagctttcccagggctccggcaacttcgccatccccaacctgctgcccggcagcctctcgttcgggcctggtggcgccgaggaagtgctgatttcctacatgcagatcgtggtgttcgtcgtcaccctgctggccatgaccggcctgaccctgttcatctcccgctcgcgaatgggccgcgcctgccgcgcctgcgccgaggacatgaagatggccaatctgctgggcatcaacaccaacaacatcatcgccctgaccttcgtggtcggtgctgcactggccgccgtcgccgccatgctgctaagcatgcaatacggcgtgatcaaccccaacgccggcttcctcgtcggcctgaaagccttcacggctgcagtactgggcggtatcggttcgatcccgggtgccgtgctcggtggtctggtgctgggcgtcgccgaagccttcggtgccgacatttttggtgatcagtacaaggacgtcgtggctttcggcctgctggtcctggtgctgctgttccgaccgaccggcattctgggtcgtccggaggttgagaaagtatga

SEQ ID NO: 61319 - protein, 307 aa, Pseudomonas syringae pv. syringae B728a
MPELFHYMQQLVNGLTIGSTYALIAIGYTMVYGIIGMINFAHGEVYMIGSYVAFMALAGLAMLGIHSLPLLMIAGFAAAIIVTSAYGYSIERVAYRPLRNSNRLIPLISAIGMSIFLQNSVQLSQGSGNFAIPNLLPGSLSFGPGGAEEVLISYMQIVVFVVTLLAMTGLTLFISRSRMGRACRACAEDMKMANLLGINTNNIIALTFVVGAALAAVAAMLLSMQYGVINPNAGFLVGLKAFTAAVLGGIGSIPGAVLGGLVLGVAEAFGADIFGDQYKDVVAFGLLVLVLLFRPTGILGRPEVEKV

SEQ ID NO: 61320 - DNA, 924 bp, Pseudomonas fluorescens Pf-5
  CDS (1)..(924): transl_table=11
atgcctgacatctatcactttttccaacagctggttaacggtctcaccgttggcagcacgtatgccctgatcgccatcggctatacgatggtttacggcatcattggaatgatcaacttcgcccacggcgaggtgtacatgatcggttcctacgtggcgttcatcgccattgccgggctggccatgatgggactcgacagcgtcccgctcttgatgaccgcagccttcatcgcgagcatcgtcgtcaccagtgcctacggctacagcatcgaacggatcgcctaccgccccttgcggggtagtaaccgcctgatcccgctgatctccgccatcggcatgtcgatcttcctgcagaacaccgttctgctggcgcaggactccaaggacaaatccattcccaacctgatcccgggcaacttctccatcgggccaggcggcgcacatgaagtgctgatttcctacatgcagatcgtggtattcgtggtgaccctcatcgccatgctcggcctgacgctgttcatctcccgttctcgcctgggtcgcgcctgccgcgcctgtgccgaggacatcaagatggccaacctcctggggatcaataccaacaacatcatcgccctgaccttcgtgatcggcgccgcgctggcggccatcgccgccgtgctgctgagcatgcaatacggtgtgatcaaccccaacgccggtttcctggtgggcctgaaggccttcaccgcagcggtcttgggcggcatcggcagtatcccgggcgcgatgctcggcgggctggtgctgggggtggccgaagcctttggtgccgacgtgttcggcgaccagtacaaggacgtcgtggcgttcggcctgttggttctggtgctgttgttccgtccgaccggcattctgggccgtccggaggttgagaaagtatga

SEQ ID NO: 61321 - protein, 307 aa, Pseudomonas fluorescens Pf-5
MPDIYHFFQQLVNGLTVGSTYALIAIGYTMVYGIIGMINFAHGEVYMIGSYVAFIAIAGLAMMGLDSVPLLMTAAFIASIVVTSAYGYSIERIAYRPLRGSNRLIPLISAIGMSIFLQNTVLLAQDSKDKSIPNLIPGNFSIGPGGAHEVLISYMQIVVFVVTLIAMLGLTLFISRSRLGRACRACAEDIKMANLLGINTNNIIALTFVIGAALAAIAAVLLSMQYGVINPNAGFLVGLKAFTAAVLGGIGSIPGAMLGGLVLGVAEAFGADVFGDQYKDVVAFGLLVLVLLFRPTGILGRPEVEKV

SEQ ID NO: 61322 - DNA, 894 bp, Colwellia psychrerythraea 34H
  CDS (1)..(894): transl_table=11
atgaattttgaactcttaactcaattagtcatcaatggccttattgttggcttgttgtacggtgtaattggtatgtgttttgtgttggtttataaatcaacccaaattgttaacttcgcccaaggtgagtttttacttatcggtgcctgggtatgttgggcgtcattgatttacttagagttaccattctttttaggttttatattatcacttgtatttatggccggctttggtgtgctgttacaaatggtcgtactacgtcctatgattggtgagccgatcatctcggtgatcatggtcactatcggtctgtctattttcttccaatcgttaatgaaatggatatttggagtctccccacaaagttacccgcaagtatttgatacgcaaagtattaacatcttgggattaaatgtggaaatggcgtacttaatgagcacggtaatcgcgttaattatcatggtcgcgttctatttattctttaaacactctaagcatggcttagcaatgagagcgactgcttttgatcaacaagcctcgcaaagtctaggtgtgtctgtaaagcatgtttttgcgatgagttggggtattgcagcaaccgtttctgctacggcagggatagtgctaggtatggttaatggtgtttcagattcactttctattatgggtatcaaagtattcccagccgttattttaggcgggttagactcaattattggcgccattgttggtggtctcattatcggtgtactagaaaacgtcgctgagttttttgatagtcaatatttacacattggtaatatgtacgatatcgcaccattttatgtgttgttaattattctttggttcaaaccttacggtttatttggcaccaaagacattgaacgtatatag

SEQ ID NO: 61323 - protein, 297 aa, Colwellia psychrerythraea 34H
MNFELLTQLVINGLIVGLLYGVIGMCFVLVYKSTQIVNFAQGEFLLIGAWVCWASLIYLELPFFLGFILSLVFMAGFGVLLQMVVLRPMIGEPIISVIMVTIGLSIFFQSLMKWIFGVSPQSYPQVFDTQSINILGLNVEMAYLMSTVIALIIMVAFYLFFKHSKHGLAMRATAFDQQASQSLGVSVKHVFAMSWGIAATVSATAGIVLGMVNGVSDSLSIMGIKVFPAVILGGLDSIIGAIVGGLIIGVLENVAEFFDSQYLHIGNMYDIAPFYVLLIILWFKPYGLFGTKDIERI

SEQ ID NO: 61324 - DNA, 960 bp, Dechloromonas aromatica RCB
  CDS (1)..(960): transl_table=11
gtgccgtttccttatgccttaaaagaaaaagacgaaatggatatttttctccagcagatcatcaatggcctagtacaaggcagcatctacgccctggtcgccttgggttacacgatggtctacggaatcatggggctgatcaacttcgcgcatggcgaggtggtgatgatcggcaccctggtgacgattaccgtggccggttcgctgatcaaggcgggcatgccggtggctttggccgggctggctggggttagtgcttcggtactggtctgcatggcgctgggctgggggctggagcgcattgcctatcgcccgctgcgcaacgcgccgcgcctgacgccgctgatcacggcgatcggtatgtccatcgtgctgcagaatctggccatgatgatctgggggcggaattacctgactttccccccgctgctgccgaagatggattttgaattcgccggcgccaatttcacggccattcaggtcatcatcgttctggtttccgcggcgaccatgggcgggttgctgctcctggtctatcgcaccaagctgggcatggcgatgcgcgccacggcgcagaatccagccgtcgccagtctgatgggcgtcaatatcaaccgcgtcatcgccgccgccttcgtgatcggttcggcgcttggtgcgctggctggcgtcatggtcggtggctactatgaaatcgcccactatcagatgggtttcatgctcggcctgaaagccttcaccgcggctgtgctgggcggtatcggcaatctcgggggggcaatgctgggcggcatcctgctcggtatcattgaggcgctgggcgccggctacatcggcgacctgaccggcggtttcctgggcagccattatcaggacatcttcgccttcatcgtgctgatcgtcgtgctgatgttcaagccgagcggtctatttggcgaaaagacaggggatcgcgcatga

SEQ ID NO: 61325 - protein, 319 aa, Dechloromonas aromatica RCB
MPFPYALKEKDEMDIFLQQIINGLVQGSIYALVALGYTMVYGIMGLINFAHGEVVMIGTLVTITVAGSLIKAGMPVALAGLAGVSASVLVCMALGWGLERIAYRPLRNAPRLTPLITAIGMSIVLQNLAMMIWGRNYLTFPPLLPKMDFEFAGANFTAIQVIIVLVSAATMGGLLLLVYRTKLGMAMRATAQNPAVASLMGVNINRVIAAAFVIGSALGALAGVMVGGYYEIAHYQMGFMLGLKAFTAAVLGGIGNLGGAMLGGILLGIIEALGAGYIGDLTGGFLGSHYQDIFAFIVLIVVLMFKPSGLFGEKTGDRA

SEQ ID NO: 61326 - DNA, 888 bp, Thermobifida fusca YX
  CDS (1)..(888): transl_table=11
gtggaaatcctgattaacgcggtcaccctcggatcgctgtacctgctgttcgcgctcggcatgagcgtggcgtggggaacgatcggcatcctcaacttcgcccacggcagcaccttcatgttctcggcgatggtcgcctactacacggtgcagatggtggccctgccgatgtgggccatgatcctgctcggggccgcagtgggcatggtgctgtccgtcctgacccaggcgctgatcttcaacttcatcctgcgccgcaaccccgacctgctcaaagcggagatgcagatcgtggtgggcggtatcggtgccgccagcgtcctgctggcgatcgcccagcactacacgaagagcgtgccgttcggtttctccgccagcacgttcaagaccaccacctaccagctcggcgccatacacatctccaatgtgcaactggtcatcctggtggcagccttcggcctggccggcctggctgcatggtggttgaagtccgcccgggccgggctggcgctgcgagcaatcggggtcaaccccgaggtcgccagcctcatgggggtggaccgtggccggatggcgttgggcaccatggccgcggccggcgcactagccggaaccgcgggcatcctgctcacctactacctgggctccattgccgcggaaaccggcgacagcttcctgatcagcgcgttcgccgcgatcatcctgggcggtatcggatcggtcatcggcgtggtcgtcgggtcgatgatcctggcgctcgccgagacgctcgtggtgacccagctgtcaggtacctgggccagcgcggtggctttcgggctcatcttcgtggtgctgctcttcctgccccgcggcatcttcggccgtaaggaggtacggcggacatga

SEQ ID NO: 61327 - protein, 295 aa, Thermobifida fusca YX
MEILINAVTLGSLYLLFALGMSVAWGTIGILNFAHGSTFMFSAMVAYYTVQMVALPMWAMILLGAAVGMVLSVLTQALIFNFILRRNPDLLKAEMQIVVGGIGAASVLLAIAQHYTKSVPFGFSASTFKTTTYQLGAIHISNVQLVILVAAFGLAGLAAWWLKSARAGLALRAIGVNPEVASLMGVDRGRMALGTMAAAGALAGTAGILLTYYLGSIAAETGDSFLISAFAAIILGGIGSVIGVVVGSMILALAETLVVTQLSGTWASAVAFGLIFVVLLFLPRGIFGRKEVRRT

SEQ ID NO: 61328 - DNA, 927 bp, Ralstonia eutropha JMP134
  CDS (1)..(927): transl_table=11
atgaacgaatttcttccacagttcacccagcagctggtcaatggcctgacgctgggtgcgatctatgcgttgatcgccatcggctacacgatggtctacggcatcatcggcatgatcaacttcgcccacggcgagatctacatgatcggtgcgtacgtgggtctggtcacactgaccgccatcggcgtgcaggccggctacccgttgccgctggtgctgggtgccgctctgctggtctccgtcgtgatcaccggctgctatggcttcgcggtcgagcgcgtggcgtatcggcccttgcgcggcgggccgcggctggtgccgctgatctcggccatcggcatgtcgatcttcctgcagaactacgtgcagatcgggcagggtgcgcgcgacgtgtccgtgccgatcctgatctcgggcgccatcgaattccagatgggcagcgatttcaccgtcacagtgccatattcccgtctgctgatcgtcggcgtgacgctggtgctgatgatcgcgctgacgctgttcatcggccattcccgcatgggccgcgcgtgccgcgcgtgcgctgaggacatgcgcatggccaacctgctgggtatcgatacgaaccgcgtgatctcgttcacgttcgtgctcggcgcgatgctggccgcggtcggcggcgtgctgatcgggctgaccatcggcaagctcaatccgtttatcggctttatcgccggcatcaaggcgttcaccgccgcggtgctgggaggcattgggagcatcccgggcgcgatgctcggcggcgtgctgctgggcctggtcgaaaccttcgcgtcgggctacatgccggccgaatacaaggacgtggtggccttcagcctgctggtgctggtgctgctgttccgcccgaccggcctgctcggcaagccagacgtggaaaaggtctga

SEQ ID NO: 61329 - protein, 308 aa, Ralstonia eutropha JMP134
MNEFLPQFTQQLVNGLTLGAIYALIAIGYTMVYGIIGMINFAHGEIYMIGAYVGLVTLTAIGVQAGYPLPLVLGAALLVSVVITGCYGFAVERVAYRPLRGGPRLVPLISAIGMSIFLQNYVQIGQGARDVSVPILISGAIEFQMGSDFTVTVPYSRLLIVGVTLVLMIALTLFIGHSRMGRACRACAEDMRMANLLGIDTNRVISFTFVLGAMLAAVGGVLIGLTIGKLNPFIGFIAGIKAFTAAVLGGIGSIPGAMLGGVLLGLVETFASGYMPAEYKDVVAFSLLVLVLLFRPTGLLGKPDVEKV

SEQ ID NO: 61330 - DNA, 936 bp, Ralstonia eutropha JMP134
  CDS (1)..(936): transl_table=11
atggatatctttatccaacagatcgtgaacggtctggtgctcggcagcatctatgcgctgatcgcactgggctacaccatggtctacggcattctgggcatcatcaacttcgcccacggcgacgtcctgatgattggcgcgctgaccgctttgtcagcgattcttgggctgcagaaattcgcgcccggcctgcccgagtggctgacgctggtgattgccacgctgatcgccatgccggtttgtgcagtgcttgcctattccatcgagcggatcgcctaccggccgctgcgcaatgcgccgcgcctggccccgctgatcaccgccatcggcgtttccatcatcctgcagaccgcgggcatgctgatctggtcgcgcaacccgctgaccttcccgcaactgctgccttccgagcctatcgatatcggatccacgggcgccaccattaccggcaaggaaatggtcatcattggcctggccgtgatggtcatggctggcctgctggccctggtcaaccgcaccaagctgggccgcgcgatgcgcgccaccgccgaaaaccagaaggttgccggcctgatgggcgtgaacccgaacttcgtcatctccgccaccttcatgatcggcgcgacgctcgccgcgctggccggcgtgatgatggcgaccaactacggcaacgcccacttctacatgggcttcatcccgggcctgaaggcgttcaccgccgcggtgctgggcggcatcggcaacctggccggcgccatggtcggcgggatgctgctgggcctgatcgaagcactgggcgccggctacatcggcgacctgaccaatggcgtgttcggttcgaactaccaggacgtctttgcgttcattgtgctgattaccgtacttgtgttccgtccgtccggcatcatgggcgaacgcgtggctgaccgtgcctga

SEQ ID NO: 61331 - protein, 311 aa, Ralstonia eutropha JMP134
MDIFIQQIVNGLVLGSIYALIALGYTMVYGILGIINFAHGDVLMIGALTALSAILGLQKFAPGLPEWLTLVIATLIAMPVCAVLAYSIERIAYRPLRNAPRLAPLITAIGVSIILQTAGMLIWSRNPLTFPQLLPSEPIDIGSTGATITGKEMVIIGLAVMVMAGLLALVNRTKLGRAMRATAENQKVAGLMGVNPNFVISATFMIGATLAALAGVMMATNYGNAHFYMGFIPGLKAFTAAVLGGIGNLAGAMVGGMLLGLIEALGAGYIGDLTNGVFGSNYQDVFAFIVLITVLVFRPSGIMGERVADRA

SEQ ID NO: 61332 - DNA, 864 bp, Ralstonia eutropha JMP134
  CDS (1)..(864): transl_table=11
gtggcattgttccttcaacagatcctgaacggcctgacgctgggcggcgtgtacagcctggtggcccttggcctgacgctggtctacggcatcctgcacgtgccgaacttcgcgcacggcgcgttctacatggctggcgcctacgtctcgtacttcctgatgacgtcgttcggcgtgaactactggctcgcgatggtcggcgccgcagtcgtcgtcgcgatgctgtcgatgctggccgaccggctggtgttccatccgctgcgcaacgcgcccgaactgcacgacatgatcgcggccatcggcatcctgctgttcctggaagccggcgcgcaggcactgtggggcgcggacttccatcgcatgccgacgccgtacggccaggtggtcgacctgttcggcctgaccgcgccgctgcagcgcctgctgatcatcgtcgccgcgttcgcgctgatggtgctgctgcacctgttcctcacgcgcaccatgacaggcgcgaccatcatggcgatggcgcagaaccgcgaaggtgccgcgctcgtaggcatcgatgcgacgcgcgtgacgctgctggtgttcgcgatttccggcgcgctggccgccatcgccgccacgctctacgcgccgatcaacctggtctacccgagcatgggcaacctggtcatcacgaaggccttcgtgatcatcatcctcggcggcatgggcagcatccccggcgcgattgcgggcgggctcatcatcggcatggccgagagcttcggcggtttctacgtttccaccgactacaaggacatcatcgcgttcgtgctgctggtggtgatcctttcgatccggccgcaaggcctgttcgccggcaaggcggcctga

SEQ ID NO: 61333 - protein, 287 aa, Ralstonia eutropha JMP134
MALFLQQILNGLTLGGVYSLVALGLTLVYGILHVPNFAHGAFYMAGAYVSYFLMTSFGVNYWLAMVGAAVVVAMLSMLADRLVFHPLRNAPELHDMIAAIGILLFLEAGAQALWGADFHRMPTPYGQVVDLFGLTAPLQRLLIIVAAFALMVLLHLFLTRTMTGATIMAMAQNREGAALVGIDATRVTLLVFAISGALAAIAATLYAPINLVYPSMGNLVITKAFVIIILGGMGSIPGAIAGGLIIGMAESFGGFYVSTDYKDIIAFVLLVVILSIRPQGLFAGKAA

SEQ ID NO: 61334 - DNA, 864 bp, Ralstonia eutropha JMP134
  CDS (1)..(864): transl_table=11
atgacaagtctcttgggcgtgctgtttgacggcctggcgtacggcagcctgttgttcctgatcagcgtcgggctatccgtgaccatgggcctgatgaatttcgtcaacctcgcgcatggcgccttcgcgatgctgggtggctatgtcgccgtggtgctgatgaaccgcgccggcgtgccattcctgctgtcgctgctgattgcgttcgccggggcagcggccgcgggctgggtactggaacgcacactgtaccgcaggctctaccaggcgagccatctcgaccaggtgctgttttccatcggcctgacattcatggcgatggccggagcgaactacctgttcggcccgggccagcagcccgtggaactgcccgcggcgctgcgcggccaagtgcgcgtgggcggggtggatctgggcgtgtaccggctcttcctgatcggtgtggtggtggcgatcaccgcgacactgggctggctggtggcgcgcacgcgcttcggcgcgcaagtgcgggccgcggtggacaaccagcaggccgcgcgcgggctgggcatcaatgttgaccgcgtattcagcctgacattcgcgctgggctccggcctggcggggctcggcggagggctcggcgtcgatatgcttggcctcgatccggcgttcccgctcaagtacatggtgtatttcctgctcgtggtggctgtcggcggcgccgggtccatccgagggccgctgcttgcggcgctggtgctcggcgtcgcggacgtggccgggaagtactacgtgccagcagtcggtgcctttgtcatctacgcgatgatggtgctgttgctggtcctgtttccggctggcctgtacgggaggcgcgcatga

SEQ ID NO: 61335 - protein, 287 aa, Ralstonia eutropha JMP134
MTSLLGVLFDGLAYGSLLFLISVGLSVTMGLMNFVNLAHGAFAMLGGYVAVVLMNRAGVPFLLSLLIAFAGAAAAGWVLERTLYRRLYQASHLDQVLFSIGLTFMAMAGANYLFGPGQQPVELPAALRGQVRVGGVDLGVYRLFLIGVVVAITATLGWLVARTRFGAQVRAAVDNQQAARGLGINVDRVFSLTFALGSGLAGLGGGLGVDMLGLDPAFPLKYMVYFLLVVAVGGAGSIRGPLLAALVLGVADVAGKYYVPAVGAFVIYAMMVLLLVLFPAGLYGRRA

SEQ ID NO: 61336 - DNA, 951 bp, Anabaena variabilis ATCC 29413
  CDS (1)..(951): transl_table=11
atggatattagtgtatttttacaacagctattgaatgggttatctattggcagcgtttatgcaatctttgccttaggttatacattggtttattccattttgggaattattaacttagcgcatggggcaatttttacgctgggggcatatttcacttatgctcttatgggtggtacgtttgggtttaatggtttgctggctaacgctactctgccgatacaattaccatttgctgtggcattgattattggcagtagtttagccgggttagtaggggtggcaatggaaagaatcgcttttcaacctttgcgaaaaaaaggatctgacaccttactaacagtggtttccagcttaggggtagcagttgtaattgtgaacataattcaatatttagtaggtgcagaaagttatacatttccggcaaatacttttggtaatttacccccagcctttaactttggaactttggaaaagccgatacctattcgtagcgtacaggtggtaattttcactgtatctgttgtaattgtggctattcttacttactttattaattgtactaaatacggtaaagcaattcaggcgatcgccgaagatgccactactgccagtttattaggtatcaatagcgatcgctttattgtcttaactttttttatcagcagttttcttgctggcttggcgggaactctagtcgcctctagtgtgagcattgcaggcccttattttggtattggctttgggttgaggggtttagcggtgattgtccttggtggcttaggtagcattcctggcgcagttttgggaggtttactgattggcgtagttgaggcgctggttccctctgattactctggttataaagacgctgtagctttcggcattttgtttatcatgctattagttagaccccaaggattattaggccgtcggtttattcagaaagtctga

SEQ ID NO: 61337 - protein, 316 aa, Anabaena variabilis ATCC 29413
MDISVFLQQLLNGLSIGSVYAIFALGYTLVYSILGIINLAHGAIFTLGAYFTYALMGGTFGFNGLLANATLPIQLPFAVALIIGSSLAGLVGVAMERIAFQPLRKKGSDTLLTVVSSLGVAVVIVNIIQYLVGAESYTFPANTFGNLPPAFNFGTLEKPIPIRSVQVVIFTVSVVIVAILTYFINCTKYGKAIQAIAEDATTASLLGINSDRFIVLTFFISSFLAGLAGTLVASSVSIAGPYFGIGFGLRGLAVIVLGGLGSIPGAVLGGLLIGVVEALVPSDYSGYKDAVAFGILFIMLLVRPQGLLGRRFIQKV

SEQ ID NO: 61338 - DNA, 867 bp, Anabaena variabilis ATCC 29413
  CDS (1)..(867): transl_table=11
atggacatacaaacgattcaactgattgtcaatggtattgcggtaggtagcattatcgctcttgcggctgtgggactgactttaacttatggaattttacggttgtctaattttgcccacggtgatttcttaactttaggggcttatttgactttgttggtcaacacttttggggtaaatatttggttatcgatgatagtggcagtagtgggaacggtgggagcaatgttactgtcagaaaaattgctatggtctagaatgcgctcgatccgagctaattccactactcttattattatctcaattgggctggcattattcctgcgtaacgggattattttaatttggggcggcagaaaccaaaattataatttacccatcactcctgctttagatatttttggtgtgaaagtaccacaaaatcaattgctggtgttggcattagcagtattatccatcggcgcactgcactacctcttacaaaacacaaaaattggtaaggcgatgcgtgctgttgctgacgatttggatttagccaaggtttctgggattgatgtggagcaagtaattttttggacttggctaattgccggcacagttacctctttaggtggcagtatgtatggcttaattacggcagtacgtcctaatatgggttggtttttaattttgccgctattcgcttccgtaatcttgggcggtattggcaacccttacggtgcgatcgccgcagcttttatcattggtattgttcaagaagtgagtacacccttgttaggttcccaatacaaacaaggtgttgccctactaatcatgattttggtgttgctcattcgtcctaaaggtttatttaaaggcacgatgtga

SEQ ID NO: 61339 - protein, 288 aa, Anabaena variabilis ATCC 29413
MDIQTIQLIVNGIAVGSIIALAAVGLTLTYGILRLSNFAHGDFLTLGAYLTLLVNTFGVNIWLSMIVAVVGTVGAMLLSEKLLWSRMRSIRANSTTLIIISIGLALFLRNGIILIWGGRNQNYNLPITPALDIFGVKVPQNQLLVLALAVLSIGALHYLLQNTKIGKAMRAVADDLDLAKVSGIDVEQVIFWTWLIAGTVTSLGGSMYGLITAVRPNMGWFLILPLFASVILGGIGNPYGAIAAAFIIGIVQEVSTPLLGSQYKQGVALLIMILVLLIRPKGLFKGTM

SEQ ID NO: 61340 - DNA, 915 bp, Pseudomonas fluorescens PfO-1
  CDS (1)..(915): transl_table=11
atggatggtattttcctgcagcaactggtcaacggcctgaccctcgggtcggtctatggcctgatcgccatcggctacacaatggtctacggcatcatcggcatgatcaacttcgcccacggcgaggtttacatgatttctgcttacctggcggcaatcagtctggctctgctggcttacttcggtattgaatccttcccgctgctgatgcttggcaccctgatattcaccatcgtgatcacggcggtgtatggctgggtcatcgagcgagtcgcttacaaacccctgcgcaactccacccgactggcaccgttgatcagcgccatcggcatctccctgattctgcaaaactacgcacagatcgcccaaggcgccaaacaacagggcgtacccacgctgctgaccggtgcatggcgtgtcgaagtcggtaccggcttcgtgcaactgacctacaccaaagtcttcatcctggtggccgcattcgtcggcatgggcctgctgacctacgtcatcaagtacaccaagctcgggcgcatgtgccgtgcgacccagcaagaccgcaaaatggcttcgatcctcggcatcaacaccgacagggtcatttcctacgtgttcatcatcggtgcggccatggcggcgttggccggcgtgctgatcaccatgaactacggcaccttcgacttctatgccggcttcatcatcggcatcaaggcatttactgcggcagtactgggcgggatcggttcgctgcctggcgccatgctcggcgggatcatcctcgggatatccgagtcgctgttctcgggtctggtcaactccgactacaaagacgtgttcagcttctcgctgctcgtacttgttctggtcttccggcctcagggcctgctgggccgtcctcttgtgtcgaaggtgtaa

SEQ ID NO: 61341 - protein, 304 aa, Pseudomonas fluorescens PfO-1
MDGIFLQQLVNGLTLGSVYGLIAIGYTMVYGIIGMINFAHGEVYMISAYLAAISLALLAYFGIESFPLLMLGTLIFTIVITAVYGWVIERVAYKPLRNSTRLAPLISAIGISLILQNYAQIAQGAKQQGVPTLLTGAWRVEVGTGFVQLTYTKVFILVAAFVGMGLLTYVIKYTKLGRMCRATQQDRKMASILGINTDRVISYVFIIGAAMAALAGVLITMNYGTFDFYAGFIIGIKAFTAAVLGGIGSLPGAMLGGIILGISESLFSGLVNSDYKDVFSFSLLVLVLVFRPQGLLGRPLVSKV

SEQ ID NO: 61342 - DNA, 924 bp, Pseudomonas fluorescens PfO-1
  CDS (1)..(924): transl_table=11
atgcctgacatctatcacttcttccaacagctggttaacggcttgaacgttggcagcatgtatgccctgatcgccatcggctacacgatggtctacggcatcattggaatgatcaacttcgcccacggcgaggtgtacatgatcggttcctacgtggcgttcatcgccatcgccgggctgaccatgatgggactcgaaagcgtcccgctgttgatgaccgtggcgttcatcgccagcatcgtcgtcaccagctcctacggatacagcatcgaacgcattgcctaccgcccgttgcgcggcagcaaccgtctgatcccgctgatttccgcgatcggtatgtcgatcttcctgcagaacacggttctgctggcgcaagactccaaggacaaagcaatccccaacctgattccgggcaacttcgccttcggcccaggtggcgcacatgaagtgctgatttcctacatgcaaatcgtggtgttcgtggtgaccctgatcgccatgctcggcctcacgctgttcatctcccgctctcgcctgggccgcgcctgccgcgcctgcgccgaagacatcaagatggccaacctgctgggcatcaacaccaacaacatcatcgccctgaccttcgtcatcggtgctgcgctggcggccgtcgcggccgtgctgctgagcatgcaatacggcgtgatcaacccgaacgccggtttcctcgtcggcctcaaggccttcaccgccgcagtgctgggcgggatcggcagcatccccggcgccatgctcggcgggctggtgctcggggtggcggaagcctttggcgccgatatcttcggcgaccaatacaaggacgtcgtggctttcggcttgttggttctggtgctgttgttccgtccgaccggcattctgggccgtccggaggttgagaaagtatga

SEQ ID NO: 61343 - protein, 307 aa, Pseudomonas fluorescens PfO-1
MPDIYHFFQQLVNGLNVGSMYALIAIGYTMVYGIIGMINFAHGEVYMIGSYVAFIAIAGLTMMGLESVPLLMTVAFIASIVVTSSYGYSIERIAYRPLRGSNRLIPLISAIGMSIFLQNTVLLAQDSKDKAIPNLIPGNFAFGPGGAHEVLISYMQIVVFVVTLIAMLGLTLFISRSRLGRACRACAEDIKMANLLGINTNNIIALTFVIGAALAAVAAVLLSMQYGVINPNAGFLVGLKAFTAAVLGGIGSIPGAMLGGLVLGVAEAFGADIFGDQYKDVVAFGLLVLVLLFRPTGILGRPEVEKV

SEQ ID NO: 61344 - DNA, 960 bp, Burkholderia sp. 383
  CDS (1)..(960): transl_table=11
atgcgacacaacgccaacgggagcttcccgcacatgactgacttctttccgcaattcgcccagcaactggtcaacggcctgacgctgggtgcgatctatgcgctgatcgccatcggctattcgatggtctacggcatcatcggcatgatcaacttcgcccacggcgagatctacatgatcggcgcctacgtgggcctcgtgaccctcactgcaatcggcatctccgccggctatccgctgccgctcgtgctcggtgccgcgctgatcgtgtcggtgatcgtcaccggcctgtacggtttcgcggtcgagcgcgtcgcgtatcgcccgctgcgcggcggcccgcgcctcgtgccgctgatctccgcgatcggcatgtcgatcttcctgcagaactacgtgcagatcggccagggcgcgcgcgacgtgtccgtgcccgtgctgatctccggcgcgttcgacatccatctcggcggcgacttcgacgtgacgatcccgtattcgcgcctgatgatcgtctgcgtgacgctcgtgctgatgatcgcgctcacgctgttcatctcgcattcgcggatgggccgtgcgtgccgcgcatgcgccgaggacatgaagatggcgaacctgctcggcatcgacacgaaccgcgtgatctcgttcacgttcgtgctcggcgcaatgctggccgccgtcggcggcgtgctgatcgggctgacgatcggcaagctgaacccgtatatcggcttcgtcgcgggcatcaaggcgttcaccgccgcggtgctcggcgggatcggcagcatcccgggcgcgatgctcggcggcgtgctgctgggcctcgccgaaaccttcgccgcaggctacatgccggccgagtacaaggacgtcgtcgcgttcggcctgctcgtgctgatcctgctcttccgcccgaccggcctgctcggcaagtcggacatcgaaaaggtttga

SEQ ID NO: 61345 - protein, 319 aa, Burkholderia sp. 383
MRHNANGSFPHMTDFFPQFAQQLVNGLTLGAIYALIAIGYSMVYGIIGMINFAHGEIYMIGAYVGLVTLTAIGISAGYPLPLVLGAALIVSVIVTGLYGFAVERVAYRPLRGGPRLVPLISAIGMSIFLQNYVQIGQGARDVSVPVLISGAFDIHLGGDFDVTIPYSRLMIVCVTLVLMIALTLFISHSRMGRACRACAEDMKMANLLGIDTNRVISFTFVLGAMLAAVGGVLIGLTIGKLNPYIGFVAGIKAFTAAVLGGIGSIPGAMLGGVLLGLAETFAAGYMPAEYKDVVAFGLLVLILLFRPTGLLGKSDIEKV

SEQ ID NO: 61346 - DNA, 906 bp, Desulfovibrio desulfuricans G20
  CDS (1)..(906): transl_table=11
atggaagagtttttccaacaattgaccaacggtctggccgtgggtggcatatatgcccttatcgccctcggatacaccatggtgtacggcgtgctgaagcttatcaacttcgcgcacggcgacctgttcaccatcggagcgtatctggggctcaccctgctgacatccatggggcttaccggtcatctgggcgctgtggcaggagtgctggtactggctgtcatggtgcaggtgctggtggccatcatcggttacctgcttgaaagggtggcctacagaccattgcggcagtcgccgcggctttccgccgtggtctcggcgctgggtgcctccatttttttccagaacgccgtgatgctcatctacggtgcgcgttttcaggtgtatccgcacgatatactgccttccgccaccgtaagcctgctgggccttgatgttcctctggtgcgcattctcatgttcctgacgtctgtggtgctcatgctggggctgtacttttttattcagaaaaccagaacaggtaccgccatccgcgctgcggccattgatcagggtgcagccaagctcatgggcatcaatgtgaacagggttgtttctctggtctttctgataggtcccgcgctgggcggcgccgccggcctgatggtggggctgtactacggccagatcaatttcaccatggggtgggtgtacgggctcaaggcgttcacagcggccattctgggcggtataggcaacataccgggcgccatggtgggcggcctgctgctgggagtcatcgaagcgctgggtgcggcatatatttccatcgcctggaaagatgccatcgccttcttcgtgctcatcatcattctgataatcaggccgacaggcctgctgggcgaaagggtggctgacaaaatatga

SEQ ID NO: 61347 - protein, 301 aa, Desulfovibrio desulfuricans G20
MEEFFQQLTNGLAVGGIYALIALGYTMVYGVLKLINFAHGDLFTIGAYLGLTLLTSMGLTGHLGAVAGVLVLAVMVQVLVAIIGYLLERVAYRPLRQSPRLSAVVSALGASIFFQNAVMLIYGARFQVYPHDILPSATVSLLGLDVPLVRILMFLTSVVLMLGLYFFIQKTRTGTAIRAAAIDQGAAKLMGINVNRVVSLVFLIGPALGGAAGLMVGLYYGQINFTMGWVYGLKAFTAAILGGIGNIPGAMVGGLLLGVIEALGAAYISIAWKDAIAFFVLIIILIIRPTGLLGERVADKI

SEQ ID NO: 61348 - DNA, 909 bp, Desulfovibrio desulfuricans G20
  CDS (1)..(909): transl_table=11
atggactggacttatttctgggaactgtttctgggcgggctgacgcgcggcagcatctatgcgcttatcgccatcgggtacaccatggtgtacggcatcatcgagcttatcaacttcgcccacggtgaaatttatatgataggcgcctttaccggtcttatcaccgcgggcgttctgggcatctacggttttccgctgctggccattctggctgtggcagtggtggttgccatcatttattccgctgcctacgggtacacgctggaaaaaatagcctacaagcccctgcgcggctccatgcggctggcaccgctcatctccgccatcggtatgtcactgtttctgcagaactatgtcatactggctcagacctcagactttctgccttttccggcactggtaccggatttcgcctttatggaacccatcgcgcacatctttgcctcttccgacctgctcatagtggctaccagcgctttttccatggcggggctgaccctgttcatcaaatacacccgcatgggcaaagccatgcgcgccaccgcgcagaaccggaagatggccatgctgctcggcatagacgccgaccgcatcatttccatcacgttcatcatcgggtcttcgctggcggcgctgggcggagtgctcattgcctcgcacgtggggcaggtcagcttcaacgtaggttttctggccggtatcaaggcctttacggcggcggtgctggggggcatcggctccatacccggcgccatggcagggggactttttctggggctgagcgaaagctacgccaccggctacatctccagcgactatgaagacgtcttcgcctttctgctgctggttctgtttctcatcttcaggccttccggcatcatgggcaaagctccggtcgaaaaggtgtaa

SEQ ID NO: 61349 - protein, 302 aa, Desulfovibrio desulfuricans G20
MDWTYFWELFLGGLTRGSIYALIAIGYTMVYGIIELINFAHGEIYMIGAFTGLITAGVLGIYGFPLLAILAVAVVVAIIYSAAYGYTLEKIAYKPLRGSMRLAPLISAIGMSLFLQNYVILAQTSDFLPFPALVPDFAFMEPIAHIFASSDLLIVATSAFSMAGLTLFIKYTRMGKAMRATAQNRKMAMLLGIDADRIISITFIIGSSLAALGGVLIASHVGQVSFNVGFLAGIKAFTAAVLGGIGSIPGAMAGGLFLGLSESYATGYISSDYEDVFAFLLLVLFLIFRPSGIMGKAPVEKV

SEQ ID NO: 61350 - DNA, 891 bp, Synechococcus elongatus PCC 7942
  CDS (1)..(891): transl_table=11
ttgcatcgagcgcttgggatggcaagcccagacctctcacaactggctcaattggccatcaatggtctggcgaccggcagcctcctggccctagccgcaacgggtctgaccttgatctacggcatcctgcgactgaccaattttgcccaaggcgagtttttgaccctcggcgcttacttcacgttggttgccaacagccttgggctcagtctctggctggccattcctctcggggcgatcgcgacgatcgcactttgcttgctgggcgaagcagttttgtgggaaccgctgcggcggcaacgggtgaacaccaccactctgatcatcctgactattggcctgtcgctgttcctgcgcaatctggtgattttgatttggggcgcgggcaatcaggcctaccggctggcagtccaaccggccttaaccctctggggactcaggatcacgctcaatagcctcctcgtggtgattggggcagctgccgctttggttctgttgcactgggttttgcagcgcaccagcatcggcaagggcatgcgagcgatcgctgatgaccccgacctggcacgggtcagtggcgtaccagtcgaaaccgtgatccgctggacttgggtgattgcgggcggtctgacagcgatcgcagggggcctctacggattgatcactgctgtccgtcccactatgggctggaatttgatcctgccgctgtttgccagcgccatcctcggagggattggtagcccttacggtgcgatcgcaggagggctgattctgggatttgcccaagaactcagcacttactggctgccagcggaatacaagcttgccgttgcctttgtcatcttgattggcgtgctggtgatccggccccaaggcctatttgctcgctag

SEQ ID NO: 61351 - protein, 296 aa, Synechococcus elongatus PCC 7942
MHRALGMASPDLSQLAQLAINGLATGSLLALAATGLTLIYGILRLTNFAQGEFLTLGAYFTLVANSLGLSLWLAIPLGAIATIALCLLGEAVLWEPLRRQRVNTTTLIILTIGLSLFLRNLVILIWGAGNQAYRLAVQPALTLWGLRITLNSLLVVIGAAAALVLLHWVLQRTSIGKGMRAIADDPDLARVSGVPVETVIRWTWVIAGGLTAIAGGLYGLITAVRPTMGWNLILPLFASAILGGIGSPYGAIAGGLILGFAQELSTYWLPAEYKLAVAFVILIGVLVIRPQGLFAR

SEQ ID NO: 61352 - DNA, 942 bp, Synechococcus elongatus PCC 7942
  CDS (1)..(942): transl_table=11
atggattggttgcaaccgctgatcaatggtctggccatcgggggcgtctatgccctgtttgccttggggtataccttggtcttttcgatcctgggggtcattaactttgcccatggtgccgtttttaccctcggtgcctacctgacttacgctctagtgggtgggcgtttcagcttcaacgggttgctcgccaatgccgcgctgcccttcagtttgccgttcgccttggctctgctgctcggcagtttgctggccggcggtgccagcctcttgattgagcaagtggcctttcgtcccctgcgccgccgccaagcggatcccctcctaaccctgatctccagccttggcgtggcggtgtttatcgtcaatttgattcaaatcttggtgggagccgagatttacaccttcccaagcaacatctacggcgacctacccagtgccatcaacttaggcagcagcgatcgcccgatccagatccgcacggtgcaaatcatcctgtttgtcgtggcgatcgcgatgttcagtctgctgacttggctgatcaacggcacccgcgttggccatgccctgaaagctgttgccgaagatgccaccaccgctagcctgctgggcatcgatcccgatcgctacatccggctgaccttcttcctgagtggcgtccttggtggtttggcgggcaccttggtcggtaccagtgtcagtatcaccggcccctatttcgggattgcctacgggctgaaaggcctgagtgtgatggtcttaggtggactcggcaatattcccggcacgattgcgggcggcttgttgttgggtctggcggaagcttgggtgccgccacaatggtcgggctatcgcgatgccgttgcctttgcgctgctatttgccatgctcttgatccgtccccagggcttgtttagtcgtgctcggacagagaaggtgtag

SEQ ID NO: 61353 - protein, 313 aa, Synechococcus elongatus PCC 7942
MDWLQPLINGLAIGGVYALFALGYTLVFSILGVINFAHGAVFTLGAYLTYALVGGRFSFNGLLANAALPFSLPFALALLLGSLLAGGASLLIEQVAFRPLRRRQADPLLTLISSLGVAVFIVNLIQILVGAEIYTFPSNIYGDLPSAINLGSSDRPIQIRTVQIILFVVAIAMFSLLTWLINGTRVGHALKAVAEDATTASLLGIDPDRYIRLTFFLSGVLGGLAGTLVGTSVSITGPYFGIAYGLKGLSVMVLGGLGNIPGTIAGGLLLGLAEAWVPPQWSGYRDAVAFALLFAMLLIRPQGLFSRARTEKV

SEQ ID NO: 61354 - DNA, 927 bp, Burkholderia thailandensis E264
  CDS (1)..(927): transl_table=11
atgaatgaattctttcctcaattcgcccagcaactggtcaacggcctcacgctgggcgcgatctacgcgctgatcgcgatcggctattcgatggtctacgggatcatcggcatgatcaacttcgcccacggcgagatctacatgctcggcgcgtacatcggcctcgtcacgctgaccgcgatcggcacgtcggcgggctatccgttgccgctcgtgcttggcgcggcgctcgtcgtgtcggtcatcgtcacggggctctacgggttcgcggtcgagcgcgtcgcgtaccggccgctgcgcggcgggccgcggctcgtgccgctcatctccgcgatcggcatgtcgatctttcttcagaactacgtacagatcggtcagggcgcgcgcgacatgtcggtgcccgtgctgatttccggtgcgttcgacatccgcctcggcggcgacttcgacgtgacggtgccgtatgcgcgcctgttgatcgtctgcgtgacgatcgtgctgatgatcgcgctcacgctgttcatctcgcactcgcggatgggccgtgcatgccgcgcgtgcgcggaggacatgcgcatggcgaacctgctcggcatcgacacgaaccgcgtgatctcgttcacgttcgtgctgggcgcgatgctcgccgcggtgggcggcgtgctgatcgggctcacgatcggcaagctcaatccgtacatcggcttcgtcgcgggcatcaaggcgttcacggccgcggtgctgggcggcatcggcagcattcccggcgcgatgctgggcggcgtgctgctcggccttgccgagaccttcgcgtccggctacatgcccaccgagtacaaggacgtggtggccttcggccttctcgtgctgatcctgctgttccgtccgacgggcctgctcggcaagtcggatatcgaaaaggtgtga

SEQ ID NO: 61355 - protein, 308 aa, Burkholderia thailandensis E264
MNEFFPQFAQQLVNGLTLGAIYALIAIGYSMVYGIIGMINFAHGEIYMLGAYIGLVTLTAIGTSAGYPLPLVLGAALVVSVIVTGLYGFAVERVAYRPLRGGPRLVPLISAIGMSIFLQNYVQIGQGARDMSVPVLISGAFDIRLGGDFDVTVPYARLLIVCVTIVLMIALTLFISHSRMGRACRACAEDMRMANLLGIDTNRVISFTFVLGAMLAAVGGVLIGLTIGKLNPYIGFVAGIKAFTAAVLGGIGSIPGAMLGGVLLGLAETFASGYMPTEYKDVVAFGLLVLILLFRPTGLLGKSDIEKV

SEQ ID NO: 61356 - DNA, 903 bp, Syntrophus aciditrophicus SB
  CDS (1)..(903): transl_table=11
atggactattttctggagcttctggtcggggggctgacccgcggcagtatttacgccctcatcgccctcggctacacgatggtgtacggcatcatcgaattgatcaatttcgctcacggcgagatttacatgatcggggccttcacggcgctgatcgtcgccggcgtgctcacccttaatggattttcaggaatttccgttctgatcctggcggcggtctttgccgtggtttacgcctccgcctacgggtttaccgtggaaaaaatcgcctataagccgctgcgtcaggcgccacggctttcgccgttgatcagcgccatcgggatgtccatttttcttcagaattacgtcctccttgcccagacctccgatttcctccccttccccaatcttttgccccagtttgacttcatggccccctatgctcacatcatgggttcgaccgaactgttcatcgtcgccacgacagctttgatcatgatcttcctcaccctgctgatcaaatttacacggatgggaaaggcgatgcgcgccaccgcccaggaccgcacgatggccatgctcaccggcgtcaacgtcaaccgcgtgatctccaacaccttcatcctgggttccgccctggccgctatcggaggcgtgctcatcgcttcccacatcggccggatcaatttctacatcggttttatcgccgggatcaaggcgtttaccgcggctgtgctgggcggaatcggcagcatcccgggcgccgtcctcggcggactggttctgggatggacggaaagcttcgccacgggttatgtctccagcgattacgaagatgtctttgcgttcctgctgctggtgctcgttttgattttccgacccgccggccttctggggcgatctccaacccgcaaggtataa

SEQ ID NO: 61357 - protein, 300 aa, Syntrophus aciditrophicus SB
MDYFLELLVGGLTRGSIYALIALGYTMVYGIIELINFAHGEIYMIGAFTALIVAGVLTLNGFSGISVLILAAVFAVVYASAYGFTVEKIAYKPLRQAPRLSPLISAIGMSIFLQNYVLLAQTSDFLPFPNLLPQFDFMAPYAHIMGSTELFIVATTALIMIFLTLLIKFTRMGKAMRATAQDRTMAMLTGVNVNRVISNTFILGSALAAIGGVLIASHIGRINFYIGFIAGIKAFTAAVLGGIGSIPGAVLGGLVLGWTESFATGYVSSDYEDVFAFLLLVLVLIFRPAGLLGRSPTRKV

SEQ ID NO: 61358 - DNA, 933 bp, Frankia sp. CcI3
  CDS (1)..(933): transl_table=11
atgggtttcctcgaccagttctggcagctgaccgtcgacggtctgacggtcggctccctgtacgcggtcatcgcgctcgggtacaccctcgtctacggggtcctccagctcatcaacttcgcgcacagcgaggtcttcatgctgggatccttcggcgggctgttcgccgcccgcgccctgctgcccggggacggctcggtcccgggcggcctcgaatcggtgggcctggtgaccatgggcctcggcgccggcgcgatctgcggcgggctcgccgccttcacgctcgaacgggtggcgtaccggccgctgcggcgccgttccgccccccggctggcctatctcatcagcgccatcggggcctcgctgttcgcggtgaaccttgccggcaaggagttcggccggcagaatgtggccctgcccgacctgttcaccgacggaacggtgttcacgctgttcggagcggacgtctccacccagtcgctggtcatcttcgcggtcgcgatcgcgatattggtcggactggaccggctggtcgcggggacccggctcgggcagggcatccgcgcggtggcccaggacgccgacaccgcggttctcatgggcgtgaacgtcgaacgcatcatcatcgtcacgttcgtgctcggcggcctgttggccggggccggtggcttcctgtacgcgatgacgttcaacgcctcttacagcatggggttcgtccccggggtgaaggcgttcaccgccgcggtcctcggcggcatcggcaacgtgcgcggggcgatgctcggcggcctgctcctcggattggtggaaagctatggcggatatatcttccaggcgtcctacaaggacgtgatcgctttcctggtcctggtcggcatcctgatgatccgaccgtccggcctgctcggggaacgtctagggagggcagcgtga

SEQ ID NO: 61359 - protein, 310 aa, Frankia sp. CcI3
MGFLDQFWQLTVDGLTVGSLYAVIALGYTLVYGVLQLINFAHSEVFMLGSFGGLFAARALLPGDGSVPGGLESVGLVTMGLGAGAICGGLAAFTLERVAYRPLRRRSAPRLAYLISAIGASLFAVNLAGKEFGRQNVALPDLFTDGTVFTLFGADVSTQSLVIFAVAIAILVGLDRLVAGTRLGQGIRAVAQDADTAVLMGVNVERIIIVTFVLGGLLAGAGGFLYAMTFNASYSMGFVPGVKAFTAAVLGGIGNVRGAMLGGLLLGLVESYGGYIFQASYKDVIAFLVLVGILMIRPSGLLGERLGRAA

SEQ ID NO: 61360 - DNA, 924 bp, Saccharophagus degradans 2-40
  CDS (1)..(924): transl_table=11
atgggcggttatacctacagcgaattggggtccatcttggcaatgcagggcttcgctggaattagtttattcagcgtactgcttttaatggcgttagggcttgccattatttttggtcaaatgggtgtaattaatatggctcacggcgaatttatggccgtaggcgcctacaccacttactttatatctaccctcaccgaggcctactttccagagcttatgtcctattactttgtgtttgccattttggtggcctttgtaatggcgggggcactagggtatttcgcggaatttatattaatacggcatttgtataagcgccctttagatacgttgctggcaacctggggcctaagcctaattatgcagcaggcgtttcgttctatttttggcgcgcgcgaagttagcccggcgctaccagattggttgatggggtcttaccagccaaccgataccattgatattccccttaacggcatgttcgtacttggtttaaccacgcttgtcactctgggcgtattttaccttttatttaaatctagctggggcttgcgcgtgcgagctactacgcaaaatcgtgtaatgagtggcgcggttggcataaacactaaaaaaattgaccgttacacctttgctttaggttgtggcattgcaggtattgcgggcgcggcgttcaccaccattgcttctactgggccaactactgggtcgctttatattgtagatacgttcatggttgtggtgttcggcggagcaggtagtttagtgggcactatatcgtcagccttttccattgcgcaggcgcaatctattttggagttcttcataagcggttcaatggcaaaagtatacacgctgttggcgttagtgttgattctaatgtttaaaccagaaggtttgtttgccagtaaggtgcgtcgctaa

SEQ ID NO: 61361 - protein, 307 aa, Saccharophagus degradans 2-40
MGGYTYSELGSILAMQGFAGISLFSVLLLMALGLAIIFGQMGVINMAHGEFMAVGAYTTYFISTLTEAYFPELMSYYFVFAILVAFVMAGALGYFAEFILIRHLYKRPLDTLLATWGLSLIMQQAFRSIFGAREVSPALPDWLMGSYQPTDTIDIPLNGMFVLGLTTLVTLGVFYLLFKSSWGLRVRATTQNRVMSGAVGINTKKIDRYTFALGCGIAGIAGAAFTTIASTGPTTGSLYIVDTFMVVVFGGAGSLVGTISSAFSIAQAQSILEFFISGSMAKVYTLLALVLILMFKPEGLFASKVRR

SEQ ID NO: 61362 - DNA, 888 bp, Methylobacillus flagellatus KT
  CDS (1)..(888): transl_table=11
atggacattgatatcggttttgttgccatcacggcggttacgctggcctgtatatacggcaccctggctatcggggtgtcgatcacatggtccagcctgggcctgattaatatgagttacggatttactttcgcgacagcaggttacggcgcctggctcgtcagtgagtatatttcctcgttgggcccggtcgtgatccttggcggcatcctgaccggcgcgctggtcggggtgctggtatgcgcggtggccttcatccctatccacgacaagcctaattttacggtacgcgggttgattgcatcgctggcgttgagcctgatcggcacccaggccctgctgtatttcttcgggccgcaatcgaaaacgctgccgcccctgtttggcgactgggaacttgagctgggcgaagtggtgctcactgccgacaagggcggcgccatcctgacctccatcctgatgcttaccctggccttatggtggttgcgctccagtcgccgcgggctggaaatccgcgccatgatgatgaacccgcatgcagcctcgctggtaggcataggcgtcaggcgtactggattctatgtcatggccctgaccggcgggctggctggccttgcatccgtcctgctgtcgcaaacttacttcgtcagcccgttttccggcgtcaccccgctgatcaagggcttgagcgtggctttgtgcggcgggttgggcagcgtcggcggcgccatgattgctgcggtcatgatcggcgtcaatgaggcgctgacggccgatatcctcggtggccaatacatcctgatcacccagttcctgctgatcatactggtgctgatcatccgtccgcgcggtatcgccggcattctcgataaacaacgcgaggcgtaa

SEQ ID NO: 61363 - protein, 295 aa, Methylobacillus flagellatus KT
MDIDIGFVAITAVTLACIYGTLAIGVSITWSSLGLINMSYGFTFATAGYGAWLVSEYISSLGPVVILGGILTGALVGVLVCAVAFIPIHDKPNFTVRGLIASLALSLIGTQALLYFFGPQSKTLPPLFGDWELELGEVVLTADKGGAILTSILMLTLALWWLRSSRRGLEIRAMMMNPHAASLVGIGVRRTGFYVMALTGGLAGLASVLLSQTYFVSPFSGVTPLIKGLSVALCGGLGSVGGAMIAAVMIGVNEALTADILGGQYILITQFLLIILVLIIRPRGIAGILDKQREA

SEQ ID NO: 61364 - DNA, 918 bp, Methylobacillus flagellatus KT
  CDS (1)..(918): transl_table=11
atgtttgattattcaatggcagagataggcaatatcgttgtcatgcaggctttctccggattgagcctgttcagcgttcttctcctgatggcacttggcctggcgatcatcttcggccaaatgggcgtgatcaatatggcccatggcgaattcatggccattggcgcctataccactgtgtttctttcccggattgccgagacttacggaatcgtcaactactatttccttttcgcgattattgcctcattcatcgtggcgttcatcatcggctatatcgttgagttcgtgctcataaggcatctttacaagcggccgcttgataccctgcttgccacctgggggctaagcctggtgatgcagcagatattccgctctacctttggcgccaaggaggtcagcgccgtgttgccagaatggctcatgggctccttccaaccgacgcctgacattgatatccccatcaatggcgtgttcgtcctcggcctggctgccgtcgtgacactgggtgtcttcatcttcatgttccgttcccgctggggcctgcgtgtgcgtgccacggtgcagaaccgtgtgatggcaggtgctgttggcatcaataccaagaaggttgaccgcgtcacgtttgcgcttggctgtggcattgctggtgttgctggtgctgcgttcacgacgatcgcctccaccggcccgacgacaggctcgctctacatcgtcgatagcttcatggtcgtggtcttcggcggtgcggccagcgtattgggcaccatagcttctgccttcggtatcgcccaggcacagtccatcctgcagttcttcatgaccagttccatgggcaaggtcgcgaccctgatggtgatcgtcggcatcctcatgctgcgccccgaaggcctgtttgcatccaaagtacgtaagtaa

SEQ ID NO: 61365 - protein, 305 aa, Methylobacillus flagellatus KT
MFDYSMAEIGNIVVMQAFSGLSLFSVLLLMALGLAIIFGQMGVINMAHGEFMAIGAYTTVFLSRIAETYGIVNYYFLFAIIASFIVAFIIGYIVEFVLIRHLYKRPLDTLLATWGLSLVMQQIFRSTFGAKEVSAVLPEWLMGSFQPTPDIDIPINGVFVLGLAAVVTLGVFIFMFRSRWGLRVRATVQNRVMAGAVGINTKKVDRVTFALGCGIAGVAGAAFTTIASTGPTTGSLYIVDSFMVVVFGGAASVLGTIASAFGIAQAQSILQFFMTSSMGKVATLMVIVGILMLRPEGLFASKVRK

SEQ ID NO: 61366 - DNA, 867 bp, Burkholderia xenovorans LB400
  CDS (1)..(867): transl_table=11
atgtacatagtcattgcgcaggcggtcatcgacgggttgctgaatgccggtattttcggcctggcggcggtgggtctcacgctgttgttcggcgtgatgcgggtcgtgaacttcgcccacggcgacctgttgatggtcggcatgtacgcgacctacgtgctgtacagcgccggtcatatccatccctatctgtcggccgtcattgtcgtgcccgcgctcgcgctgctcggcgtggccatgtatcgcttcctgctgcgtccgctctccggcgcgcccgagcacgcccagttgctggtcacgctcggactctccatggtgctgcaaaacgtcgtgctgtcgctgttcggcgcggatttccgttcgatcaacgtgccggtcagcaacgaggcgttcgagctcggcgcgatcgttctgccggccgcgcgtctgtatggctttgttgtcggcatgggcgcgtgtatcgccctgtacctctttttgcgctacacggacttcggcgtcatcacgcgcgcggcagtgcaggatcgcactgccgcggcgctcgccggtatcgatgtcgagcgagtgctggtgatttccacggcaatcgcggtgggcctgctcggtctcgcagccgcgtggctggtgccgatggtgtatctgtcgtccgaggtgggccacacgtacctgctgccctcgttcatcatcgtcattctcggcggcatgggcagtgtacgcggcgccattctcggatcgatcgtctatggtctgagccagagcctgggagccgtgctcgtacccggttcgctgggcattctcgtgccgttgatcaccttcgtcgcgctcttgctggttcggccgagcggccttttccggggaaccgtatga

SEQ ID NO: 61367 - protein, 288 aa, Burkholderia xenovorans LB400
MYIVIAQAVIDGLLNAGIFGLAAVGLTLLFGVMRVVNFAHGDLLMVGMYATYVLYSAGHIHPYLSAVIVVPALALLGVAMYRFLLRPLSGAPEHAQLLVTLGLSMVLQNVVLSLFGADFRSINVPVSNEAFELGAIVLPAARLYGFVVGMGACIALYLFLRYTDFGVITRAAVQDRTAAALAGIDVERVLVISTAIAVGLLGLAAAWLVPMVYLSSEVGHTYLLPSFIIVILGGMGSVRGAILGSIVYGLSQSLGAVLVPGSLGILVPLITFVALLLVRPSGLFRGTV

SEQ ID NO: 61368 - DNA, 927 bp, Ralstonia metallidurans CH34
  CDS (1)..(927): transl_table=11
atgaacgaatttcttccacagttcactcagcagctggtcaacggcctgacgctgggtgcgatctatgcgttgatcgccatcggctacacgatggtctacggcatcatcggcatgatcaactttgcccacggcgagatctacatgatcggcgcgtacgtgggtctcgtgacgctgaccgccattggcgcgcaggcgggttatccgctgccgctggtgcttggtgcggcactgatcgtctccgtcgccgtgacaggctgctacggctatgccgtcgagcgcgtggcgtatcgccccctgcgtggcgggccgcgcctggtgccgttgatctcggcgatcggcatgtccatcttcctgcagaactatgtccagatcgggcagggcgcgcgcgacgtatcggtgcccatcctgatttctggcgcgatcgaattccagatgggcggagacttcacggtgaccgtgccgtattcgcggctgctcatcgtgggcgtgacgctagtgctgatgatcgtgctgacgctgttcatcggccactcccgcatgggccgcgcctgccgcgcctgcgcggaagacatgcgcatggctaacctgctcggcatcgacacgaaccgcgtgatctcgttcacgttcgtgctcggcgcgatgctggccgccgtgggtggcgtgctgattggtctgacgatcggcaagcttaatccgttcatcggcttcatcgctggcatcaaggccttcacggcggcggtgcttggcggcatcggcagcatcccgggcgccatgctcggcggcgtgctgctgggtctggccgaaaccttcgcttccggctacatgccggccgagtacaaggacgtggtggcgttcggcctgctggtcctggtgctgctcttccgtcccacgggcctgctcggcaagcccgacgtggaaaaggtctaa

SEQ ID NO: 61369 - protein, 308 aa, Ralstonia metallidurans CH34
MNEFLPQFTQQLVNGLTLGAIYALIAIGYTMVYGIIGMINFAHGEIYMIGAYVGLVTLTAIGAQAGYPLPLVLGAALIVSVAVTGCYGYAVERVAYRPLRGGPRLVPLISAIGMSIFLQNYVQIGQGARDVSVPILISGAIEFQMGGDFTVTVPYSRLLIVGVTLVLMIVLTLFIGHSRMGRACRACAEDMRMANLLGIDTNRVISFTFVLGAMLAAVGGVLIGLTIGKLNPFIGFIAGIKAFTAAVLGGIGSIPGAMLGGVLLGLAETFASGYMPAEYKDVVAFGLLVLVLLFRPTGLLGKPDVEKV

SEQ ID NO: 61370 - DNA, 936 bp, Ralstonia metallidurans CH34
  CDS (1)..(936): transl_table=11
atggatatctttatccagcagatcgtgaacggtcttgtgctcggcagcatctacgcgctgatcgcactgggctacaccatggtctacggcattctgggcatcatcaacttcgcgcacggcgatgtgctgatgattggcgcgctgaccgctttgtcggcaatcatggggctgcaaaagttcgcccccggcctgcccgaatggctgacgctggtgatcgccacgctgatcgccatgcccgtctgtgcagttctggcctataccatcgaacgcgtggcctaccggccgttgcgcaacgcgccacgattggccccgcttattaccgcgatcggcgtctcgatcattctccagaccatggggatgctgatctggtcgcgtaacccgctgacgttcccgcaactgctgccgtcgagcccgatcgacatcggctccaccggcgccacgatcaccggcaaggaaatcgtcatcatcggcctggccgtgatggtgatggcgggcctgctggccctggtgaaccgtaccaagctcggccgcgccatgcgcgccaccgccgagaaccagaaggtggcgggcctgatgggcgtcaaccccaacttcgtgatttccgccacgttcatgatcggtgcggcgcttgcggcgctggccggcgtcatgatggccaccaactacggcaatgcccatttctacatgggcttcatcccgggcctgaaggcgttcaccgccgcggtgctcggcggcatcggcaacctggctggcgcaatggtcgggggcatgctgctgggcctgatcgaagcgcttggcgcgggctacatcggcgacctgaccaacggtgtgttcggctcgaactaccaggacgttttcgccttcatcgtgctgatcatcgtgctcgtgttccgtccgtccggcatcatgggcgaacgtgtggctgaccgcgcctga

SEQ ID NO: 61371 - protein, 311 aa, Ralstonia metallidurans CH34
MDIFIQQIVNGLVLGSIYALIALGYTMVYGILGIINFAHGDVLMIGALTALSAIMGLQKFAPGLPEWLTLVIATLIAMPVCAVLAYTIERVAYRPLRNAPRLAPLITAIGVSIILQTMGMLIWSRNPLTFPQLLPSSPIDIGSTGATITGKEIVIIGLAVMVMAGLLALVNRTKLGRAMRATAENQKVAGLMGVNPNFVISATFMIGAALAALAGVMMATNYGNAHFYMGFIPGLKAFTAAVLGGIGNLAGAMVGGMLLGLIEALGAGYIGDLTNGVFGSNYQDVFAFIVLIIVLVFRPSGIMGERVADRA

SEQ ID NO: 61372 - DNA, 864 bp, Ralstonia metallidurans CH34
  CDS (1)..(864): transl_table=11
atggcattgttttttcagcagtttctcaatggcctgactttgggcggcgtctatagcctggtcgcactcgggctgaccctggtctacggcatcttgcacgtaccaaacttcgcgcacggcgcgttctacatggccggcgcgtatgtgtcgtactacgccatgaccacgctgggcatgaattactggctggccatgctggcggcggccgtcgtggtggcgatgctgtcgatgctggcggaccgcctggtcttttatccgctgcgccatgcgcccgagattcacgacatgatcgccgccatcggcatcctgctgtttctcgaagccggcgcgcaggcgctgtggggggccgacttccaccgcatgcccaccccatatggacagatggtcgagatcttcggcctgaccgctccactgcaacggctgttgatcatcgtcgcggcattcggcctgatggtgctgctgcacctgttcctgacgcgcacggtcacgggttcgacgatcgtcgccatggcgcagaaccgcgaaggcgccgcgctggtcggtatcgacgccatgcgcgtgacactgcttgtgttcgcgatctctggcgcgctggccgccatcgccgccacgctctacgcgccgatcaacctggtctatccgagcatgggcaaccttgtcatcaccaaggcgttcgtgatcatcatcctcggcggcatgggcagcatccccggcgcgatcgtgggcgggctgatcatcggcatggccgaaagcttcggtggcttctacatctccaccgactacaaggacatcatcgccttcctgctgcttgtgatcatcctgtcggtgcgtccgcagggcctgttcgccggcaagaccgcctga

SEQ ID NO: 61373 - protein, 287 aa, Ralstonia metallidurans CH34
MALFFQQFLNGLTLGGVYSLVALGLTLVYGILHVPNFAHGAFYMAGAYVSYYAMTTLGMNYWLAMLAAAVVVAMLSMLADRLVFYPLRHAPEIHDMIAAIGILLFLEAGAQALWGADFHRMPTPYGQMVEIFGLTAPLQRLLIIVAAFGLMVLLHLFLTRTVTGSTIVAMAQNREGAALVGIDAMRVTLLVFAISGALAAIAATLYAPINLVYPSMGNLVITKAFVIIILGGMGSIPGAIVGGLIIGMAESFGGFYISTDYKDIIAFLLLVIILSVRPQGLFAGKTA

SEQ ID NO: 61374 - DNA, 921 bp, Silicibacter sp. TM1040
  CDS (1)..(921): transl_table=11
atgtccacgatacttatcatcgagcaggtgctgaacgggcttcagtccggcgtcatgctctttctcatggcggcggggctgacgctgatttttggggtcatgggcctcatcaatcttgcccatggctcgctctatatggttggggcctttgccgcggcggccgtggcgggcgtcacggggtccttcgtgctggcgcttatcgcggcgcttgcggcggcggcgcttgcgggggctgtgatcgaggttgcggtgatccgcaggctctatgacagcgatcacctcgatcaggtgctggcgacctttgcgctcattctgattttctccgaaggcacgcgctgggtttttggctcttttccgctgtttctggacattcccgatgccttgtcggggccggttaccctgcccggaggtatccagtatccgctttatcgtcttgcgctcatcggggtggggcttctggtggccttcggcctgtggctcctgatcgagcgcacccggatcggcattcagatccgtgcgggcgagaacgaccgagagatgattgccgccctgggtgtggacatctccaagctctatacgctggtctttgcccttggcgccgcgttggccggtcttgcgggggcgctggttggtgcgatccagtcggtgcaggtcggcatgggcgagccggtgctgatccttgccttcgtcgtgatcgtgatcggcggtatcggatccatcaaaggggcctttatcggcgcattgctggtggggctcacggatacattggtcgggatcttcctgcccgaagtgctcaaactctttatggacgcggcccccgcaacatctgccggatcgtcgatcgcctcgatgtcgatctacatcctgatgagccttgtactggtctggcgtccctctggcctgttcggagcccgcgcatga

SEQ ID NO: 61375 - protein, 306 aa, Silicibacter sp. TM1040
MSTILIIEQVLNGLQSGVMLFLMAAGLTLIFGVMGLINLAHGSLYMVGAFAAAAVAGVTGSFVLALIAALAAAALAGAVIEVAVIRRLYDSDHLDQVLATFALILIFSEGTRWVFGSFPLFLDIPDALSGPVTLPGGIQYPLYRLALIGVGLLVAFGLWLLIERTRIGIQIRAGENDREMIAALGVDISKLYTLVFALGAALAGLAGALVGAIQSVQVGMGEPVLILAFVVIVIGGIGSIKGAFIGALLVGLTDTLVGIFLPEVLKLFMDAAPATSAGSSIASMSIYILMSLVLVWRPSGLFGARA

SEQ ID NO: 61376 - DNA, 921 bp, Myxococcus xanthus DK 1622
  CDS (1)..(921): transl_table=11
atggcgcagctcctccagcacctcatcaacggcctggccgccggcaccatctacgcgctcgtcgcgcttggctacacgatggtgtacggcgtcctgaagctcatcaacttcgcccacggcgacgtcatgatggtcggcgtctacatgggctacgccaccgcgttcgcgctcgggcgcgacatgcgcagctccctgctgggcgtggccgtcgtgttcgcggtggccatgctgggctgcgcgctgctcgggttcctcatcgagcgcttcgcgtaccgccccctgcgggagaagccgcgcctcaccgcgctcatcaccgccatcggcatctccttcgcgctgtcctacggcttccaactggacctcggcttcttgccgggcgcggcgccgcgggccttcccggaggtcatcgagccggtggagtggctcgtcatcggtgaccgggacgtggtggtgtggaactggcaggtcatcagcttcggcatcgccgtggcgctgatggtgggcctgcagtacctggtgttccgcacgcgcttcggccgggccatgcgcgcggtgtcctgggaccaccgcgtggcggcgctgatgggcatccccaccgaccgcgtcatcgcgctgacgttcatgctgagcagcgcgctggcggcgggcgccggcctgctctacgccatcaaggacacgtcggtgagcccgctgatgggcctgtacgtgggcctcaaggccttcgtggcggcggtgattggtggcatcggccatgtgccgggcgccgtggtgggcggcctggtgctgggcctggtggaggagttcgtggtgggctacgcggccagcacctggcgtgacgcggtggccttcggcttcctcatcctggtgctgctggtgaagccgggcggcctcttcggccgcgtcgccgcggagaaggtctga

SEQ ID NO: 61377 - protein, 306 aa, Myxococcus xanthus DK 1622
MAQLLQHLINGLAAGTIYALVALGYTMVYGVLKLINFAHGDVMMVGVYMGYATAFALGRDMRSSLLGVAVVFAVAMLGCALLGFLIERFAYRPLREKPRLTALITAIGISFALSYGFQLDLGFLPGAAPRAFPEVIEPVEWLVIGDRDVVVWNWQVISFGIAVALMVGLQYLVFRTRFGRAMRAVSWDHRVAALMGIPTDRVIALTFMLSSALAAGAGLLYAIKDTSVSPLMGLYVGLKAFVAAVIGGIGHVPGAVVGGLVLGLVEEFVVGYAASTWRDAVAFGFLILVLLVKPGGLFGRVAAEKV

SEQ ID NO: 61378 - DNA, 885 bp, Mycobacterium sp. MCS
  CDS (1)..(885): transl_table=11
atggatgtcctgatcgggcagctggcaacgggattgagcctcggctcgatcctgttgctggccgcgctcgggctctcgctgaccttcggtcagatgggggtcatcaacatggcgcacggcgagttcatcatggccggctgctacaccgcctacgtggtgcagcaggtgttctccagcgccggtgcgtcactgctgatctcgctggtggtcgggttcttcgtcggcggcgccatgggcgccctcctggaggtgaccctgatccagcggatgtatcaccgaccgctggacaccctgctggtcaccttcggggtcgggctgatcctgcagcagatcgccagggacatcttcggcgctcccgcggtcaacgtcgttgcgccgtcgtggctttccggtggggtggagatcctcggcgcggtggtgcccaagacccgcatcttcatcctggtgctggcggtggtgtgcgtggcggtcctggccaccgtgctcaagaccagcccgatgggccggcgcatccgcgcggtggtgcagaaccgtgatctcgcggagaccagcggcatctcatcgcgcaagaccgacatcaccacgttcttcatcggatcgggtctggccgccgtcgccggggtggcgctgaccctgatcgggtcgaccagcccgaccaccggacagagcttcctgatcgacgcattcctcgtggtggtcgtcggtggcctcgggcagatcaaaggaaccgtcatcgcggcgctggcactgggtttcctgaactcgttcatcgagtacaacaccaccgcgtcgctggccaaggtgatcgtcttcgtgatcatcgtgatcttcctgcaggcgcgcccgcagggcctgttcaccgttcggacaaggagtctcgtatga

SEQ ID NO: 61379 - protein, 294 aa, Mycobacterium sp. MCS
MDVLIGQLATGLSLGSILLLAALGLSLTFGQMGVINMAHGEFIMAGCYTAYVVQQVFSSAGASLLISLVVGFFVGGAMGALLEVTLIQRMYHRPLDTLLVTFGVGLILQQIARDIFGAPAVNVVAPSWLSGGVEILGAVVPKTRIFILVLAVVCVAVLATVLKTSPMGRRIRAVVQNRDLAETSGISSRKTDITTFFIGSGLAAVAGVALTLIGSTSPTTGQSFLIDAFLVVVVGGLGQIKGTVIAALALGFLNSFIEYNTTASLAKVIVFVIIVIFLQARPQGLFTVRTRSLV

SEQ ID NO: 61380 - DNA, 891 bp, Rubrobacter xylanophilus DSM 9941
  CDS (1)..(891): transl_table=11
gtgctggtccaggcgctggtcaccgggctgctgctcggcggggtctacagcctcgtctcgatgggcctcacgctcatcttcggggtgctcgacatcctgaacttcgcgcacggggccttcatggcgctcgcgatgtacgcctccttcgtgctggtggcgaacgcggggttcgacccctacctctcgctcttggtctccgtgccgctgctcttcgttctcggggtactcgtgcagcgggtcctgctggcccgggtcatggaccagccgcacgagaaccagctcctgctcaccttcgggctcgcgctgctcatagagaacgcgctcctcatggtcttcacggccacgccgcgcaccgtggaattcccctacgcccagaccggcatacccctggggttcgcgacggttcggggcccgctcgacgtcttcggcgcggtcgccgacctgccacgggtcatagccttcctcggatcgctcgtgatcgccggggggctcttctacctcctgcggcgcaccagcctgggcacggcgatccgggccgtcgccgagaacccggacggggcggcgatggtcgggatagacgtgcggaggatgcacatgatcgccttcgggctcggcaccgcgtgcgtggcggcggcgggcaccctggtcctgccgttcctctcgctgcagcccaccaccggcgagcagttcaacgtcatagccttcgtcgttgtggtgctcgggggtttgggcaacgtggtcggggcgctcgtcggcgggattttgatagggctcgtccaggagctcggcggcgccttcgtgcccggggtggacaagctgttcttcgtgttcgtggtcttcgtcctgacgctcctgctccgcccgcagggcctcttcggggggaagccgtga

SEQ ID NO: 61381 - protein, 296 aa, Rubrobacter xylanophilus DSM 9941
MLVQALVTGLLLGGVYSLVSMGLTLIFGVLDILNFAHGAFMALAMYASFVLVANAGFDPYLSLLVSVPLLFVLGVLVQRVLLARVMDQPHENQLLLTFGLALLIENALLMVFTATPRTVEFPYAQTGIPLGFATVRGPLDVFGAVADLPRVIAFLGSLVIAGGLFYLLRRTSLGTAIRAVAENPDGAAMVGIDVRRMHMIAFGLGTACVAAAGTLVLPFLSLQPTTGEQFNVIAFVVVVLGGLGNVVGALVGGILIGLVQELGGAFVPGVDKLFFVFVVFVLTLLLRPQGLFGGKP

SEQ ID NO: 61382 - DNA, 873 bp, Mesorhizobium sp. BNC1
  CDS (1)..(873): transl_table=11
atgcttgtcactacgatcatcaatggcttggtgcttggcggcacctacgcgctcgtcgccatggggctcaccattcaatacggcatcgcgcgcattatgaatctcgcctatggcgagacaatcatcgccgccgcctttctcgcctttgtcctgaacggggcgcttggcatcgccccgctcccaagcctgctcatagcagcacccgcggggttcgcgctcagctacgtcatttatgggctgatgctgcgccctcttgtccggcgatccgggggaggggcggggctggaggtgaattccattctcgctaccttcggccttctgttcgttatccaaggcatcatgctggttctcttcggcggagattatatcagctacagctacatgaatttcggcgtcgatgttcttggcgcgagcgtggcggccaaccgcctgctcgcactggttcttgccgtcgtcctgggcggcgggctctaccttctcctgacgcgcacgctctggggcactgcccttcgtgcggtggccgttgcgccgcagtccgcgccgctggtcgggatcgacgccaatcgtgctgctcgttttgcctttgccctgggcggggcactggccacctgcggcggcgtcgttatttccatgtatcaaaccttcacggccagctccggcgtgatcttcaccatgaaggcgctgatcgtcgtgatcctagggggtgtgggcaatcttgccggagcgctctcggccggtctcttgcttggcctggtcgaaaccctggtcgccacttatgtgagcccagggctgacgctcgccgccgtctatcacatctttctcggcgttctgctctggcgtccctccggcttgttcgggaaggcgcggcgatga

SEQ ID NO: 61383 - protein, 290 aa, Mesorhizobium sp. BNC1
MLVTTIINGLVLGGTYALVAMGLTIQYGIARIMNLAYGETIIAAAFLAFVLNGALGIAPLPSLLIAAPAGFALSYVIYGLMLRPLVRRSGGGAGLEVNSILATFGLLFVIQGIMLVLFGGDYISYSYMNFGVDVLGASVAANRLLALVLAVVLGGGLYLLLTRTLWGTALRAVAVAPQSAPLVGIDANRAARFAFALGGALATCGGVVISMYQTFTASSGVIFTMKALIVVILGGVGNLAGALSAGLLLGLVETLVATYVSPGLTLAAVYHIFLGVLLWRPSGLFGKARR

SEQ ID NO: 61384 - DNA, 885 bp, Rhodococcus sp. RHA1
  CDS (1)..(885): transl_table=11
atggatgtagtgatcggacagctgttcaccgggttgagtatcggatcgatcctgttgctcgcggcgctggggctgtcgttgacgttcggccagatgggcgtcatcaacatggcccacggcgaattcatcatggccggctcgtacacggcctacgtggtgcagcaggtggtgtcgagcgccaccggttctctgttcatctctctgctcgtcggcttcgtggtcggtggcgcgatgggtgtcctcctcgaggtcaccctcgtcaagcggatgtaccaccggccgctggacacgctgctggtgacgttcggtgtgggattgatcctgcagcagctggcgcgggacgtcttcggtgcgcccgccgtcaacgtcgccgcaccggagtggctctccggtggtgtggagatcctgggcgcggtggtgccgaagacgcgcctgttcatcctggttctggccgtcgttgccgtcgtcgcgctgtcgctggcgatgcagaagtccccgatgggacgccgtatccgcgccgtcgtgcagaaccgtgacctcgcggagaccagcgggatctccagtcgccgaaccgatgtgacgacgttcttcatcggttccggtctggcgggtgtcgcgggtgtggcgctcaccctgatcggctcgacgagcccgaccatcgggcagagctacctcatcgacgcgttcctggtggtcgtggtcggcggcctggggcagatgaagggcgcggtgatcgccgcgttcgcactcggcatcctcaattcgttcgtcgagtactcgaccacggcgtcgatcgccaaggtcatcgtgttcgtggtcatcgtggtgttcctccaggttcggccgcagggcctgttcgccgtcaagacgaggagtctcgtatga

SEQ ID NO: 61385 - protein, 294 aa, Rhodococcus sp. RHA1
MDVVIGQLFTGLSIGSILLLAALGLSLTFGQMGVINMAHGEFIMAGSYTAYVVQQVVSSATGSLFISLLVGFVVGGAMGVLLEVTLVKRMYHRPLDTLLVTFGVGLILQQLARDVFGAPAVNVAAPEWLSGGVEILGAVVPKTRLFILVLAVVAVVALSLAMQKSPMGRRIRAVVQNRDLAETSGISSRRTDVTTFFIGSGLAGVAGVALTLIGSTSPTIGQSYLIDAFLVVVVGGLGQMKGAVIAAFALGILNSFVEYSTTASIAKVIVFVVIVVFLQVRPQGLFAVKTRSLV

SEQ ID NO: 61386 - DNA, 864 bp, Rhizobium leguminosarum bv. viciae 3841
  CDS (1)..(864): transl_table=11
atgaactggcttgataccattctccagggcgtgctgctcggcgggctctatgcgctgtttgcggcgggcttgagcctcgtcttcggcatcatgcggctggtcaacctcgcccatggcgacctgatcgtgcttgccgccttcttgattctgatcctggtgacaacactcgggcttgacccgttcgttgccgccctgatcgcgatgccgttgatgttcgccatcggctggggcctgcaatatttcctgctcaaccgcactctcggcaaggatatcctgccgccgctgcttgtcaccttcggcttgtcgatcgtcatccagaacggcctgctcgaaggattttcggccgatagccgccgtgtttttgccggcagtctcgagagcgcctccgtcaatctaggtcctgtcaccgccggcatcatgccgctgatgaccttcttttccgccgtcgccgtcatcgtctgtctcaaccagctcatctaccgcacctccgtcggccgcgccttccgggcaacctcggacgatccggtgacggcagggctgatgggcattcggccgcagcgcatcttcgcgatggcaacggggctcgccatggtcgtggtgacgatcgctgccctctatctcgggacacgcgccaatttcgatccgacgtcagggccagcgcgactgatctacgccttcgaagcggtgatcatcggcggcctcggctcgctctggggcacgctcgccggcggcatcatcctcggcgttgcccagactgtgggtgccgcgatcaatccggaatggcagatccttgccggccacctggcattcctcgccgttctcctgttcaagccgcgcggccttttcccgcgcgcggtggattga

SEQ ID NO: 61387 - protein, 287 aa, Rhizobium leguminosarum bv. viciae 3841
MNWLDTILQGVLLGGLYALFAAGLSLVFGIMRLVNLAHGDLIVLAAFLILILVTTLGLDPFVAALIAMPLMFAIGWGLQYFLLNRTLGKDILPPLLVTFGLSIVIQNGLLEGFSADSRRVFAGSLESASVNLGPVTAGIMPLMTFFSAVAVIVCLNQLIYRTSVGRAFRATSDDPVTAGLMGIRPQRIFAMATGLAMVVVTIAALYLGTRANFDPTSGPARLIYAFEAVIIGGLGSLWGTLAGGIILGVAQTVGAAINPEWQILAGHLAFLAVLLFKPRGLFPRAVD

SEQ ID NO: 61388 - DNA, 873 bp, Rhizobium leguminosarum bv. viciae 3841
  CDS (1)..(873): transl_table=11
atgctctcgaccatactcgagcaatctgtgaatggaatcgtcacgggttccgtttacgccatcgtcgccgtcggcatgaccatgattttcggcgtgctgagagccatcaattttgctcacggcgaatactacatgctcggcacgttcggggcctggtttgcgatcgattatctcggcctgtcctacgaagtgtcgattgtcgtgggcgttcttgcgacaatcgccgttgcctatgtggtcgggcaactcgtcatgcgccggatggtcggcgcgcccgcggagtcgggcgtgctcgccacccttggcatcgcgctgatcctgcagaacaccatcattctcgtcttcggcggaggctacaagttcttcgccggaggctatatcgaaccggtttccatcctgggcttcagtctggccgagcagcgcattctcattctcgtcgtctgcctgttggtattcatcggcctcgaactgatggtcagctacacccgcctcggaatggcgatgcgcgccgtttcccagaacgtcgagtgctgcagcgtcgtcggcatcgatgtgccacaggtggtgcttcgaaccttcatgctgggggcggccctcgccgcactttcgggtgttctgacggcgccggtcaatgtcagtgtttatggcggcatgggcgagttgatcaccttcaagacgctgccgatcattatcatgggcggtttggggaatgtgcgtggaactttcgtcgcggcgatgatccttggcgttgccgagagcctggtcgccacctatgtcggcttgcaattccgcgacacggtcggcttcgccacgctgatcctgatgctgatgtggcgaccgcatggcctcttttcgacgcaggcgcgcttctag

SEQ ID NO: 61389 - protein, 290 aa, Rhizobium leguminosarum bv. viciae 3841
MLSTILEQSVNGIVTGSVYAIVAVGMTMIFGVLRAINFAHGEYYMLGTFGAWFAIDYLGLSYEVSIVVGVLATIAVAYVVGQLVMRRMVGAPAESGVLATLGIALILQNTIILVFGGGYKFFAGGYIEPVSILGFSLAEQRILILVVCLLVFIGLELMVSYTRLGMAMRAVSQNVECCSVVGIDVPQVVLRTFMLGAALAALSGVLTAPVNVSVYGGMGELITFKTLPIIIMGGLGNVRGTFVAAMILGVAESLVATYVGLQFRDTVGFATLILMLMWRPHGLFSTQARF

SEQ ID NO: 61390 - DNA, 894 bp, Rhizobium leguminosarum bv. viciae 3841
  CDS (1)..(894): transl_table=11
atgctcgacattctgtttatcggcctcagtctcggctcgatccttcttttggtggcgctcggccttgccatcacctacggcgctatgggcgtcatcaacatggctcatggagagatggtcatgatcggcgcctatgtcgccgtcctctccggcatctggctgaaggcaagccttctgcttgcgatcccgctggccttcgtcgtgacggccctgctcggtctgctgatcgagcgggtggttgtgcggcggctttatggccgtctgctggacacgcttctcgccacctgggggatcgccatcctcctgcagcaggccgtgcggctcgaattcggcctgtcctttttcggcattcatgtcgaaggtcttggggccggcctgcagaacgtcccggtgcctgcctacctgcagggcacgttcaggcttgccggcgccgacatcaatgcctaccgcacctttatcatcgccgttaccgccgcgctgacactggcgacgtggttcattctctaccggacggcggccggcatgcaggttcgcgccatcatccggaacccgaaaatggcggcagcctgcggcatcgacgtgaaacgcgtcaacgccatgacatttgcgttcggttccggccttgccggtgttgccggcgtcatgatgtccggcttcaagacggtctttcccgatatgggcacgacaatggtcgtcgacggcttcatggtcgtcgtcaccggcggggtcggtagccttttcggcaccatcctgtcgtcagggctgctcggcgaaatcaatgcgctggtcgccatcgggacgaacgacatcctggcacgtgccgtcgtgttcggggtcgtcattctcgtcattctcgtcaagcccagcgggctgttctcgttcaaggggcgctga

SEQ ID NO: 61391 - protein, 297 aa, Rhizobium leguminosarum bv. viciae 3841
MLDILFIGLSLGSILLLVALGLAITYGAMGVINMAHGEMVMIGAYVAVLSGIWLKASLLLAIPLAFVVTALLGLLIERVVVRRLYGRLLDTLLATWGIAILLQQAVRLEFGLSFFGIHVEGLGAGLQNVPVPAYLQGTFRLAGADINAYRTFIIAVTAALTLATWFILYRTAAGMQVRAIIRNPKMAAACGIDVKRVNAMTFAFGSGLAGVAGVMMSGFKTVFPDMGTTMVVDGFMVVVTGGVGSLFGTILSSGLLGEINALVAIGTNDILARAVVFGVVILVILVKPSGLFSFKGR

SEQ ID NO: 61392 - DNA, 861 bp, Rhizobium leguminosarum bv. viciae 3841
  CDS (1)..(861): transl_table=11
atgctgactattctgttcgacggcatcgcttatggaatgctgctgttcattctcgcctgcggattgaccatcacgcttggattgatgaatttcatcaacctcgcccatggcgctttcgccatggcgggcggctacatcactgtcgtcctgatgaacagctatggcgtttccttctattggtgtttgccgatcgccttcctcgcagtcgcgcttgccggcctggttctggagcgcctgctctaccggcatctctattccaagccgcatctcgatcaggtgctgttttccgtcggcctggtcttcatgtcgattgccggcgcttattatttcatgggcggccagcagcagatgatccagctgccgcaggagctctccggccgctgggatttctacggcgtcggcatcggccgctaccggctcttcatcatcgttgtctgcatccttctgacgatcacgctgcagttcctgctgacgaaaacccgtttcggcagccagctgcgtgccgctgtcgatgacggaagggtcgcccgcgggctcggcatcaatgtctcggcggtcttcgcgctgaccttcgccgtaggctcgggccttgccggcctcggcggcgcgatgggcaccgagattctcgggctcgatccgaattttccgctgaaattcatgatctacttcctgatcgtggtgaccgtcggcggcacgtcctcgataactgggccatttcttgccgccctcctgctcggcgtcgccgatgtcgcgggcaaatattacgtgccgcagattggcgccttcgtcatctacggcgtcatggtcgccgtgcttctcctgcgtccgcacgggctgttctcgcgggagggtggccgatga

SEQ ID NO: 61393 - protein, 286 aa, Rhizobium leguminosarum bv. viciae 3841
MLTILFDGIAYGMLLFILACGLTITLGLMNFINLAHGAFAMAGGYITVVLMNSYGVSFYWCLPIAFLAVALAGLVLERLLYRHLYSKPHLDQVLFSVGLVFMSIAGAYYFMGGQQQMIQLPQELSGRWDFYGVGIGRYRLFIIVVCILLTITLQFLLTKTRFGSQLRAAVDDGRVARGLGINVSAVFALTFAVGSGLAGLGGAMGTEILGLDPNFPLKFMIYFLIVVTVGGTSSITGPFLAALLLGVADVAGKYYVPQIGAFVIYGVMVAVLLLRPHGLFSREGGR

SEQ ID NO: 61394 - DNA, 885 bp, Rhizobium leguminosarum bv. viciae 3841
  CDS (1)..(885): transl_table=11
atgcaacagtttctgcaagtccttatgtcgggcctggcaacgggatcgatctacgcgctggcggcgatcggcttcacgctgctctggcaagctgcgcagacggtcaacttcgcgcagggcgaattcgtcatgctgcccgctttcttcatgctgatggcgcttggggctgggctgccgatgcctttggccattctcgtcgcgcttgcggcttccgttttcgtgctcggctatctgttcaagcggctgatcgtggaaccaatgcaggcgtcgaaagcaggcggaggtcttcccctggtgatagcgaccatggcgttggcgatcctgttgaaggagagcgtcaaggaattctacggggcggaagcgcagccctttccggagctcgtctccggtggcagcctgaacgtcttcggcgcagtcatttcggtcactgacatcgcccatcttttcatttcgctggcggtcgtcgtggctctgacgctgtttctcaaccgcacgagaacgggccgcgccatgcaggcgacagcacagaatcccaacgtggcggaaattctcggcgtggatacgagacgcatggtgctctacacctttctgatcaacgcggcactcgcgtcgctggcatcgttcctgatcacgccgttctatctcgcgaagttctcgaacggggaatatctcggtctcatcgctttcatcgccgcgatcgtcggaggcttcaaccagatccgcggcgcgctcgtaggcggcctgctgatcggcgtgctcgacaatatgacggcaacctacgtgaccgccgaatatcgggcggccgttccgctcgtcctgctcatcgtcatcatcctgtggcggccggaaggcctgctgggtacgcctgaggggaggaaagtatga

SEQ ID NO: 61395 - protein, 294 aa, Rhizobium leguminosarum bv. viciae 3841
MQQFLQVLMSGLATGSIYALAAIGFTLLWQAAQTVNFAQGEFVMLPAFFMLMALGAGLPMPLAILVALAASVFVLGYLFKRLIVEPMQASKAGGGLPLVIATMALAILLKESVKEFYGAEAQPFPELVSGGSLNVFGAVISVTDIAHLFISLAVVVALTLFLNRTRTGRAMQATAQNPNVAEILGVDTRRMVLYTFLINAALASLASFLITPFYLAKFSNGEYLGLIAFIAAIVGGFNQIRGALVGGLLIGVLDNMTATYVTAEYRAAVPLVLLIVIILWRPEGLLGTPEGRKV

SEQ ID NO: 61396 - DNA, 1653 bp, Rhizobium leguminosarum bv. viciae 3841
  CDS (1)..(1653): transl_table=11
atgtatcgcgccataaagattttcctcatcacggtttgcctgacattttcgggtctcgtattttcaggctttgcattttcgggcctgacaatctcgagcgaagtccaggcccaggacgatatccacgtgcttatcgacgcgctcggcgtcggcgacttcccggaacgagaagcggccatcaaagcgctggtcgcttccaaggatccgcatgtcagccagatcctgcagcagttgagcgacggccttctctacgtcaattccgatggcggcccggttctcctccagggcggtaccgatgacgaaccaacctattccgatccgatcaccggcgaagccgttgccgatgtcgatccggatctgatgacgaaggtcaagatcaacaacgcgcttcgcggcgtcatcggcgccgccaccagccagctgacgctgatgagcccggaccgttccgcgcggcttgccgcggcgcagggccttctgaaggatgccgatcccgccaatctcgacctgctgaacacggcgattgcggccgaaaaggacgctgagatcaagaatacgatggaagcggcgcgcgcagtgctgctgctcaagacggatgcgagcgtcgaagacaagaaggctgcaatcggtacgatcgcggcgcgcggcaatcgcgatgcgctgaccatcctcacgaccacactcgaaaccgcgcccgacgacctgaagccggcgatccaggcggatatcagctccatcaatcgcagcctggcgctgtgggatatcgtccagaacatctggtacggattgtctctcggctcggtactgctgcttgccgcgatcggccttgccatcaccttcggcgtcatgggcgtcatcaacatggcgcatggcgaaatggtgatgatcggcgcctacaccacctatgtagtgcaggaatacattacctccgcatttcctgaacttgccgattattcgctggcctttgccgtgcctgcggccttcgtctttaccggcttcgtcggtctggtgatcgagcgcgccgttatccgctatctctacggccggccgctcgaaacgctgctcgccacctggggcgtgtcgctcattctgcagcaggcagtgcgcagcatcttcggcccgaccaaccgcgaggtccgcaatccgacctggatgtccggcgtcttcgatctcggcgggctctccatcacctggaaccgactgtggatcatcgtcttttcgatggtggtctttgtggcgctgctcctgctgctcaagcggtccgccttcggcctgcagatgcgtgccgttacgcagaaccggcgcatggcgtcgtcgatgggcatccgcaccggttgggtcgatgccttcaccttcgcgctcggctcgggcattgccggcattgccggcgtggcgctcagccagatcgacaatgtctcgccgaacctcggtcaatcctacatcatcgacagcttcatggtcgtcgtcttcggcggtgtcggcaatctctggggtacgctggtcggcgcactctcgctcggcgtcgtcaacaagttcctcgagcccttcgccggcgccgtgctcggcaagatcctggtgctcgtcctcatcattctcttcatccagaagcgtccccgcgggctcttcgcactcaaaggaagggcggtggaagcatga

SEQ ID NO: 61397 - protein, 550 aa, Rhizobium leguminosarum bv. viciae 3841
MYRAIKIFLITVCLTFSGLVFSGFAFSGLTISSEVQAQDDIHVLIDALGVGDFPEREAAIKALVASKDPHVSQILQQLSDGLLYVNSDGGPVLLQGGTDDEPTYSDPITGEAVADVDPDLMTKVKINNALRGVIGAATSQLTLMSPDRSARLAAAQGLLKDADPANLDLLNTAIAAEKDAEIKNTMEAARAVLLLKTDASVEDKKAAIGTIAARGNRDALTILTTTLETAPDDLKPAIQADISSINRSLALWDIVQNIWYGLSLGSVLLLAAIGLAITFGVMGVINMAHGEMVMIGAYTTYVVQEYITSAFPELADYSLAFAVPAAFVFTGFVGLVIERAVIRYLYGRPLETLLATWGVSLILQQAVRSIFGPTNREVRNPTWMSGVFDLGGLSITWNRLWIIVFSMVVFVALLLLLKRSAFGLQMRAVTQNRRMASSMGIRTGWVDAFTFALGSGIAGIAGVALSQIDNVSPNLGQSYIIDSFMVVVFGGVGNLWGTLVGALSLGVVNKFLEPFAGAVLGKILVLVLIILFIQKRPRGLFALKGRAVEA

SEQ ID NO: 61398 - DNA, 903 bp, Rhizobium leguminosarum bv. viciae 3841
  CDS (1)..(903): transl_table=11
atggagtatttcgtccagcagctcttaaacgggctgacgctcggatccatctatggcctcgtggctattggctatacgatggtttacggcattatcggcatgatcaatttcgcccatggcgacatcttcatgctcggtggattcgccgctcttatcgtcttcctcgtcctcacatccatcttcgcaggtctcccggtggccgttctgctgctggtgatgctggtcgttgcgatgctgatgacgagtttgtggaattggacgatcgagcgggtcgcataccggcccctgcgcgggtccttccgcctggcgccgctgattaccgcgatcggcatgtcgatcacgctgtccaacttcatccaggtgacgcagggtccacgcaacaagccgatcccgccgatggtgagctcggtctaccagttcggcaacatctcggtgtcgctgaagcagattatcatcatcgtgatcaccgcagtgctgctgacgatcttctggtacatcgtcaatcgtacggcactcggccgtgcccagcgcgccactgagcaggatcgcaagatggcggcgctgctcggcgtcaacgtcgaccagacgatctccatcactttcgttatgggtgcggcactcgcagccgtggccgggacgatgtacctgatgtattatggtgtcgcctcgtttaacgacggcttcacgcctggtgtgaaggccttcacggcagctgttctcggcggtatcggttcgttgcccggcgccgtcttcggcggcctccttatcggccttatcgagtcgctgtggtcggcatacttcaccatcgcctacaaggacgtcgcgacctttgcgatcctggctttcgtgttgatcttcaagccgaccggcatcctcgggcggccggaagtcgagaaggtataa

SEQ ID NO: 61399 - protein, 300 aa, Rhizobium leguminosarum bv. viciae 3841
MEYFVQQLLNGLTLGSIYGLVAIGYTMVYGIIGMINFAHGDIFMLGGFAALIVFLVLTSIFAGLPVAVLLLVMLVVAMLMTSLWNWTIERVAYRPLRGSFRLAPLITAIGMSITLSNFIQVTQGPRNKPIPPMVSSVYQFGNISVSLKQIIIIVITAVLLTIFWYIVNRTALGRAQRATEQDRKMAALLGVNVDQTISITFVMGAALAAVAGTMYLMYYGVASFNDGFTPGVKAFTAAVLGGIGSLPGAVFGGLLIGLIESLWSAYFTIAYKDVATFAILAFVLIFKPTGILGRPEVEKV

SEQ ID NO: 61400 - DNA, 879 bp, Rhizobium leguminosarum bv. viciae 3841
  CDS (1)..(879): transl_table=11
ttgaccatggtttcgatcgatcttttgattgaagggcttgtcttcggtgttcttgtcggctgcttttatgcagccgtcagcatcgggctttcaattgcattcgggctgcttgacgtgccccatatcgcccacgcttccttccttgtgctggcagcttacatgaccttcctgctcggatctttcgggatagatccgcttctggccggagcccttatcctgatcccgttcttcttcctgggcgccgctgtctaccgcttctactatgaggcgttcgagaaacggggcaccgatgccggggtacggggcatcgccttcttcttcggcattgccttcattgttcaggtcgtgctttcactcgtcttcggtctcgaccagcaaagtgtcagcgcaccctatatcggcagcagtctcgcgcttggggaaatgcgaataccctggcgcctgattgtcgcgcttgtggtggctgtcggactggttcttagcctaaacctttacctgtccagaaccttccgcggccgcgcgatccgtgcggttgctcaagacccctgggcgttaaaggtgattggggcgaacccggttctgaccaaacagtgggctttcggccttgccactgccgctacagcggtcggcggggcgctcctgatcatcgttagccctgtcgagcccagtctcgacagggtctatatcggcagaactttctgcgtcgtggtcctggcaggcctgggaagcatgaacgggacattgatcgcgggcattttgctgggggtgatggagtcgctcgtactaacagcgttcggagcctcatgggcgcccgcggtcgccttcggacttctcctgctcgtattgggcttgcggccacaggggctttttggacgatga

SEQ ID NO: 61401 - protein, 292 aa, Rhizobium leguminosarum bv. viciae 3841
MTMVSIDLLIEGLVFGVLVGCFYAAVSIGLSIAFGLLDVPHIAHASFLVLAAYMTFLLGSFGIDPLLAGALILIPFFFLGAAVYRFYYEAFEKRGTDAGVRGIAFFFGIAFIVQVVLSLVFGLDQQSVSAPYIGSSLALGEMRIPWRLIVALVVAVGLVLSLNLYLSRTFRGRAIRAVAQDPWALKVIGANPVLTKQWAFGLATAATAVGGALLIIVSPVEPSLDRVYIGRTFCVVVLAGLGSMNGTLIAGILLGVMESLVLTAFGASWAPAVAFGLLLLVLGLRPQGLFGR

SEQ ID NO: 61402 - DNA, 888 bp, Rhizobium leguminosarum bv. viciae 3841
  CDS (1)..(888): transl_table=11
atgacgatgatcttcggcattcccctgcaggcgctgttcggccagctgctgatcggcctgatcaacggctcgttctacgcgctgctcagcctcggcctcgccatcatcttcggcctgcttagggtgatcaacttcgcccatggcgcgcaatatatgctcggcgccttcgtcgcctatctgctgctgacctatgccggcatcggctactggccgtcattgatcctggcgcccgttatcgtcggccttgcgggtgcaatcatcgagcggctgttcctgcgccggctctacgatctcgatccgctctacggcctgctcttcaccttcgggctggcgctcgcggtcgagggcaccttccgttatctctacggctcttccggccagccctatgcaacgccagcggcccttgccggcggggcgaacctcggcttcatgttcctgccgatctatcgcggctgggtggtggtcgtctcgctcgtcgtctgcctcggcacatggctgctgatcgagaagaccaaactcggggcttacctgcgtgccgccaccgaaaacgccgtgctggtgcaggtcttcggcgtcaacgtgccggtgctgttgacgctcacctacgcgctcggcgccggtctcgccgcctttgccggcgtgctggcggcgccgatctaccaggtctcgccgctgatgggctcgaacatgatcatcgtcgtcttcgccgtcgtcgtcgtcggcggcatgggatcgatcatgggcgcgatcatcaccggttatgtgctcggcattgccgagggcctgaccaaggtcttctatcccgaggcgtccaacatcgtgatcttcgtcatcatggcgatcgtgcttctcatcaggcccgcgggcctcttcggacgggatgcttga

SEQ ID NO: 61403 - protein, 295 aa, Rhizobium leguminosarum bv. viciae 3841
MTMIFGIPLQALFGQLLIGLINGSFYALLSLGLAIIFGLLRVINFAHGAQYMLGAFVAYLLLTYAGIGYWPSLILAPVIVGLAGAIIERLFLRRLYDLDPLYGLLFTFGLALAVEGTFRYLYGSSGQPYATPAALAGGANLGFMFLPIYRGWVVVVSLVVCLGTWLLIEKTKLGAYLRAATENAVLVQVFGVNVPVLLTLTYALGAGLAAFAGVLAAPIYQVSPLMGSNMIIVVFAVVVVGGMGSIMGAIITGYVLGIAEGLTKVFYPEASNIVIFVIMAIVLLIRPAGLFGRDA

SEQ ID NO: 61404 - DNA, 915 bp, Pseudomonas aeruginosa UCBPP-PA14
  CDS (1)..(915): transl_table=11
atggacggcatcttcctccagcaaatgatcaacgggctgaccctcggctcggtctacggcctcatcgccatcggctacaccatggtctacggcatcatcggcatgatcaacttcgcccacggcgaggtgtacatgatctccgcctacctgtcggccatcgcccttgccctgctggccttcttcggcctgcagaacttcccgctgctgatcctcggcaccttgctgttcaccgtgctggtgacctgcacctacggctgggtgatcgagcgcatcgcctacaagccgctgcgcaactccacgcgcctggcgccgctgatctcggcgatcggcatgtcgctgatcctgcagaactacgtgcaggtggcacagggaccgcgccagcaggggatcccgaccctgctcgacggcgccctgaaattccacgtcggcgacggtttcgtccagctcacctacaccaagctgttcatcctgatcgcttcgctgatcggcatggcagtgctgacctacgtgatccgctacaccaagctcgggcgcatgtgccgggcgacccagcaggaccgcaagatggcttcgatcctggggatcaacaccgaccgggtgatctcctacgtgttcgtcatcggcgccgcgatggccgccctggccggggtgctgatcaccatgaactacggcaccttcgacttctacgccggcttcatcatcggcatcaaggcgttcaccgcggcggtgctcggcggcatcggctcgctgcccggggcgatgctcggcggcctggtgctgggagtggccgaggcgcagttctcggggatggtcaacaccgactacaaggacgtgttcgccttctcgttgctggtactgatcctgatcttccgtccccagggcctgctcggccgcccgcagatcgccaaggtgtaa

SEQ ID NO: 61405 - protein, 304 aa, Pseudomonas aeruginosa UCBPP-PA14
MDGIFLQQMINGLTLGSVYGLIAIGYTMVYGIIGMINFAHGEVYMISAYLSAIALALLAFFGLQNFPLLILGTLLFTVLVTCTYGWVIERIAYKPLRNSTRLAPLISAIGMSLILQNYVQVAQGPRQQGIPTLLDGALKFHVGDGFVQLTYTKLFILIASLIGMAVLTYVIRYTKLGRMCRATQQDRKMASILGINTDRVISYVFVIGAAMAALAGVLITMNYGTFDFYAGFIIGIKAFTAAVLGGIGSLPGAMLGGLVLGVAEAQFSGMVNTDYKDVFAFSLLVLILIFRPQGLLGRPQIAKV

SEQ ID NO: 61406 - DNA, 924 bp, Magnetococcus sp. MC-1
  CDS (1)..(924): transl_table=11
atgaatagctacgttatcggacaacaactggtcaatggagtggtgctcggctccatctatggccttatcgcggtgggctataccatggtctacggcatcattggtatgatcaattttgcccatggcgaaatttatatgatctctgcctacctgaccgccattaccttggccgtgcttacaacatggggcgtcgattcggtctttctggccctcatcctgacccttatcagcagcatcgcttttaccgccctgtatggctggacagtggagcgtatcgcctatcgacctctgcgccgctccacccgtttggcccccttgatttctgccattggcatgtcattggttttgcaaaactatgtacgtttggcccaaggcagtcgtaaccaaggggtgcccagtttgatggaaggtaatctgcgtctggtgggggagaaccccgagcagtttgtgcaagtaacctatgtgcagttggtgatcgtgctcaccgctttgatcagtatgggtattttaagctggacgatccaaaaaaccgcgctggggcgtgcgtgccgggctacgcaacaagatcgtgttatggcagaactgctgggggtgaatacggatcgtattatctctgtggtgtttgtgctgggggcatccatggctgctgtggcgggggtgctggttacggtcaactatggctcgtttgattttcatgtggggtttgtcaccggcattaaagcctttacggcggcggtgctggggggcatcggctccctacctggggcgatgttgggggggttgattttggggctgtccgagtcgttttttgcggggtttgtcaacagtgactataaggatgtctttgcgttttctatcctggtattggtgttgatttttaaacccagtgggttgttgggtcgccctgctgtcgaaaaggtataa

SEQ ID NO: 61407 - protein, 307 aa, Magnetococcus sp. MC-1
MNSYVIGQQLVNGVVLGSIYGLIAVGYTMVYGIIGMINFAHGEIYMISAYLTAITLAVLTTWGVDSVFLALILTLISSIAFTALYGWTVERIAYRPLRRSTRLAPLISAIGMSLVLQNYVRLAQGSRNQGVPSLMEGNLRLVGENPEQFVQVTYVQLVIVLTALISMGILSWTIQKTALGRACRATQQDRVMAELLGVNTDRIISVVFVLGASMAAVAGVLVTVNYGSFDFHVGFVTGIKAFTAAVLGGIGSLPGAMLGGLILGLSESFFAGFVNSDYKDVFAFSILVLVLIFKPSGLLGRPAVEKV

SEQ ID NO: 61408 - DNA, 1647 bp, Magnetococcus sp. MC-1
  CDS (1)..(1647): transl_table=11
atggatagatccaccatgcaacgatccctgaaattttttctgtggtgtgccttgacgtgggcggtttgcttgacggcacccctggcgaaggcagccagccaagatgatctgcaacgtctgaataatcgatctttttctgttaaaatgcaggcgattaaagaacttggtgccagtggtgatcgggccttagtgcccgcgctgaccgctttgttagagggcaacctctatggacgtaaaaccgataacatggtggtgatcggccaaaaaagcggacaagtttatctattgattgatccattaagcggtcaagagctggggcaggtgcaggagagtgcgctggccaagattggcatcaacaaccggctgcggcggttgattcggggtgccctggggggcttgaccctgctgagcaaagatcctgccctacgcttacaggcggcccaatccatttttaatagtcgggatgtggagctgctggagagcctgcaacaggccattgcccgcgaagaggatgccaccattctggctgctatgcagaaggcccaagcggtgattgagctgtttcatggcgagagcttggaaaaacgcaaagcagccgtgattttgctggaacaggtgggtgggcaggatgtgcgggcgctgctctcgcaactggtgcaggagccggatctgcacaacaaccacgcggagctgtatggtgtggtcaaggctgcgctggagcgggttgaggagcgcttaagactatggaacatggtgggtagcctgttccagggcatcagcctgggttcggtgttgctgttggcggcggtggggttggccatcacctttggggtgatgggggtgatcaatatggcccatggtgagctggttatgttgggggcctataccacctttgtggtacaggatctgtttcgggcctatctgccggattggttggattggtcgttgctggtggcggtgcccatggcctttttggtctctggtctgtttggggtggccattgaacggggcattatccgctttttgtatgggcgccccctggagaccctgttggcgacctggggcttgagtttaatgctgcaacagttggtgcgcaccctgtttggacccaccaaccaagaggtcagcaacccttcatggatgagtggggcgattcaaaccagtcagggcttggtgctcacctataaccgtatcaccatcattctcttttcgctggcggtgatcggttccttggcgttggtgttgcgcaaaacctcgctgggtttgcagatgcgcgcggtgacgcaaaaccgccgcatggccggctccatgggcatccgtaccggctgggtggacgcgctaacctttggtttgggggcgggtattgcgggcatcgcgggggtggcgcttagtcaggtggacaatgtttcacccaacctggggcagagctacattattgatagctttatggtggtggtgtttggtggggtgggcaacctgtggggcactctggtgggggcctttagcttgggggtgttgaataaatttatggagcccttggcaggggcggtgctgggtaaaattttggtgctggtcggcattattctgttcattcaaaaacgccccaggggattgtttgccctaaaagggcgggcggtggaggcataa

SEQ ID NO: 61409 - protein, 548 aa, Magnetococcus sp. MC-1
MDRSTMQRSLKFFLWCALTWAVCLTAPLAKAASQDDLQRLNNRSFSVKMQAIKELGASGDRALVPALTALLEGNLYGRKTDNMVVIGQKSGQVYLLIDPLSGQELGQVQESALAKIGINNRLRRLIRGALGGLTLLSKDPALRLQAAQSIFNSRDVELLESLQQAIAREEDATILAAMQKAQAVIELFHGESLEKRKAAVILLEQVGGQDVRALLSQLVQEPDLHNNHAELYGVVKAALERVEERLRLWNMVGSLFQGISLGSVLLLAAVGLAITFGVMGVINMAHGELVMLGAYTTFVVQDLFRAYLPDWLDWSLLVAVPMAFLVSGLFGVAIERGIIRFLYGRPLETLLATWGLSLMLQQLVRTLFGPTNQEVSNPSWMSGAIQTSQGLVLTYNRITIILFSLAVIGSLALVLRKTSLGLQMRAVTQNRRMAGSMGIRTGWVDALTFGLGAGIAGIAGVALSQVDNVSPNLGQSYIIDSFMVVVFGGVGNLWGTLVGAFSLGVLNKFMEPLAGAVLGKILVLVGIILFIQKRPRGLFALKGRAVEA

SEQ ID NO: 61410 - DNA, 876 bp, Mycobacterium smegmatis str. MC2 155
  CDS (1)..(876): transl_table=11
atgaccggactcgtgcaagcgcttgtcggcggaatcctcatcggtgggctgtacgtcgccatcagcatcgggttctcactgtcattcggtgtcctcgacgtcgtcgacctcgccgtcgggatgtgggtggtgatcggcgcgttcgccgcgatcgtggtcagcgaggccaccggcatcgacgcgttcgcgctgctgccggcggtgttcgtggtgttcgggatcgtggggtggatcatcgcgccgctgatctaccgggtgcggatgagcaagtacgcgctgcccgcgctgatgggcctggcgttcacgttcggcctggcgacgctgatccgcggcggcctgctcacggtgttcggctacaacccgcgcaccgtgcccaccagcctgttcaccggcaacgtctcggtgctgggcatcaccgcacccatgatccgggtggccgggttcgggttcgcggtgatcgccacggccctgttcctggcgttcctgttctacacccgcacgggcctggccatccgcgccaccgcgcagagcaaagaaaacgcgggcctgatgggcatcgacgtcagacgcatcagcagcctggtctacgcgatctacacaggcctcaccgccatggccggcgcactgctcggcgcgatctacgcgatgacacccgaagtcgggctgcgctacacgctgttcgcgttcttcgtcgtggtgctcgccggtctgggctcggtggtcggggtgatggtcgcgggcctgttcctcggcatcctgcagtccctggtcacgacgtatgtcggcgccaactacaccctgctggtggtgttcgcggtgctgttcgtcgcgctgctgttgttcccgcagggcatctcccggcgaggcatcgcatga

SEQ ID NO: 61411 - protein, 291 aa, Mycobacterium smegmatis str. MC2 155
MTGLVQALVGGILIGGLYVAISIGFSLSFGVLDVVDLAVGMWVVIGAFAAIVVSEATGIDAFALLPAVFVVFGIVGWIIAPLIYRVRMSKYALPALMGLAFTFGLATLIRGGLLTVFGYNPRTVPTSLFTGNVSVLGITAPMIRVAGFGFAVIATALFLAFLFYTRTGLAIRATAQSKENAGLMGIDVRRISSLVYAIYTGLTAMAGALLGAIYAMTPEVGLRYTLFAFFVVVLAGLGSVVGVMVAGLFLGILQSLVTTYVGANYTLLVVFAVLFVALLLFPQGISRRGIA

SEQ ID NO: 61412 - DNA, 885 bp, Mycobacterium smegmatis str. MC2 155
  CDS (1)..(885): transl_table=11
atggatatcctgatcggccagctggcaacaggattgagcctcggctcgatcctgttgctggccgcactcggcctttctctgacgttcggccagatgggcgtcatcaacatggcgcacggcgagttcatcatggccggctgttacaccgcgtacgtggtccagcaggtgatctcgagtgccggtgcgtccctgctcatctcgctggtggtgggattcctcgtcggtggcgcgatgggtgccctgcttgaggtgacgctgatccagcgcatgtaccaccgcccgctggacaccctgctcgtcaccttcggcgtcgggctgatccttcagcagatcgcgcgcgacatcttcggtgcccccgcggtcaacgtcgtggccccctcctggctgtcgggcggcgtcgagatcctcggcgccgtcgtgcccaagacccgcatcttcatcctggtcctggccgtcgtgtgtgtcgcggtgctcgcgaccgtgctcaaggcgagccccatgggccgtcgtatccgggcggtggtgcagaaccgcgatctcgcagagaccagcggcatctcgtcccgcaagaccgacatcacgacgttcttcatcggatccgggctcgcggctgtcgccggtgtcgccctgacactcatcggttcgaccagcccgaccatcggccagagcttcctcatcgacgcgttcctggtggtcgtggtgggcgggctcggccagatcaagggcaccgtcatcgcggcgctgacgctgggctttttgaactccttcatcgagtacaacaccacggcgtcgctggccaaggtgatcgtgttcgtgatcatcgtgatcttcctgcaggtgcgcccgcagggcctgttcaccgtgcggacaaggagtctggtatga

SEQ ID NO: 61413 - protein, 294 aa, Mycobacterium smegmatis str. MC2 155
MDILIGQLATGLSLGSILLLAALGLSLTFGQMGVINMAHGEFIMAGCYTAYVVQQVISSAGASLLISLVVGFLVGGAMGALLEVTLIQRMYHRPLDTLLVTFGVGLILQQIARDIFGAPAVNVVAPSWLSGGVEILGAVVPKTRIFILVLAVVCVAVLATVLKASPMGRRIRAVVQNRDLAETSGISSRKTDITTFFIGSGLAAVAGVALTLIGSTSPTIGQSFLIDAFLVVVVGGLGQIKGTVIAALTLGFLNSFIEYNTTASLAKVIVFVIIVIFLQVRPQGLFTVRTRSLV

SEQ ID NO: 61414 - DNA, 873 bp, Nocardioides sp. JS614
  CDS (1)..(873): transl_table=11
gtggacttcctgcaacaggtcatcaacggcctgaccatcggcagcgtctacgccctggtcgcaatcggcttctccgtcgtgtacggcgccctcgggctggtcaacttcgcccacggcgacatcctgatggccggttcgttcgtggcgttcggggtgcacacctccttcgacgtgccgatcgtgctggcctgcctggtcggcatcggtgccgggatcctgctcgcggggatcgtcgaggaggtggccgtccgcccggtgctcaaggcccacctgctgatcccgatgatgaccacgctgggcatgggcctggtcatccgcaacgtcgtcgagctgaagtggggatcgggcaccctcccgttcccgtcgttcgccggctcgggcttcatcgagatcggcggactccagatcgcgcgggccgccgtcgtcacgctggtcgtcgcggtggtgacgctcgtcgggttcgcggccttcctgcgctacacgaggcccggcttcgcgatccgggtcgtggcccaggacatgaccgccgcccggctgatgggcgtcggtgtgaaccgcacgatcttcgcggtctacggcgtcggtggcgcgctcggggtgatcggcgggctgctctacgcgaacaccctcgaggtcgtctacctcgggatgggcttcccgatcctgctcaaggggttcgccgcggccatcgtcggcggcatcgggaacctccagggcgccctcatcgggggactggtgctggggatcctcgaggcgacggtcggtccgtccgccgggtcctaccgcgacgcgatcgccttcttcctgctgatcgtcattctgctcgtccgccccgccggcctgctcggcgcccgtgtccaggagcgtgtgtga

SEQ ID NO: 61415 - protein, 290 aa, Nocardioides sp. JS614
MDFLQQVINGLTIGSVYALVAIGFSVVYGALGLVNFAHGDILMAGSFVAFGVHTSFDVPIVLACLVGIGAGILLAGIVEEVAVRPVLKAHLLIPMMTTLGMGLVIRNVVELKWGSGTLPFPSFAGSGFIEIGGLQIARAAVVTLVVAVVTLVGFAAFLRYTRPGFAIRVVAQDMTAARLMGVGVNRTIFAVYGVGGALGVIGGLLYANTLEVVYLGMGFPILLKGFAAAIVGGIGNLQGALIGGLVLGILEATVGPSAGSYRDAIAFFLLIVILLVRPAGLLGARVQERV

SEQ ID NO: 61416 - DNA, 864 bp, Nocardioides sp. JS614
  CDS (1)..(864): transl_table=11
gtgagcgacctcctgctgaccctcctgctcggcctcatgcaggcgggcctctacacgctcgtcggcctgggcctgacgatcaccttcggcgtgacccacatcctgaacttcgcccacggcgagttcgtgacgatcggcgcgtactcgctgatcgggttcgtggtcctgctcccgacggcgctcgcgatcccgctggccgtcgccgtggcggtcggcgtctccgccgtcatctacctcctcggcttcgtcttcacgatcggcgaccacctacaggggctggccgtctcgctcggcctgctgctgttcagcgagaacctcttcctccagatgttctcggccatcccgcgcaccggtccccggatcgagggcaccctcgggctgcccggcgacaaccagatcgcctgggcgcggatcgtcgtgatcctgctgaccgcgacgatcgtggtggtcgccgcgatcgcgctgaagcgaacctgggtcggactggccctgcgggccaccggcgacgagcggttcgccgcgtccacgctcgggctctccgcccgtcgggtaggcctctacgccttcctggtcgccggggccctcgccgcgatcgcgggtatctgcatcgcctcggtcacgccggtcacccccacgatcgggatgagctacctgctgaccgggttcgtggtcgcgatcatcggaggactcggctcgcccatgggcgtcctggtcgcctccctgctgctcggcctcgtcgaggcgttcaccgctcggtacgccgacccgtcgatgaccagcgtctacacgttcacggcgatgatcgtcgtgctgctcctgatgccgcagggcatcttcaaccggaagcaggtccgagccggatga

SEQ ID NO: 61417 - protein, 287 aa, Nocardioides sp. JS614
MSDLLLTLLLGLMQAGLYTLVGLGLTITFGVTHILNFAHGEFVTIGAYSLIGFVVLLPTALAIPLAVAVAVGVSAVIYLLGFVFTIGDHLQGLAVSLGLLLFSENLFLQMFSAIPRTGPRIEGTLGLPGDNQIAWARIVVILLTATIVVVAAIALKRTWVGLALRATGDERFAASTLGLSARRVGLYAFLVAGALAAIAGICIASVTPVTPTIGMSYLLTGFVVAIIGGLGSPMGVLVASLLLGLVEAFTARYADPSMTSVYTFTAMIVVLLLMPQGIFNRKQVRAG

SEQ ID NO: 61418 - DNA, 885 bp, Nocardioides sp. JS614
  CDS (1)..(885): transl_table=11
atgaccgagctgctccagaacctcctcctcggcctgctgctgggcggcgtgtacgccctcgcggcgagtgggttgaccctgatcttcggtgtcatgcgggtgatcaacatcgcccacggcgcgttcctgatcctggcctcgttcatcacctactggctgtgggacgcgttcggcatcgacccgttgctcgcgatcgtgatcacgaccccgatcgtgttcgcgctcgggtgggtcacctacaaggtcgtcgtgtccccgatccgcacggcgccgatggcgtcgacggtgctgctcaccttcgggctggcgctggtggtcgagggtgcgatgggggagatctggggcaacaactcgacggcggtccggccgtcgtacgccgatgagtccttcatcttcgggggtctgttcctcccgaaggcccaggtgtacggcggcctgatcgcggtcgtggtcctcgtcctgctgtggggcgtgctgaccaagacgtggctgggccgggcgatccgcgcggcggcgacgaacccgtcgtccgcagagctggtcggcatcaaggtgagcgcggtcgcggctctcgtgttcgcgctcgggatcgcggccgccggtgccggcggtgcgatcaccggggtgctctacccgttcgtccccggctcgcactaccagtggatcgcgcggttgctcgcgatcgtggtgctcggcggcctcgggagcctcaacggcgcggtcctcggcgcgctcatcttcggcatcgccgagacgctgaccgccgcctacgtgtcgccctcctgggcaaccgccgtcccgtacgccatcgtgttcctggtgctgctgatccgcccgcagggactgctcggcacccgactccgagaggatgcagtagcagcatga

SEQ ID NO: 61419 - protein, 294 aa, Nocardioides sp. JS614
MTELLQNLLLGLLLGGVYALAASGLTLIFGVMRVINIAHGAFLILASFITYWLWDAFGIDPLLAIVITTPIVFALGWVTYKVVVSPIRTAPMASTVLLTFGLALVVEGAMGEIWGNNSTAVRPSYADESFIFGGLFLPKAQVYGGLIAVVVLVLLWGVLTKTWLGRAIRAAATNPSSAELVGIKVSAVAALVFALGIAAAGAGGAITGVLYPFVPGSHYQWIARLLAIVVLGGLGSLNGAVLGALIFGIAETLTAAYVSPSWATAVPYAIVFLVLLIRPQGLLGTRLREDAVAA

SEQ ID NO: 61420 - DNA, 867 bp, Azoarcus sp. BH72
  CDS (1)..(867): transl_table=11
atggatttcacgacgttcctgatacagatactgaactcgctgcagtacggcctgctgctgttcctggtggcaagcgggctgacgctggtgttcggcatcatgggcatcatcaacctggcgcacggcagcttctacatggtcggcgcctacctcgcgtttgcgctcaccagcctcaccggcaacctgatgctcagcatcgcgctcggcattccgctcgccttcgtgttcggcgcgctgctcgagtggctgctgttcgcccacctctacaagcgcgaccacctcgagcaggtgctgctgacctacggcctcatcctgatcttcgaggaactgcgcagcctcgcggtcggcgacgacgtgcacggtgtcgacatcccggcgctgttctccgcctccatcccgctgtcggacacgctgtcctatccggtgtaccgcatcctcatctcggtggtgtgcctggtgctggccggcgcgctgtggtggctgatgcagcgcacccggctgggcatgatgatccgcgccggcagccacgaccgcgacatggtccaggcgctcggcatcgacatcaacctgctctaccgcacggtgttcgcgctcggcgtggtgctggcggcgctggccggcatgctggcggcgccgatctcttcggtgtatccgggcatgggctccagcgtgctcatcatctccttcgtcatcgtcgtcatcggcggcatcggctcggtgtggggcgcgctcgtcgccgcgctgctgatcggctttgccgacaccttcggcaaggtgctgctgcccgatctcgccgggctggcggtgtacctggtcatggcggtggtgctgttgtggcgccccgaaggcatcttcaagaaggggtaa

SEQ ID NO: 61421 - protein, 288 aa, Azoarcus sp. BH72
MDFTTFLIQILNSLQYGLLLFLVASGLTLVFGIMGIINLAHGSFYMVGAYLAFALTSLTGNLMLSIALGIPLAFVFGALLEWLLFAHLYKRDHLEQVLLTYGLILIFEELRSLAVGDDVHGVDIPALFSASIPLSDTLSYPVYRILISVVCLVLAGALWWLMQRTRLGMMIRAGSHDRDMVQALGIDINLLYRTVFALGVVLAALAGMLAAPISSVYPGMGSSVLIISFVIVVIGGIGSVWGALVAALLIGFADTFGKVLLPDLAGLAVYLVMAVVLLWRPEGIFKKG

SEQ ID NO: 61422 - DNA, 933 bp, Azoarcus sp. BH72
  CDS (1)..(933): transl_table=11
atggaaaccctcatccagcagacgatcaacggcctggtgatcggcagcgtgtacgcgctgatcgcactcggctacaccatggtttacggcattctcggcctgatcaacttcgcccacggcgacgtactgatggtgggcgcgatgaccgcgctgcagaccatgctgttcctgatgggggtggcgcccggcatgtcgccgctggtcatgctgacgatcgcgctgctggtggcgattccggtgtcaatgctgatcggcttcacgatggagcggctggcctaccgacgcttgcgcaacgcgccgcggctggcgccgctgatcaccgcgatcggcatgtccttcctgctgcagacgatcgcgatgatcatctggggccgcaactaccacacctttccgcaactcatctcgaccacgccgctgcagccggtcgaaggcgtgttcgtcaccccggtgcagatcgtcatcgtgatcgtgtcggcgctgctgatgatcggcctgacgctgctggtcagccgcacccgcatcggccgcgcgatgcgcgccaccgccgaaaaccaccgcaccgccagcctgatgggcgtggataccaacgccgtcatcgccttcaccttcgtcattggcgccgggctggccgcggtggcgggcgtgatgtacgccagcaactacggcatcgcccactacggcatgggcttcatgccggggctcaaggccttcaccgccgcggtgctcggcggcatcggcaacctcggcggcgcgatggtgggcggcgtggtgctcggcctggtcgaatccttcggcgccggctacatcgagcacctcaccttcggtttcctcaactcgtcctaccaggacatcttcgccttcctgatcctcggcctggtgctgatcttccggcccaccgggctgctcggcgaacgcgtgtccgaccgcgcgtaa

SEQ ID NO: 61423 - protein, 310 aa, Azoarcus sp. BH72
METLIQQTINGLVIGSVYALIALGYTMVYGILGLINFAHGDVLMVGAMTALQTMLFLMGVAPGMSPLVMLTIALLVAIPVSMLIGFTMERLAYRRLRNAPRLAPLITAIGMSFLLQTIAMIIWGRNYHTFPQLISTTPLQPVEGVFVTPVQIVIVIVSALLMIGLTLLVSRTRIGRAMRATAENHRTASLMGVDTNAVIAFTFVIGAGLAAVAGVMYASNYGIAHYGMGFMPGLKAFTAAVLGGIGNLGGAMVGGVVLGLVESFGAGYIEHLTFGFLNSSYQDIFAFLILGLVLIFRPTGLLGERVSDRA

SEQ ID NO: 61424 - DNA, 858 bp, Azoarcus sp. BH72
  CDS (1)..(858): transl_table=11
atgtccgccttcgcccaggtccttgccagcggcgttgccacgggctgcgtgtatgggctggtggcgctgtccttcgtgctgatctacaaggcgagcgacaccgtcagcttcatgcagggcgaactgctgatggtgggcgccttcgccgcggtcggcctgcatgcggcgggggtgccgctcgcgctcgccggcgtgctggccgtgctcgcggtggcgctgctcggcgccgcgctggagcggctggcgctgcggcgcgcactcggccagccccatctggttgcggtgctgctgaccttcggcttcggactggtgatgcggggcgcggtcgcgagcgtgcctgccgccacccacgagatgcaccgcctgccgctgcccgagcaggtgctggtattgggtggcatcgtgttcgcatccagccacctcgcggtgatcgccgccaccgcgctgctggtgctgctgctggcgctgttcttccgccacactcgtgcggggctggcgttgcgcgcctgcgccgaggatgcgcgcgtcgccgcgctgatgggggtgccggtggcgcgcatgcacaccctggcgtgggcgctgggcgccggactggcggcctttgccgggctgctgctcgcgccgatctcctttgtccatctcgacatggggctggtggcgctgaaagcctttccggccgcggtgctcggcggcctttacagcctgccgggcgcgcttgcgggcggcgtcttcatcggcgtggccgaggcgctggccgggctggcgctgcctgagggctacaaggacgcggtgccttacgcgctgttgatgctggcgctgctggccttcccgcgcgggttcggcgggcgcgcggcatga

SEQ ID NO: 61425 - protein, 285 aa, Azoarcus sp. BH72
MSAFAQVLASGVATGCVYGLVALSFVLIYKASDTVSFMQGELLMVGAFAAVGLHAAGVPLALAGVLAVLAVALLGAALERLALRRALGQPHLVAVLLTFGFGLVMRGAVASVPAATHEMHRLPLPEQVLVLGGIVFASSHLAVIAATALLVLLLALFFRHTRAGLALRACAEDARVAALMGVPVARMHTLAWALGAGLAAFAGLLLAPISFVHLDMGLVALKAFPAAVLGGLYSLPGALAGGVFIGVAEALAGLALPEGYKDAVPYALLMLALLAFPRGFGGRAA

SEQ ID NO: 61426 - DNA, 1968 bp, Acidovorax sp. JS42
  CDS (1)..(1968): transl_table=11
atggctgcgggcttcaaccgcgcgggctgcggtggccctgtgcggcaatggacgactgacatggatatttcggggctgctggcccaactgctcaatggcctggcgggcgcttccacgttgttcctcgtggcggcggggctgtcgctgatcttcggcgtgatgcgcatcgtcaacttcgcgcacggctcgttctacatgctgggcctgtacttggcctatgccctggtggagcgtctgggcgaggccctcggcttctggcctgcgctgctgtgggctccgctggccgtgggcctgctgggcgcggcggtggaggtgctgctgctgcgccgcatctaccgcgcccccgaactgttgcagctgctggccaccttcgccttggtgctggtgatcaaggacgcggcgctatggctctgggggccggaggagctgttcggcccgcgcgcgccgggcctggagggcgcggtggacctgctgggccggcgcttcccggcctacgacctgttcctcatcgccgtggggccgctggtgctggtgctgctcacgctgctgctcacgcgcacgcgctggggcacgctggtgcgcgccgccacgcaggaccgtgagatggtcggtgcgctgggtgtgaaccaggcctggctgttcaccagcgtgttcgcgctgggggccctgctggcaggcctgggcggcgcgctgcagctgccgcgcgagcctgccagcctggaactggacatgctcaccatcggcgccgccttcgtggtggtggtggtgggcggcatgggctcattgcccggcgccttcgtggcggcgttggtgattgccgagctcaaggccgtgtgcatctggctgggcgtggtcgaggttgcgggggtggaggtggcctttccccagctcacgctggtggtggaattcctagtgatggcggccgtgctcatctggcggccctggggcctcatgggccgcccgcaggccgtggcacgtggcgtgggcgcgcccgaggcgccgctgcgccaggcggggcagggtgccacggccgcttggtgcgcgctggtgctgggcctggcgctgctgccgctggcggtggagccgggcagctacgccaccgtgctgttgaccgacatcgcgattgccgcgctgttcgccgccagcctgcattgcattctggggccgggcgggctgcattcgtttggccatgcggcgtacttcggcctgggcgcctacggcgcggcgctgctggtgcgctggctggactggcccatgggcacggcgctgctgctggggccgctggtggcggcggccggtgcgctggtgtacggctggttctgcgtgcgcctgtcaggcgtgtcgctcaccatgctcacgctggcgttcgcgcagatcacctgggccatcgcctaccagtgggacggtttcaccggcggcagcaacggcatcaccggcgtgtggccgccgcagtgggccgcgcagggcgcgggcttctattggttggtgctggcgctggccgtggcgggcatctacctgctgcggcgcatgctgtttgcgccgctgggctgggcgctgcgcgcggcgcgcgactcggcgctgcgggccgacgccattggcatcgacgtgcgcggcgtgcagtgggccgccttcgtggcggcggggctgctggccggtctggcgggggcgctgtacgtgttttccaaaggcagcgtggcgcccgatgcgctgggcgtgtcgcgctcggtggacgggctggtgatggtgctgctgggcggcatgcagcagctggccgggccggtggtgggcgcgggtgtgttcacctggctgcacgacaccgtggcgcgcagtaccgactactggcgcgcgctgctgggcggcatcatgctgctgctggtgctgctgtttcctcaaggaatttcggggtttgcgcagatatggcaagcgcgagcagctattaaaaacaaagcacaggagggcgcgccatga

SEQ ID NO: 61427 - protein, 655 aa, Acidovorax sp. JS42
MAAGFNRAGCGGPVRQWTTDMDISGLLAQLLNGLAGASTLFLVAAGLSLIFGVMRIVNFAHGSFYMLGLYLAYALVERLGEALGFWPALLWAPLAVGLLGAAVEVLLLRRIYRAPELLQLLATFALVLVIKDAALWLWGPEELFGPRAPGLEGAVDLLGRRFPAYDLFLIAVGPLVLVLLTLLLTRTRWGTLVRAATQDREMVGALGVNQAWLFTSVFALGALLAGLGGALQLPREPASLELDMLTIGAAFVVVVVGGMGSLPGAFVAALVIAELKAVCIWLGVVEVAGVEVAFPQLTLVVEFLVMAAVLIWRPWGLMGRPQAVARGVGAPEAPLRQAGQGATAAWCALVLGLALLPLAVEPGSYATVLLTDIAIAALFAASLHCILGPGGLHSFGHAAYFGLGAYGAALLVRWLDWPMGTALLLGPLVAAAGALVYGWFCVRLSGVSLTMLTLAFAQITWAIAYQWDGFTGGSNGITGVWPPQWAAQGAGFYWLVLALAVAGIYLLRRMLFAPLGWALRAARDSALRADAIGIDVRGVQWAAFVAAGLLAGLAGALYVFSKGSVAPDALGVSRSVDGLVMVLLGGMQQLAGPVVGAGVFTWLHDTVARSTDYWRALLGGIMLLLVLLFPQGISGFAQIWQARAAIKNKAQEGAP

SEQ ID NO: 61428 - DNA, 954 bp, Acidovorax sp. JS42
  CDS (1)..(954): transl_table=11
atgaatcttgagtttttcgtgatctccctgctcaacggcgtcagctacggtctgctgctgttcatgctgagttcgggactgacgctgatcttcagcatgatgggcgtgctcaacttcgcgcacaccagtttctacatgctgggcgcgtactttgcgtacaccttgtcgggtgccatcggcttctggcccgcgctggtggtggcaccgctgctggtgggggcgttgggcgcggtcttcgagcgctatgcactgcgccgcgtgcacaagttcggccatgtgcccgagctgctggtcacctttggcctgtcgtacctgatcctggaggtggtgcagctggtgtgggggcgctccaccgtgccctatggcctgcctgcgcaactgcaggggccgctcttcaccctgtacggcacgcagtttcccaagtcgcgctccttcgtcatgctggtggcggtgctgatgctgctgtcggtctggctgctgctcacgcgcacccgcatcgggttggtgatccaggcggcgctcaagcatccgcacatggtggaggccctgggccacaacgtgccgcgcgtgttcatgctggtgtttggcggcggctgcgcgctggcggggctggccggcgtgatcggcggcaatacctacgtgaccgagccggccatggcggcctcggtgggctccatcatcttcgtggtggtggtggtcgggggcatggggtcgctggcgggggcgttcctggcgtcactcatcatcggactggtgcagacctttgcggtggcgctggactattcgctggtgcatgccttcgcgcggctgggtgtgcaggtcaccgaacagacctttggctacccgctattcaagctcaccatctcgcaggtggcgccgatcctgccgtacctgttcctcgttctgatcctgatcttccggcccaagggcctgctgggcacgcgggaggattga

SEQ ID NO: 61429 - protein, 317 aa, Acidovorax sp. JS42
MNLEFFVISLLNGVSYGLLLFMLSSGLTLIFSMMGVLNFAHTSFYMLGAYFAYTLSGAIGFWPALVVAPLLVGALGAVFERYALRRVHKFGHVPELLVTFGLSYLILEVVQLVWGRSTVPYGLPAQLQGPLFTLYGTQFPKSRSFVMLVAVLMLLSVWLLLTRTRIGLVIQAALKHPHMVEALGHNVPRVFMLVFGGGCALAGLAGVIGGNTYVTEPAMAASVGSIIFVVVVVGGMGSLAGAFLASLIIGLVQTFAVALDYSLVHAFARLGVQVTEQTFGYPLFKLTISQVAPILPYLFLVLILIFRPKGLLGTRED

SEQ ID NO: 61430 - DNA, 927 bp, Acidovorax sp. JS42
  CDS (1)..(927): transl_table=11
atgtctgatctcataccccagctggtacaacagctgttcaatggtctttcgctgggcgccatctacgcgctgatcgcgatcggctacacgatggtctacggcatcatcggaatgatcaacttcgcccatggcgacatctacatgatcggcgcctacatcggcctggtcacgctgtcggccgtcggcgtgcagagtggtctgccggtgtgggcgatcatcgccctgatgctggtggtagcggtggccatcacgggcgtctacggcttcgtggtggagcaggtggcctacaagccgctgcgcagcagcccgcgcctggtggcgctgatctcggccatcggcatgtccatcttcctgcagaactgggtggcgctgggccagggcgcgcgcgacatggccgtgccctcgctgatccccggcgcgctgcgctttggcagcgaaggcggcttcgaggtctacgtgccctactcgcgcatcctcatcatcgccgtggcggtggtgctgatgattgcgctcacgctgtacatccagcactcgcgcatgggccgcgcctcgcgcgcctgctcgcaggacatgcacatggccaacctgctgggcatcgacaccaaccgcgtgatctcgttcaccttcatcctgggcgccatgctggcggccgtgggcggcgtgctgatcgcactcgccgtgggcaagctcaaccccttcatcgggttcatcgcaggcatcaaggcgttcacggcggccgtcctcgggggcatcggctccattcccggcgccatgctgggcggggtgatcctgggcgtggccgagaccttcgccgccgcctacatctcgtcggagtacaaggacatcgtggccttcggcctgctggtgctcatcctgctggtgcgccccacgggcctgctgggcaagcctgaagtggagaaagtctga

SEQ ID NO: 61431 - protein, 308 aa, Acidovorax sp. JS42
MSDLIPQLVQQLFNGLSLGAIYALIAIGYTMVYGIIGMINFAHGDIYMIGAYIGLVTLSAVGVQSGLPVWAIIALMLVVAVAITGVYGFVVEQVAYKPLRSSPRLVALISAIGMSIFLQNWVALGQGARDMAVPSLIPGALRFGSEGGFEVYVPYSRILIIAVAVVLMIALTLYIQHSRMGRASRACSQDMHMANLLGIDTNRVISFTFILGAMLAAVGGVLIALAVGKLNPFIGFIAGIKAFTAAVLGGIGSIPGAMLGGVILGVAETFAAAYISSEYKDIVAFGLLVLILLVRPTGLLGKPEVEKV

SEQ ID NO: 61432 - DNA, 930 bp, Acidovorax sp. JS42
  CDS (1)..(930): transl_table=11
atggacatcttgctgcagcagatcatcaatggtctggttctgggcagcatgtacgccttgatagccttgggctacaccatggtgtacggcatcatccagctcatcaacttcgcgcacggggaagtgctcatggtcggcgcgctgaccagttggagctgcatcggcctcatgcaggaggccatgccgggcgcgcccggctggctcattctgctgctggccacgctgatcgcctgcgtggtggcggcggtactcaatttcaccatcgaaaaagtcgcctaccggccgctgcgcaacagcccgcgcctggcccccttgatcaccgccatcggcatgtcgatcctgctgcagacgctggcgatgatcatctggaagcccaactacaaaccgtaccccacgctgctgcccacccagccgttccaagtgggcggcgcggtgatcaccaccacccaggtgttgatcctgggcgtgacggtggtggcgctggcttccatggtctacctggtcaactacacacggctgggccgcgccatgcgcgccacggcagagaacccgcgcgtggccgcgctcatgggcgtgaagcccgacatggtgatctcggccaccttcatcatcggcgcggtgctggccgccatcgccggcatcatgtgggcctccaactacggcacggcgcagcacaccatgggcttcttgccggggctgaaggcgttcaccgcggcggtgttcggcggcatcggcaacctggctggtgccgtggtgggcggacttctgctggggctcatcgaggccatcggctcaggctacatcggcaccctcaccgggggcgtgctgggcagccactacaccgacatcttcgcctttatcgtgctcatcatcatcctgacgctgcgcccctcgggcctgctgggtgagcgtgtggccgaccgcgcctga

SEQ ID NO: 61433 - protein, 309 aa, Acidovorax sp. JS42
MDILLQQIINGLVLGSMYALIALGYTMVYGIIQLINFAHGEVLMVGALTSWSCIGLMQEAMPGAPGWLILLLATLIACVVAAVLNFTIEKVAYRPLRNSPRLAPLITAIGMSILLQTLAMIIWKPNYKPYPTLLPTQPFQVGGAVITTTQVLILGVTVVALASMVYLVNYTRLGRAMRATAENPRVAALMGVKPDMVISATFIIGAVLAAIAGIMWASNYGTAQHTMGFLPGLKAFTAAVFGGIGNLAGAVVGGLLLGLIEAIGSGYIGTLTGGVLGSHYTDIFAFIVLIIILTLRPSGLLGERVADRA

SEQ ID NO: 61434 - DNA, 870 bp, Magnetospirillum magnetotacticum MS-1
  CDS (1)..(870): transl_table=11
atggacgccactttcttcatgaacgtgatcagcgccggtctgttgaccggtctggtctacggcctgatggccctggggctgtcggtaattttcggcgttatgcgcgtggtcaattttgcccatggcgacatgatggtggtggccatgtatgccgccttcctgctttacaccaagatgggaatcgaaccggtgccagccctgccgctggtggccggtttgctgttcgtggtcggctatctgctgcagcgctttttgatcaaccacttcctgggcgtcaccgagcatatccagttcctgctgctgctctcggtggccatgatcatcaccaatatcgtcctcatggtgttcggccccgatgcccgcaacatccagcttgacgccagcttcgagagctactcgctggggccgctggtgctggacaaggtgcgtgtcaccgccgccttcaccgcgggcggcgtggccgccctgctttgggccttctttaagtacaccaccacgggaaccgccatccgcgcctgtgccgacaatccggtgggcgcccgcgtggtgggccttaacgttgagaagctttacgccatcacgtttggcatcggcaccgcttgcgtcggcgccgccggttgcctgcttctgctgctggtggacgtgcatccccatctatcatccgactacaccttgctgggctttatcattgtcatcctgggaggcctgggcagcctgggcggcgccctgctgggcggcattctggtgggcctgtccgaggccctgtcgggcgtgctgatcgcgccctccttgaaaagcatgttcagcttcggccttttgatcctggtcctcttgctgcgtccgcaaggcatcctggggaagaagccatga

SEQ ID NO: 61435 - protein, 289 aa, Magnetospirillum magnetotacticum MS-1
MDATFFMNVISAGLLTGLVYGLMALGLSVIFGVMRVVNFAHGDMMVVAMYAAFLLYTKMGIEPVPALPLVAGLLFVVGYLLQRFLINHFLGVTEHIQFLLLLSVAMIITNIVLMVFGPDARNIQLDASFESYSLGPLVLDKVRVTAAFTAGGVAALLWAFFKYTTTGTAIRACADNPVGARVVGLNVEKLYAITFGIGTACVGAAGCLLLLLVDVHPHLSSDYTLLGFIIVILGGLGSLGGALLGGILVGLSEALSGVLIAPSLKSMFSFGLLILVLLLRPQGILGKKP

SEQ ID NO: 61436 - DNA, 867 bp, Magnetospirillum magnetotacticum MS-1
  CDS (1)..(867): transl_table=11
atgagcatcgatctcgccaatcagattgtcacaggcctcttgaccggactggtctacagcctgatggcccttggcctgtcggtcattttcggcgtggtccgcgtcgtcaatttcgcccatggcgagatgaccgcgctggccatgtacgccgcctgggcgctgttttcctggctggaacttgatccgctgatcggcctgccgctgatcgccttgctgctgttcgcgctgggctatgtcatgcagcgcggcctgatcgacgccttcgtctccaaaccggaacacatgcagttcatcttgctggtggccgtggccatcgtcatggtcaacggctcgctgctggtctttggacccgatgcccacggcattcaggttccttatggcttcgatacctacgaggtggggccgctgctggtggacaaggtccgtctgctggccgccgtggcggcgcttgccatctccggcctcctgatgctgttttttcgccacaccatgaccggcaaggccattcgcgcctgcgccgacaatctggtgggcgccaaggtcatcgggctgaacgtcaagcagctctacgccgtcaccttcggcatcggctcggcctgcgttggggcagcgggggccttgctggccatgctgatcgacgtcatgccatccagcgggccggaactgaccatgctggccttcatcatcgtcatcgtcggcggcctgggcagcatgggcggcgccctgttgggcggcatcctgatcggtatctccgaggtgctggccggatatttcctgatgccgtccatgaagagcatgttcagtttcgccattctgatcctggtcctcatcctgcggccccaaggtctgatgggggcgcgcaaatga

SEQ ID NO: 61437 - protein, 288 aa, Magnetospirillum magnetotacticum MS-1
MSIDLANQIVTGLLTGLVYSLMALGLSVIFGVVRVVNFAHGEMTALAMYAAWALFSWLELDPLIGLPLIALLLFALGYVMQRGLIDAFVSKPEHMQFILLVAVAIVMVNGSLLVFGPDAHGIQVPYGFDTYEVGPLLVDKVRLLAAVAALAISGLLMLFFRHTMTGKAIRACADNLVGAKVIGLNVKQLYAVTFGIGSACVGAAGALLAMLIDVMPSSGPELTMLAFIIVIVGGLGSMGGALLGGILIGISEVLAGYFLMPSMKSMFSFAILILVLILRPQGLMGARK

SEQ ID NO: 61438 - DNA, 861 bp, Magnetospirillum magnetotacticum MS-1
  CDS (1)..(861): transl_table=11
atggatttctggttttttctgattcaggtgctgaacggcgtccagtacgggctgctgctgttcctggtcgcctcggggctgaccctgatcttcggcatcatgggcatcatcaatctggcccacggcgccttctatatgctgggtgcctatctggcctattggctggcccggaccacgggcagcctgacggcggcggtcgtgctgtcactgcccatttccgccgccatcggctatgtgatcgaggccctgctggtccgcaccctttaccgccgcgaccatctggatcaggtgttgctgacctatggcctgatcctcatcttcaacgaggcgacccgcatgatctggggcgccgatgtgcacggcgtgacggtgcccgccgcgctcaactggtccatccggctgaccgataccttgtcctatcccgtctatcgcctgatgctttcgggcgtctgcgccgtgctggcggtggccatgtatctggtgatcacgcggacccgttttggcatgtgggtgagggcgggtgcgtcgaaccgcgacatggtggcggcgctgggcatcaatgtgaagctgctgttcggcgtggtcttcgctctgggcgccgccctggccgggctggcaggcgccatctcgacccccatcacctcggtggcgccgggcatgggcgattccgtcctgatcctgtgtttcgtggtggtggtgatcggcggcgtgggctccatcaagggcgcctttctcggcgccatgttgatcggtctggccgacactttcggcaaggtcttcgttcccgatttcgccagcttcaccgtctatggcgtcatggcggcggtgctgttgtggaagccgagagggttgttcgcatga

SEQ ID NO: 61439 - protein, 286 aa, Magnetospirillum magnetotacticum MS-1
MDFWFFLIQVLNGVQYGLLLFLVASGLTLIFGIMGIINLAHGAFYMLGAYLAYWLARTTGSLTAAVVLSLPISAAIGYVIEALLVRTLYRRDHLDQVLLTYGLILIFNEATRMIWGADVHGVTVPAALNWSIRLTDTLSYPVYRLMLSGVCAVLAVAMYLVITRTRFGMWVRAGASNRDMVAALGINVKLLFGVVFALGAALAGLAGAISTPITSVAPGMGDSVLILCFVVVVIGGVGSIKGAFLGAMLIGLADTFGKVFVPDFASFTVYGVMAAVLLWKPRGLFA

SEQ ID NO: 61440 - DNA, 915 bp, Magnetospirillum magnetotacticum MS-1
  CDS (1)..(915): transl_table=11
atggagtattttctccaacagttgatcaatggcctgacgctgggcgcgatctatggtctggtggcgcttggctacaccatggtttacggcgttctgggcatgatcaattttgctcacggcaccatctacatggtgggcgcgttcatttcgctgatcacctttttggccgccaccacgcttctcggaacctcggttcccctggccctggtcctgaccctgttcgccgccatgggcttgaccgcgctgtggggctggacggccgaaagggtggcctatcggccattgcgctcggcgccgcgcctggcgccgctgatctcggccatcggcgtgtccatcatgctgcagaacttcgtggcccaagcccagggcgcacgggccaagccgctgccgccggtgttcaagggcggaatcaccttgatggatggcggcggcttcgtagtcagcctcagctggatgcagatggtcatcatggcgctgaccctggcgttgatggccgtgttcacctggatcatcacccgcaccgccttgggccgcgcccagcgcgcctgcgagcaggacatgaagatggcctcgctcttaggcatcgatgtggaccgggtaatctccaccaccttcgtcatcggcgccggactggcgggcgtggccgggatgatggtaactctctattacggggtgatcgacttctatatcggcttcctggccgggatcaaggcgttcacggccgccgtgctgggcggcatcggctcgctgcccggcgccatgctgggcgggctgctgatcggactgatcgaggccttctggtcggcctatttctccatcgaatacaaggatgtggccacgttcagcatcctggtggcggttctggtcttccgtcccaccggcctgttgggccgtccggatgtggagaagatctga

SEQ ID NO: 61441 - protein, 304 aa, Magnetospirillum magnetotacticum MS-1
MEYFLQQLINGLTLGAIYGLVALGYTMVYGVLGMINFAHGTIYMVGAFISLITFLAATTLLGTSVPLALVLTLFAAMGLTALWGWTAERVAYRPLRSAPRLAPLISAIGVSIMLQNFVAQAQGARAKPLPPVFKGGITLMDGGGFVVSLSWMQMVIMALTLALMAVFTWIITRTALGRAQRACEQDMKMASLLGIDVDRVISTTFVIGAGLAGVAGMMVTLYYGVIDFYIGFLAGIKAFTAAVLGGIGSLPGAMLGGLLIGLIEAFWSAYFSIEYKDVATFSILVAVLVFRPTGLLGRPDVEKI

SEQ ID NO: 61442 - DNA, 885 bp, Crocosphaera watsonii WH 8501
  CDS (1)..(885): transl_table=11
atggaaataccacaaattattttagagacagcacaaaacttatttaacggtttggccattggcagtgtgatcgctttagctgctgtgggattaaccctcacctgtggcattttacggctttctaactttgctcacggggactttatgactctgggagcttatctaacttggttactcaatagtcaagggttaaatttagttctttcggccattttaggagcagggggaaccatattcgctatgttagtctcagaatatctactatggaaaccgatgcgtaatcgtcgggcaacttccaccaccctgattattatttctattggtttggccctgtttcttcgcaacggaattttaatgatttggggggctaataatcaacgttatgatgttcctattattccggctcaagaaatttttggtttgagattagctaccgatcgcatttgggccatcgctttagctgtggtggccatcgttattctacatttagtcttacaaagaacaaaaatcggtaaagcgatgcgagcggtggctgataatatcgatttagctagggtttcagggatcaatgtggagcaagttgttctctggacttggatcatcactgctattctaactacccttgggggtgtgatgttaggcttaattaccagtaccatacgaccaaatatggggtggtttctcattctaccgatgtttgcctctgttattttagggggtattggcaacccttatggtgcgatcgctggtggtttagtgatcggggttgctcaagaattaagtgtcccttggttgggaactgattataagttaggggtggctttattaatcatgattcttattcttttaattcgtcctcaagggatctttaaagggactctttag

SEQ ID NO: 61443 - protein, 294 aa, Crocosphaera watsonii WH 8501
MEIPQIILETAQNLFNGLAIGSVIALAAVGLTLTCGILRLSNFAHGDFMTLGAYLTWLLNSQGLNLVLSAILGAGGTIFAMLVSEYLLWKPMRNRRATSTTLIIISIGLALFLRNGILMIWGANNQRYDVPIIPAQEIFGLRLATDRIWAIALAVVAIVILHLVLQRTKIGKAMRAVADNIDLARVSGINVEQVVLWTWIITAILTTLGGVMLGLITSTIRPNMGWFLILPMFASVILGGIGNPYGAIAGGLVIGVAQELSVPWLGTDYKLGVALLIMILILLIRPQGIFKGTL

SEQ ID NO: 61444 - DNA, 888 bp, Streptococcus suis 89/1591
  CDS (1)..(888): transl_table=11
atgcttcaacaacttgtcaatggtttgattcttggttctgtttatgcccttttggcccttggttataccatggtgtacggaattatcaaactcattaacttcgcccatggtgatttgtatatgatgggtgcttttatggggtacttcctattaaataatttaaattttattgcagatggtggaacgcgtttctttgttgctctcattctagcgatggtagggacggctattctcggtgtagttatagagtttttagcctatcgtcctttgcgtaattcaacgcgtatagcagctttgattacggctatcggtgtatccttcttcttagaatacactatgattaaattctttacagcagacgtaaaagcctttccacaagcaatcgaagctgtgacttttaaccttggtccagtttctgttacgaatatccagttgattattcttggtgtatcgcttgcgttgatggttgcacttcaattaattgtcaaacgtacaaaaatggggaaagccatgcgtgcggtctctgtagatagcgatgcagctcagcttatggggatcaatgtaaaccgtacaatcagctttacttttgctcttgggtcggctcttgcgggtgctgcgggtgttctcctaggtctctactacaaccagattgagcctttgatggggatgaccccaggtttgaaagcctttgtagcggcagtattgggcggtatcggtattattccaggtgctgcgcttggtggcttcgttatcggtatcatcgaaacattcacctatgtgattgaattcgatactttccgcgatgcgatcgtatatactgttttgatcatcatcctcttggtgcgtccaagtggtattcttggtaaaaatgtgaaagagaaggtgtaa

SEQ ID NO: 61445 - protein, 295 aa, Streptococcus suis 89/1591
MLQQLVNGLILGSVYALLALGYTMVYGIIKLINFAHGDLYMMGAFMGYFLLNNLNFIADGGTRFFVALILAMVGTAILGVVIEFLAYRPLRNSTRIAALITAIGVSFFLEYTMIKFFTADVKAFPQAIEAVTFNLGPVSVTNIQLIILGVSLALMVALQLIVKRTKMGKAMRAVSVDSDAAQLMGINVNRTISFTFALGSALAGAAGVLLGLYYNQIEPLMGMTPGLKAFVAAVLGGIGIIPGAALGGFVIGIIETFTYVIEFDTFRDAIVYTVLIIILLVRPSGILGKNVKEKV

SEQ ID NO: 61446 - DNA, 894 bp, Roseovarius nubinhibens ISM
  CDS (1)..(894): transl_table=11
atgaacggccttcaattcggcgtcttgctgtttctgatcgcggccggtctgaccctgatcttcgggatcatggatttcgtcaatctcgcccatggtgtgctctacatggtgggcggctatctcatggccacgttcgtggccctgaccggcagcttcaccatggggctgctgctcgccctgcccaccgcgctggtggtgggtctggcgctggaatatctggtgatccgaaaactctatcaccgctcgcatctcgatcaggtgctggccaccttcggccttctcatgatcatcaccgaaggggtcaagatcctctggggcagcagcccgctttcggtgccgatcccaccgcttctcgatggggcgatcccgctcatcgggcaggtgaaatacccgatctaccgtctcgccatcatcgccaccggtctggcggcggcggccggtctctatctcatcgtgaaccacacgcgcatcggcatgctgctgcgcgccggcgccaccaaccgcaacatggtcgcggcccttggcgtcaatatctcgcggctcttccggctggtctttgcctttggcgtgatgctcgcctgtttcgcgggcatgatggtcgcgccgatcctgtcggtcgacaccggcatgggcgaaagcatcctcatcctgaccttcgtggtggtggtcatcggcggcatcggctcgatccggggggcgtttctcggcgcgcttctggtggccacggtggacacattgggcggcacctttggcccgatcctgctgcgcatggtgtttgatcccgccaccgcctcgcaggtgggccggaccctcgccccgatgctggtctatatcctgatggccatcatcctctttgccaaacccgcgggcctctttgggcgcaagccggtatga

SEQ ID NO: 61447 - protein, 297 aa, Roseovarius nubinhibens ISM
MNGLQFGVLLFLIAAGLTLIFGIMDFVNLAHGVLYMVGGYLMATFVALTGSFTMGLLLALPTALVVGLALEYLVIRKLYHRSHLDQVLATFGLLMIITEGVKILWGSSPLSVPIPPLLDGAIPLIGQVKYPIYRLAIIATGLAAAAGLYLIVNHTRIGMLLRAGATNRNMVAALGVNISRLFRLVFAFGVMLACFAGMMVAPILSVDTGMGESILILTFVVVVIGGIGSIRGAFLGALLVATVDTLGGTFGPILLRMVFDPATASQVGRTLAPMLVYILMAIILFAKPAGLFGRKPV

SEQ ID NO: 61448 - DNA, 870 bp, Roseovarius nubinhibens ISM
  CDS (1)..(870): transl_table=11
atgttgatgcaactcacgatcagtgggatctcgcagggtgcgatctatgcgctcatcgcgctgtcgctcacggtggtctaccggtcgaccacgatcgtcaatttcggccatggggatttcgtcatggcaggcgccttcctcagctatgtgctggtggtgctgctcggcgtcgccttcgtgccggcggcgatgctggcggtggtggcgatgttcctgctggggctcgcctttagccgggggctggtccggccgatccgaggcgggccgcatatcggctttgcgctgatgtgcatctcggcgggctatgtgtttcgcggcatcgcgcggatcgtctgggggcgcgaagtgctgccgatgccgcgggtcttcgacatcaacccgatcttcatcggcgatctgatcatcacaggcgacgcgatctttatcctctcgaccaccgcgatcatgctcgccgtcttctttggcgtgctggcgctcaccgatatcggcaagatggtgcaggcggtctatcaatcggcccgcggggcacagctcatcggcatcaatgtcgaccggttcaacgatttcacctggggcatcggcgccgcattgggcgccatcggcggtatcctcatcgcgccgatctcgcttctccacccggacctcggcgcgagtttcctgatcaagggctttgccgcgatgacgctcggcggctttggctcgctctatggcgcggtgctcggggcgctcatcctcgggctgagcgaacaatatgccggggcctatatcgactcggccctgatcgacatcacggcctatctggtcatcgtcctcgtcctgttcctgcggccccatgggctgttcgggcgcaaggccatcgtgaaggtgtga

SEQ ID NO: 61449 - protein, 289 aa, Roseovarius nubinhibens ISM
MLMQLTISGISQGAIYALIALSLTVVYRSTTIVNFGHGDFVMAGAFLSYVLVVLLGVAFVPAAMLAVVAMFLLGLAFSRGLVRPIRGGPHIGFALMCISAGYVFRGIARIVWGREVLPMPRVFDINPIFIGDLIITGDAIFILSTTAIMLAVFFGVLALTDIGKMVQAVYQSARGAQLIGINVDRFNDFTWGIGAALGAIGGILIAPISLLHPDLGASFLIKGFAAMTLGGFGSLYGAVLGALILGLSEQYAGAYIDSALIDITAYLVIVLVLFLRPHGLFGRKAIVKV

SEQ ID NO: 61450 - DNA, 864 bp, Roseovarius nubinhibens ISM
  CDS (1)..(864): transl_table=11
atgagcatgcaaatgatctttaacgcattggtcaatgccgcgctcatcgcgcctccggccatggcattctccctgctgttcgggattctcaaattcccgaatttcgccatcggcggctatatcacggtgggcgcctttgccgcctatacgttcaacgtgccgctgggcttgccgctgccgctggccgctgccgccgcgatgctggtcaccgcgctggtggtctggctgatgcatgtgctggtcttccagccgatggaagagcattcggccatcaccttgctggtggtctccatcgccctgaccctgatcatcgagaatgtgatccggctgttcttttccgccgatgtgcgcggcttcgagatcccgttagagcggccctggaaactcttgggcgcgcggatcacgccggaacaggtgcagatcatcatctggagcctcgtcatcggtgtcgcgctgcattgtctgctggcctacacatggatcggccgggcgatgcgggcggtggcggacaacccgatgctggccgccattcgcggggtcaatgcgacccggatcaccgcctttaccaccgccatctgcggcgcgctcttcgggctcaccggtgtctttgccggtctcgatctggtgatcgagccgctggtcggctggaacctcaccatcccgatctttgcggcggcgatcctcggcggcatcggctctccctatggggcgatcgtcggggcgctgctggtcgggctcgcggaagaggccaccattctcttcctgccttcaacctacaagatcggcgtcggtttcgtgatcatcgccgtgctgctgctgctgcgtccgcaggggctctttggaaccgcggagatcagaaaatga

SEQ ID NO: 61451 - protein, 287 aa, Roseovarius nubinhibens ISM
MSMQMIFNALVNAALIAPPAMAFSLLFGILKFPNFAIGGYITVGAFAAYTFNVPLGLPLPLAAAAAMLVTALVVWLMHVLVFQPMEEHSAITLLVVSIALTLIIENVIRLFFSADVRGFEIPLERPWKLLGARITPEQVQIIIWSLVIGVALHCLLAYTWIGRAMRAVADNPMLAAIRGVNATRITAFTTAICGALFGLTGVFAGLDLVIEPLVGWNLTIPIFAAAILGGIGSPYGAIVGALLVGLAEEATILFLPSTYKIGVGFVIIAVLLLLRPQGLFGTAEIRK

SEQ ID NO: 61452 - DNA, 927 bp, Roseovarius nubinhibens ISM
  CDS (1)..(927): transl_table=11
atggagcttggaccttatctcatgctggccacgttggagggctcggtcacggcggcggtgctggcgctgacggcggttgggctgagccttgtgttcggggtgatgcgggtggtgaatatcgcccatggcgagttcttcatgctgggcgcggtgattgcctatgtgctgacgcgggcgatttctggccatccggcggttgggttcgcggtggcgctggtggtggcgccggtgctggtcggcgtgctggcggtggtggcggatatgaccatcctcaagcggctcgactatgacccggagcggaccatcgtggcgaccatcgggcttttgtacatcattcagcagctcaccttgatgagctatggccccgatgcgcggccggtggaggcgccgttcaacacgcggctggcgctgccgtggttcgagtggggcgagaacgggctggcgatgtattggccctggggtctcagcacgacgagttacaagctcgccgtgattggcgcggcggtggtgctgctctgtgggatctgggcgatgatggcgcggacgcggattggccttgtgatgcgggcgacgcaggcggatcgggacatggcgcaggcctttggcatcccggtcgagaaggtttacgccatggtctttggcattggcgcggggctggcggcgatggcggcggtgctgatcgtgccgatccagcaggcgcattacctgatgggggccgatccgttgcttctgagctttatcgtggtgatcatcggcgggctgggcagcctgcccggtacggtggtggcggccattctcatcggcctcagcgatggcatcatctcggtgtttttctcgccgacgctggcgaagatcctcgcgacgctgctggtcggcctcgtgctcgtttttcggccgcagggcctctttgggacacgcggcgtatga

SEQ ID NO: 61453 - protein, 308 aa, Roseovarius nubinhibens ISM
MELGPYLMLATLEGSVTAAVLALTAVGLSLVFGVMRVVNIAHGEFFMLGAVIAYVLTRAISGHPAVGFAVALVVAPVLVGVLAVVADMTILKRLDYDPERTIVATIGLLYIIQQLTLMSYGPDARPVEAPFNTRLALPWFEWGENGLAMYWPWGLSTTSYKLAVIGAAVVLLCGIWAMMARTRIGLVMRATQADRDMAQAFGIPVEKVYAMVFGIGAGLAAMAAVLIVPIQQAHYLMGADPLLLSFIVVIIGGLGSLPGTVVAAILIGLSDGIISVFFSPTLAKILATLLVGLVLVFRPQGLFGTRGV

SEQ ID NO: 61454 - DNA, 1023 bp, Oceanicola batsensis HTCC2597
  CDS (1)..(1023): transl_table=11
atggacgcaatcatcctccaaatcctgaacggcctggacaagggatcggcctatgcgctgatcgcccttggactgacgctgatcttcggcacgctcggcgtggtcaatttcgcccatggcgcgctcttcatgatcggggcgttctgttcggtcaccctcagcaagctgctgaacctcagcttcgagacggtggatccgacacagaaggatttcctgggcaacccgctgaaggtcaagaccccctatgtcgaaagctggttcggccccgaggtgggcgccaccatcatcgactggtccgtcccgctcgccatcctcttcgccatcccgatcatgctggtcatcggctatgtgatggagcgcggactcatcaagcacttctacaagcgcccccatgccgaccagatcctcgtgaccttcggcttggccatcgtgctgcaggagatcgtcaagttctacttcggcgccaatccgatccagacccccgcccccgacgccctgtccggcgtggcgaacctgggcggcgccctcggcctgcagatcgcctatccgatctggcgtctcgtctatatcggtttctcgctgctgctgatcttcggcgccttcgccttcctgcagttcaccaccttcggcatggttgtccgcgccggcatggccgaccgcgagaccgtgcagcttctgggcatcgacatcgaccgtcgcttcaccatcatgttcggcctggccgccgccatcgccggcctggcgggcgtgatgtacgggccgatcaacgcgccgaactatcacatgggcatggacttcctcgtgctgtccttcgtggtggtggtcgtgggcggcatgggctcgcttcccggggcggtcctggccggtttcctgctgggcatcctcgaggccttcgcctcgaccacctgggccaccacgacgatccccggcatcaaccagatcatcatctacctcgttgcaatcattgtccttctcacgcggccgcgcggcctgatgggcaaaaaaggcgtgatggaggactaa

SEQ ID NO: 61455 - protein, 340 aa, Oceanicola batsensis HTCC2597
MDAIILQILNGLDKGSAYALIALGLTLIFGTLGVVNFAHGALFMIGAFCSVTLSKLLNLSFETVDPTQKDFLGNPLKVKTPYVESWFGPEVGATIIDWSVPLAILFAIPIMLVIGYVMERGLIKHFYKRPHADQILVTFGLAIVLQEIVKFYFGANPIQTPAPDALSGVANLGGALGLQIAYPIWRLVYIGFSLLLIFGAFAFLQFTTFGMVVRAGMADRETVQLLGIDIDRRFTIMFGLAAAIAGLAGVMYGPINAPNYHMGMDFLVLSFVVVVVGGMGSLPGAVLAGFLLGILEAFASTTWATTTIPGINQIIIYLVAIIVLLTRPRGLMGKKGVMED

SEQ ID NO: 61456 - DNA, 867 bp, Oceanicola batsensis HTCC2597
  CDS (1)..(867): transl_table=11
atgacgctatttttcatcgtgacgctgaacggtctgacgctggctgctctctattttctggctgccaccggattcagcttgatcttcggattgatgcggacagtgaacatggcacatggcgcgctgctgcttctgggggggtatgtaggcttcagcgtcgttgaggccacagggtcctgggggcttggggtcatcgctggcgggctggccgccgcgctggccggagcgctggtgcagttcggaatcctgggctggatgcagggcgatgagctgcgccagacactggcgtccatcgccatctcgatcatcatggctgacctgatgctttggcattggggcggcatcacctatcaggtgacgctcccggaacttctgtcgggcggccaacggctccccctgctgggggtaggctatgccagcatcaggctcgcgctgatggcctttgcccttgtcatcggtgtggcgctttggttcctgattcagaaaacccggtttggcgccgtgatccgcgcaggcgtggacgatcaagcgatgctgcgcgcgctcggctttccgatcaaacggattttcatctctgttttcgctctgggggggatgctggcagggatggccggggtggtggctgccagtgccctgtccatcgcaccggggaccgatctgcagttcttgctgtcttctctcgtggtggtgattgtcgggggcatgggctctgtggggggggcagctttgggcgcgctgctcgtggggctggccgagcaatacgggcttgcctatgcgccgacctatggcgccgtcttcactttcgcgatcatggttctggtgcttgcggtgcgtccgcaaggccttctggggagggctgagaaatga

SEQ ID NO: 61457 - protein, 288 aa, Oceanicola batsensis HTCC2597
MTLFFIVTLNGLTLAALYFLAATGFSLIFGLMRTVNMAHGALLLLGGYVGFSVVEATGSWGLGVIAGGLAAALAGALVQFGILGWMQGDELRQTLASIAISIIMADLMLWHWGGITYQVTLPELLSGGQRLPLLGVGYASIRLALMAFALVIGVALWFLIQKTRFGAVIRAGVDDQAMLRALGFPIKRIFISVFALGGMLAGMAGVVAASALSIAPGTDLQFLLSSLVVVIVGGMGSVGGAALGALLVGLAEQYGLAYAPTYGAVFTFAIMVLVLAVRPQGLLGRAEK

SEQ ID NO: 61458 - DNA, 885 bp, Oceanicola batsensis HTCC2597
  CDS (1)..(885): transl_table=11
atgcagcttgcgctccaactccttctgtcggggatcctgctgggcggggtctatgccctggccgcactgggcctgaacctgatcttcggcgtggccaagatcgtgaacttcgcccatggcgaattcatgatgctgggcatgtacgcgggcttctggctgatgaccctcacggggatcaatccctactgggggtcgccgctgatcgccgtcgccttcttcgtcgtcggcgcggccttctactggggcgtgatgcgcttcaccatatactcgacagagctgacacaggtcttcgccacgctcggaatgtcgatcgcgctgcagaacctcgcgcttgtgatgttctcggccgattaccggactatccagaccatgccggacggccggtcctccatcgacttcggctttgtccacctgtcctcggaccgggtcatcgccttcctattcgccatcgcgatcttcgtgggggtcatcctcttcctgcgccggacattcaccgggcgcgcgattgaggccgtctcgcaggacctgatggccgcccggctcatggggatcaacacccagaagatcttcctgatcaccttcggactgggcatcggcattaccggggtcgccggcgcggttctggtcccctcattctacgccttcccttcggtcgggaccttcttcgtgctgatcgccttcgtggttgtggtgctgggcggcctcggcagcgtaaccggcacgatgatcggcggtctctctctgggcctgatcgaatcctacgtcggctatttcagccccgacctgaaggaagccacccatttcatcctgctgatccttctgctggcggtccgtccgcagggcatcctcggggtcaagggcgccgagaaggagtcgctgaaatga

SEQ ID NO: 61459 - protein, 294 aa, Oceanicola batsensis HTCC2597
MQLALQLLLSGILLGGVYALAALGLNLIFGVAKIVNFAHGEFMMLGMYAGFWLMTLTGINPYWGSPLIAVAFFVVGAAFYWGVMRFTIYSTELTQVFATLGMSIALQNLALVMFSADYRTIQTMPDGRSSIDFGFVHLSSDRVIAFLFAIAIFVGVILFLRRTFTGRAIEAVSQDLMAARLMGINTQKIFLITFGLGIGITGVAGAVLVPSFYAFPSVGTFFVLIAFVVVVLGGLGSVTGTMIGGLSLGLIESYVGYFSPDLKEATHFILLILLLAVRPQGILGVKGAEKESLK

SEQ ID NO: 61460 - DNA, 933 bp, Synechococcus sp. WH 5701
  CDS (1)..(933): transl_table=11
gtggttcatctcctgcagattctgatcaacggactggcctcgggggcggtctatgccctcttcgccctcggctacaccctggtgttctcggtgcttggggtgatcaacttcgcccatggggcgatgttcacgatcgggggttacctcacttacctgctgatcggtggcgcggtgggggccaatgggctgctggcgggctggcaactgcccattgccctgccgttctggctggccctggccctggccggagccggctccgccctggtgggcctgggggtggaggcggtggccttccgccccctgcgccagcgcaacgccgaaccgttgctctacctgatctccagcctgggtgctggggtggtgctggtgaacctcgtgcagctgctgatgggagctgagagctactcgattcctgcctccaccctggcggccctgccgccggcgctgagcctgggcggcgcccagatccgcaccgtgcaattgcttctgctgctggttgccgccctgttgctggtcctgctcactctctggctggagggcagccgcaacggcaaggccctgcaggcggtggcggaggatcccaccaccgcccgcctgctcgggatcgattccggcgccatgatccgcctggccttcgcactgagcgggttcctggctggcgtggccggcgggctggtgggactgagcgtgagcatcgccgggccttacttcggcatcggctacgggctcaagggtctgggggtgctggtgctgggcgggctgggcagcgtgccgggggcggtgctcggcggcctgatcgtggggctggctgaagcgctggtgccctcggagctctccggctacaaggacggtgtggcctttgcgatcctgtttctggtgctgctgctccggccccagggattgctcggcaaacccctggcgagcaaggtgtga

SEQ ID NO: 61461 - protein, 310 aa, Synechococcus sp. WH 5701
MVHLLQILINGLASGAVYALFALGYTLVFSVLGVINFAHGAMFTIGGYLTYLLIGGAVGANGLLAGWQLPIALPFWLALALAGAGSALVGLGVEAVAFRPLRQRNAEPLLYLISSLGAGVVLVNLVQLLMGAESYSIPASTLAALPPALSLGGAQIRTVQLLLLLVAALLLVLLTLWLEGSRNGKALQAVAEDPTTARLLGIDSGAMIRLAFALSGFLAGVAGGLVGLSVSIAGPYFGIGYGLKGLGVLVLGGLGSVPGAVLGGLIVGLAEALVPSELSGYKDGVAFAILFLVLLLRPQGLLGKPLASKV

SEQ ID NO: 61462 - DNA, 888 bp, Oceanospirillum sp. MED92
  CDS (1)..(888): transl_table=11
atggcaacatttctcggtatcaatctctttggccttttcggccagctgctggtgggcctgattaacggttcattctatgcacttctcagtctgggtctggcgatcattttcggactgttaaaaattatcaacttcgcccagggtgcgttgtatatgctaggcgcatttttcgcctggatggctctcaactacatgggtattaactactgggctgcgctgctctttgtgccgcttgcagtcgggtttattggaatcctgatggagcgctttctattgcgccctatcgcaaatgaagaccacctgtacagtcttctgctgaccttcggtttggcgttgattcttcagggggcatttacacacctgtacggttcttccggtctctcttatgcgatccctgaagagcttaaaggtggtaaccgtttaccgttcatgtatctaccaaactaccgtgcctggatcatcgttgcatcgatcattgtgtgtgcgggaacctggtacatgattgagaaaaccaagctgggtgcatacctgcgtgcgggtacggaaaacccgcagctgatgcaggcgttcggtatcaacgtacctttgatcgtaaccctgacatttggttttggtgtaggtctggctggttttgccggcgttatggctgcaccggtttactctgtatcgcctgatatgggctccaacatgctgatagtggtatttgccatcgtcgtaattggtggcatgggctcgatagggggtgcaattttgacaggtctcggcatgggcgtggtagaaggcttaaccaagtatttctatccggaagcctctacgacagttatcttcgctgtaatggtgatcgtactgttgactaagcctgccggtctgttcggtaaagaagcttaa

SEQ ID NO: 61463 - protein, 295 aa, Oceanospirillum sp. MED92
MATFLGINLFGLFGQLLVGLINGSFYALLSLGLAIIFGLLKIINFAQGALYMLGAFFAWMALNYMGINYWAALLFVPLAVGFIGILMERFLLRPIANEDHLYSLLLTFGLALILQGAFTHLYGSSGLSYAIPEELKGGNRLPFMYLPNYRAWIIVASIIVCAGTWYMIEKTKLGAYLRAGTENPQLMQAFGINVPLIVTLTFGFGVGLAGFAGVMAAPVYSVSPDMGSNMLIVVFAIVVIGGMGSIGGAILTGLGMGVVEGLTKYFYPEASTTVIFAVMVIVLLTKPAGLFGKEA

SEQ ID NO: 61464 - DNA, 927 bp, Oceanospirillum sp. MED92
  CDS (1)..(927): transl_table=11
atgtctgaattttctctctatcttttacaacagcttattaatggactgaccatcggatctacctatgccctgatcgctatcggttacacgatggtttacggcattatcggtatgatcaactttgcccacggcgaaatttacatgattggctcctatgtcactttcatcgtaatcgctggcctgctaggcatgggtttggtctccctccctattgttttactcatcgtgcttatcgtcgctgtcattgtctccagtacctatggctggacagtggagcgagtggcctaccggccattgcgaggctcgaaccgtctgatcccactgatctctgcgatcggtatgtcgatcttcctgcaaaactacgttggtctgtctcagggctaccgtgatgcagcgctgccaccacaagttgtgggtggctggacattcggtgatcctgcggtgtttgaagtcactatctcttacatgcagtcgattatctggatcgcgacgctgcttacgatgaccgcacttaccctgtttatctcccgttcacgcatgggtcgcgcttgtcgtgcctgctctgaagacctggggatgaccaacctactgggtatcgacactaacaagatcatcgcgctgaccttcatcgtgggtgctgcactggcagcagtagcaggtatcctgctaagcctttactacggtgtgatcaacccgtttgttggctttatcgcaggccttaaagccttcaccgcagcagtactgggtggaatcggttccattccgggtgcaatgttgggtggtttgattctgggtgttacagaagcaatgactgcggctttcttcccggcggaatataaagatgttgtatctttcggcctgctggttctgatcctgctgttccgtccaagcggactgctgggtaaaccggaagtggagaaagtgtga

SEQ ID NO: 61465 - protein, 308 aa, Oceanospirillum sp. MED92
MSEFSLYLLQQLINGLTIGSTYALIAIGYTMVYGIIGMINFAHGEIYMIGSYVTFIVIAGLLGMGLVSLPIVLLIVLIVAVIVSSTYGWTVERVAYRPLRGSNRLIPLISAIGMSIFLQNYVGLSQGYRDAALPPQVVGGWTFGDPAVFEVTISYMQSIIWIATLLTMTALTLFISRSRMGRACRACSEDLGMTNLLGIDTNKIIALTFIVGAALAAVAGILLSLYYGVINPFVGFIAGLKAFTAAVLGGIGSIPGAMLGGLILGVTEAMTAAFFPAEYKDVVSFGLLVLILLFRPSGLLGKPEVEKV

SEQ ID NO: 61466 - DNA, 879 bp, Oceanospirillum sp. MED92
  CDS (1)..(879): transl_table=11
atgttcgatattaacctctttgccttgttcggccagttactggtcggactgatcaacggctcattctatgctctactgagtttaggattggcgattattttcggccttctgaaaatcattaactttgcccagggcgcactctatatgctgggtgccttcatcgcgtttctggcgctgaaatatatgggtatcaattactgggcggcactgattatcgtgcctgtctgtgtcggtttggtcggcatcctgatggagcgtttcctgatccgccccattgctaacgaagaccacctatacagcctgctgctgacctttggtctggcgctgattatccagggtgcgtttacccatatgttcggttcttccggtctgtcttatgcgatccctgaagagctcaaaggcggtaaccgtctgccatttatgtacctaccaaactaccgcgcctggatcatcatcgcttccgtcgctgtctgctttggtacttggtacatgatcgagaaaaccaaactgggcgcttatctgcgtgccggtactgagaatccacagctaatgcaggcatttggtatcaacgttccattgatcgtaactctgacgtttggctttggtgtagcgctggccggttttgccggagtcatggccgcccctgtttactcagtttcgcccgatatgggttccaatattctgattgtcgtatttgccatcgtggtaatcggtggtatgggctccataggtggtgccatccttaccggtttggggatgggcgttgtcgaaggcctgaccaagtatttttaccccgaagcatctacaactgtcatcttcctggtgatggtgatcgttctgctgcttaagcctgcgggcctgttcggtaaagaggcttag

SEQ ID NO: 61467 - protein, 292 aa, Oceanospirillum sp. MED92
MFDINLFALFGQLLVGLINGSFYALLSLGLAIIFGLLKIINFAQGALYMLGAFIAFLALKYMGINYWAALIIVPVCVGLVGILMERFLIRPIANEDHLYSLLLTFGLALIIQGAFTHMFGSSGLSYAIPEELKGGNRLPFMYLPNYRAWIIIASVAVCFGTWYMIEKTKLGAYLRAGTENPQLMQAFGINVPLIVTLTFGFGVALAGFAGVMAAPVYSVSPDMGSNILIVVFAIVVIGGMGSIGGAILTGLGMGVVEGLTKYFYPEASTTVIFLVMVIVLLLKPAGLFGKEA

SEQ ID NO: 61468 - DNA, 1602 bp, Oceanospirillum sp. MED92
  CDS (1)..(1602): transl_table=11
atgagcgtctgtctggctctgttctctgtctcggtacaggccaacgagcagacaacaaatgaatcgtctatctcgcctaattcagctgcgttaattgcacaattagctgaggtaaagctatcaaaaaccctgcctgttctggaacagttggaagccgtcggtggtgctgaacttctgccgctttttaccacgttgcttgaaggcaaactttattacgttaaagcctctaaacagattgtcgctgttgagaaaaagggcagtgattatctggtaagtgacctttttagtgctcagttactgggcgctatgaagaagaaagagattaaaaagattcgggtgaataacaaactccgtgtctttcttcgtcaagcgattgcccgtttacagattaagagccctgagcctgagaaacgtttaatcgccataaaagctctatatggcagcttaacggatagcacgatcgatacgctgaaaaaagtatatccggacgaaactaaccttgaagttaaagaagcgatagagctggcatttgcgctttatgaaagtaaaagcccgcttgcagaaaaacgactggctgccgtgaatggtttagctgaaagcctggaaaatgaagcgcgcaacagtctgacctatttggtcgaaaatgactccgacaaaaaggtacaaatggccgctggcgctgcgttgaagaagatcaatgagcgtatcgagttttatgattttgttgatcagctcttctttggccttagcctgggttctgttttattgctggcagcgattggtctggctatcacctttggggtgatgggggtcattaacatggcccacggtgagatgatcatgctgggtgcatacaccacctatgtggtgcagctgttaatgccagatgcgattgagtactcattgttggtagccgtgcctgctgcatttgttgtctcaggtttggtcggtattctgatcgaacggggtgtgatccggttcctgcatggccgcccattggaaacgctgctagcgacctttggtatcagcctgattttgcagcaactggtacgtaccgtgttttcaccgcttaaccgtcaggtggagtcaccgctatggatgagtggttctttagagattaatccggtactcagtctgactctgaaccgtttatacattctggcgtttgctttgttggtgtttggcttgttgctgatcatcctcagaaagacctcgttaggtctgaatgttcgcgctgtatcgcaaaaccgtagtatggcaaaagcgatgggtattcgtacggactgggtggatgcaatgaccttcggcctgggctcaggtattgcgggtatcgccggtgtagccttgagtcaattaaccaacgtagggccaaaccttggacagtcctacatcatcgactcctttatggttgtagtgttcggtggcgtcggcaacctgtggggcaccctggtagccgcattctcactaggtgtggcgaacaaattcctggaaccggtaaccggcgcggtgttggccagcattctggttctggtctttattatcctgtttattcagaaaaaacctaagggcctgttcccgcaaaaagggagggctgcagaatga

SEQ ID NO: 61469 - protein, 533 aa, Oceanospirillum sp. MED92
MSVCLALFSVSVQANEQTTNESSISPNSAALIAQLAEVKLSKTLPVLEQLEAVGGAELLPLFTTLLEGKLYYVKASKQIVAVEKKGSDYLVSDLFSAQLLGAMKKKEIKKIRVNNKLRVFLRQAIARLQIKSPEPEKRLIAIKALYGSLTDSTIDTLKKVYPDETNLEVKEAIELAFALYESKSPLAEKRLAAVNGLAESLENEARNSLTYLVENDSDKKVQMAAGAALKKINERIEFYDFVDQLFFGLSLGSVLLLAAIGLAITFGVMGVINMAHGEMIMLGAYTTYVVQLLMPDAIEYSLLVAVPAAFVVSGLVGILIERGVIRFLHGRPLETLLATFGISLILQQLVRTVFSPLNRQVESPLWMSGSLEINPVLSLTLNRLYILAFALLVFGLLLIILRKTSLGLNVRAVSQNRSMAKAMGIRTDWVDAMTFGLGSGIAGIAGVALSQLTNVGPNLGQSYIIDSFMVVVFGGVGNLWGTLVAAFSLGVANKFLEPVTGAVLASILVLVFIILFIQKKPKGLFPQKGRAAE

SEQ ID NO: 61470 - DNA, 894 bp, Alteromonadales bacterium TW-7
  CDS (1)..(894): transl_table=11
atgaactttgaattactcattcagttaatcattaatgggcttattgtcggcttgttgtatggcgtcgtcggtatgtgttttgttttagtttataagtcgacacaaattgtaaactttgcacagggcgaatttttacttgtcggtgcctgggtatgctggagcgtacttatttacttagaactgccctttattgttggctttttgctcacaatggcgtttatggcggcctttggtattttaattcaaatgattgttttacgccctatgattggcgagccaattatttctgtcattatggtcacaatcggtttatctatctttttccaagcattgatgaagtggatttttggtgtgtcagcgcaaagttacccgcaagtatttgatgcgcaaagcattcaaatttttggcctaaatattgagtcagcctacttaatgagtacggttatagccttaattatcatggttgcattttacctcttttttaaacattcaaaatatggtctcgctatgcgagccactgcatttaatcagcaaattgcacaaagcttaggtatttcagttaaacaagtgtttgctatgagctggggcattgcggcaacggtatcggcaacagccggtattgtaataggtatggttaacggggtttcaagttctctatcaatgatggggattaaagtgttcccagccgttattttaggcggcctcgactcgattgtaggtgcaattgtgggtggtttaacaattggagtactcgaaaacttagctgagttttttgatagccaataccttcatgttggcaacatgtacgacatagcgccattttacgtccttctcatcatactttggtttaaaccttacggtttatttgggactaaagatattgaacgaatttaa

SEQ ID NO: 61471 - protein, 297 aa, Alteromonadales bacterium TW-7
MNFELLIQLIINGLIVGLLYGVVGMCFVLVYKSTQIVNFAQGEFLLVGAWVCWSVLIYLELPFIVGFLLTMAFMAAFGILIQMIVLRPMIGEPIISVIMVTIGLSIFFQALMKWIFGVSAQSYPQVFDAQSIQIFGLNIESAYLMSTVIALIIMVAFYLFFKHSKYGLAMRATAFNQQIAQSLGISVKQVFAMSWGIAATVSATAGIVIGMVNGVSSSLSMMGIKVFPAVILGGLDSIVGAIVGGLTIGVLENLAEFFDSQYLHVGNMYDIAPFYVLLIILWFKPYGLFGTKDIERI

SEQ ID NO: 61472 - DNA, 903 bp, Candidatus Desulfococcus oleovorans Hxd3
  CDS (1)..(903): transl_table=11
atggacgtaagcgggcctttttcggattttctgcagttcctcttcatgggggttcagcggggctgcatctacgccatggtggccatggggtttaacatcatttacaactccaccggcatcatcaacttcgcgcagggggagttcgttgtgctgggcggcctgatgatggtcaccctgacaatggcctctcacctgcccatgcccgtggcctttctgctgaccgctgtttttgtcatggcggtgggcgtcctgatggagcggaccaccatcaacccggtgaagaacccctcggtgctgcggctgatcatcatcaccatcgcggtttccatcctgattcgcggtattgccatgctggtctggggcaaggagtcccaccacatgcgccacttttccagcgaagagagtattaatgtgctgggcgccacgattcttccccagacgctgtggattatcggcatgctggttgtgaccgtgggcgtgtttgtctattttttcaattacaccatgaccggtaaaagcatgcgggcctgcgccatcaaccgggacgcggcccgcctggccgggatcaacgaccggaaaatgatcatgctgtcctttgccctttccgccggtatcggggccattgccggcatcatcatcacgccggtgatccagatggattatgcccggggcgcgctgctgggcctcaaggggtttggtgccgccgtggtgggcggcctgggaaacagttttggcgccgtggccgcgggcctgctgctgggcattatcgaggccatggccgcgggatacatctcctctcactacatggacgccgcggccctttttatcctgctgattgtcctgtttgtccgccccagcggacttttcggcaaccgggaggcggccagatttaaagaattttaa

SEQ ID NO: 61473 - protein, 300 aa, Candidatus Desulfococcus oleovorans Hxd3
MDVSGPFSDFLQFLFMGVQRGCIYAMVAMGFNIIYNSTGIINFAQGEFVVLGGLMMVTLTMASHLPMPVAFLLTAVFVMAVGVLMERTTINPVKNPSVLRLIIITIAVSILIRGIAMLVWGKESHHMRHFSSEESINVLGATILPQTLWIIGMLVVTVGVFVYFFNYTMTGKSMRACAINRDAARLAGINDRKMIMLSFALSAGIGAIAGIIITPVIQMDYARGALLGLKGFGAAVVGGLGNSFGAVAAGLLLGIIEAMAAGYISSHYMDAAALFILLIVLFVRPSGLFGNREAARFKEF

SEQ ID NO: 61474 - DNA, 915 bp, Pseudomonas putida GB-1
  CDS (1)..(915): transl_table=11
atggatggtattttcctgcagcaactggtcaacggcctgaccctcgggtcggtctatggcctgatcgccatcggctacacaatggtctatggcatcatcggcatgatcaacttcgcgcacggcgaggtgtatatgatttccgcgtacctcgcggcaatcagcctggcattgctggcttacttcggcgtcgagtcgttcccgctactgatgttgggcacgctgttgttcaccgtcgtcgtcacgggcgtctatggcttcaccatcgagcgcatcgcctacaaacccctgcgtaactccacccgcctggcgccgctgatcagtgccatcggcatttcgctgatcctgcaaaactacgcacagatcagccagggcgcccgccagcaaggcgtgccaaccttgctggaaggtgccatgcgtgtcgaagtcggcaccggcttcgtgcaactgacctataccaagatcttcattctggtggcagccttcgtcggcatgggcctgctgacctacgtgatcaagtacaccaagctcggccgcatgtgccgtgccacccagcaagaccgcaagatggcctcgatcctgggcatcaacaccgaccgggtaatctcctacgtgttcgtcatcggcgccgtgatggccgccctggccggcgtgctgatcaccatgaactacggcacgttcgacttctacgccggcttcatcatcggtatcaaggcattcaccgccgcggtgctcgggggtatcggctcactgcctggcgccatgctcggcggcatcatcctgggtatttccgagtcgctgttctctggcttgatcaactccgactacaaggatgtgttcagcttctcgctgctggtgatgatccttatcttccgcccacaaggcctgctgggtcgcccgctcgtggctaaggtgtga

SEQ ID NO: 61475 - protein, 304 aa, Pseudomonas putida GB-1
MDGIFLQQLVNGLTLGSVYGLIAIGYTMVYGIIGMINFAHGEVYMISAYLAAISLALLAYFGVESFPLLMLGTLLFTVVVTGVYGFTIERIAYKPLRNSTRLAPLISAIGISLILQNYAQISQGARQQGVPTLLEGAMRVEVGTGFVQLTYTKIFILVAAFVGMGLLTYVIKYTKLGRMCRATQQDRKMASILGINTDRVISYVFVIGAVMAALAGVLITMNYGTFDFYAGFIIGIKAFTAAVLGGIGSLPGAMLGGIILGISESLFSGLINSDYKDVFSFSLLVMILIFRPQGLLGRPLVAKV

SEQ ID NO: 61476 - DNA, 861 bp, Pseudomonas putida GB-1
  CDS (1)..(861): transl_table=11
atgctcgatttgtacctgttccaactgctcaacggcctgggcctggggatgatctacttcctcatcgccgtgggcctgacgatcattttcggcctgctcaacttcgtcaacttcgcccacggtgcgttcttcttgctgggcgcctacctgtgctacaccgccgtagcgataaccggcaacttctggctggcgctgctgattgcgccgctggtagtggccgcactggcgtgggccgtcgagcgcctgttgatcaagcgcatctaccacctgccgcacaccttccagatcctcgtcaccctcggcatcgcactgatcatccaggaagcctcggtgctgatctggggcccggtgggcaagaacattgccgtaccgccggagctgcgcggcgtgctgatcctcggtgacttcatctacccctactaccgcctgttcctgatcggcttcgccgcgctgatcggcgttggcttgtggttgctgctggagcgcacccgcttcggcgcactggtgcgcgcgggtagcgaaagcaccgaaaccgtatcgctgctgggcaccaatatctttcgcctgttctccctgaccttcgccctgggcgtgggcctggccggggtggcgggtgtgctgttcgcaccactacgcggcgcccagcctttcgtcggcccggagatcctcggcattgccttcgtggtggtggtgatcggcggcatgggctcgttcggcggtgcgctggttggcggcctgctggtgggtgtggtgcaaagcatgatgaccagcctctggccgcaaggcgccagcctgatgatctacggcgccatggccgcagtgatcctggtccgtccctatggcctgtttgggagagcctga

SEQ ID NO: 61477 - protein, 286 aa, Pseudomonas putida GB-1
MLDLYLFQLLNGLGLGMIYFLIAVGLTIIFGLLNFVNFAHGAFFLLGAYLCYTAVAITGNFWLALLIAPLVVAALAWAVERLLIKRIYHLPHTFQILVTLGIALIIQEASVLIWGPVGKNIAVPPELRGVLILGDFIYPYYRLFLIGFAALIGVGLWLLLERTRFGALVRAGSESTETVSLLGTNIFRLFSLTFALGVGLAGVAGVLFAPLRGAQPFVGPEILGIAFVVVVIGGMGSFGGALVGGLLVGVVQSMMTSLWPQGASLMIYGAMAAVILVRPYGLFGRA

SEQ ID NO: 61478 - DNA, 924 bp, Pseudomonas putida GB-1
  CDS (1)..(924): transl_table=11
atgcctgagatctaccatttcttccaacaactggttaatggattgaccatcggcagcacctatgccttgatcgccatcggctacacgatggtgtacggcatcattggcatgatcaacttcgcccatggcgaggtgtacatgatcggttcctacgtggccttcatcgccctggcgggcctggccatgatgggcatccattcgctgccgatcctgatgaccgtcgcctttgtcgcgacgatcttcgtcaccagtgcctatggctacagtatcgaacgggttgcctatcgccctctgcgcaacagcaaccggttgattccgctgatttccgccatcggcatgtcgatcttcctgcagaacaccgtcttgctgtcgcaagactccaaggacaaatccatccccaacctgatccccggcagcttctccttcgggccaggcggtgctgaagaagtactgatcagctacatgcaagtcctggtgttcgtggtcaccctggtggccatgaccctgctcaccctgttcatctcccgctcccgcctgggccgcgcctgccgcgcctgcgccgaagacatcaagatggccaacctgctgggcatcaacaccaacaacatcatcgccctcaccttcgtcatcggtgccgccctggcagccgtggcagccgtgctgctgagcatgcagtacggggtgatcaaccccaacgccggtttcctggtgggcctgaaggccttcactgcggcggtgctgggtggcatcggcagcattccgggcgccatgctcggcggcctggtgctgggtgtagcggaagcctttggcgccgacatcttcggcgaccagtacaaggacgtggtggcattcggcttgttggttcttgtcttgctgttccggccgaccggcattctgggccgcccggaggttgaaaaagtatga

SEQ ID NO: 61479 - protein, 307 aa, Pseudomonas putida GB-1
MPEIYHFFQQLVNGLTIGSTYALIAIGYTMVYGIIGMINFAHGEVYMIGSYVAFIALAGLAMMGIHSLPILMTVAFVATIFVTSAYGYSIERVAYRPLRNSNRLIPLISAIGMSIFLQNTVLLSQDSKDKSIPNLIPGSFSFGPGGAEEVLISYMQVLVFVVTLVAMTLLTLFISRSRLGRACRACAEDIKMANLLGINTNNIIALTFVIGAALAAVAAVLLSMQYGVINPNAGFLVGLKAFTAAVLGGIGSIPGAMLGGLVLGVAEAFGADIFGDQYKDVVAFGLLVLVLLFRPTGILGRPEVEKV

SEQ ID NO: 61480 - DNA, 870 bp, Marinobacter sp. ELB17
  CDS (1)..(870): transl_table=11
atgtctggcatcggatcggcgttgctgaatagtcttgatatcgggcttctgctgttcattatcgcagtgggactgaatatcgtgtttggtgttttaaacatcatcaactttgctcacggagcgctctacatgctgggggcgtacctggcatttaccctgatcaacatagtaggaatgccgttttgggcagcgctgctattggctccgcttggcgtggctatattggcggttctcatcgaccggtttttattacggtatatttattccagggatatagcagacagtttgttactcactttcgcacttttgttaatcattaacgagagcgtgcgaatgatctggggcagtggaattcaggttgttcaaccacctcagctgctggccgggtcgatggatattatgggtagttccataccgacatacagcctgtttgtgattgtcatgggcctggcgctgctggctggcctctggttcctgtttaaccggacccgaatcggtcgaatcatgcgtgctgccgctctggatcgcgatatggcagaggtcttgtgtatcaatacccggctggtggtgacgggtgtgtttgcctttggcgcctggcttgcggctgtcggcggtgtgattgcagctccgatgcgtgcactggatcctggcatgggtgacaaaattattatcgaatccttcattgtggtggtaatcggtgggcttggaagtttccccggggccttgcttggcgccattattctcgggctgatccatggctttggtggtcgttattttccagaggtaaacatgcttttgccatttttgggaatggcgctggttctgctgttcaaacctaatggcattatgggcaaaggggcagcggcatga

SEQ ID NO: 61481 - protein, 289 aa, Marinobacter sp. ELB17
MSGIGSALLNSLDIGLLLFIIAVGLNIVFGVLNIINFAHGALYMLGAYLAFTLINIVGMPFWAALLLAPLGVAILAVLIDRFLLRYIYSRDIADSLLLTFALLLIINESVRMIWGSGIQVVQPPQLLAGSMDIMGSSIPTYSLFVIVMGLALLAGLWFLFNRTRIGRIMRAAALDRDMAEVLCINTRLVVTGVFAFGAWLAAVGGVIAAPMRALDPGMGDKIIIESFIVVVIGGLGSFPGALLGAIILGLIHGFGGRYFPEVNMLLPFLGMALVLLFKPNGIMGKGAAA

SEQ ID NO: 61482 - DNA, 876 bp, Marinobacter sp. ELB17
  CDS (1)..(876): transl_table=11
atgttctccgaatttctgcaatatctgtttaccggtatcaccattggtgctacttacgccctgatcgctttgggctttacccttatttataacgccaatcatgttatcaacttcgcccagggcgaatttttgatgattggtggtatggcgaccgtgtctttaacggccatgggtgtgccgatgttgcttgccatcgtgttggcggttgttcttgcgggtcttatgggtattgccctgcagcgcctggcgattgcaccggcaaaagatgcgaacgttgtcacgctgatcattattaccatcggcgcgtctatttttatccgtggtctggctcaattagtctggggcaaaaagtaccacgtgatgcctaacttcagcggcgacgaaccgattgaagtatttggcgctgtactgaacagtcaaagtctgtgggtgctgggcgtgggtgcggtgctggtagcggtattggtgtatttcttcacccgcaccatgaccggtaaagcgattcttgccacttccatgaacaaagacgccgcccgcctggtgggtattcgcacccagatggtgctgatgctggcgttcatggtgtctgcactgctgggttcaatcgccggcattgtggtcgctcctattacgttcacttcttacgatattggcatcatccttggtttgaaaggctttgtggcagcggccattggcggcctgggcagtggtgtgggcgccgttgtgggtggtttggcgttgggcgtggttgaggccatggccgcgggctatctgtcgtctgattacaaagacgcggtggccttctcgatgattctgctggtgttgttcttcatgccccggggcctgtttggcgccaaagttgtggagcgggtgtga

SEQ ID NO: 61483 - protein, 291 aa, Marinobacter sp. ELB17
MFSEFLQYLFTGITIGATYALIALGFTLIYNANHVINFAQGEFLMIGGMATVSLTAMGVPMLLAIVLAVVLAGLMGIALQRLAIAPAKDANVVTLIIITIGASIFIRGLAQLVWGKKYHVMPNFSGDEPIEVFGAVLNSQSLWVLGVGAVLVAVLVYFFTRTMTGKAILATSMNKDAARLVGIRTQMVLMLAFMVSALLGSIAGIVVAPITFTSYDIGIILGLKGFVAAAIGGLGSGVGAVVGGLALGVVEAMAAGYLSSDYKDAVAFSMILLVLFFMPRGLFGAKVVERV

SEQ ID NO: 61484 - DNA, 873 bp, Marinobacter sp. ELB17
  CDS (1)..(873): transl_table=11
ttggacctatttctgcaagccatcgttaacggggtattgataggcgggatattgatctgcctgaccgttggtttccaactgacgttcggcgtcttgcatgtcatcgacttcgcggtcggtggatgggtgatgctgggtggctatgccgcgtactggttagtggcgttggccggtattgatccgttcatcagcattttttttgtgttcgctctgtttgcccttattggtcgggcaatagggcctttgatctatcacgtgcgaaccagtcgttacgcccgaccggacctgatggccctcgcctttacctttggtcttttcctgctgatgcgcggtggcgcgctctggctgtggtcctataatagccgaaacgtcgaatcggtattttccggcgaatttttaaccgtcgggtctgtcactattcccttgttgcgcctgagtgcctttttaatggctattctcatcagcctcggggttttcctgctcctctaccgaacccgttttggcatggcagtccgggcggttgctcaaaaccgggaccatgccgggttgatgggtgtcgacgtaaagcgggtttcggcctacgtctatgggctctataccggaataacggcttcggcgggcgttctaatcgccacgatctactccgtaaacccttccgtcggcgtgcgctataccttgtttgccttcttcgttgcggtgctggctggcctggggtccgtggggggtgtcctgattgcagggctcgccctcgggctattggaatctttagcgtccacctatgtcggcagccgctattcattgttgattgtattcggagtactgtttttggtactgctggtcgcgccaaagggggttcttggccgtggcatctaa

SEQ ID NO: 61485 - protein, 290 aa, Marinobacter sp. ELB17
MDLFLQAIVNGVLIGGILICLTVGFQLTFGVLHVIDFAVGGWVMLGGYAAYWLVALAGIDPFISIFFVFALFALIGRAIGPLIYHVRTSRYARPDLMALAFTFGLFLLMRGGALWLWSYNSRNVESVFSGEFLTVGSVTIPLLRLSAFLMAILISLGVFLLLYRTRFGMAVRAVAQNRDHAGLMGVDVKRVSAYVYGLYTGITASAGVLIATIYSVNPSVGVRYTLFAFFVAVLAGLGSVGGVLIAGLALGLLESLASTYVGSRYSLLIVFGVLFLVLLVAPKGVLGRGI

SEQ ID NO: 61486 - DNA, 1605 bp, Marinobacter sp. ELB17
  CDS (1)..(1605): transl_table=11
atgggcatcatccgattgctcagtcagcttctgcttgtctgttctctgttctggccgggctttgctcaggcccaggtggaagacaccgaagcgcaacaactgctcacggcactggcggactcgtcatttgcagaaaaaaaagccgtggttaatcgcatagccagcagcggcgatgaacgcgcccggggctggctggaatcgtttgccagcaacaaactggcccgcattgaatccagcgggcaattcatcatcgtgacggacaatcgcggccgagactggaccgtgcaaagcgcactgaccggtgaaaatttgggcgaattctcccgccgggacatcgacaccgttcgcgttaacaacgcgttacgtggcgaactggaagacatcctgtcggtgattgacctgaaaagccctgaccaaagcagccgcttaaccgccgcccgtgcccttaaaggcagcgtagacagtgcactcgccgagcgcgtgccgggccttatcgatagcgaacagagcgagccagttcgtgccgcgcttacggaagcactggccatctaccgcgtagccgagcagggcgatctggcggcagttgaaaccttgtctggcagcctgaattcgcaagcccgcgctgccctgcagcaagccatgcgcagtgacgatccggcgctggttgcggctgccaccaaagctatggacagcatcgagcaaaaactgactctgaaccgcgccgccgaaacactgtatttcggcctgtcaatgggctcggttctggtgttggccgccatcggcctggccattacctttggcgtaatgggcgttatcaacatggcccacggcgaactgattatgctgggtgcctacaccacttggggcatgcagcagctgcttccgggccagccgggcctggcgctgattctatccattccggccggttttctggtggcggctctggccggcgtggtgattgaacgtaccgttatccagtacctgaaaggccgcccgctggaaactctactggccacctttggtgtcagcctgattctgcaacagttggtgcgcacagtggtttccccgctgaaccgcacggtgattacaccggagtggatgagtggctcggtgatgatcaacgaagctctgtcactcactctcaaccggctttacgtgattgggtttgccctggtggtgttcgccgggctgatgctgattatgcgtaaaacccgcctggggctagaggttcgggcggttacccagaaccgggccatggcccgttccatgggtataagagccacccgcgtcgacattctcacctttgccttgggttctggcgttgccggcctggcgggcgtggccttatcacagattaccaacgtcggccccaacctgggccagagctacatcatcgattcgttcatggtggtggtgttcggcggtgtgggcaatctgtggggcacgctgctggccggattgacgctgggcaccatcaaccagctgctggaaccctgggtgggtgcggtgctggccaagattatggtgctggtgatgatcatcctgttcattcagaaacggcctcggggattgtttccccagaaaggccgtgcggcggaggggtaa

SEQ ID NO: 61487 - protein, 534 aa, Marinobacter sp. ELB17
MGIIRLLSQLLLVCSLFWPGFAQAQVEDTEAQQLLTALADSSFAEKKAVVNRIASSGDERARGWLESFASNKLARIESSGQFIIVTDNRGRDWTVQSALTGENLGEFSRRDIDTVRVNNALRGELEDILSVIDLKSPDQSSRLTAARALKGSVDSALAERVPGLIDSEQSEPVRAALTEALAIYRVAEQGDLAAVETLSGSLNSQARAALQQAMRSDDPALVAAATKAMDSIEQKLTLNRAAETLYFGLSMGSVLVLAAIGLAITFGVMGVINMAHGELIMLGAYTTWGMQQLLPGQPGLALILSIPAGFLVAALAGVVIERTVIQYLKGRPLETLLATFGVSLILQQLVRTVVSPLNRTVITPEWMSGSVMINEALSLTLNRLYVIGFALVVFAGLMLIMRKTRLGLEVRAVTQNRAMARSMGIRATRVDILTFALGSGVAGLAGVALSQITNVGPNLGQSYIIDSFMVVVFGGVGNLWGTLLAGLTLGTINQLLEPWVGAVLAKIMVLVMIILFIQKRPRGLFPQKGRAAEG

SEQ ID NO: 61488 - DNA, 870 bp, Marinobacter sp. ELB17
  CDS (1)..(870): transl_table=11
atgcattcgtggcttaatgagatattcatcggtcttagcctgacctcaatcctgctaatggtcgcattagggttagccatcatatacggcaccatgggtgtaattaacttagcccacggtcaattcgtgatgataggtgcctatgttgcctggtttctgcaaagccagttcggtatcggcattattgtaggattaccgctgattttcatagcgggcgccttgctgggtctcgcagtagagcgaacgattattcaaaggctctacacacgcccgttggatacaatcctggcaacctgggggattggtatcgtacttgaacagctggttcgaggacttttcggatcagattcacgctacgtcgcacggcctgagtttctggacggaaatctcatacttgccggtgttcacatgtcttactaccggctgtttatcattggtttcgcactgctcactctcgcggttacgtggtttctgctgtttcgcacagaatttggcaccaagcttcgcgcggttatccagaacaaagagatttctgaatgctacggcgtcagcgcaaaccgtgtgtatgccgtgacatttgcatatggcgcgggactcgcagcaatcgctggcgcgctgataacaccaatggtcagtgttactccgaccatgggcaccggggttgtggtagatgcatttctagtggtgatcgttggcggtgtaggcagtattgtcgggactgcggcggcagcactcatgattggggaggcaacggcgtggctgtcctatctcttgagtgaaaccacggcacgcatcctgattctgttgggcgttatagttctgattcgttttcgtccgcagggactctttcccgataaagtccggcgctaa

SEQ ID NO: 61489 - protein, 289 aa, Marinobacter sp. ELB17
MHSWLNEIFIGLSLTSILLMVALGLAIIYGTMGVINLAHGQFVMIGAYVAWFLQSQFGIGIIVGLPLIFIAGALLGLAVERTIIQRLYTRPLDTILATWGIGIVLEQLVRGLFGSDSRYVARPEFLDGNLILAGVHMSYYRLFIIGFALLTLAVTWFLLFRTEFGTKLRAVIQNKEISECYGVSANRVYAVTFAYGAGLAAIAGALITPMVSVTPTMGTGVVVDAFLVVIVGGVGSIVGTAAAALMIGEATAWLSYLLSETTARILILLGVIVLIRFRPQGLFPDKVRR

SEQ ID NO: 61490 - DNA, 1218 bp, Moritella sp. PE36
  CDS (1)..(1218): transl_table=11
atgtcgagtgatgccgcgttacgtgagcaagcaatagacgatttattgggcaatgttgatcctgcgatccaagccttattgcgtcaacgcttagctgttgaagatgttgagcaaaataaaacgtcattaacactcgcgctagccataggcaccgcagcgatatcagaagacaaaactgaattgttagccgccgttcatttattggcagactcgatagagccgaccgcgtttagtgcgctggacaatatcgtcaataccactgctgatgatgacttacgtcaggccgcgcaacgaggcttagacagttatgcgcaaagtcaaaaagtctattcaacccttgaaactttgtattttggcttgagtctcggttcggtgttggcattagcgggtctgggtctggcgattacctttggggtgatgggggtgattaatatggcgcatggtgagctgatcatgctcggtgcttatactacttacgttatgcagcaattaatgccggacaatattggtttatcgttagtactctcgatccctgcggcctttcttgtgtcgggtttagtaggcattgccattgagcgtggggtgatccgctttctctatggccgtccattggaaaccttacttgccacctttggcatcagtcttatcttgcagcaagcagtccgcagtgtgttctcgccattgaaccgctcggtatcgacacccgattggatgagcggcatgttggagtttaatcccatgttggcactgacttataaccgcctctatatcattattttctgtttattagtgttctgtacacttatttttgtattaaagaaaacaccactgggtttacaagtgcgtgcggtatcacaaaatcgttcgatggctcgggcaatgggtgtacgttcggagtgggttgatgccatgacctttggtttaggtgccggtgtagctggtattgcgggtgttgccttgtcgcaattaaccaatgtcggaccgaatatgggccagagctatattattgattcgtttatggtcgtggtatttggtggggttggtaatctgtggggtaccttggttgctggtttaactttaggtctatttaacaagttgttagaaccttgggctggtgcggtactcgctaagatcatcgtactggtattcattatcctatttattcaaaaacgcccgcgtggactctttccacaacgtggtcgtgcggccgaggaataa

SEQ ID NO: 61491 - protein, 405 aa, Moritella sp. PE36
MSSDAALREQAIDDLLGNVDPAIQALLRQRLAVEDVEQNKTSLTLALAIGTAAISEDKTELLAAVHLLADSIEPTAFSALDNIVNTTADDDLRQAAQRGLDSYAQSQKVYSTLETLYFGLSLGSVLALAGLGLAITFGVMGVINMAHGELIMLGAYTTYVMQQLMPDNIGLSLVLSIPAAFLVSGLVGIAIERGVIRFLYGRPLETLLATFGISLILQQAVRSVFSPLNRSVSTPDWMSGMLEFNPMLALTYNRLYIIIFCLLVFCTLIFVLKKTPLGLQVRAVSQNRSMARAMGVRSEWVDAMTFGLGAGVAGIAGVALSQLTNVGPNMGQSYIIDSFMVVVFGGVGNLWGTLVAGLTLGLFNKLLEPWAGAVLAKIIVLVFIILFIQKRPRGLFPQRGRAAEE

SEQ ID NO: 61492 - DNA, 918 bp, Methylophilus methylotrophus
  CDS (1)..(918): transl_table=11
atgtttggttattcgatggcagatataggcaatattgtggtgatgcagggcttttccggcctgagcatgtttacagtgttgctgctgatggcacttggtctcgcgattattttcgggcagatgggtgtgattaacatggcacatggcgagtttatgaccataggcgcctacaccaccgtactcatttcaaaagtagcagccagttacggcttcacggattactacttcgtgtttgccattgcgattgccttcttgctggccttcgcggtcggttactttgttgaattcattatgatcaggcacttgtataagcggccgctggatacgctactggccacctggggcttgaatctggtcatgcaacaaattttccgctcttcattcggcgccaaagaagtgagtgccgaactgcctgagtggatgctgggctctttcaagccaacccctgatattgatatcccgattaacggggtattcgtgatggtgctggcggcgctagtgactttcggtgtctacatgtttatgtacaaatcccgctggggcttgcgtgtacgtgccacggtgcagaaccgtaccatggctggcgcagtagggattaatacagccaaagttgaccgcgtcacttttgccctgggctgcggcattgccgggattgccggtgctgcatttaccaccattgcctctactggcccgaccacagggaccttgtatatcgtggacagctttatggtcgtggtatttggtggcgcagccagcattgtcgggacgattgcttccgccttcgggattgcccaggcgcaatcgatactgcaattctttatgaccagctctatgggtaaggtctccaccttgctcgtcatcgtcaccatcctgatgatgaaaccggaaggtctgtttgcctccaaactgcgtaaataa

SEQ ID NO: 61493 - protein, 305 aa, Methylophilus methylotrophus
MFGYSMADIGNIVVMQGFSGLSMFTVLLLMALGLAIIFGQMGVINMAHGEFMTIGAYTTVLISKVAASYGFTDYYFVFAIAIAFLLAFAVGYFVEFIMIRHLYKRPLDTLLATWGLNLVMQQIFRSSFGAKEVSAELPEWMLGSFKPTPDIDIPINGVFVMVLAALVTFGVYMFMYKSRWGLRVRATVQNRTMAGAVGINTAKVDRVTFALGCGIAGIAGAAFTTIASTGPTTGTLYIVDSFMVVVFGGAASIVGTIASAFGIAQAQSILQFFMTSSMGKVSTLLVIVTILMMKPEGLFASKLRK

SEQ ID NO: 61494 - DNA, 912 bp, Desulfococcus multivorans
  CDS (1)..(912): transl_table=11
atggactatttttttcagcagctgattaacggcctcaccctgggggggctgtatgccctgatcgctctcggatacaccatggtatacggcgtgatccagctgatcaatttcgcccacggcgagctctttgccgcagggggctatgtgggcgttattctcctcggctatttcacggggaggggatatctggaaacccatcccatcctctgtcttatcggcgccttcgccctgaccatgggatattgcgcctttctcgccgtcggcgtcgagaaggtggcctacaaaccccttcgccgtcaaccgaggctggcggtgctcctctcggccctgggtatgtccattttcctcagcaacgccctgatgctgacgcaaggcgtctacgacaaggcctaccccagcgaactcttccagggcggattcgacctgggaggggtcaccatcagctacctgcgcatcatgatcctggccatgacggtggtgctgctgatcgggctcaacctgttggtcttcaggaccaagatcggcatcgccatgcgggccacggcccaggacaagatcatgtcctctctcgtctccatcagcagcaaccggatcatatccctgacatttgccatcggcgcggggctcgcggccgcagccggggtcatggtgggcctctattacgggtccgtgcgctacgacatggggtttctgcccggtatcaaagcctttgccgccgccgtgctgggcgggatcggcaacatcacgggcgccatgctgggcgggctcatcatcgggatggtggaaattttcggtgcgggttacatctccggtcagtacaaggacgtgtttgcctttatcattctgatcgccgtgctttacttcaagccaacgggaatcatgggcgagaatatcgatgatacacgagtatag

SEQ ID NO: 61495 - protein, 303 aa, Desulfococcus multivorans
MDYFFQQLINGLTLGGLYALIALGYTMVYGVIQLINFAHGELFAAGGYVGVILLGYFTGRGYLETHPILCLIGAFALTMGYCAFLAVGVEKVAYKPLRRQPRLAVLLSALGMSIFLSNALMLTQGVYDKAYPSELFQGGFDLGGVTISYLRIMILAMTVVLLIGLNLLVFRTKIGIAMRATAQDKIMSSLVSISSNRIISLTFAIGAGLAAAAGVMVGLYYGSVRYDMGFLPGIKAFAAAVLGGIGNITGAMLGGLIIGMVEIFGAGYISGQYKDVFAFIILIAVLYFKPTGIMGENIDDTRV

SEQ ID NO: 61496 - DNA, 1917 bp, Burkholderia cepacia
  CDS (1)..(1917): transl_table=11
atgacccaatactacgtgctgcagctgttcaacgggctcgtcaacggcggcttcatcgccatgatgagcctggggctgagcgttattttcggcatgatgcgcgtcgtgaatttcgcgcacggcgcgctctacatgctcggcgcgttcatcgcgttcgtgctcggctcgcaactcggtctgtcgctgtgggccgcgctcgtgctggcgccactcgcgatcggcgcattcggcctcgtgctggagcggctctttctgcgtcatctgtacaaggtcgatccgtcgtacaacctgctgctcacgtttggcctcacgctcatcatcgaagacaccatgcggcgcttcttcgccgtgcagggtgcgccttttctggtgccgcagagcctcgcgggcgccgtcaatctcggcttcgtggtctatccgaagtaccgcttcttcgtgctcgtcgtgtcgctcgtgatttgcggcggcacctggttcatgctggaccgcacgcgtctcggcgcgctagtgagagccggtaccgagcggccgaatctgctgcgctgcttcggcgtacgcgtgccgctgctggtgtccggtgcgttcgcgttctcggcggggctcgcggcgctggcgggcgtgctcgcgtcgccgttgaagaacatttcgccgttcatggggcaggagatgatcgcgacgacgtttgccgtcgtcgtcgcgggcgggctggggtcgatcgtcgggtcggtggtgatgggctttctggtcggcgtgatctcgacgctcgcggcgatctggtatccgcccgtcgcaacggccgcgacgtacatcgtgatgatcgtcgtgctgatcgtgcggccgggtggcatctttcgcggtgtcgatgtcgcgcatttcccgctgcactacacgccaatcggtgccgccacgcgtcgcgtcgtgatgagctggcaggcgaagctcgtcgcgctggtggcaggtatcgcgctgccgtggctcgtgtatcccgtgctcgcgtgcgatatcgtgctgtggggcctgtgcgcgctcggctttgacctgctgttctcgttcggcgggctgctgtcgttcggacaggcggcgtggtggggggcaagcgcctatctgacggggatcttcatcgcaaagctgcactatccgatgtggatcggcctgctggcgggcgtgtcgatcagcacgctcgtcgcgcttgcgttcggcatgctcatcacacgcaaacagggcatctacttttcgatggtcacctttgcgctggcggagatcgtgtatttcgtcgtcaaccagtcgcccgcctatacgggcggcgaggatgggctgcacggcatcatgcgcggctcgctgttcggcgtgagcctgcacaaccagatcacgttctactacgtcgcgctcgtcgtcgtggcgctgacggtggggttcgtgttccgcatcattcgctcgccgttcggcctgtcgctcgcaggcgcgcgcgacagcgagcggcgcatgctgagcatcggttacgacgtgcgcggcctgcggctgcgcgcgtatgtgttgtccgcattcgtgatcagcgtcgcgggcggcctgtttgcgctcgcgcatgaattcgtgagcctcgaatcggtgtactggcgcgcgtcgggcgagccgatcatgatgacgctgctcggcggcgcaggcacggtgttcggaccgatgctgggcgccggcgtcgtgctggtcctgcgcgatcatctgagcaccgtcactgacagcggcaatctcgtgctcggtgtgacctccgtggtcatcgtgatgttatttcgccgcggcattctcggcgaagtgctgcatcgcgtgctcgccagaaccgctgcctggtccgcgcggtccgaacgcggatttcgcgagccctccgaagcggtttcttcttccgaccaatcgggtcttcattga

SEQ ID NO: 61497 - protein, 638 aa, Burkholderia cepacia
MTQYYVLQLFNGLVNGGFIAMMSLGLSVIFGMMRVVNFAHGALYMLGAFIAFVLGSQLGLSLWAALVLAPLAIGAFGLVLERLFLRHLYKVDPSYNLLLTFGLTLIIEDTMRRFFAVQGAPFLVPQSLAGAVNLGFVVYPKYRFFVLVVSLVICGGTWFMLDRTRLGALVRAGTERPNLLRCFGVRVPLLVSGAFAFSAGLAALAGVLASPLKNISPFMGQEMIATTFAVVVAGGLGSIVGSVVMGFLVGVISTLAAIWYPPVATAATYIVMIVVLIVRPGGIFRGVDVAHFPLHYTPIGAATRRVVMSWQAKLVALVAGIALPWLVYPVLACDIVLWGLCALGFDLLFSFGGLLSFGQAAWWGASAYLTGIFIAKLHYPMWIGLLAGVSISTLVALAFGMLITRKQGIYFSMVTFALAEIVYFVVNQSPAYTGGEDGLHGIMRGSLFGVSLHNQITFYYVALVVVALTVGFVFRIIRSPFGLSLAGARDSERRMLSIGYDVRGLRLRAYVLSAFVISVAGGLFALAHEFVSLESVYWRASGEPIMMTLLGGAGTVFGPMLGAGVVLVLRDHLSTVTDSGNLVLGVTSVVIVMLFRRGILGEVLHRVLARTAAWSARSERGFREPSEAVSSSDQSGLH

SEQ ID NO: 61498 - DNA, 939 bp, Pseudomonas putida
  CDS (1)..(939): transl_table=11
gtggacggtaatttcgatatcttgttgcaacaggtcctcaacggcctggtgctgggcagcatctatgccctggtagccttgggctacaccatggtctacggcatcatcggcctgatcaacttcgcccacggcgaggtggtgatgatcggcgccatggtcaccatttcggtactgacaatgctcgctggcgccggctttgcccctggcatcatcacgttgctgctggcaatcatggctgctgcggtggtgtgcatgctgctggcccagggcatggaaaagtacgcctatcggcccttgcgcaaagccccgcggctgaccccgctgatccttgccatcggcatctccatcgccttgcagaacctggcgatgatgatctgggggcgcggctacaagaccttccccgaagtggtagagacgcggcccgtggacgtgttcggcgccactgtcaccaacgtgcagctctcgatcatgctggttgccgtggtgatcatgcttggcttgtggctattggtggacaagacccgcctgggcaaagccatgcgcgccaccgcgcagaatcaggaagtggccgggctgatgggcattaacatcaatcgggtgatcagcgccactttcctgattggcgccagcctgggtgccatcgccggggtaatgcgcgccatcaactacggccaggccgatgcctacatgggcctgctactgggcctgaaggcgttctccgcagcggtgcttggcggtatcggcaacctgttcggggccatggctggcggcctgttgctgggtctgatcgaatcgctggcggcaggctacaccgggcagttgacgggcggcttcctgggggccaactaccaggacatcttcgcctttgcggtgctgatcctggtgttgctgttccggcccaatgggctgcttggcgaacgccaggctgaccgggcgtga

SEQ ID NO: 61499 - protein, 312 aa, Pseudomonas putida
MDGNFDILLQQVLNGLVLGSIYALVALGYTMVYGIIGLINFAHGEVVMIGAMVTISVLTMLAGAGFAPGIITLLLAIMAAAVVCMLLAQGMEKYAYRPLRKAPRLTPLILAIGISIALQNLAMMIWGRGYKTFPEVVETRPVDVFGATVTNVQLSIMLVAVVIMLGLWLLVDKTRLGKAMRATAQNQEVAGLMGININRVISATFLIGASLGAIAGVMRAINYGQADAYMGLLLGLKAFSAAVLGGIGNLFGAMAGGLLLGLIESLAAGYTGQLTGGFLGANYQDIFAFAVLILVLLFRPNGLLGERQADRA

SEQ ID NO: 61500 - DNA, 912 bp, uncultured archaeon GZfos35B7
  CDS (1)..(912): transl_table=11
atggacattggcgttttcatccagatattagtatggggcatttatgcgggctgtatatacatcctgttagcgatagggctgaacctgatattcggagttatgaaggttgtgaacttcgcgcatggcgaattgctgatgctcggagcttatgctaccttctggatttacaccttttctgatcttaacccctatcttgtgatcccccttgcgatgatcatattggcaattctcggggtctttatagaacggctttgcttccggccgataatgggtaccggtaagttgaacgagatctttctcagtctcggattgatatatctatttcagaatttagcggctgtattctggacaactgactcaagatctattcatagcccgtacagtgacgtttctattactctaggatccatcaatctgcccgtggattatatcctcattatcgtaattacggccatatgtctaattgcacttcaactattcatgaagaaagccaccctcggtagagcgatgcgagccacaagccagaacagggaggcggctacattaatgggtattaatgtggagcggatggacatgctcagttttgcattgggtgctgcatttgctgcgactgccggaagcttatgtttgataagtggtcaaatggtgaatccgtatgtggggtccatcccggcgatagaagcttttgcggtcgtaatcatcggcgggcttggtagtatacccggtgcaattatcgctggcctgactttgggtattgccgaaaacattgtgccgttattcctgcaatcgtcagtgggtttactaggccttgaaatgtcattctccgcatggaaggatacaatagcattcattatcttgattattgttcttgtaataaggccgacaggtatattcggggagaaggaagagtaa

SEQ ID NO: 61501 - protein, 303 aa, uncultured archaeon GZfos35B7
MDIGVFIQILVWGIYAGCIYILLAIGLNLIFGVMKVVNFAHGELLMLGAYATFWIYTFSDLNPYLVIPLAMIILAILGVFIERLCFRPIMGTGKLNEIFLSLGLIYLFQNLAAVFWTTDSRSIHSPYSDVSITLGSINLPVDYILIIVITAICLIALQLFMKKATLGRAMRATSQNREAATLMGINVERMDMLSFALGAAFAATAGSLCLISGQMVNPYVGSIPAIEAFAVVIIGGLGSIPGAIIAGLTLGIAENIVPLFLQSSVGLLGLEMSFSAWKDTIAFIILIIVLVIRPTGIFGEKEE

SEQ ID NO: 61502 - DNA, 924 bp, symbiont bacterium of Paederus fuscipes
  CDS (1)..(924): transl_table=11
atgcccgagatttatcactacttacagcaacttgttaacggtttgaccgtaggcagcacttacgcgctgattgcgatcggttacaccatggtctacggcatcatcggcatgatcaacttcgctcacggcgaggtctacatgctcggctcgtatatcgcttttatcgccattaccctattagcgatgctagggttggacaatgtcccactgctgatgctcgccgcattcaccgccagcatcattgtcactagcgccttcggctacagtattgagcgagtcgcataccgtccgttacgtggtggtaaccgtctgatcccactgatttccgcgattggcatgtctttcttcctgcagaacgccgtgatgctctcgcaggactcgaaggagaaagccattcctgccctgttgcccggtagcttcgtattcggcgaaagcagcatgaacggtgtggtcatttcttacatgcagattctgattttcattgttaccttcctagtaatgttcggcctcaccctgtttatctcccgttcccgtttgggacgtgcatgccgtgcctgtgccgaggacctaaagatggctgatctgctgggcattaacagcaataacgttatcgcctttaccttcgttattggtgctgccctggccgctgttgccgctacgctgctaggcatgttgtacggggtgatcaatcccggtatcggttttctcgccgggatcaaagcctttactgccgccgtgcttggtggtatcggcagcattcctggggccatgcttggtggcttgctgctgggtgttaccgaagccttcggtgctgatatgtttggtgaccaatacaaagacgtggtggctttcggcctgttgatcctggtgctgctgttccgacctaccggcatcctcggtcgccctgaggtggagaaagtatga

SEQ ID NO: 61503 - protein, 307 aa, symbiont bacterium of Paederus fuscipes
MPEIYHYLQQLVNGLTVGSTYALIAIGYTMVYGIIGMINFAHGEVYMLGSYIAFIAITLLAMLGLDNVPLLMLAAFTASIIVTSAFGYSIERVAYRPLRGGNRLIPLISAIGMSFFLQNAVMLSQDSKEKAIPALLPGSFVFGESSMNGVVISYMQILIFIVTFLVMFGLTLFISRSRLGRACRACAEDLKMADLLGINSNNVIAFTFVIGAALAAVAATLLGMLYGVINPGIGFLAGIKAFTAAVLGGIGSIPGAMLGGLLLGVTEAFGADMFGDQYKDVVAFGLLILVLLFRPTGILGRPEVEKV

SEQ ID NO: 61504 - DNA, 882 bp, Rhizobium sp
  CDS (1)..(882): transl_table=11
atggaactgttcttccaacttgtcgtcgatggccttgcatccggagccatctacgcgtccctggcgctggccttggtcctgatcttccgtgcgacgcgcatcgtcaatttcgggcaaggcgaaatggccaccttctcggcttattgtgcctggcagctctatgaatggggcatgccgatgatgctttccttcctcgtcgtcggcgtcttcgcgttcgtgctcgggatcggcattttccgcttcgtcatcaggccggtttctaaggccccggtcgaggccgtcgtcgtcgtgacgctcgggctcttcgtcgtcttccaggcgctatccctgtggctctggggttccgaccagcgtgcttttccctcgctgttcccgaacatcggctgggatttccttggcgtgcgcatgacggcaagtgcggccggcatgatcgcccttctgctctgtctcgccgtggccacgggggcggtctttcgcttcacacggcttggcctcgccatgcgagcctccgcctttgatggcgagaagagcctgcttgttgggatccccgtcgaacggatgctgatgctcggctggggctttgccgcggtgattggcttcgtcgcggcgcttctggtcgggccgcggctgttcctgagcccgacgatgatgatgccgatcctgctctacgccctggcgtcggcgacccttggcggctgggacagcccgctcggggcgatgatcggcggtctgattgtcggtgtggcggaaagcctcggcgcgacctttctccccttcatcggtgcggatctgcgcgtggtgatcccgatactcgtcactctcgtcgtcctgctcgttcggccggtcggtctcttcggtactcgcacggtggtcaagctatga

SEQ ID NO: 61505 - protein, 293 aa, Rhizobium sp
MELFFQLVVDGLASGAIYASLALALVLIFRATRIVNFGQGEMATFSAYCAWQLYEWGMPMMLSFLVVGVFAFVLGIGIFRFVIRPVSKAPVEAVVVVTLGLFVVFQALSLWLWGSDQRAFPSLFPNIGWDFLGVRMTASAAGMIALLLCLAVATGAVFRFTRLGLAMRASAFDGEKSLLVGIPVERMLMLGWGFAAVIGFVAALLVGPRLFLSPTMMMPILLYALASATLGGWDSPLGAMIGGLIVGVAESLGATFLPFIGADLRVVIPILVTLVVLLVRPVGLFGTRTVVKL

SEQ ID NO: 61506 - DNA, 942 bp, Rhizobium leguminosarum bv
  CDS (1)..(942): transl_table=11
atgcagcgtgtttcgctcgcatccaggggaaaacgacatatggagtatttcgtccagcagctcttaaatgggctgacgctcggatccatctatggccttgtggctattggctatacgatggtttacggcattatcggcatgatcaatttcgcccatggcgacatcttcatgctcggtggtttcgccgctcttatcgtcttcttcgtcctcacatccatcttcgcaggtctcccggtggcagttctgctgctggcgatgcttgtcgtcgcgatgttgatgacgagcttgtggaactggacgattgagcgcgtcgcataccgtcccctgcgcggttccttccgcctggcgccgctgatcaccgcgatcggcatgtcgatcacgctgtccaatttcatccaggtgacgcagggtccacgcaacaagccgattccgccgatggtgagctcggtctaccagttcggcaacatttcggtgtcgctgaaacagatcatcatcatcgtgatcacggcagtgctgctcacgatcttctggtacatcgtcaatcgtaccgcactcggccgtgcccagcgcgccactgagcaggatcgcaagatggcagcgctgctcggcgtcaacgtcgaccagacgatctcgatcactttcgttatgggtgcggcactcgcagccgtcgccggcacgatgtacctgatgtattatggcgtcgcctcgtttaacgacggcttcacgcccggtgtgaaggccttcacggcagccgttctcggcggtatcggttcgttacccggcgccgtcttcggcggcctccttatcggccttatcgagtcgctgtggtcggcatacttcaccatcgcctataaggacgtcgcgacctttgcgatcctggctttcgtgttgatcttcaagccgaccggcatcctcgggcggccggaagtcgagaaggtataa

SEQ ID NO: 61507 - protein, 313 aa, Rhizobium leguminosarum bv
MQRVSLASRGKRHMEYFVQQLLNGLTLGSIYGLVAIGYTMVYGIIGMINFAHGDIFMLGGFAALIVFFVLTSIFAGLPVAVLLLAMLVVAMLMTSLWNWTIERVAYRPLRGSFRLAPLITAIGMSITLSNFIQVTQGPRNKPIPPMVSSVYQFGNISVSLKQIIIIVITAVLLTIFWYIVNRTALGRAQRATEQDRKMAALLGVNVDQTISITFVMGAALAAVAGTMYLMYYGVASFNDGFTPGVKAFTAAVLGGIGSLPGAVFGGLLIGLIESLWSAYFTIAYKDVATFAILAFVLIFKPTGILGRPEVEKV

SEQ ID NO: 61508 - DNA, 867 bp, Azoarcus evansii
  CDS (1)..(867): transl_table=11
atggatttcgtatccttcctgatccaggtgctgaactcgctgcagtacggcctgctgctgttcctcgtggccagcgggctgacgctggtgttcggcatcatgggcatcatcaacctcgcgcacggcagcttctacatggtcggcgcctacctcgcgttcgcgctcacgagcctgaccggcaacctgatgctggcgatcgcgctggggttgccgctggccttcgtgttcggcgcgatcctcgaatgggcgctgttctcgcacctgtacaagcgcgaccacctcgaacaggtgctgctgacctacggcctgatcctgatcttcgaggagctgcgcagcctcgccgtcggcgacgacgtgcatggcgtgacgatccccgagctgttctcggcatcgatcccgctctcggataacctcagctacccgctgtatcggctggtgatctcggtcgtgtgcctcgcgctcgcgggcgggctgtactggctgatccagaagacgcgcctcggcatgatgatccgcgccggcagccacgaccgcgacatggtcaaggcgctcggcatcgacatcaacctgctgtaccgcaccgtgtttgccctcggtgtcgcgctcgcggcgctggccggcatgctcgccgcgccgatctcctccgtctatccgggcatgggcagcagcgtgctgatcatctccttcgtgatcgtcgtgatcggcggcgtcggctcggtgtggggcgcgctcgtcgcggcgctcgtgatcggcttcgcggacaccttcggcaaggtgctgctgcccgatctcgcgggcctgatggtctatctcgtgatggccgtggtgctgctgtggcgccccgaaggcatcttcaagaaggcttga

SEQ ID NO: 61509 - protein, 288 aa, Azoarcus evansii
MDFVSFLIQVLNSLQYGLLLFLVASGLTLVFGIMGIINLAHGSFYMVGAYLAFALTSLTGNLMLAIALGLPLAFVFGAILEWALFSHLYKRDHLEQVLLTYGLILIFEELRSLAVGDDVHGVTIPELFSASIPLSDNLSYPLYRLVISVVCLALAGGLYWLIQKTRLGMMIRAGSHDRDMVKALGIDINLLYRTVFALGVALAALAGMLAAPISSVYPGMGSSVLIISFVIVVIGGVGSVWGALVAALVIGFADTFGKVLLPDLAGLMVYLVMAVVLLWRPEGIFKKA

SEQ ID NO: 61510 - DNA, 873 bp, Rhizobium leguminosarum bv
  CDS (1)..(873): transl_table=11
atgctctcgaccatactcgagcaatctgtgaatggaatcgtcacgggttccgtttacgccatcgtcgccgtcggcatgaccatgattttcggcgtgctgagagccatcaattttgctcacggcgaatactacatgctcggcacgttcggggcctggtttgcgatcgattatctcggcctgtcctacgaagtgtcgattgtcgtgggcgttcttgcgacaatcgccgttgcctatgtggtcgggcaactcgtcatgcgccggatggtcggcgcgcccgcggagtcgggcgtgctcgccacccttggcatcgcgctgatcctgcagaacaccatcattctcgtcttcggcggaggctacaagttcttcgccggaggctatatcgaaccggtttccatcctgggcttcagtctggccgagcagcgcattctcattctcgtcgtctgcctgttggtattcatcggcctcgaactgatggtcagctacacccgcctcggaatggcgatgcgcgccgtttcccagaacgtcgagtgctgcagcgtcgtcggcatcgatgtgccacaggtggtgcttcgaaccttcatgctgggggcggccctcgccgcactttcgggtgttctgacggcgccggtcaatgtcagtgtttatggcggcatgggcgagttgatcaccttcaagacgctgccgatcattatcatgggcggtttggggaatgtgcgtggaactttcgtcgcggcgatgatccttggcgttgccgagagcctggtcgccacctatgtcggcttgcaattccgcgacacggggtcgttcgccacgctgatcctgatgctgatgtggcgaccgcatggcctcttttcgacgcaggcgcgcttctag

SEQ ID NO: 61511 - protein, 290 aa, Rhizobium leguminosarum bv
MLSTILEQSVNGIVTGSVYAIVAVGMTMIFGVLRAINFAHGEYYMLGTFGAWFAIDYLGLSYEVSIVVGVLATIAVAYVVGQLVMRRMVGAPAESGVLATLGIALILQNTIILVFGGGYKFFAGGYIEPVSILGFSLAEQRILILVVCLLVFIGLELMVSYTRLGMAMRAVSQNVECCSVVGIDVPQVVLRTFMLGAALAALSGVLTAPVNVSVYGGMGELITFKTLPIIIMGGLGNVRGTFVAAMILGVAESLVATYVGLQFRDTGSFATLILMLMWRPHGLFSTQARF

SEQ ID NO: 61512 - DNA, 885 bp, Burkholderia cepacia
  CDS (1)..(885): transl_table=11
atgacgggatctctgtttctgcaggccattctggctggcatcacgagcggctttgtctatgccttgatcgccgtgggcattgccgtgattttcaggggcagccacatcatcaacgccatgcagggtgagtttgcggtcgttggagctttggttgctgtgttcgcgctgacgaagagcggcttgccctattggctggcagcactgctgggcgtggctgccggcgcggccatcggcgcggcgattgacgtcctcttcgtgcgtcccatgaagcggcgcaacgccagtgaggaaagcttcctgctcctgaccatcggcctcgcgtttacgttgtcagccgctgccctctacttcaccggtcgcgattcgcacctgttgccttcctatgccgagggcgtggtggaaatcgccggcgcaacgattcccaagcatgcgctttggctgatcctgatctcgttgctggtggtgggtgggttgaggcttttctatcgcaagacgcttttgggtctgtccatggcggccgcttctgccgatccggacggcgccaccacgaccggcatcgatgtgaaccgggctcggctctatacgtttctcctgggtggtgcggtcggtgccttggcgggcatcctggtcactcccttgatcgccatgaactaccacatcggcattgtctacaccctcaagggcttcgcggctgccattctgggagggatagccaacccgatcggtgccgtgctgggggggctgatgattggtctgattgagtcgctggccgcagttgtattcccatccggctaccgggatgccgttgcgatggcgttcctgatcctcatcatgatcgtcatgccgaatgggttgatcggccgagccggacgggcgggagggtaa

SEQ ID NO: 61513 - protein, 294 aa, Burkholderia cepacia
MTGSLFLQAILAGITSGFVYALIAVGIAVIFRGSHIINAMQGEFAVVGALVAVFALTKSGLPYWLAALLGVAAGAAIGAAIDVLFVRPMKRRNASEESFLLLTIGLAFTLSAAALYFTGRDSHLLPSYAEGVVEIAGATIPKHALWLILISLLVVGGLRLFYRKTLLGLSMAAASADPDGATTTGIDVNRARLYTFLLGGAVGALAGILVTPLIAMNYHIGIVYTLKGFAAAILGGIANPIGAVLGGLMIGLIESLAAVVFPSGYRDAVAMAFLILIMIVMPNGLIGRAGRAGG

SEQ ID NO: 61514 - DNA, 945 bp, Burkholderia cepacia; identical to SEQ ID NO: 61055
  CDS (1)..(945): transl_table=11

SEQ ID NO: 61515 - protein, 314 aa, Burkholderia cepacia; identical to SEQ ID NO: 61056

SEQ ID NO: 61516 - DNA, 867 bp, Agrobacterium tumefaciens
  CDS (1)..(867): transl_table=11
atggattttgctatcattcttttacttcagatcgcgattgcgatcgcgaccattattcttttcagcatcggtctcgctgtcgtgttcgggatgatgcgcgtcatcaatctcgcgcatggcgaattcatcatgctcggcgcgtatggtgcgctcaaaagctacgaggccggtctgaacctctgggtcggcatgctgatcgtcgcgccgcttgtctccgccatttacgggctcgtcgtcgagcgcatcctgatccggcgcctttacggccgtctgatcgatactctgttggcgacatgggggctgagtctttttacggtcggcatggtgacgatgatcttcggaaataccgccggaagcgtccccacgccattgtcgacgctacagatcggccagtacggccttggtatttacaatctgtttatcgtcgccatcacgggtgtcgtgcttctggcgatatacctcgtgctgaaacggaccaatctggggacgctcgcgcgcggcaccatgcaggatgccgatatggtggctgccctcggctataatccgaagacagtctacgctgcgaccttcgccataggcgcagccctcgcgggccttgccggtggattgcttgccccggtaaccggcatcattccgaccatgggggctgccttcgtggcgaaggccttcatcaccgtcatctccggcggcgcggcgatcatacttggtacagggtctacggccgcgatcttcggtgccatcaaccagatcgtgacattcgtttccacacctgttctcggtgaagctgcccttcttctggcggcgatattgcttttgcgcatgttgccgaatggcctgtccggacgctttttcaaagggggcgtataa

SEQ ID NO: 61517 - protein, 288 aa, Agrobacterium tumefaciens
MDFAIILLLQIAIAIATIILFSIGLAVVFGMMRVINLAHGEFIMLGAYGALKSYEAGLNLWVGMLIVAPLVSAIYGLVVERILIRRLYGRLIDTLLATWGLSLFTVGMVTMIFGNTAGSVPTPLSTLQIGQYGLGIYNLFIVAITGVVLLAIYLVLKRTNLGTLARGTMQDADMVAALGYNPKTVYAATFAIGAALAGLAGGLLAPVTGIIPTMGAAFVAKAFITVISGGAAIILGTGSTAAIFGAINQIVTFVSTPVLGEAALLLAAILLLRMLPNGLSGRFFKGGV

SEQ ID NO: 61518 - DNA, 903 bp, Rhizobium leguminosarum bv
  CDS (1)..(903): transl_table=11
atggagtatttcgtccagcagctcttaaatgggctgacgctcggatccatctatggccttgtggctattggctatacgatggtttacggcattatcggcatgatcaatttcgcccatggcgacattttcatgctcggtggtttcgccgctcttatcgtcttcctcgtcctcacatccatcttcgcaggtctcccggtggcagttctgctgctggcgatgcttgtcgtcgcgatgttgatgacgagcttgtggaactggacgattgagcgcgtcgcataccgtcccctgcgcggttccttccgcctggcgccgctgattaccgcgatcggcatgtcgatcacgctgtccaatttcatccaggtgacgcagggtccacgcaacaagccgattccgccgatggtgagctcggtctaccagttcggcaacatttcggtgtcgctgaaacagatcatcatcatcgtgatcacggcagtgctgctcacgatcttctggtacatcgtcaatcgtaccgcactcggccgtgcccagcgcgccactgagcaggatcgcaagatggcagcgctgctcggcgtcaacgtcgaccagacgatctcgatcactttcgttatgggtgcggcactcgcagccgtcgccggcacgatgtacctgatgtattatggcgtcgcctcgtttaacgacggcttcacgcccggtgtgaaggccttcacggcagccgttctcggcggtatcggttcgttacccggcgccgtcttcggcggcctccttatcggccttatcgagtcgctgtggtcggcatacttcaccatcgcctataaggacgtcgcgacctttgcgatcctggctttcgtgttgatcttcaagccgaccggcatcctcgggcggccggaagtcgagaaggtataa

SEQ ID NO: 61519 - protein, 300 aa, Rhizobium leguminosarum bv
MEYFVQQLLNGLTLGSIYGLVAIGYTMVYGIIGMINFAHGDIFMLGGFAALIVFLVLTSIFAGLPVAVLLLAMLVVAMLMTSLWNWTIERVAYRPLRGSFRLAPLITAIGMSITLSNFIQVTQGPRNKPIPPMVSSVYQFGNISVSLKQIIIIVITAVLLTIFWYIVNRTALGRAQRATEQDRKMAALLGVNVDQTISITFVMGAALAAVAGTMYLMYYGVASFNDGFTPGVKAFTAAVLGGIGSLPGAVFGGLLIGLIESLWSAYFTIAYKDVATFAILAFVLIFKPTGILGRPEVEKV

SEQ ID NO: 61520 - DNA, 924 bp, Pseudomonas aeruginosa
  CDS (1)..(924): transl_table=11
atgcccgagatttatcattacctacaacaattggttaacggcctgaccgtcggcagcacctatgcgctgatcgcgatcggctacaccatggtctacggcatcatcggcatgatcaacttcgcccacggcgaggtgtacatgatcggctcgtacatcgccttcatcgccatcaccctgctggcgatgatggggctggacagcgttccgctgatgatgctcgccgcattcgccgccagcatcatcgtcaccagtgctttcggctacagcatcgagcgggtcgcctaccgcccgttgcgcggcggcaaccgcctgatcccgctgatctccgcgatcggcatgtcgatcttcctgcagaacgccgtgatgctctcgcaggactccaaggaaaaggccatcccgaccctgctgcccggcaacttcgtgttcggcgaaagcagcatgaacggcgtggtgatctcctatatgcagatcctgatcttcgtcgtcaccttcctggtgatgttcggcctcaccctgttcatctcccgttcccgcctgggccgcgcctgccgcgcctgcgccgaggacctgaagatgaccaacctgctgggtatcaacagcaacaacatcatcgccctcaccttcgtcatcggcgccgccctggccgccgtcgccgcggtgctgctgggcatgcagtacggcgtgatcaaccccgggatcggcttcctcgccgggatcaaggcgttcaccgccgcggtgctcggcggcatcggtagcatccccggcgccatgctcggcggcctgctgctgggcgtcgccgaagccttcggcgccgacgtgttcggcgaccagtacaaggacgtggtggccttcggcctgctgatcctggtgctgctgttccgacctaccggcatcctcggtcgtccggaggtggaaaaagtatga

SEQ ID NO: 61521 - protein, 307 aa, Pseudomonas aeruginosa
MPEIYHYLQQLVNGLTVGSTYALIAIGYTMVYGIIGMINFAHGEVYMIGSYIAFIAITLLAMMGLDSVPLMMLAAFAASIIVTSAFGYSIERVAYRPLRGGNRLIPLISAIGMSIFLQNAVMLSQDSKEKAIPTLLPGNFVFGESSMNGVVISYMQILIFVVTFLVMFGLTLFISRSRLGRACRACAEDLKMTNLLGINSNNIIALTFVIGAALAAVAAVLLGMQYGVINPGIGFLAGIKAFTAAVLGGIGSIPGAMLGGLLLGVAEAFGADVFGDQYKDVVAFGLLILVLLFRPTGILGRPEVEKV

SEQ ID NO: 61522 - DNA, 927 bp, Escherichia coli O157
  CDS (1)..(927): transl_table=11
atgtctgagcagtttttgtatttcttgcagcagatgtttaacggcgtcacgctgggcagtacttacgcgctgattgccatcggctacaccatggtttacggcattatcggcatgatcaacttcgcccacggcgaggtttacatgatcggcagctacgtctcatttatgatcatcgccgcactgatgatgatgggcattgataccggctggctgctggtagcggcgggattcgtcggcgcaatcgtcattgccagcgcctacggctggagtatcgaacgggtggcttaccgcccggtgcgtaactctaagcgcctgattgcactcatctcggcaatcggtatgtccatcttcctgcaaaactacgtcagcctgactgaaggttcgcgcgacgtggcgctgcccagcttgtttaatggtcagtgggtagtgggtcatagcgaaaacttctctgcctctattaccaccatgcaggcggtgatctggattgtcaccttcctcgccatgctggcgctgacgattttcattcgttattcccgtatggggcgcgcctgccgtgcctgcgccgaagatctgaaaatggcgagcctgcttggcattaacaccgaccgggtgattgctttgacctttgtgattggcgcggcgatggcggcggtggcgggcgtactgctcggtcagttctacggcgtcattaacccctatatcggctttatggccgggatgaaagcctttaccgctgcggtgctcggtgggattggcagcattccgggagcgatgattggcgggctgattctggggattgcggaggcgctctcttctgcctacctgagtacggaatataaagatgtggtctcattcgccctgctgattctggtgctgctggtgatgccgaccggtattctgggtcgcccggaggtagagaaagtatga

SEQ ID NO: 61523 - protein, 308 aa, Escherichia coli O157
MSEQFLYFLQQMFNGVTLGSTYALIAIGYTMVYGIIGMINFAHGEVYMIGSYVSFMIIAALMMMGIDTGWLLVAAGFVGAIVIASAYGWSIERVAYRPVRNSKRLIALISAIGMSIFLQNYVSLTEGSRDVALPSLFNGQWVVGHSENFSASITTMQAVIWIVTFLAMLALTIFIRYSRMGRACRACAEDLKMASLLGINTDRVIALTFVIGAAMAAVAGVLLGQFYGVINPYIGFMAGMKAFTAAVLGGIGSIPGAMIGGLILGIAEALSSAYLSTEYKDVVSFALLILVLLVMPTGILGRPEVEKV

SEQ ID NO: 61524 - DNA, 948 bp, Methanococcus jannaschii
  CDS (1)..(948): transl_table=11
ttggtcaagcttttactaaaagatttaggtgagaaaatgattttagaaggagctattatatactccaaccttttggttttgttggctttgggattaactctaacttatataacaacaaacgttccaaactttgctcagggaagttatgcgatagttgggagttatgttgctttaacattattaaagttgtttggtatttgtccttatctttctttaccagttttatttgttgttggggcaattgttggtttaataacttatttagctttaaagcccttgataaaaagaaatgcctctgtagagattttaatgattgcaactcttgctatagatttaatattattgggtgttattggggcttactctgaaatattaagtcaaattgttggttctactcaagcaaaattcgtttttgcaaacttggatttttcattatttggatttaaaggaattttatttgtttcaaccttcgtagttatactactattaattggactttatctcctcctgtataaaacaaagtttggtattgctttgagagcttcaatggagaatccttcattagctcaaactatgggaattgatgttgaaaaaacaagattattttcttggattctttctggagctttagctggagttgctggtgggcttttacctttcatgcaagagattgttccagccactggggatttaattattatttcaatctttgcggcaagtattgttggaggtttaaggcatataagtggagcattaatagggggctatataattggaatatctgagagtttaataacttattatttagcatcagcatttggaacaggatttttggtttatggaaaggttatctccttaataataatgatagcaacattattaatagcaccttatggaattactggagtcgattggaaaaagttaaaaagattattatctacttcataa

SEQ ID NO: 61525 - protein, 315 aa, Methanococcus jannaschii
MVKLLLKDLGEKMILEGAIIYSNLLVLLALGLTLTYITTNVPNFAQGSYAIVGSYVALTLLKLFGICPYLSLPVLFVVGAIVGLITYLALKPLIKRNASVEILMIATLAIDLILLGVIGAYSEILSQIVGSTQAKFVFANLDFSLFGFKGILFVSTFVVILLLIGLYLLLYKTKFGIALRASMENPSLAQTMGIDVEKTRLFSWILSGALAGVAGGLLPFMQEIVPATGDLIIISIFAASIVGGLRHISGALIGGYIIGISESLITYYLASAFGTGFLVYGKVISLIIMIATLLIAPYGITGVDWKKLKRLLSTS

SEQ ID NO: 61526 - DNA, 927 bp, Salmonella typhi
  CDS (1)..(927): transl_table=11
atgtccgagcagtttctctatttcttgcagcagatgtttaacggcgtcacgctggggagcacctacgcgctgattgctatcggttatacgatggtgtacggcattatcggcatgatcaacttcgctcatggcgaggtgtatatgatcggcagctacgtctcttttatgatcatcgccgcgctaatgatgatgggaatagacaccagttggctactggtggccgccggatttatcggcgcgattattattgccagcgcctacggctggagtatcgagcgagtcgcttaccggcctgtgcgcaattccaagcgcctgatcgccctgatttccgccatcgggatgtccatctttctgcaaaactacgtcagcctgacggaaggttcgcgcgacgtggcgttacccagcctgtttaacggccagtggattgtgggcagcagcgaaaacttttccgcgtccatcaccaccatgcaggcggttatctggatagtcacctttctggctatgctggcgctcaccattttcattcgctactcccggatgggccgcgcctgccgcgcctgcgcggaggatctgaaaatggccagcctgctcggcattaataccgaccgcgtcattgcgctaacgtttgttatcggcgcggcaatggcggcggtggcgggcgtgctgctcggtcagttctatggcgtgattaacccctacatcggttttatggccgggatgaaagcgttcaccgcggcggtgctgggcggtattggcagcattccgggcgcgatgatcggcggtctgattttgggcgtcgccgaagcgctctcgtctgcatatttaagtaccgaatataaagatgtcgtgtcgttcgctctgctgattctggtactgctggtgatgccgaccggtatcctggggcgtccggaggtagagaaagtatga

SEQ ID NO: 61527 - protein, 308 aa, Salmonella typhi
MSEQFLYFLQQMFNGVTLGSTYALIAIGYTMVYGIIGMINFAHGEVYMIGSYVSFMIIAALMMMGIDTSWLLVAAGFIGAIIIASAYGWSIERVAYRPVRNSKRLIALISAIGMSIFLQNYVSLTEGSRDVALPSLFNGQWIVGSSENFSASITTMQAVIWIVTFLAMLALTIFIRYSRMGRACRACAEDLKMASLLGINTDRVIALTFVIGAAMAAVAGVLLGQFYGVINPYIGFMAGMKAFTAAVLGGIGSIPGAMIGGLILGVAEALSSAYLSTEYKDVVSFALLILVLLVMPTGILGRPEVEKV

SEQ ID NO: 61528 - DNA, 20 bp, Artificial sequence
  primer
atggagcttttcgcccagac

SEQ ID NO: 61529 - DNA, 23 bp, Artificial sequence
  primer
ttatgccgccctccaggcccggc

SEQ ID NO: 61530 - protein, 370 aa, Artificial sequence
  consensus sequence
  Variant (2)..(4): Xaa in position 2 to 4 is any amino acid
  Variant (5)..(6): Xaa in position 5 to 6 is any or no amino acid
  Variant (8)..(11): Xaa in position 8 to 11 is any amino acid
  Variant (13)..(13): Xaa in position 13 is any amino acid
  Variant (15)..(15): Xaa in position 15 is any amino acid
  Variant (17)..(21): Xaa in position 17 to 21 is any amino acid
  Variant (23)..(27): Xaa in position 23 to 27 is any amino acid
  Variant (29)..(29): Xaa in position 29 is any amino acid
  Variant (33)..(37): Xaa in position 33 to 37 is any amino acid
  Variant (39)..(88): Xaa in position 39 to 88 is any amino acid
  Variant (89)..(146): Xaa in position 89 to 146 is any or no amino acid
  Variant (148)..(208): Xaa in position 148 to 208 is any amino acid
  Variant (209)..(224): Xaa in position 209 to 224 is any or no amino acid
  Variant (226)..(228): Xaa in position 226 to 228 is any amino acid
  Variant (231)..(241): Xaa in position 231 to 241 is any amino acid
  Variant (243)..(252): Xaa in position 243 to 252 is any amino acid
  Variant (254)..(263): Xaa in position 254 to 263 is any amino acid
  Variant (265)..(276): Xaa in position 265 to 276 is any amino acid
  Variant (277)..(279): Xaa in position 277 to 279 is any or no amino acid
  Variant (281)..(287): Xaa in position 281 to 287 is any amino acid
  Variant (289)..(293): Xaa in position 289 to 293 is any amino acid
  Variant (296)..(296): Xaa in position 296 is any amino acid
  Variant (298)..(300): Xaa in position 298 to 300 is any amino acid
  Variant (302)..(309): Xaa in position 302 to 309 is any amino acid
  Variant (311)..(334): Xaa in position 311 to 334 is any amino acid
  Variant (335)..(363): Xaa in position 335 to 363 is any or no amino acid
  Variant (365)..(367): Xaa in position 365 to 367 is any amino acid
  Variant (369)..(369): Xaa in position 369 is any amino acid
GXXXXXGXXXXLXAXGXXXXXGXXXXXNXAHGXXXXXGXXXXXXXXXXXXXXXXXXXXXXXXXXXXXXXXXXXXXXXXXXXXXXXXXXXXXXXXXXXXXXXXXXXXXXXXXXXXXXXXXXXXXXXXXXXXXXXXXXXXXXXXXXXXGXXXXXXXXXXXXXXXXXXXXXXXXXXXXXXXXXXXXXXXXXXXXXXXXXXXXXXXXXXXXXXXXXXXXXXXXXXXXXGXXXRAXXXXXXXXXXXGXXXXXXXXXXFXXXXXXXXXXGXXXXXXXXXXXXXXXGXXXXXXXFXXXXXGGXGXXXGXXXXXXXXGXXXXXXXXXXXXXXXXXXXXXXXXXXXXXXXXXXXXXXXXXXXXXXXXXXXXXLXXXPXG

SEQ ID NO: 61531 - protein, 36 aa, Artificial sequence
  protein pattern
  Variant (2)..(9): Xaa in position 2 to 9 is any amino acid
  Variant (10)..(10): Xaa in position 10 is Ile, Leu, Met or Val
  Variant (11)..(11): Xaa in position 11 is any amino acid
  Variant (12)..(12): Xaa in position 12 is Ala, Gly, Ser or Thr
  Variant (13)..(13): Xaa in position 13 is any amino acid
  Variant (14)..(14): Xaa in position 14 is Cys or Gly
  Variant (15)..(25): Xaa in position 15 to 25 is any amino acid
  Variant (27)..(27): Xaa in position 27 is Phe, Ile, Leu, Met or Val
  Variant (29)..(29): Xaa in position 29 is any amino acid
  Variant (31)..(35): Xaa in position 31 to 35 is any amino acid
  Variant (36)..(36): Xaa in position 36 is Ala, Gly, Pro or Ser
GXXXXXXXXXXXXXXXXXXXXXXXXNXAXGXXXXXX

SEQ ID NO: 61532 - DNA, 105 bp, Thermus thermophilus
  CDS (1)..(105): transl_table=11
atggaagaaaagcccaaaggcgcactggcggtcatcctggtcctgaccctcaccatcctggtcttctggctgggagtgtacgccgtcttcttcgctagggggtaa

SEQ ID NO: 61533 - protein, 34 aa, Thermus thermophilus
MEEKPKGALAVILVLTLTILVFWLGVYAVFFARG

SEQ ID NO: 61534 - DNA, 105 bp, Escherichia coli O157:H7 EDL933
  CDS (1)..(105): transl_table=11
atgtcggatgatatttcactggcaatggaaggtgcgctggctgttattgctgttgtgggcgtttactgcctggttgtgtttttgatggatcgactagggaactga

SEQ ID NO: 61535 - protein, 34 aa, Escherichia coli O157:H7 EDL933
MSDDISLAMEGALAVIAVVGVYCLVVFLMDRLGN

SEQ ID NO: 61536 - DNA, 168 bp, Streptomyces coelicolor A3(2)
  CDS (1)..(168): transl_table=11
atgctgtttctcgtagtcgcacttctgctcctcggagtggtcctgggcgccgtcgcccacgcaccgctgaccttctccgtcgcggccggcctggtcatcgccgtctggctcggcatcttcgcggtccgcgagcggcacggccgccggcggggcacctccgcccactga

SEQ ID NO: 61537 - protein, 55 aa, Streptomyces coelicolor A3(2)
MLFLVVALLLLGVVLGAVAHAPLTFSVAAGLVIAVWLGIFAVRERHGRRRGTSAH

SEQ ID NO: 61538 - DNA, 171 bp, Streptomyces coelicolor A3(2)
  CDS (1)..(171): transl_table=11
atggttccgcttctgctcgtactgcttctcgcgatcgtccttttcggtatcggattcgcggtgaaggttctctggtggatcgctctggcggttctggtcctgtggctgatcggtttcctggcccgcgggacgacggccggcggcggcaggggccgctggtaccggtggtga

SEQ ID NO: 61539 - protein, 56 aa, Streptomyces coelicolor A3(2)
MVPLLLVLLLAIVLFGIGFAVKVLWWIALAVLVLWLIGFLARGTTAGGGRGRWYRW

SEQ ID NO: 61540 - DNA, 171 bp, Streptomyces avermitilis MA-4680
  CDS (1)..(171): transl_table=11
atggttcccctgctgctcgttcttctgctcgccctgatcctcttcggtgccggattcgcactcaaggccctgtggtggatcgccgtgatcgtcctggtgatctggctggtcggcttcttcgctcgctcctcgggagcaggtgggaagcgaggccgctggtatcgctggtag

SEQ ID NO: 61541 - protein, 56 aa, Streptomyces avermitilis MA-4680
MVPLLLVLLLALILFGAGFALKALWWIAVIVLVIWLVGFFARSSGAGGKRGRWYRW

SEQ ID NO: 61542 - DNA, 156 bp, Cytophaga hutchinsonii ATCC 33406
  CDS (1)..(156): transl_table=11
atgggaaatatattatacatcatcgcagtaatcttggtcatcttttgggcagtaggattctttgcttacacagcaggtggcatcatacacgtattgttagtattagcaattattgctattctgatccgtgtaattcaaggcgacaaagttgtctga

SEQ ID NO: 61543 - protein, 51 aa, Cytophaga hutchinsonii ATCC 33406
MGNILYIIAVILVIFWAVGFFAYTAGGIIHVLLVLAIIAILIRVIQGDKVV

SEQ ID NO: 61544 - DNA, 96 bp, Trichodesmium erythraeum IMS101
  CDS (1)..(96): transl_table=11
atggaaagtgcagcttacattttggtactagctttggccttaggcgtaatattttttgccatcgccttccgtgatccacctaggattggaaagtaa

SEQ ID NO: 61545 - protein, 31 aa, Trichodesmium erythraeum IMS101
MESAAYILVLALALGVIFFAIAFRDPPRIGK

SEQ ID NO: 61546 - DNA, 177 bp, Oryza sativa subsp
  CDS (1)..(177)
atggctgcttctttcatggctcgcgtcggggtaatcctagtgctgtccctttggctgctgccgtcgcttttgcccggtttttttgccgccgggggctttatcagccggcaacgggcttttgccatgaaaagaaaaaagaaggttgtcaatctctattaccagtactatagtcaatag

SEQ ID NO: 61547 - protein, 58 aa, Oryza sativa subsp
MAASFMARVGVILVLSLWLLPSLLPGFFAAGGFISRQRAFAMKRKKKVVNLYYQYYSQ

SEQ ID NO: 61548 - DNA, 108 bp, Anabaena sp
  CDS (1)..(108): transl_table=11
atggaaagcgttgcttacattctaattttgaccctagcaataggcgttctcttttttgcgatcgcattccgcgaaccaccccgcattgagaaaaaagaagagaaataa

SEQ ID NO: 61549 - protein, 35 aa, Anabaena sp
MESVAYILILTLAIGVLFFAIAFREPPRIEKKEEK

SEQ ID NO: 61550 - DNA, 20 bp, Artificial sequence
  primer
atggaagaaaagcccaaagg

SEQ ID NO: 61551 - DNA, 23 bp, Artificial sequence
  primer
ttaccccctagcgaagaagacgg

SEQ ID NO: 61552 - protein, 1 aa, Artificial sequence
  consensus sequence
L

SEQ ID NO: 61553 - DNA, 675 bp, Thermus thermophilus
  CDS (1)..(675): transl_table=11
atggtggaggttcggtatctcggccactcggcggtcctcctcacggacggcaagacgcggatcgtcattgaccccttcctcaccggaaaccccatggccgccctcggggtgggggaggtccaggcggacctcatcctggtcacccacgcccacggggaccacttcggggacagcgtggccctctccaagaagggaggcgtggtggtctccacctttgagatcgccacctacgccgagaagcacggggcgaagagcgtccccatgaacctggggggcacctaccgctttgagggcggctggctcaagtgggtgcccgcctggcactccagtagcttccccgacggcacctacggtggcatgcccatgggcgtggtggtggagcttgggggcaagcgcatctaccacgccggggacaccgccctcttctccgacatgcgcctcatcggggagatgggcctggacctcgccctcctccccatcggcgaccacttcaccatgggccccgaggacgccctgaaggccctggagctcctcaggcccaagaaggtggtgcccatccactacaacaccttcccccccatccgccaagacggggaggccttcgcccaacgggccagggagaagggcgtggaggggcatgccctaaagccgggagaggttctccgccttgactaa

SEQ ID NO: 61554 - protein, 224 aa, Thermus thermophilus
MVEVRYLGHSAVLLTDGKTRIVIDPFLTGNPMAALGVGEVQADLILVTHAHGDHFGDSVALSKKGGVVVSTFEIATYAEKHGAKSVPMNLGGTYRFEGGWLKWVPAWHSSSFPDGTYGGMPMGVVVELGGKRIYHAGDTALFSDMRLIGEMGLDLALLPIGDHFTMGPEDALKALELLRPKKVVPIHYNTFPPIRQDGEAFAQRAREKGVEGHALKPGEVLRLD

SEQ ID NO: 61555 - DNA, 732 bp, Xanthobacter autotrophicus Py2
  CDS (1)..(732): transl_table=11
atgaagatcacctggttcggccacgccgcgttccgcctcgactttgcggacaaggcggtgctcatcgatcccttcttcaccggcaatcccagcttcaactccacggtggaggaggccgcccgaggggtgacccacatcctgctcacccacggccattccgaccatgtgggcgacaccgtctccctggtggaggatgcggccgatgccagccggaccctgccggtggtggccaatcccgagatctgcgcctatctcgccgccaagggcgccggcaatgccgggcagatgatgaacaccggaggttcgctggattgcggcggcttcaccgtgaccatggtgcgcgccgaccattcctcgggtgggccgggcagcccctccgaatatctgggcaaccccaccggcctcatcatccgggcgccgggcgagcccaccgtctggcacatgggcgacaccgacatctattccgacatggcgttgatgtgcgagatccaccggcccaaggtggtcttcattcccatcggcgaccgcttcaccatgggccctgccgtggcggcgctggcggtgaagcgcttcctgccgggcgtggaagtggtggtgccgtgccattacggctccttccccatcctggtgcaggacgcctccttcttcgcgcaggcgctggcggaccacccggtgaaggtggtggtgcccggccccggcgggtcgttcgacgccaacatcacgccggcataa

SEQ ID NO: 61556 - protein, 243 aa, Xanthobacter autotrophicus Py2
MKITWFGHAAFRLDFADKAVLIDPFFTGNPSFNSTVEEAARGVTHILLTHGHSDHVGDTVSLVEDAADASRTLPVVANPEICAYLAAKGAGNAGQMMNTGGSLDCGGFTVTMVRADHSSGGPGSPSEYLGNPTGLIIRAPGEPTVWHMGDTDIYSDMALMCEIHRPKVVFIPIGDRFTMGPAVAALAVKRFLPGVEVVVPCHYGSFPILVQDASFFAQALADHPVKVVVPGPGGSFDANITPA

SEQ ID NO: 61557 - DNA, 711 bp, Pyrococcus horikoshii OT3
  CDS (1)..(711): transl_table=11
atgttttgttattatactcctgggtgggcgaagatggtgaaggtaaagtttttaggacatgcggccttttatattgagggaagcaagaagatcttaatcgatccatttttgactggaaatccacaagccgctgcaaggccggaggacttcaaggatgttgacctaattctcgtaacccatgcgcatggagaccacttgggtgatgctggtgaaatagcaaggataagtggggcaaagatagtagctatgtacgatcttgcaaactacatttccgagaagtacaaggatgttgaaaccattgggatgaattacggcccaactgagatcgatggagtatttatagttcaagttcctgcatggcactcaagtagcgatggaaagtacagcataggaaatccctctggatacatagtaaagctcgacgatgttaccatctatcatgctggggatacttatgttttcaaagatatggagctgttcgctgaactttacggccccatagacgttgccctccttccaataggagggcacttcaccatgggtgttagggaagctgcaaaggccgtggagctactcaagccgaggaaggttgttccaatgcattacaacacatggccaccaatatccgcggatcctgaagagttcaagaggttagttggggacaaagcggaggttgtaatactaaagccaggtgaagagctaaagctttag

SEQ ID NO: 61558 - protein, 236 aa, Pyrococcus horikoshii OT3
MFCYYTPGWAKMVKVKFLGHAAFYIEGSKKILIDPFLTGNPQAAARPEDFKDVDLILVTHAHGDHLGDAGEIARISGAKIVAMYDLANYISEKYKDVETIGMNYGPTEIDGVFIVQVPAWHSSSDGKYSIGNPSGYIVKLDDVTIYHAGDTYVFKDMELFAELYGPIDVALLPIGGHFTMGVREAAKAVELLKPRKVVPMHYNTWPPISADPEEFKRLVGDKAEVVILKPGEELKL

SEQ ID NO: 61559 - DNA, 660 bp, Aeropyrum pernix K1
  CDS (1)..(660): transl_table=11
ttgcccgtcacggtagagtggtgctatcacgcttatatcctccttaaagccggtgatgttttgatggccatagatcctcatgacgggggcagcctcgggcttcccacttgtagggttgatgctgactatattctggttacgcacgaccatttcgaccacaacgccgtagaggtggccaggggtaaaaggactaaggaggtcctcaagagattttacggttcgaagaacctcgggcccttcaccgttactggtgtaaaagtttatcacgacaaggctggcgggactttgaggggagaggtggcggcctacagggtcgaggttgagggcttgtccctcgtacacctgggcgacataggccacgttataacatcgagcagccatccggagctgtcgagacctgacgttctattcgtgcctgttggaggcacgtttaccgttaacgccgcggaagcctggaaaatagtggagaacctcaggcccaggatagccgtgcccatccactattggatgccgggaagccacctaccaatagaccccctggacaggttcctgcaggtagccagggcggggaggcagcccattgagggtagggttctagagctctcacccgagaagctgccggagaagactacgatatactatttcaaggttcaatcctag

SEQ ID NO: 61560 - protein, 219 aa, Aeropyrum pernix K1
MPVTVEWCYHAYILLKAGDVLMAIDPHDGGSLGLPTCRVDADYILVTHDHFDHNAVEVARGKRTKEVLKRFYGSKNLGPFTVTGVKVYHDKAGGTLRGEVAAYRVEVEGLSLVHLGDIGHVITSSSHPELSRPDVLFVPVGGTFTVNAAEAWKIVENLRPRIAVPIHYWMPGSHLPIDPLDRFLQVARAGRQPIEGRVLELSPEKLPEKTTIYYFKVQS

SEQ ID NO: 61561 - DNA, 723 bp, Halobacterium sp. NRC-1
  CDS (1)..(723): transl_table=11
atggagcttacttggttcggacactcgacgtggcgcgtaacagtcggcaccaccgatctcctcgtcgaccccttcttcgacaacccccacaccgacaccgctcccagcgaggtcgctgtcgaccacgtcctgctcacacacggccacgccgaccacatcgcacacgtcggcgcgttcgccgacacccacaccgtcggcacccccgaagtgaccggctacgtggccgacgaaaccggcgtcgaagacaccaccggcatgaacctcggggggaccgtcgagctcggcgacgcgttcgtgacgatggtgcgggccgaccacaccaacggcctggaaaccggctacgaatactccggcggaacgcccgtcggctacgtcatctcggacgccgcgcccacgcagaccggcgacggcgacgccacgacgttctaccacgccggcgacaccagcctccaatccgagatgaaggacgtcatcggcccctacctcgacccggacgccgccgccgtcccggtcggcgaccacttcacaatggggccgatgcaggccgctgtcgccgtcgactggctggacgttgatgtcgcgttcccgatgcattacgacaccttcccccccatcgaggtcgacaccgcggacttcgaacgcgaggtgaacgccaccggcagccaggccgacgttcacgtgctcgacggcgacgaaacggtcgacctctcggacgcgctgtaa

SEQ ID NO: 61562 - protein, 240 aa, Halobacterium sp. NRC-1
MELTWFGHSTWRVTVGTTDLLVDPFFDNPHTDTAPSEVAVDHVLLTHGHADHIAHVGAFADTHTVGTPEVTGYVADETGVEDTTGMNLGGTVELGDAFVTMVRADHTNGLETGYEYSGGTPVGYVISDAAPTQTGDGDATTFYHAGDTSLQSEMKDVIGPYLDPDAAAVPVGDHFTMGPMQAAVAVDWLDVDVAFPMHYDTFPPIEVDTADFEREVNATGSQADVHVLDGDETVDLSDAL

SEQ ID NO: 61563 - DNA, 783 bp, Deinococcus radiodurans R1
  CDS (1)..(783): transl_table=11
atgaagcggctgagatcagggggaggggacaaaagggcacaacatccccacgctgtcgcccctcctcattcatactcaggagttccaggaggcaacctcatgctcaagatccgttctctcggccacagcactttctttctcgatgacgggacgcaccgtctgctcatcgaaccctttctcgaaggcaacccgcgctgcccggtgaccctcggcgaagtgcagtcgtggcagccgagcgccgtgctcatcagccacgcccacggcgaccactggggcaacgccctggatttcggacgggcgggcgtgccgatcatcgccaccgccgagatcgccgggtacgccggagcgcacggcgccaacaacgccgtcggcatgaacatcggcggcacctaccgcgccgagtggggcagcgtttccctgacccccgcgtggcactcgagctcctttcccgacggcacctacggcggaatgcccacgggtctggtcatcgagttcggcggccagcgcctgtatttcgcgggcgacaccgcgctgttttccgacatgcgcctgatcggggaccgcgaactcgacctcgcgttcctgcccatcggcgaccactacaccatggggccggaagaggccgggcgcacgctggacttgctgcgtccgcgcgttgccattcccatgcactacgcgactttcccggccctgaccggcgaccccgccgtcttccgcaccgagggcgaacggcgcggcgtggaggtccgggtccttgaccccggcgagacgaccgagctgtaa

SEQ ID NO: 61564 - protein, 260 aa, Deinococcus radiodurans R1
MKRLRSGGGDKRAQHPHAVAPPHSYSGVPGGNLMLKIRSLGHSTFFLDDGTHRLLIEPFLEGNPRCPVTLGEVQSWQPSAVLISHAHGDHWGNALDFGRAGVPIIATAEIAGYAGAHGANNAVGMNIGGTYRAEWGSVSLTPAWHSSSFPDGTYGGMPTGLVIEFGGQRLYFAGDTALFSDMRLIGDRELDLAFLPIGDHYTMGPEEAGRTLDLLRPRVAIPMHYATFPALTGDPAVFRTEGERRGVEVRVLDPGETTEL

SEQ ID NO: 61565 - DNA, 705 bp, Sinorhizobium meliloti 1021
  CDS (1)..(705): transl_table=11
atgaacatcaaatggctgggacattccgccttccatatcgaaacggcgaaagccaaaatcctgatagatccgttcttcaccggcaatccggcctttcgggacgaggagcgcaaggccgcaacggcgggactgacccacattctgctgacccacggccacggcgaccatgtcggcgacaccgttgccatagccaaggaaaccggcgcgacggtccttgccaatttcgacctctgcatgtggctcggccggcagggcatttcgaagctggagccgggcaatacgggcggaaccatccagctcgggagcttcaccgccacattcgtcaacgcgctgcattcatcggcgcagatcaccgacgacggcgtttcgcattcgctcggcaatgccaatggcctcgttctccatttcgacgacgagccgacgctctatcacatgggcgacacggaaatcttctccgacatggcgctcgtgcaggaactgcacgagccggaaatcggcatcgtgccgatcggcgaccgtttcaccatgggcggtgccgtggccgcgctcgcgtgccagcgttacttcaagttcaacacgacgatcccttgccactatggctccttcccgatcatcgaccagacgccggagaccttcattgccggcatggacggcgcctcgacattggtcgccacccccgaggtcggtggcgcggtaaccctataa

SEQ ID NO: 61566 - protein, 234 aa, Sinorhizobium meliloti 1021
MNIKWLGHSAFHIETAKAKILIDPFFTGNPAFRDEERKAATAGLTHILLTHGHGDHVGDTVAIAKETGATVLANFDLCMWLGRQGISKLEPGNTGGTIQLGSFTATFVNALHSSAQITDDGVSHSLGNANGLVLHFDDEPTLYHMGDTEIFSDMALVQELHEPEIGIVPIGDRFTMGGAVAALACQRYFKFNTTIPCHYGSFPIIDQTPETFIAGMDGASTLVATPEVGGAVTL

SEQ ID NO: 61567 - DNA, 1116 bp, Agrobacterium tumefaciens str. C58
  CDS (1)..(1116): transl_table=11
gtgtcgccatgtcgcgtgctgcctttatcttttacggacgaattcggtgcgcagcaccagacccttgaccgcatcatgcctgcaatcgatctcttcgggattgtcggtcaggcggatcgacttgatgacggtgccctgcttgatgaccgtgttggtgcccttgaccttcaagtccttgatcaatgtcacggaatcgccgtcttcaagcacattgccggcggcatcgcgcacttcctttgcacgggctgcctcggcggccagttcggaagccggccgccattcgccgctcgcttcgtcatacacgtaatcgtcattatccgcggccattgtcgcctctctgaaatatcggtagtgcggttgttcaggccgtcctatgtcataatataccggcaatacaaaggagaacttcccatgaaactcacctggctcggccattccgccttccgtcttgaaaacggcagtgcgaagatcctcatcgatccgttcttcaccggcaatcccggttttgccgggcaggatggcaaatcagcggccgaaggcatcacccatattctcctgacccacggccatggcgaccacgtcggcgataccgtgcagcttgcccgcgaaacgggagccaccgtgctggcgaatgccgatcttgccgcctggctgtccgcaaagggtgtcgcgaaagtcgatatgggcaataccggcgggaccgtacatttcgacggcttctccgtcaccttcaccaatgcgctgcattcctcggcccagatcaccgaagacggcgtctcccattcgctcggcaatgccaacggcctgatgctgcatttcgaggatggcccggccgtctatcacatgggcgacacggacatcttctccgacatgaagctcatcaacgaactgcaccagccggatatcggcctggtgccgatcggtgatcgcttcacgatgggcggtgccgtggcggcgctcgcctgccagcgcttcttcaagttccagaatgtcattccttgccactacggttccttcccgatcatcgatcagacgccggacaagttcgtggccggcatggaaggcgcggaagcgcgtgttcacacgccgaaggcgggcgatacattgtccttctga

SEQ ID NO: 61568 - protein, 371 aa, Agrobacterium tumefaciens str. C58
MSPCRVLPLSFTDEFGAQHQTLDRIMPAIDLFGIVGQADRLDDGALLDDRVGALDLQVLDQCHGIAVFKHIAGGIAHFLCTGCLGGQFGSRPPFAARFVIHVIVIIRGHCRLSEISVVRLFRPSYVIIYRQYKGELPMKLTWLGHSAFRLENGSAKILIDPFFTGNPGFAGQDGKSAAEGITHILLTHGHGDHVGDTVQLARETGATVLANADLAAWLSAKGVAKVDMGNTGGTVHFDGFSVTFTNALHSSAQITEDGVSHSLGNANGLMLHFEDGPAVYHMGDTDIFSDMKLINELHQPDIGLVPIGDRFTMGGAVAALACQRFFKFQNVIPCHYGSFPIIDQTPDKFVAGMEGAEARVHTPKAGDTLSF

SEQ ID NO: 61569 - DNA, 780 bp, Brucella melitensis 16M
  CDS (1)..(780): transl_table=11
ttgctttcaactttatcggcgtcatatctgttcacacaccagaaatcgagaccgaaggaaatatacatgaaaatcacctggcttggacacgccgctttccgtgttgaaaccgctaaggcagtcattctcattgaccccttcctgaacggcaatcccggcgccaaaggtatcgacttcaaggaagccaccaggggtgtcacgcatattgcgctcacccacggccatggtgaccatgtgggcgacacggtagccattgccagggagcatggcgcaaccgtaatcgccaatgccgatcttgcctcatggcttggcagtcagggcgtggaaaagcttgaccccggcaatacgggcggcacgctggcgcatgaaggttttacaattaccttcgtcaatgcacttcattcttccgccatgctgacggaaaacggcgtttcgcaggcgcttggaaacccgaatggccttgtgttccacttcgaggattcgccgacgctctatcatatgggcgacacggatattttctccgacatggcgctcatcaacgagcttcaccagcccgaaatcggcattgtgcccattggcgaccgtttcaccatgggcggtgcggtggcggctctcgcctgccagcgttatttcaatttcaattctgtcctgccttgccattatgcttcattcccgatcatcgaccggacggcggacaagtttattgcgggaatggcggatcatccggcaaccaaagtgctggccgatccggcgggaaccgttcacagcttccaagcttaa

SEQ ID NO: 61570 - protein, 259 aa, Brucella melitensis 16M
MLSTLSASYLFTHQKSRPKEIYMKITWLGHAAFRVETAKAVILIDPFLNGNPGAKGIDFKEATRGVTHIALTHGHGDHVGDTVAIAREHGATVIANADLASWLGSQGVEKLDPGNTGGTLAHEGFTITFVNALHSSAMLTENGVSQALGNPNGLVFHFEDSPTLYHMGDTDIFSDMALINELHQPEIGIVPIGDRFTMGGAVAALACQRYFNFNSVLPCHYASFPIIDRTADKFIAGMADHPATKVLADPAGTVHSFQA

SEQ ID NO: 61571 - DNA, 672 bp, Pyrobaculum aerophilum str. IM2
  CDS (1)..(672): transl_table=11
atgcctttttcatacggggagctcctcatatcttggctcgggcacgactcgtttagaattacggggggcggcttcgtgctgtacatagacccctatcagttacaagtgggggacccgaaggccgacgcgatccttattactcacgagcattttgaccactgcgatcccccctctattcagcggattttaaagccctctactgtagtcgtggcgcctagagtggccaggcagtgcgccctcaaggccgcccgcaacgtggcggagatctccccgggggaggagagggaggtgggcccgttaaaaatcagggcgttccccgcttataatataaacaaattcagagacccggcccgcggcgtggtgttccaccccaaggaggacgggagggtggcgtatttaatagagtggggcggggttaggatattccacgcgggggacagcgacttcgtccccgagtttagagaagtgagggctgacgtcgtgttagtgccggtctcgggggtttacgtaatgactccgcaagaggccgccgagtttgtcaacgccgtaatgcccaaagtggcaattccaatgcactacggctctatagtcgcgtcgaggagagaggcggaggagttcaagaggcttgtcaggcccgaggtgcaagtagtgattttagatagggaaatataa

SEQ ID NO: 61572 - protein, 223 aa, Pyrobaculum aerophilum str. IM2
MPFSYGELLISWLGHDSFRITGGGFVLYIDPYQLQVGDPKADAILITHEHFDHCDPPSIQRILKPSTVVVAPRVARQCALKAARNVAEISPGEEREVGPLKIRAFPAYNINKFRDPARGVVFHPKEDGRVAYLIEWGGVRIFHAGDSDFVPEFREVRADVVLVPVSGVYVMTPQEAAEFVNAVMPKVAIPMHYGSIVASRREAEEFKRLVRPEVQVVILDREI

SEQ ID NO: 61573 - DNA, 678 bp, Methanosarcina acetivorans C2A
  CDS (1)..(678): transl_table=11
gtgtataaggtgtataatatgaatagtgtaaaaatagaaggcattaatattcaatggttcggaaattccggttttctgcttgaagggaacggcaaaaaaatctatatcgacccgtatcagatcggtgcagaaccggcttttgatgacagggcagatattctcctcattacgcatgagcactttgaccactgcagccctgaggatatacggaaagtacggagatcggatacaaccaccctgatccctgagagctgttcccttgagttcagaggcgatgccagaagggttgccgaaggggatgtccttgctgacggacttgagatcaagggggtccgaattgatgttgttccggcctataaccttgataagccctaccaccccagggaacttggagtcgggtacatcgtagagcttggagggctgaggatttaccatgcaggagactgtgatttcttcccggagatggaggatatcagagccgatatagctcttctgccaatagggggtacgtatactatggatgaggaagaagccgccagagcagctgcagctatttctccgaaggttgtcattccaatgcactacggttcagaagggatcgacggagaccccgaaaagtttaaagcctttgtgaacagcaagaacccggatattaatgtaatcattcttgatgtataa

SEQ ID NO: 61574 - protein, 225 aa, Methanosarcina acetivorans C2A
MYKVYNMNSVKIEGINIQWFGNSGFLLEGNGKKIYIDPYQIGAEPAFDDRADILLITHEHFDHCSPEDIRKVRRSDTTTLIPESCSLEFRGDARRVAEGDVLADGLEIKGVRIDVVPAYNLDKPYHPRELGVGYIVELGGLRIYHAGDCDFFPEMEDIRADIALLPIGGTYTMDEEEAARAAAAISPKVVIPMHYGSEGIDGDPEKFKAFVNSKNPDINVIILDV

SEQ ID NO: 61575 - DNA, 1041 bp, Streptomyces coelicolor A3(2)
  CDS (1)..(1041): transl_table=11
atgacgcagcagccccggtcgaccgcgcgcacccccgcctccgccgaggaccccgccgcggccgccgcccacccgccgctcgccgccccccggccgccggccgagcaccgggtgtggccgcggaccttccacgaccggctgaccgcaccgctgcccggtctgaaggccttcgccagattcgcccgcgagggggcggtcagacccggcccggccggactcgccgacgtcccccggctgccgtgcgcacccggcccgctgccccgggtggacgcgcgcaccgtcgccgtcacctgggccggacacgccagctgggtggtgcggatcggtggcctcaccgtgctcaccgacccggtctggtcccgccggatcctcggcaccccgccccgggtcacgcccgtcggcgtcccctggagcgccctgccccgcgtcgacgccgtcgtcatcagccacaaccactacgaccacctggacgcgcccaccttgcgccggctcccgcgcgacacccccgtactcgtcccggccggtctgggccgctggttccaccgccgccgcttcacccacgtcaccgagctggactggtgggaggcgaccgagctgaacggggtccggttcgacttcgtcccggcccaccactggtccaagcgctccctgaccgacacctgccgcaccctgtggggcggctgggtgctcaccgaccccgacggccgccgcgtctacttcgccggtgacaccgggtacggccactggttcacccggatcggccgccgctaccccggcatcgacctcgcgctgctccccatcggcgcctacgacccgcgctggtggctcagcgacgtgcactgcgatccggaggaggcggtgcgggccgcccaggacgtcggcgcgcgccgcatggcgccgatgcactggggcacgttcgtgctctccgcggagccggtactggaacccctcgcccgcgtacgcgccgcctggcagcaggcgggcctgccccgcgaacgcctgtgggacctgccgatcggcgcctcccgcgtgctggagtga

SEQ ID NO: 61576 - protein, 346 aa, Streptomyces coelicolor A3(2)
MTQQPRSTARTPASAEDPAAAAAHPPLAAPRPPAEHRVWPRTFHDRLTAPLPGLKAFARFAREGAVRPGPAGLADVPRLPCAPGPLPRVDARTVAVTWAGHASWVVRIGGLTVLTDPVWSRRILGTPPRVTPVGVPWSALPRVDAVVISHNHYDHLDAPTLRRLPRDTPVLVPAGLGRWFHRRRFTHVTELDWWEATELNGVRFDFVPAHHWSKRSLTDTCRTLWGGWVLTDPDGRRVYFAGDTGYGHWFTRIGRRYPGIDLALLPIGAYDPRWWLSDVHCDPEEAVRAAQDVGARRMAPMHWGTFVLSAEPVLEPLARVRAAWQQAGLPRERLWDLPIGASRVLE

SEQ ID NO: 61577 - DNA, 768 bp, Streptomyces coelicolor A3(2)
  CDS (1)..(768): transl_table=11
gtggagctcacgtggtggggtcacgccacctgcacggtcgaggattcgggcatccgcgtgctcaccgatcccctgttcgtccgccggctggcccatctgcgtcgcaggcggggcgcggtcccgccgcccgaggcgtggcgcgcggacgtggcgctggtctcccatctgcacgccgaccacctgcacgtgccgtcgctcgcgcggctcgcgccgggcacgcgcctgctcgtgccccggggcgcacgccgggcggtgccggggctgcggcggctcggtcacctggagctgaccgaggtggtgccgggtgacgagacgaccgtcggtgacctgcgcatacgggcggtcccggcgcggcacgacgggcggcggctgccggtcggacggcaccgcgcccccgcgctcggctacgtcgtcgagggcgaggcgcggacgtacttcgccggggacaccgggctgttcgacggcatggagcaggaggtcgggccggtcgacgcggcgctgctgccggtgggcggctggggcccctacctgggtgcggaacacctggacgcggggcgggcggccgaggcactggcccggctggcgccgcgcacggcggtgccggtgcactacggcacgtactggccgatcgggatggacgccgtgcgcccccacgagttccacacgccgggcgaggagttcgtgcgcctgtcggcgctgcgcgcgccgggcgtggcggtgcaccggctggggcacggcgagagtgtgcgggtggaggtcgcgcggtga

SEQ ID NO: 61578 - protein, 255 aa, Streptomyces coelicolor A3(2)
MELTWWGHATCTVEDSGIRVLTDPLFVRRLAHLRRRRGAVPPPEAWRADVALVSHLHADHLHVPSLARLAPGTRLLVPRGARRAVPGLRRLGHLELTEVVPGDETTVGDLRIRAVPARHDGRRLPVGRHRAPALGYVVEGEARTYFAGDTGLFDGMEQEVGPVDAALLPVGGWGPYLGAEHLDAGRAAEALARLAPRTAVPVHYGTYWPIGMDAVRPHEFHTPGEEFVRLSALRAPGVAVHRLGHGESVRVEVAR

SEQ ID NO: 61579 - DNA, 660 bp, Methanosarcina mazei Go1
  CDS (1)..(660): transl_table=11
gtgaatagtgtgaaaatcaaggatatcagcattcaatggttagggcatgccggttttttgcttgaaggggaaggcaaaaaaatctatattgatccttttaggattgctcaggagcctgcttttgatgacagggcagatattctccttatcactcatgaacactatgatcactgcagccctgatgatatcaggaaggtcaggaaatctgacactactacccttatccctgaaaattgttctcttgaattcaagggagatgcaaggagggttgctgaaggggatattctggctgatgggcttgagatcaaagggacccggattgaagtggtccctgcttataatattgataagccgtatcatcccagagggcttggagtggggtatatcgtagaacttgaagggttaaggatttatcacgcaggagattcagactttattccagagatagaggctatcaatgccgatatagctcttctgcctatcgggggtacgtataccatgaacgaggaagaagccgcgaatgcagcagcagttatatctcccggttttactattcccatgcattatggttcagaaggaattaacggagaccccgaaaggtttaaagctcttgtacacagcaagaacccggatattaatgtgattatttttgattcctga

SEQ ID NO: 61580 - protein, 219 aa, Methanosarcina mazei Go1
MNSVKIKDISIQWLGHAGFLLEGEGKKIYIDPFRIAQEPAFDDRADILLITHEHYDHCSPDDIRKVRKSDTTTLIPENCSLEFKGDARRVAEGDILADGLEIKGTRIEVVPAYNIDKPYHPRGLGVGYIVELEGLRIYHAGDSDFIPEIEAINADIALLPIGGTYTMNEEEAANAAAVISPGFTIPMHYGSEGINGDPERFKALVHSKNPDINVIIFDS

SEQ ID NO: 61581 - DNA, 714 bp, Brucella suis 1330
  CDS (1)..(714): transl_table=11
atgaaaatcacctggcttggacacgccgctttccgtgttgaaaccgctaaggcagtcattctcattgaccccttcctgaacggcaatcccggcgccaaaggtatcgacttcaagggagccaccaggggtgtcacgcatattgcgctcacccacggccatggtgaccatgtgggcgacacggtagccattgccagggagcatggcgcaaccgtaatcgccaatgccgatcttgcctcatggcttggcagtcagggcgtggaaaagcttgaccccggcaatacgggcggcacgctggcgcatgaaggttttacaattaccttcgtcaatgcacttcattcttccgccatgctgacggaaaacggcgtttcgcaggcgcttggaaacccgaatggccttgtgttccacttcgaggattcgccgacgctctatcatatgggcgacacggatattttctccgacatggcgctcatcaacgagcttcaccagcccgaaatcggcattgtgcccattggcgaccgtttcaccatgggcggtgcggtggcggctctcgcctgccagcgttatttcaatttcaattctgtcctgccttgccattatgcttcattcccgatcatcgaccggacggcggacaagtttattgcgggaatggcggatcatccggcaaccaaagtgctggccgatccggcgggaaccgttcacagcttccaagcttaa

SEQ ID NO: 61582 - protein, 237 aa, Brucella suis 1330
MKITWLGHAAFRVETAKAVILIDPFLNGNPGAKGIDFKGATRGVTHIALTHGHGDHVGDTVAIAREHGATVIANADLASWLGSQGVEKLDPGNTGGTLAHEGFTITFVNALHSSAMLTENGVSQALGNPNGLVFHFEDSPTLYHMGDTDIFSDMALINELHQPEIGIVPIGDRFTMGGAVAALACQRYFNFNSVLPCHYASFPIIDRTADKFIAGMADHPATKVLADPAGTVHSFQA

SEQ ID NO: 61583 - DNA, 675 bp, Enterococcus faecalis V583
  CDS (1)..(675): transl_table=11
atggaactgataggacatggacattcatgtattgaaattcgtctaaacgacggcacgaaccttttatttgatccttttattaatggcaaccctttagcggacgtttcacttgcagatttacaccctgattacatcttaatcacccacggacacagcgatcatattggcgatatgctagcaattgctcaagccaacaaggcaacgattattgcgatagctgaagtggctatgtatgcgcagtcgcaaggtgtaaaagcgcatggaatgaatctaggtgggcgttatgtctttccttttggttcggttaaatttgtgccagctttgcatagttccggttatgaaatagacggcgtaatgacctacatgggcgaagcaagtgggattattttagaagcagaagataaaaaaatttatcacgctggtgatacggcgttgttttcagatatgcgcctttttgcaaaagacaaatccattgatgtagcgttcttaccaattggcgataattatacgatgggaccagaggatgcgctagaagcaatcgcttacttaaatcccgaaataaccattccaattcattacaatacctttcctgttatccaacaaaatccagcaatattcgtagagcaagtagttggcgggaaagtattaaacccaggagagacgatcctagtttag

SEQ ID NO: 61584 - protein, 224 aa, Enterococcus faecalis V583
MELIGHGHSCIEIRLNDGTNLLFDPFINGNPLADVSLADLHPDYILITHGHSDHIGDMLAIAQANKATIIAIAEVAMYAQSQGVKAHGMNLGGRYVFPFGSVKFVPALHSSGYEIDGVMTYMGEASGIILEAEDKKIYHAGDTALFSDMRLFAKDKSIDVAFLPIGDNYTMGPEDALEAIAYLNPEITIPIHYNTFPVIQQNPAIFVEQVVGGKVLNPGETILV

SEQ ID NO: 61585 - DNA, 768 bp, Streptomyces avermitilis MA-4680
  CDS (1)..(768): transl_table=11
gtggagatcacctggtgggggcatgccacctgcacggtcgaggactcgggaacgcgcgttctcaccgacccgctcttcgcgcgccgcctggcgcacctgcggcgccgccggggcgcaccgcccccgcccgaggcggcggtcgcggacgtggcgctcgtctcgcatctgcacgccgaccacctccacgtaccgtccctggcccggctcgcccccggcacccggctgctgctgccgcggggcgccgtgcgtcaggtgccggggctgcgcaggctcggtcatctgcggctcaccgaggtcgcgcccggcgatcggacgcaggtcggtgacctggtcgtacggaccgttccggcgcggcacgacggacggcggctgccggtcggtccgcaccgctcgcccgcgctcgggttcgtgatcgagggtgccgcgcggacgtacttcgcgggggacaccgggctgttcgaggagatggccgaggaggtcgggcccgtcgacgtggcgctgttgccggtcggcggctgggggccgtatctcggcgaggggcacctggacgcggggcgggccgcgcaggcgctcgcgcggctgacgccccgcagcgcggtaccggtgcactacggcacgtactggccgatcgggatggatgccgtgcgcccccatgaattccacacgccgggcgccgagttcgtgcgcctcgcggcggagcgcgcgccggcggtcgcggtgcacctgctggcgcacggcgagagcgtacgcccggaggtggcccggtga

SEQ ID NO: 61586 - protein, 255 aa, Streptomyces avermitilis MA-4680
MEITWWGHATCTVEDSGTRVLTDPLFARRLAHLRRRRGAPPPPEAAVADVALVSHLHADHLHVPSLARLAPGTRLLLPRGAVRQVPGLRRLGHLRLTEVAPGDRTQVGDLVVRTVPARHDGRRLPVGPHRSPALGFVIEGAARTYFAGDTGLFEEMAEEVGPVDVALLPVGGWGPYLGEGHLDAGRAAQALARLTPRSAVPVHYGTYWPIGMDAVRPHEFHTPGAEFVRLAAERAPAVAVHLLAHGESVRPEVAR

SEQ ID NO: 61587 - DNA, 648 bp, Nanoarchaeum equitans Kin4-M
  CDS (1)..(648): transl_table=11
atgaaaatcaaatacatgggacacagcgcttttattatagagcataagaacaggctaataatagatccatacatagaaacaatacctgaagtagattatgtattggtaacgcatgctcataatgaccattttggtaatactatagagattgccaagaaaaacaatgccaaagttatttctatatatgaaatagcagaattcgttaagcaatttaatatagaaagcataggcatgaactttggaggcactatagatattggagaaaaggttagtttagtgcctgcagtgcacagctctactttatattacaatggaaaagcttatcccttgggaaatcctggagggtttgtaattaagggaaataaaaccatataccatgctggagatacaatggttttcaaagatatggaactaattggagagctatttaaaatagatgttgctttgttacctattgggggggtatttacaatggatattgaccaagctctaaaggcaatagatttgcttaaaccaaaaatagttataccaatgcattataatacatggccaataattaaagccgatccatacgaatttaaaagaaaagccgaagaaaagggagtagaagcgattgtattaaataaagatgaagagatagatttataa

SEQ ID NO: 61588 - protein, 215 aa, Nanoarchaeum equitans Kin4-M
MKIKYMGHSAFIIEHKNRLIIDPYIETIPEVDYVLVTHAHNDHFGNTIEIAKKNNAKVISIYEIAEFVKQFNIESIGMNFGGTIDIGEKVSLVPAVHSSTLYYNGKAYPLGNPGGFVIKGNKTIYHAGDTMVFKDMELIGELFKIDVALLPIGGVFTMDIDQALKAIDLLKPKIVIPMHYNTWPIIKADPYEFKRKAEEKGVEAIVLNKDEEIDL

SEQ ID NO: 61589 - DNA, 720 bp, Desulfovibrio vulgaris subsp. vulgaris str. Hildenborough
  CDS (1)..(720): transl_table=11
atgcagacccgcatcacatggcacggtcattcgaacttccaggtcgcctccggtggcaccaacgtgctcatcgacccgttcttcgacggcaaccccgtcgccgcagcgcgatgggacgccatcgaccggcccgacctcgttctcgtgacacacgaccatggcgaccatgtgggtcaggccatcgacatctgcaaggccacgggggcgaaactgggctgtgtggtcggcacggatgcccgcctcgtcgaggcggggctgccgcgtgaactggtgctgaacggcatcggcttcaacatcggcggcacggtggaatgcgccggagcgcgcatcaccatgacacaggcgtaccactcttcggagtcgggcgttccggtaggctacatcgtgaccatgccggacggattcaccttctaccatgcgggcgacacgggcatcttctcggagatggagctatggggccgcctgtatgccatcgacctcgccctgttgcccataggcggggtgttcaccatggacccgcgtcaggccgcactcgcgtgcagcctcttgcgtgcacggtccgtgattcccatgcactggggaacgttccccgtgctggagcagaacaccacgcgcttcagggagcaacttgcgaaccacgctccggactgccgactgttcaacatgacgccaggcgagagcctgactctcgacagaagccaggaagggtgcgcctgctag

SEQ ID NO: 61590 - protein, 239 aa, Desulfovibrio vulgaris subsp. vulgaris str. Hildenborough
MQTRITWHGHSNFQVASGGTNVLIDPFFDGNPVAAARWDAIDRPDLVLVTHDHGDHVGQAIDICKATGAKLGCVVGTDARLVEAGLPRELVLNGIGFNIGGTVECAGARITMTQAYHSSESGVPVGYIVTMPDGFTFYHAGDTGIFSEMELWGRLYAIDLALLPIGGVFTMDPRQAALACSLLRARSVIPMHWGTFPVLEQNTTRFREQLANHAPDCRLFNMTPGESLTLDRSQEGCAC

SEQ ID NO: 61591 - DNA, 663 bp, Picrophilus torridus DSM 9790
  CDS (1)..(663): transl_table=11
atggagataatctggcacggacatgcatgcttttcaataaatggcaggaagaatgtcttaatagacccgtttcttgcagggaacccgctttcaaaaataaaaccagaggatattgatgcagatattattttattaacgcacgggcacttcgaccatgcaggtgatgctgttaacatagcccagaggttaaaaattcctgttctggccgcatttgagcttacagagcttttaaaaaaagacgtaaaaacaattgatataaatcagggcggcaccgtggatttcgatgatataaagataaaggctgttaatgcaatacactcatcaagctacaatggtatgtatgcaggaaatccacttggctttattgtaactgatgagaggatgtattatcatgcaggcgatacacaatatttctctgatatggaactaatatcaaaatatgacaaaccagagattgttatgcttccaataggcggccattataccatggacgttaatgaggctttaatagctctcgatattttaagaccaaaaatagccataccgatgcattacaatacatttccagtaataaaagcagatccacaggatctaaaaaaggaggcttcaaaacttggcatagaggtcattatacctgaaatagaggaaaagatagatttataa

SEQ ID NO: 61592 - protein, 220 aa, Picrophilus torridus DSM 9790
MEIIWHGHACFSINGRKNVLIDPFLAGNPLSKIKPEDIDADIILLTHGHFDHAGDAVNIAQRLKIPVLAAFELTELLKKDVKTIDINQGGTVDFDDIKIKAVNAIHSSSYNGMYAGNPLGFIVTDERMYYHAGDTQYFSDMELISKYDKPEIVMLPIGGHYTMDVNEALIALDILRPKIAIPMHYNTFPVIKADPQDLKKEASKLGIEVIIPEIEEKIDL

SEQ ID NO: 61593 - DNA, 675 bp, Symbiobacterium thermophilum IAM 14863
  CDS (1)..(675): transl_table=11
atgcagattcggtacctgggacactcggcattcgagatcacggacgggaagtggaacctgctgatcgatccgttcatcacgggcaatccggcctgcccggtgaaggcggaggagctgcacccgcagtacatcctggtcacccacctgcacgatgaccacgtgggcgacacggtggccatcgccaagcgcaccggcgcaacggtgatcaccagcttcgaaggcgggcaggccctcgccgcgcagggcgtgaaggtggccgacatggccctgggcgggaagcgccggttcgacttcggcctggtccgggtcaccctggccttccacggcttcggccccaccggcggccacgcctgcgggttcgtgatccacatcggcggcaagcgcatctaccacgcgggggacaccgcgctcttcagcgacatgaaactgctcaacggcgtcatcgaggagcccggcatcgacgtggccatgctgcccatcggcgacaactacaccatgggtccggaagacgccgccgtcgcggtggagtggatccggcccaaggtggtcatccccatgcactggggcacgttcccggtgctggtgcaggacgcgtccggtttcgcggcgcgggtgcgggagaccggcgcctcgcagcccgtcgtcctccggcccggcgagacctacaccctgtaa

SEQ ID NO: 61594 - protein, 224 aa, Symbiobacterium thermophilum IAM 14863
MQIRYLGHSAFEITDGKWNLLIDPFITGNPACPVKAEELHPQYILVTHLHDDHVGDTVAIAKRTGATVITSFEGGQALAAQGVKVADMALGGKRRFDFGLVRVTLAFHGFGPTGGHACGFVIHIGGKRIYHAGDTALFSDMKLLNGVIEEPGIDVAMLPIGDNYTMGPEDAAVAVEWIRPKVVIPMHWGTFPVLVQDASGFAARVRETGASQPVVLRPGETYTL

SEQ ID NO: 61595 - DNA, 687 bp, Bacillus licheniformis ATCC 14580
  CDS (1)..(687): transl_table=11
atgaaagtggcatatcatggtcattcagtggtaacagttgatacgggagatcatcagttgatcttcgatccgtttattacaggaaactcattaaccgatttaaagcccgaagatgtcaaagcggacgtcatcttgctgactcacggacataacgatcatgtcggcgataccatcgaaatcgccaagcgaaacaattcgctcgttgtagctccgaatgaactcgcggtctatctaggatggaaaggcctgaatgtacatccgatgcacatcggcggctcccaccagttcgattttggaaaagtcaagctgacgcaggctttccacggatcggcttatacggaagaagacagccaaaagatcgtctataccggcatgccggcggggatccttctgactgtggaaggaaggacgatttttcatgccggcgacaccgggcttttctcagatatgaagctgatcggtgaattaaatcatatcgaccttgccttcttgccgatcggcgataattttacgatgggccctgaggacgccaaactggccgcagaatggctcagagcgaaacaggttgtcccggttcactactcgacgttccccgtcatcgaacaggatccgcatgcatttgcggacagccttcctggaggcgtcggaaaagtgcttgaggtcggtgagtcaatcgaatttaagtaa

SEQ ID NO: 61596 - protein, 228 aa, Bacillus licheniformis ATCC 14580
MKVAYHGHSVVTVDTGDHQLIFDPFITGNSLTDLKPEDVKADVILLTHGHNDHVGDTIEIAKRNNSLVVAPNELAVYLGWKGLNVHPMHIGGSHQFDFGKVKLTQAFHGSAYTEEDSQKIVYTGMPAGILLTVEGRTIFHAGDTGLFSDMKLIGELNHIDLAFLPIGDNFTMGPEDAKLAAEWLRAKQVVPVHYSTFPVIEQDPHAFADSLPGGVGKVLEVGESIEFK

SEQ ID NO: 61597 - DNA, 693 bp, Silicibacter pomeroyi DSS-3
  CDS (1)..(693): transl_table=11
atgaagatcatctggctgggacatggcagtttccggatcgaaagcggcgaggcggtgctgctggtcgatccctggctcaatggcaacccgaccctgcccgaggatcagcacgacgccgccgtcatcggcgccacccatatcctgctgacccatacccatttcgaccatgtggtcgatgtgctgccgctggcgcgcctgctcaaagtgccggtggtgggccaatacgacctgatgggctattggagcgaggccgaagagatcgagaccgtggggttcaacaagggcggcacggtgaccctgaacggggtgcgggtatcgatggtgccggcctcgcacagctccaccttcaccacgccggacgggcttcgcagcggtggctctgaagtgggttacatgatcgcagccgaggggcatgtggtctatctgtcgggcgataccggcatcatggccgacatggactggatgggggattactataagcccgatatcggcatcctcagcgccgggggccatttcaccatggacatgcagggcgcggcctatgccgcaaaacgctatttcaacttcaagacggtgatcccctgccattaccgcagcttcccgatcctggagcaatcggcccaggccctgatcgacgggttgcccggcgtcgaggtgatcgagccgcaggtgatgcaggcgatcgaggtctga

SEQ ID NO: 61598 - protein, 230 aa, Silicibacter pomeroyi DSS-3
MKIIWLGHGSFRIESGEAVLLVDPWLNGNPTLPEDQHDAAVIGATHILLTHTHFDHVVDVLPLARLLKVPVVGQYDLMGYWSEAEEIETVGFNKGGTVTLNGVRVSMVPASHSSTFTTPDGLRSGGSEVGYMIAAEGHVVYLSGDTGIMADMDWMGDYYKPDIGILSAGGHFTMDMQGAAYAAKRYFNFKTVIPCHYRSFPILEQSAQALIDGLPGVEVIEPQVMQAIEV

SEQ ID NO: 61599 - DNA, 693 bp, Methanosarcina barkeri str. Fusaro
  CDS (1)..(693): transl_table=11
atggttggcgtaaagattacctggctcgggcattcggcttttttgttagaagctgaaaagaaattgttgatcgacccttttatttcagggaacccactggctccgtgcagccctgaagaactgaaccctgatataataaccgtgactcacgggcaccgcgatcaccttggagatacgatcgaaatcggaaaacgaaccagatgccggataattaccattcatgaggttgcaaactatataaaatcgaaaggagtttttgcagaaggcatgggcaagggcggtacagtaaatgtagaaggcataaagctaaccatgaccgatgcgctccattcctcctcaattgatgcctcgggttttagtttcgatggtggctccccggcaggtttcattatacaaatcaacggacattccatctaccacgccggagacactggggttttcggggatatgaaactcataggtgaactctatgaacctgaactggtccttctgcccataggcgacaaatttacaatgggcataaaagaagccacaaaagccgtagaactcatcctgcccagaaccgtaatccctatgcactatagcacctttgacgtaataaaacaggaccctgaagagttcaaaagagcagttgaggcaaaagtcgatacgaaagtcattatcatgaaacccggagaatctatagatctttga

SEQ ID NO: 61600 - protein, 230 aa, Methanosarcina barkeri str. Fusaro
MVGVKITWLGHSAFLLEAEKKLLIDPFISGNPLAPCSPEELNPDIITVTHGHRDHLGDTIEIGKRTRCRIITIHEVANYIKSKGVFAEGMGKGGTVNVEGIKLTMTDALHSSSIDASGFSFDGGSPAGFIIQINGHSIYHAGDTGVFGDMKLIGELYEPELVLLPIGDKFTMGIKEATKAVELILPRTVIPMHYSTFDVIKQDPEEFKRAVEAKVDTKVIIMKPGESIDL

SEQ ID NO: 61601 - DNA, 693 bp, Rhodobacter sphaeroides 2.4.1
  CDS (1)..(693): transl_table=11
atgaagatcacctggctcggccattccggcttccgcatcgccatcgagcaggccgtgctgcttgtcgacccctggctcaccggcaacccgctcttccccgccgaccggcgcgaggaggcgctggcgggcgccacccatatcctcatcacccacgggcatggcgaccataccggcgacactgtggccatcgcgaaggagcggggccttccggtggtcggcatctacgatctcgtgacctggctgcaggagaaggaggggatcgacgggatcggcttcaacaagggcggcacggtgacgctgggcggggcccgggtcaccatggtgcaggccacccattcctcctccatgtcgggcgaggcgggcccgatctataccggcaccgaatcgggctacatgatcgcgggcgagggccatgtgatctacctgtcgggcgataccgacatcatggccgatatgggctggatgggcgaatatcaccgccccgacgtgggcatcctctccgcgggcggtcatttcaccatggacatgaagcgggcggccttcgcagcgcgcaaatatttcgacttccgcaccgtgatcccctgccattaccgcaccttcccgctgctcgaacagtcggccgaggcgctgaaggagggcctgcccggcgtcgaggtgatcgagccgcaggtgctcgtcccgatcgacatctga

SEQ ID NO: 61602 - protein, 230 aa, Rhodobacter sphaeroides 2.4.1
MKITWLGHSGFRIAIEQAVLLVDPWLTGNPLFPADRREEALAGATHILITHGHGDHTGDTVAIAKERGLPVVGIYDLVTWLQEKEGIDGIGFNKGGTVTLGGARVTMVQATHSSSMSGEAGPIYTGTESGYMIAGEGHVIYLSGDTDIMADMGWMGEYHRPDVGILSAGGHFTMDMKRAAFAARKYFDFRTVIPCHYRTFPLLEQSAEALKEGLPGVEVIEPQVLVPIDI

SEQ ID NO: 61603 - DNA, 681 bp, Carboxydothermus hydrogenoformans Z-2901
  CDS (1)..(681): transl_table=11
gtgaaaataacttttctgggtcatgccgcttttttagtggaggaagaagggcttaagttcttgtttgatccttttttaacgggaaatcctcaggccaaaattcgccccgacgaaattactgccgattacatcttggtaagtcacggccacggtgaccacctgggggataccgtagcaattgcccaaagaagcggtgctaccgtaattggtgtttttgaactttgcaattttctttcccgccagaacgttaaaacccatcccatgcatattggcggaagatataactttgggcagtttacagtaaagcttactcccgcctggcatggaagctcctttggagaagggccagtggaatacctgggaaatccctgcggctttttactttccgttggcgggaaaacattataccataccggagataccggactcttttacgatatgaaattacttgccgaaatagacccggtggatattttactggtaccgattggtggcaattttaccatggacgttaaagatgcgctaaaagctctggaacttgttaaacccaaatatgctattcccatgcactacaacacctggccggtaattgctgcggatgtcggggaatttcaagataaaggccgggctttaggagtagcaatcaaagtattgaatcccggggagatggttgttctttaa

SEQ ID NO: 61604 - protein, 226 aa, Carboxydothermus hydrogenoformans Z-2901
MKITFLGHAAFLVEEEGLKFLFDPFLTGNPQAKIRPDEITADYILVSHGHGDHLGDTVAIAQRSGATVIGVFELCNFLSRQNVKTHPMHIGGRYNFGQFTVKLTPAWHGSSFGEGPVEYLGNPCGFLLSVGGKTLYHTGDTGLFYDMKLLAEIDPVDILLVPIGGNFTMDVKDALKALELVKPKYAIPMHYNTWPVIAADVGEFQDKGRALGVAIKVLNPGEMVVL

SEQ ID NO: 61605 - DNA, 723 bp, Desulfovibrio desulfuricans G20
  CDS (1)..(723): transl_table=11
atgcagcatctgcttacgtggcatggccacgccaattttcagattgccacagagggcgccaacattctgatagacccttttttcgagggtaatccttccgctgccgcggcgtggcagggcatagcaaaacccgaccttgtgctggtcacccacgaccacggcgaccatgtgggccagaccgtggagatatgccgtgaaacgggcgccatgatgggtgccatagtgggtacggctgaaaagctggccgctgcgggtgtgccgcagcagcaggtgcttaacggcatcgggttcaacatcggcggcacagtgctgcacaacggtgtggccgtgaccatgacgcaggcgtatcattcttcggaatccggcgcgcctgcggggtatatacttacgctgcccgacggctttaccatttaccacgccggtgacacgggtatttttgccggtatggaactgtgggggcgtctgtattccattgatgtggcgctgctgcccatcggcggggtgttcaccatggatgccaagcaggccgcgctggcgtgccgtctgctgcgtgcgcgttcggtggtgcccatgcactggggcacgttccccgtgctggagggcaatacggcgcgttttaaagaacaactgatgaattttgctccggactgccgcctcttcgacatgaagcccggagaaaccctgacgctggaaaccgcgtcagaaggctgtgcctgcgactag

SEQ ID NO: 61606 - protein, 240 aa, Desulfovibrio desulfuricans G20
MQHLLTWHGHANFQIATEGANILIDPFFEGNPSAAAAWQGIAKPDLVLVTHDHGDHVGQTVEICRETGAMMGAIVGTAEKLAAAGVPQQQVLNGIGFNIGGTVLHNGVAVTMTQAYHSSESGAPAGYILTLPDGFTIYHAGDTGIFAGMELWGRLYSIDVALLPIGGVFTMDAKQAALACRLLRARSVVPMHWGTFPVLEGNTARFKEQLMNFAPDCRLFDMKPGETLTLETASEGCACD

SEQ ID NO: 61607 - DNA, 711 bp, Desulfitobacterium hafniense Y51
  CDS (1)..(711): transl_table=11
gtggtaaaaatggaaattcgctttcacggtcatgcttgcttcgaaatcattggggaaaagggcagaatactgattgatcctttcctgaaggggaacccggcagccgatgtggggccggaacatttcactcacctggacgggattctggtttcccacgggcattccgatcatttaggggatgccatcgaactctcacaaaagaccggagcccctcttatttgtgtctttgagctggcccgtctctgtgccaggtatggggcgaagacccatgccatgcatatcggcggcaagcatacctttaactttggcacggtgcgtttgacccaagccctgcacggctcggtctttgaaccgccgggagaagaagaatcctttacttatgccggtatggcctgcggatttttgatccagatggatggcaagtggatttatcatgcgggggatacggggcttttcggggatatggagctgatcggacggcggcaccccttggcagccgccatgctgccgattggggacaactacaccatggggcaggaggaagcggtctatgccgctaccctcttaaggcccaactatttgatccccatgcattataatacctttccggttatccagcaggaccctcaggagttcagcgaacttttaaaaagaaagttcccggccagcaaaggggagattttagcccctggccaatccctgatcatttaa

SEQ ID NO: 61608 - protein, 236 aa, Desulfitobacterium hafniense Y51
MVKMEIRFHGHACFEIIGEKGRILIDPFLKGNPAADVGPEHFTHLDGILVSHGHSDHLGDAIELSQKTGAPLICVFELARLCARYGAKTHAMHIGGKHTFNFGTVRLTQALHGSVFEPPGEEESFTYAGMACGFLIQMDGKWIYHAGDTGLFGDMELIGRRHPLAAAMLPIGDNYTMGQEEAVYAATLLRPNYLIPMHYNTFPVIQQDPQEFSELLKRKFPASKGEILAPGQSLII

SEQ ID NO: 61609 - DNA, 657 bp, Methanococcoides burtonii DSM 6242
  CDS (1)..(657): transl_table=11
atgagaaccacaacaattggtaatgtatcaatagaatggctaggacatgccggattcatatttcgcgggcagaaaaaagtgatatacattgacccatatcagatcccagatgagatcagccctgaagatgaagctgacatcatacttttgacacacgaacatttcgaccattgcaacccggattccatacggaagatacgcggaagcatgacaactaccttgatcccggaaaatatgtcattacagttcaaaggcgatgcacgcagaatcattgagggagataagctcaaaggagatctggcgataaaaggagtgaatatagaggtcgtgccttcatacaatcttaataagccaaaccatccgcgcggagaaggtgtaggctatatagtcgaactggaaggcataaagatataccatgccggagattcagacttgatccccgaaatggctgagatacatgcagatgtggcccttctacccataagtgccgattttacaatgagcgaagaagaagcagctgatgcgacagtttccatagggccaaagattgcaattcctatgcattatggccttgttgatggtactgatgcagacccagagaagttcaaagcgcttatcaatgcaaaggatcctaatgtagaagtcataattctttaa

SEQ ID NO: 61610 - protein, 218 aa, Methanococcoides burtonii DSM 6242
MRTTTIGNVSIEWLGHAGFIFRGQKKVIYIDPYQIPDEISPEDEADIILLTHEHFDHCNPDSIRKIRGSMTTTLIPENMSLQFKGDARRIIEGDKLKGDLAIKGVNIEVVPSYNLNKPNHPRGEGVGYIVELEGIKIYHAGDSDLIPEMAEIHADVALLPISADFTMSEEEAADATVSIGPKIAIPMHYGLVDGTDADPEKFKALINAKDPNVEVIIL

SEQ ID NO: 61611 - DNA, 876 bp, Ralstonia metallidurans CH34
  CDS (1)..(876): transl_table=11
atgatcagacgccgccttatcattgccgccgcagccgcgactgcgctcgccgcctgcgcctcaggtatttcgaacgcccccgccccggcgccgcagccggccaccaccggcagccatgcccctggcaagaccgaagtgctctggctcggccaggccgccacgcgcatcaccacgcccggcggcaaggtcatcgtcatcgacccctggctgaccggcaatccgaagacgccgcccgcgttcaagcaactctccgcgctgggcaaggtcgacatgatcctgctcacccacgcccacggcgaccatctcggggatgcgccggcaatcgccacgacgcagcacgtgccgatctggaatggcggcggcatgggcccgcaactggtcagccttggtctggtgacctcggatctggtgcaaccgtttggcaagagcggcactgtcatgccattcggacctaacggtccgaagatcaccgccgtccacgccgagcattcgtccgagctggtctggaagaatccggccacgaacaagaacgaaagccactacggcggcgagccggtcggctacatcatcgagatggagaatggcttcaagatctggcacatgggcgataccggactgttcagcgatatgaagctgatcgccgaacgctacaagccagatctggccatgatcccgatcggcgggcattacacgatgggcccgcaggacgcggcgatagccgtgcgcgatttcatcaagccgaggtatgccattccgatgcactacggcacgtcgccgatgctgcgcggcacgcctgacgagttcaaggccgcgctcggggccggagccaccacggcggtaatcgtgcccgatcccggccagcaggtcgcgttctaa

SEQ ID NO: 61612 - protein, 291 aa, Ralstonia metallidurans CH34
MIRRRLIIAAAAATALAACASGISNAPAPAPQPATTGSHAPGKTEVLWLGQAATRITTPGGKVIVIDPWLTGNPKTPPAFKQLSALGKVDMILLTHAHGDHLGDAPAIATTQHVPIWNGGGMGPQLVSLGLVTSDLVQPFGKSGTVMPFGPNGPKITAVHAEHSSELVWKNPATNKNESHYGGEPVGYIIEMENGFKIWHMGDTGLFSDMKLIAERYKPDLAMIPIGGHYTMGPQDAAIAVRDFIKPRYAIPMHYGTSPMLRGTPDEFKAALGAGATTAVIVPDPGQQVAF

SEQ ID NO: 61613 - DNA, 702 bp, Acidobacteria bacterium Ellin345
  CDS (1)..(702): transl_table=11
atggacctgcaagggctgaagatcacgtggctcgggcacgcaacatttcgcgtcgtaacgccgaagggaacccacattctgatcgatccctgggtcatgggcaatcccgcctgccctgagaccgagaagcaagtgaaaaaggtggacgtgatgctgatcacgcatggccacttcgaccacattggcgacgccgtcgagatcgcgaaaaagcattcgcccaaagtcgtgtgcatcccagagatgggcgcgtggttacagaagaagggcgtgaagaacgtcgccgagatgaataagggcggtacgcagcatgtgggcgacatcgccgtcacgatggtccacgcggtgcactcctgcggcattaccgatggcgatcaggttgtgtacggcggcgaggcctgcggctacgtgttgaagttcgacaacgacgtgaccctctaccacgcgggcgacaccatggcgttcagcgacatgaagatcatccatgagctgtggcgtccgcaaattgcgatgctgccgattggagaccactacaccatggatccacggcaggctgcctacgcggcagaactgctccagccaaaggcgatcatcccgatgcactttggcaccttcccggtgctcaccggcaagccttctgagcttgagaagtttgtcgaagtctgcgatgtacacgaaatgaagccaggagaaacgtggtcctaa

SEQ ID NO: 61614 - protein, 233 aa, Acidobacteria bacterium Ellin345
MDLQGLKITWLGHATFRVVTPKGTHILIDPWVMGNPACPETEKQVKKVDVMLITHGHFDHIGDAVEIAKKHSPKVVCIPEMGAWLQKKGVKNVAEMNKGGTQHVGDIAVTMVHAVHSCGITDGDQVVYGGEACGYVLKFDNDVTLYHAGDTMAFSDMKIIHELWRPQIAMLPIGDHYTMDPRQAAYAAELLQPKAIIPMHFGTFPVLTGKPSELEKFVEVCDVHEMKPGETWS

SEQ ID NO: 61615 - DNA, 693 bp, Silicibacter sp. TM1040
  CDS (1)..(693): transl_table=11
atgaaactgatctggctcggtcatggcggctttcgtctggaaacaggcgagaccacccttcttatcgacccttggctcaccggcaatccgatgctcgaagacagtcaacatgacgcggcaacccaaggggccacccatatcctgttgacccatgcgcattttgatcatgtggcggatgtgctggagctggcaaaacacctctcggtgccgatcgttggccaatatgacctgatgggatattggggcgaaaccgaaggcgtgcagaccgtgggcttcaacaagggcggcactgtcacggtcggggacacgcgcgtctcaatggtgccggcctcccattccaacacgttttccacccgcgacgggctgcgcactgcgggcagcgaagtgggctacatgatccgggcagaagggaagacgctctatgtgtcgggcgacaccgacatcatggccgacatggactggatgggggactactacaaacccgagatcggcattctgtcggcgggggggcatttcaccatggatatgaaggccgccgcctatgccgcgcaacgctattttgcctttaaaacggtcatcccctgccactaccgaacatttccattgctggaacagagcgcacaagacttgattgatgggcttcccggcgtcaacgtcatcgagccacagattatgaaagacatcgaactctaa

SEQ ID NO: 61616 - protein, 230 aa, Silicibacter sp. TM1040
MKLIWLGHGGFRLETGETTLLIDPWLTGNPMLEDSQHDAATQGATHILLTHAHFDHVADVLELAKHLSVPIVGQYDLMGYWGETEGVQTVGFNKGGTVTVGDTRVSMVPASHSNTFSTRDGLRTAGSEVGYMIRAEGKTLYVSGDTDIMADMDWMGDYYKPEIGILSAGGHFTMDMKAAAYAAQRYFAFKTVIPCHYRTFPLLEQSAQDLIDGLPGVNVIEPQIMKDIEL

SEQ ID NO: 61617 - DNA, 729 bp, Rubrobacter xylanophilus DSM 9941
  CDS (1)..(729): transl_table=11
atggtgcaggagatgctcggcgggaccaggataacctacctcggccacgcgaccttcaggctgaccaccccgggcggggagaacatcctcatcgacccctttctcgcggacaacccccagacccccgaggagctcaagcaggtcggcgacctcgacaccatcctcgtgacccacgggcacttcgaccacttcgccgacgccatccccgtggcgcgccagaccggggctacggtggtggcgaacttcgagatctcctcctacgtccagagccagggcatagagaactccatgcccctcaacaagggcggcaccgcccgggtcggcggggtgaaggtcaccggcaccaacgcctttcacgcctcctcgatccagacggaggacggctccacgatctacggcggcgagccgatgggcttcgtggtggagttcgagagcggcttcaaggtctaccacgccggggacaccgccgtcttcggggacatgcgcctgatcggggagctctacggcccggacctggcgctcctgccgatcggcgaccgggtggtgatgagccccttcgaggcggcccacgcggcccggctgctcggcgtgcggcacgtggtcccgatgcactacggaaccttcccgttcctgccgggcaccccggaggagttcgagcgccacgccagggagctgggcctggagctggagatccacgtgatgaagcccggggaggagctgggctcctag

SEQ ID NO: 61618 - protein, 242 aa, Rubrobacter xylanophilus DSM 9941
MVQEMLGGTRITYLGHATFRLTTPGGENILIDPFLADNPQTPEELKQVGDLDTILVTHGHFDHFADAIPVARQTGATVVANFEISSYVQSQGIENSMPLNKGGTARVGGVKVTGTNAFHASSIQTEDGSTIYGGEPMGFVVEFESGFKVYHAGDTAVFGDMRLIGELYGPDLALLPIGDRVVMSPFEAAHAARLLGVRHVVPMHYGTFPFLPGTPEEFERHARELGLELEIHVMKPGEELGS

SEQ ID NO: 61619 - DNA, 705 bp, Mesorhizobium sp. BNC1
  CDS (1)..(705): transl_table=11
atgaaaataacctggtatggccattccgctttcaggattgaggcgggcggcgccaaaatcctcatcgatcctttcctttccggcaatcccacttggaaagagggctgggaaggacccgccgagggcgtcacgcacgttcttctgacccacggccacggcgaccacttgggagacacgctggacatcctgaagaagacaggagccatgctggtcgcaaatgccgagatcagcagctattacggcgctcaaggcgttgagggcagcaggatcaaccccggcaatcacggcggcactgtggattgcggcgggttcaccacaaccttcgtgaacgcgctgcactcgtcctccttcaccaaggacggcagcaacatttatctcggcaatcctcacggcctcgtgctgcatttcccgagcgacaagaccgtctatcacatgggggataccgatattttcggcgatatggccctcatcgaggagctccaccagccgcagatcggccttgtgcccatcggcgaccgctacacgatgggcggcgccgtcgcggcgctcgcctgccgccgcttcttccgcttcgaggctgtcatcccctgccactatgggacctttccgatcatcgatcagaccgccgagaagttcatcgagggcatggaaggcgctgagacgaaggtgttgacgccgccccccggccaggaggttgatctatag

SEQ ID NO: 61620 - protein, 234 aa, Mesorhizobium sp. BNC1
MKITWYGHSAFRIEAGGAKILIDPFLSGNPTWKEGWEGPAEGVTHVLLTHGHGDHLGDTLDILKKTGAMLVANAEISSYYGAQGVEGSRINPGNHGGTVDCGGFTTTFVNALHSSSFTKDGSNIYLGNPHGLVLHFPSDKTVYHMGDTDIFGDMALIEELHQPQIGLVPIGDRYTMGGAVAALACRRFFRFEAVIPCHYGTFPIIDQTAEKFIEGMEGAETKVLTPPPGQEVDL

SEQ ID NO: 61621 - DNA, 777 bp, Mesorhizobium sp. BNC1
  CDS (1)..(777): transl_table=11
atgacctttacgaggcgtaagactttgcaactcggtgcaaccggcttggccgcggtcggagcgacgatcatcatgcctttttccacccgggcgcaggaatcccaaggcgacagctacgacagcgaaaacgggaagatcaccatctcccccatcgcgcatgcctctttcgtgatgaccgttcccaatatggtcatctatgtcgatcctgttgggggtgccgcggcgtttgagggcaatcctcctgcggacctcatactcgtcacccacgagcatggcgatcatttcgagccggatacactgactgcgcttgcaggagagcagacacagctcgtcaccaacccgtccgtcttcgataagctgcccgaggcgctgaagagcaaggcaacctcgatcggcaatggagaaagcacgaccgtgggcgaaatcgggatcgaagccattcctgcctacaacaccacgcccgaccggttgcagtaccaccccaagggccgcgacaacggctatgtcctgagcgccgacgggcgcagggtctatattgcgggcgacacggaagacatcccggaaatgcgcgctcttagcgacatcgacatcgccttcgtcccgatgaacctgccctacaccatggatagcgatcaggcggcttccgctgtggccgagttcgctcccaaggttgtctatccctaccattatcggggcagcgatcccgaggcctttgctgcaaaggttgccgaggcaggcgcggagatccaggtggtgcaggggccttggtatagctga

SEQ ID NO: 61622 - protein, 258 aa, Mesorhizobium sp. BNC1
MTFTRRKTLQLGATGLAAVGATIIMPFSTRAQESQGDSYDSENGKITISPIAHASFVMTVPNMVIYVDPVGGAAAFEGNPPADLILVTHEHGDHFEPDTLTALAGEQTQLVTNPSVFDKLPEALKSKATSIGNGESTTVGEIGIEAIPAYNTTPDRLQYHPKGRDNGYVLSADGRRVYIAGDTEDIPEMRALSDIDIAFVPMNLPYTMDSDQAASAVAEFAPKVVYPYHYRGSDPEAFAAKVAEAGAEIQVVQGPWYS

SEQ ID NO: 61623 - DNA, 768 bp, Mesorhizobium sp. BNC1
  CDS (1)..(768): transl_table=11
atgaaatatacgagacgctgggtgttgacggctggggccatggggttggggatagccggttgcataggaccgcatattgcgtcagccaaggcacaaggaagcgacaccattcctgccgacggtggggagatcactgtccatcctgtgggacatgcttccatcgtcctggaggcaggcgacatgacaatctacgtcgacccggtcggcgaggcatctgcctaccaggccttttcagccccggatctcatcctcatcacgcacgagcaccccgatcacttcaacgttgacttgcttaatgcgcttgcgagcaacgggacaaagatcattgccaatccggcggtctttgagcttttaccagaagctcttcagggcatggccgcgcagatggccaatggtgaaagaacagaggtggctggcatcgggatcgaagctgttcccgcatacaatactacgcaagagcggctgcggtatcacccgcaggggcgggacaacgggtatgtgctctcgctttctggagtgcgaatctacatagctggtgatacggaagatacccccgagatgcggggccttcaggacatcgacctggcttttgtgccgatgaacctgccattcaccatgagcgttgagcaggcagcggatgcggtgatcgagttcaagccgaaagtggtctacccgtatcattaccggggtaacgacgtagatcaattcaagagcttggtggatcagtcaggcgcagaaatcgaggtacgcctcgccaagtggtattaa

SEQ ID NO: 61624 - protein, 255 aa, Mesorhizobium sp. BNC1
MKYTRRWVLTAGAMGLGIAGCIGPHIASAKAQGSDTIPADGGEITVHPVGHASIVLEAGDMTIYVDPVGEASAYQAFSAPDLILITHEHPDHFNVDLLNALASNGTKIIANPAVFELLPEALQGMAAQMANGERTEVAGIGIEAVPAYNTTQERLRYHPQGRDNGYVLSLSGVRIYIAGDTEDTPEMRGLQDIDLAFVPMNLPFTMSVEQAADAVIEFKPKVVYPYHYRGNDVDQFKSLVDQSGAEIEVRLAKWY

SEQ ID NO: 61625 - DNA, 825 bp, Rhodococcus sp. RHA1
  CDS (1)..(825): transl_table=11
gtgcgcatcgcaccgcctttcgtcatctggaatcgtaagggtgtgagcgcaacgccgggtccagttgccgccgcacccggtgtgcgctggctcggacattccagcgcgctgatcgtggaccgcgggacggtcgtcctgaccgatccggtgctgaccgaccacgtcgcgcacctacgccgccgccgagggcccgcaccgatcgggccgcacgtgcgcaacccggacgccgtcctgctctcgcacctgcacgcggaccatgcgcacctgccgtcgctgcggctgctcgatcccgacgtcccgatcgtggccccgtggcgggcggtcgacggcctgcccgcgctgcgccagttcgccgaccgcctggtgctgctgaggccgggcgacgagacaaggatcggcaacgtcgccgtgcgcgccgtgcccgccctacacgacggcaggcgctggccgcgcggcccgcagatcgcgcccgcggtcgggtacgtcgtcgagggtgaccggcggacctactttgccggcgacaccgacctgtaccccgacctcgccgaccacgtcggccctgtcgacctcgcgctgctacccgtcggcggctggggtccgaccctcggcaagggtcacctcgacccgactcgcgccgcggtcgtcgcacgcctggtggaggcgggcctggcggtgccgatccactacggcacactgtggccgatcggcctcgacgccgtgcgaccccggttgttcttcggcccgggcggggagttcgtccaccacgccgagcgggcgggtgtcgttgcggtggagttgcacccgggtagcgaactcggggtgtga

SEQ ID NO: 61626 - protein, 274 aa, Rhodococcus sp. RHA1
MRIAPPFVIWNRKGVSATPGPVAAAPGVRWLGHSSALIVDRGTVVLTDPVLTDHVAHLRRRRGPAPIGPHVRNPDAVLLSHLHADHAHLPSLRLLDPDVPIVAPWRAVDGLPALRQFADRLVLLRPGDETRIGNVAVRAVPALHDGRRWPRGPQIAPAVGYVVEGDRRTYFAGDTDLYPDLADHVGPVDLALLPVGGWGPTLGKGHLDPTRAAVVARLVEAGLAVPIHYGTLWPIGLDAVRPRLFFGPGGEFVHHAERAGVVAVELHPGSELGV

SEQ ID NO: 61627 - DNA, 705 bp, Rhizobium leguminosarum bv. viciae 3841
  CDS (1)..(705): transl_table=11
atgaagatcacctggctcggccattccgccttccgcatcgagacatcaaaggcgaagatcctgctcgatccattcctcagctataacgcctccttttccggccaggatatcaaggatgtttctgcaggcatcactcacatcctgttgacgcacggccatggcgatcatgtcggcgataccgtggcactcgccaaggaaaccggcgctgtcgttctcgccaatgccgatctcgccgcttggctcggctccaagggcgtcgacaagatcgagatgggcaataccggcggcacgatcgcgctcggcagcttctcggcaaccttcaccaatgcgctgcactcctccgcccagatcaccgaggacggcgtctcgcacgcactcggcaacgccaacggcctgatgctgcatttcgacgacgaagcctcgatccttgccatgggcgataccgacatcttctccgacatggcgctgatcaatgaattgcaccagcccgatatcggtttcgtgccggtcggcgaccgcttcaccatgggcggcgctgtggcagcacttgcctgccggcgctatttcaacttcaagaccgcgatcccctgccactacggcacctttccgatcatcgaccagacggccgaaaaattcgttgccggcatggacggatcgaagacggatgtgaaggcgatcaggccttccgagagcctgtcgatctga

SEQ ID NO: 61628 - protein, 234 aa, Rhizobium leguminosarum bv. viciae 3841
MKITWLGHSAFRIETSKAKILLDPFLSYNASFSGQDIKDVSAGITHILLTHGHGDHVGDTVALAKETGAVVLANADLAAWLGSKGVDKIEMGNTGGTIALGSFSATFTNALHSSAQITEDGVSHALGNANGLMLHFDDEASILAMGDTDIFSDMALINELHQPDIGFVPVGDRFTMGGAVAALACRRYFNFKTAIPCHYGTFPIIDQTAEKFVAGMDGSKTDVKAIRPSESLSI

SEQ ID NO: 61629 - DNA, 693 bp, Oenococcus oeni PSU-1
  CDS (1)..(693): transl_table=11
atgaaaattacgtattttggccaaagtgcttttcaaatcaaaaccggtaaaacaacaattttaattgatccgtttttaaccggtaataagcatacaaaagtcgaccccttcgatttaaatcctgaatacatcttattaacgcatgctcatcaggatcataccggcgatagtttcgatatagccaggagaacaggagcgacgatcattacccaaacggattatgcccagtatattaatgatattttgcctgaagccaagggttgccatgctgaaggaattaatttcggtggaacttttagtgctgatgatttttctgtaaaactttatccagcctggcacacggatgcaagaatggttggaaatgctctggtgccggttggagtcgctgctgggatggctttaacaattgaagataaattgatttacgataccggtgataccgctttgttttccgacctaaaattagttgcgagaaaacatccggtcgatttggctttaatttgtattggtggccacttcacgatggatgctgacgatgcacttgttgctgcagattttcttcaggctaaacatgtcatcccgactcattacaatacttttccgtctattcaggccgacccgcagaaattcgttgaacaattaccaacaggcgtaggaataatccctgattttgataaggaatttgatttttaa

SEQ ID NO: 61630 - protein, 230 aa, Oenococcus oeni PSU-1
MKITYFGQSAFQIKTGKTTILIDPFLTGNKHTKVDPFDLNPEYILLTHAHQDHTGDSFDIARRTGATIITQTDYAQYINDILPEAKGCHAEGINFGGTFSADDFSVKLYPAWHTDARMVGNALVPVGVAAGMALTIEDKLIYDTGDTALFSDLKLVARKHPVDLALICIGGHFTMDADDALVAADFLQAKHVIPTHYNTFPSIQADPQKFVEQLPTGVGIIPDFDKEFDF

SEQ ID NO: 61631 - DNA, 708 bp, Solibacter usitatus Ellin6076
  CDS (1)..(708): transl_table=11
atgaaaagaattgcgagtgtgctgctggctgcggcggctgcgttcggggcagcgcccgaggagtttacgactgcgaaggggccggcgcagattatcccgattcaacatgcgagcctgatgctgaaggccggcgggaaggtgatgtacgtcgatccggcgcaaggggcatacgacgggctgccgcaggcggattacatcctgatcacggacattcacggcgatcacatggcgccggcggtggttgcaaagttgaagaaggccggcacggttattgtgacgcctaagtcggccgccgataagtttccgggcgcggtggtgatggcgaatggagaggcgaaggcgatcggcgaattccaggtagaggcgattccgatgtacaacctgaagccggccgcggatggcacggtgtatcacgaaaagggtcgaggcaatggctacatcgtgacgttcggcgggaagcggttctattttgccggcgatacggaaggcacgccggagatgcgcgcattgaagaatatcgacgtggcattcatccccatgaatttgccatatacgatgacgccgcgcgacgcggcggatgcggtaaaggcatttcatccagcggtggtgtatccgtatcactaccggggacaggacaccgcgatcttcgctaaggcgctggaaggtacaggaatcgacgtgcggttgcgcgactggtacggaaagtaa

SEQ ID NO: 61632 - protein, 235 aa, Solibacter usitatus Ellin6076
MKRIASVLLAAAAAFGAAPEEFTTAKGPAQIIPIQHASLMLKAGGKVMYVDPAQGAYDGLPQADYILITDIHGDHMAPAVVAKLKKAGTVIVTPKSAADKFPGAVVMANGEAKAIGEFQVEAIPMYNLKPAADGTVYHEKGRGNGYIVTFGGKRFYFAGDTEGTPEMRALKNIDVAFIPMNLPYTMTPRDAADAVKAFHPAVVYPYHYRGQDTAIFAKALEGTGIDVRLRDWYGK

SEQ ID NO: 61633 - DNA, 693 bp, Solibacter usitatus Ellin6076
  CDS (1)..(693): transl_table=11
atggaaatcacttggctaggtcatggcaccttccagttccgtctgccatcgggacaggtcctcgtgatggacccgtggatcgatggcaatccggcgtatccgaaagggtgcaagatcgatcgcgtggacacgatctgcatttcacacggccacttcgatcacattcacgatgcggtgccgctggcgaaacagttcgaccccgaggtggtggcgatcttcgagacggcgcactggctggaatcgaaaggagtggccaagacccggccgatgaacaaaggcggctcgcagaaagtcggcgaagtaatggtgacgatgacccacgcggtccacagctgcggcatcgtggacgagggcaagatcatttacggcggcgaagcggcgggctacgtgcttcaccttccggacaagcgcgtaatctacttctcgggcgacaccaacgtattctccgacatggcgttgatcgagcagctgtaccatccggaattggcattcctgccgatcggagatctctacacgatgagcccgcatgaggctgcgctggcctgccgcctgctgcgcgcgcgcaaagtgatcccgatgcacttcggcacgttcccgccgctcaccggccgcccggacgatttgcgcgagcggatccgcggactggagaccgaagtctgggcgctcgagccaggcaaaccggtgcagtggtaa

SEQ ID NO: 61634 - protein, 230 aa, Solibacter usitatus Ellin6076
MEITWLGHGTFQFRLPSGQVLVMDPWIDGNPAYPKGCKIDRVDTICISHGHFDHIHDAVPLAKQFDPEVVAIFETAHWLESKGVAKTRPMNKGGSQKVGEVMVTMTHAVHSCGIVDEGKIIYGGEAAGYVLHLPDKRVIYFSGDTNVFSDMALIEQLYHPELAFLPIGDLYTMSPHEAALACRLLRARKVIPMHFGTFPPLTGRPDDLRERIRGLETEVWALEPGKPVQW

SEQ ID NO: 61635 - DNA, 900 bp, Solibacter usitatus Ellin6076
  CDS (1)..(900): transl_table=11
atgggagccgccctactcgaccttggcagctgggtctaccgcaccgcaccaagtttctacagacgcctcgctcaggattttcagcgcgacatccgccccgcgccgcaccgccctgatccgaactcctggcccaataccggcttccacgccgcgtggctcggccattccaccgtcctgctcaagatcgatggcctcacgatcctcaccgaccccgtcttcagcaagcgcgccggtatcggactcggtcccgtcacgctcggcctcaagcgcctggtggcccccgcgctcactatcgcggaccttcccgaaatcgacgtggtactgctctcgcacgcccacatggaccacttcgatatccccagcctgcaccgcctcgaaggccgcggcgtcacggtcgtgactgcttcccgcacggcggacctgctccgcgccggccgctactccgccatccgcgagctccgctgggacgagcgcacgcaaatcggcccgctcgagattcgtgctttccccgtccgccactggggagcccgcatgcgcagcgatacctaccgcggttacaacggctacaccctcgaatgcggccgctaccgcatcctcttcggcggcgacaccgccatgaccgatacttttcgccaactcaaaacctcccgccccttcgatctcgccatcatgccggtcggcgcctacaatccctggatcaccgcccattgcactcccgagcagtcctggcgcatggcccaggacgccggcgccgagttcttcctccccgtccaccaccagaccttcatgctcagccgcgaaccctacttcgagcccatcgagcgcgtctacaacgtggccggcaaccactccgaccgcgtcgccctcagcggcatcgggcaacaattccaaattaactga

SEQ ID NO: 61636 - protein, 299 aa, Solibacter usitatus Ellin6076
MGAALLDLGSWVYRTAPSFYRRLAQDFQRDIRPAPHRPDPNSWPNTGFHAAWLGHSTVLLKIDGLTILTDPVFSKRAGIGLGPVTLGLKRLVAPALTIADLPEIDVVLLSHAHMDHFDIPSLHRLEGRGVTVVTASRTADLLRAGRYSAIRELRWDERTQIGPLEIRAFPVRHWGARMRSDTYRGYNGYTLECGRYRILFGGDTAMTDTFRQLKTSRPFDLAIMPVGAYNPWITAHCTPEQSWRMAQDAGAEFFLPVHHQTFMLSREPYFEPIERVYNVAGNHSDRVALSGIGQQFQIN

SEQ ID NO: 61637 - DNA, 930 bp, Shewanella sp. ANA-3
  CDS (1)..(930): transl_table=11
atgtctcatatttatcaactgccaaagagatacattatgaaaaacaaagctatcaccatcctacttaccttagggcttgcaaccatcataaatagcaccaatgcattagctgaatcggctccaacgctgcattcagaaccacagcagattcactttcagcatatccgaaatgcaacatctaaactcacttatggtgacacaacattcttaatcgaccctatgctggcaaagaaagatacctatcctggttttgccggtacttaccgtagtgaaatacgtataccaatgatcgatttacccatgtcagctaaagctgtaattgacaatgtagacgccgttattgtcactcacacacatcttgatcattgggatgatgcagcacaaagtgtaattcctaaaacgatgcctttatttgttcaaaatgaagaagatgcaaatactattcgcgctcaaggctttaaagatgtgcgcgtgttaggcattaaaactcagttcaatggcattagtttaaccaaaacaggtgggcagcatggcacggatgaaatgtatgcaatcccagcgttagctaaagcactaggagaggctatgggtgtcatattagaggctgacaactacaacactgtttattttgtcggtgatactatttggcgcgatgaagtggaggatgcgttacataaatttaagcctgaattcgttgtgcttaacactggtgatgctcgaatggaaaatcttaaaggctcaattatcatggggaaagaagatacggtaagggctattaaacatgctcctcaagcgaacattattgctgtgcatatggatacggttaatcacgcagcattgacccgtaaagagctcagggagttcgtggaagaaaaaggcatagaaaaacaagtattaattcctgaagatggtgaatcgttgaagttataa

SEQ ID NO: 61638 - protein, 309 aa, Shewanella sp. ANA-3
MSHIYQLPKRYIMKNKAITILLTLGLATIINSTNALAESAPTLHSEPQQIHFQHIRNATSKLTYGDTTFLIDPMLAKKDTYPGFAGTYRSEIRIPMIDLPMSAKAVIDNVDAVIVTHTHLDHWDDAAQSVIPKTMPLFVQNEEDANTIRAQGFKDVRVLGIKTQFNGISLTKTGGQHGTDEMYAIPALAKALGEAMGVILEADNYNTVYFVGDTIWRDEVEDALHKFKPEFVVLNTGDARMENLKGSIIMGKEDTVRAIKHAPQANIIAVHMDTVNHAALTRKELREFVEEKGIEKQVLIPEDGESLKL

SEQ ID NO: 61639 - DNA, 687 bp, Listeria monocytogenes str. 1/2a F6854
  CDS (1)..(687): transl_table=11
atgaagatttcatttcatggtcagtcttgtattaaaataattactggggatacaactattctcgtggatccatttatttctggtaatgagaaatgtgatttaaaatcggaagaacagatgcctgactttatcgtgctgtcgcatgggcatgatgatcatgtcggtgatacagttgaaattgctaagaattctggagcaacagttatctgtaatgcggatttggcttcatttttggcggtagaggatgggcttgaaaatatggcgccaatgcatattggtgggaaaagacagtttagttttggccaagtgaagttgacgcaagcttttcacggatcgcagacggttcgagatggtcgcattgttaaccttggtttcccaactgggattgtatttacgatagaagataaaaatatttattttgcaggggacactggtttgttttctgatatgaaattaattggtgaattaaatccgctagacgttgctttcttgccgattggggataattttaccatgggaccagaagatgcggcgattgcggcacgatttttacaagcgaaattagttgttccaatgcattacaatacgtttcctttaatcgcgcaagatccacacaaatttgtcgcatcacttgacgaaggaatcactggaaaagtacttgaaatcggagaaagtatcgaaatctaa

SEQ ID NO: 61640 - protein, 228 aa, Listeria monocytogenes str. 1/2a F6854
MKISFHGQSCIKIITGDTTILVDPFISGNEKCDLKSEEQMPDFIVLSHGHDDHVGDTVEIAKNSGATVICNADLASFLAVEDGLENMAPMHIGGKRQFSFGQVKLTQAFHGSQTVRDGRIVNLGFPTGIVFTIEDKNIYFAGDTGLFSDMKLIGELNPLDVAFLPIGDNFTMGPEDAAIAARFLQAKLVVPMHYNTFPLIAQDPHKFVASLDEGITGKVLEIGESIEI

SEQ ID NO: 61641 - DNA, 684 bp, Bacillus cereus G9241
  CDS (1)..(684): transl_table=11
atgaaagtatcttatcatgggcattcagttgtaaagattgaaacgaatggaaaagtgattgtaattgatccatttttaacgggaaatccgaaaacagatttaaaggctgaagatgtaaaagtagatgcgattcttttatcgcacggacatggtgatcatgttggagatacagtagagcttgcgaagaaaaataatgcagttgtagtggcgccatttgaactagcgacatttttaagttggcaaggtgtaaaaacacatccgatgcatattggtggttcacatgaatttgacttcggaaaagtgaagtttacacaagcattccatggctctagttatattgatgaagaaaataagacgattacatatacaggtatgccagcgggtattttatttacagcagaagaaaaaacagtgtatcatgcaggtgatactgctctattctctgatatgaaattaattggggaactcaataacgttgatgtagcatttttaccaattggtgataatttcacgatgggaccagaagatgctgttttagcagcaaaatgggttcaggcgaaaactgttgtaccgatgcattacaatacgttcccggttattgaacaagatccatatcaatttgtagaaaagctacaaaattgtacagggaaagtattagaagctggagaaagtattacactatag

SEQ ID NO: 61642 - protein, 227 aa, Bacillus cereus G9241
MKVSYHGHSVVKIETNGKVIVIDPFLTGNPKTDLKAEDVKVDAILLSHGHGDHVGDTVELAKKNNAVVVAPFELATFLSWQGVKTHPMHIGGSHEFDFGKVKFTQAFHGSSYIDEENKTITYTGMPAGILFTAEEKTVYHAGDTALFSDMKLIGELNNVDVAFLPIGDNFTMGPEDAVLAAKWVQAKTVVPMHYNTFPVIEQDPYQFVEKLQNCTGKVLEAGESITL

SEQ ID NO: 61643 - DNA, 690 bp, Exiguobacterium sibiricum 255-15
  CDS (1)..(690): transl_table=11
atgaaactgacttatcacgggcagtctactgtcacgatcgaaacgaacgggcaccacatcgtcattgatccgtttttcagcggcaacgatcaggcgatgacaaaaccggaagacgtcaaagcagactttatcctgttaacgcatgcgcatgccgatcatatgctggatgccgaagacatcgccaaagcgacaggcgcgacgattgtcgcgacacatgaactggcgacgtacctgagctttaaaggattgaatgttcatccgatgaatctcggcggacagtttgagtttccgttcggaaaagtcaaaatgacgcaggcgttccattcttcaagcatcatcgatgaaaaaaaacagacgatcacgtacatgggaatgccggccggcttcttattgacgattgaagataaagtcatctatcatgcgggagatacggcactgtttggtgatatggcgctctacggtgcacattacgacatcgatcttgcgttcctgccgatcggtgataactatacgatgggtccggatgatgccttggtggcagcagacatgttgcaggcgaaaacggttgtgccggtccattacgacacgtttgatctcatcaagcaggatgccgcggctttctgtgcgaatttggaagcgcagggccaaaccggtcaagccttgaaaatcgatgagtcaatcgaactgtaa

SEQ ID NO: 61644 - protein, 229 aa, Exiguobacterium sibiricum 255-15
MKLTYHGQSTVTIETNGHHIVIDPFFSGNDQAMTKPEDVKADFILLTHAHADHMLDAEDIAKATGATIVATHELATYLSFKGLNVHPMNLGGQFEFPFGKVKMTQAFHSSSIIDEKKQTITYMGMPAGFLLTIEDKVIYHAGDTALFGDMALYGAHYDIDLAFLPIGDNYTMGPDDALVAADMLQAKTVVPVHYDTFDLIKQDAAAFCANLEAQGQTGQALKIDESIEL

SEQ ID NO: 61645 - DNA, 693 bp, Sulfitobacter sp. EE-36
  CDS (1)..(693): transl_table=11
atggatatcatctggcttggccacggcagctttcgcatcgagatcgaggatcagattctgctgatcgacccctggctcaccggcaatccgatgctggacgacgcgcagcacgaggccgcactggcaggcgtcacgcaaatcctagtgacccacgggcatttcgaccacacccaggacctcaagatggtggccgagaaaaccggcgcgccagttgcaggcatggtcgaactgatgggctatttcagcgcgcagggcgtggagaacaccaccggcttcaacaaaggcggcaccatccgctgcggcaaggtcgatgtgaccatggtacctgcgtcgcattcctcttccgtcgatggggacgcggggcctgtctatatgggggccgagatcggctttatgatcaagggcgaaggccgcacgatctatgtctcgggtgatacggatattatggcggatatggattggatgggcgactaccacaaacccgatatcggcattctcagcgcgggcggccatttcaccatggatatggccggtgcggcctatgcggcgaaacggtactttgacttcaagaccgtcatcccctgccactaccgtaccttcgacgcgcttgaacaatcggcgcaggtactgatcgacggcttgcccggcgtggatgtgatcgagcccgaggtgcttaaaccgatcagcctgtaa

SEQ ID NO: 61646 - protein, 230 aa, Sulfitobacter sp. EE-36
MDIIWLGHGSFRIEIEDQILLIDPWLTGNPMLDDAQHEAALAGVTQILVTHGHFDHTQDLKMVAEKTGAPVAGMVELMGYFSAQGVENTTGFNKGGTIRCGKVDVTMVPASHSSSVDGDAGPVYMGAEIGFMIKGEGRTIYVSGDTDIMADMDWMGDYHKPDIGILSAGGHFTMDMAGAAYAAKRYFDFKTVIPCHYRTFDALEQSAQVLIDGLPGVDVIEPEVLKPISL

SEQ ID NO: 61647 - DNA, 693 bp, Roseovarius nubinhibens ISM
  CDS (1)..(693): transl_table=11
atgcgtatcacctggctcggacatggctcttttcgcatcgaaatcggcggccagaccctgctcatcgacccctggctcaccggaaatccgatgctcgccgatgatcagcacgacgccgccaccaagggcgcgagccatatcctgctgacccatgcgcatttcgatcacgtcgccgatgtgctccgtctggccaagcgcgacggcgtcaccgtggtgggtcaatatgaccttctatcccattgggaaagcaccgagaatatcgaggtgatcggctttaacaaaggcggcaccgtggcgctgggcgatgtcgcggtcaccatggtgcacgcggtccattcctcgtccttcggcaccgacgcggggccttccgtgccgggcaccgaatgcggctatatgatcaccggcgagggccacacgatctatgtctcgggcgacaccgatgtgatggccgatatgggcgtgttcaacgcgctgcatcagcccgacatcggcatcctctgcgccggcggccatttcaccatggacatgcgccgcgccgcctatgctgcgaaaaccttctttgatttcaagacggtgatcccctgccactaccggaccttcccgattctcgaacaatccgccgcggccctgatcgacgcgctgcccggcgtcgacgtgatcgaacccgaggtgctgcacccgatcgagctctag

SEQ ID NO: 61648 - protein, 230 aa, Roseovarius nubinhibens ISM
MRITWLGHGSFRIEIGGQTLLIDPWLTGNPMLADDQHDAATKGASHILLTHAHFDHVADVLRLAKRDGVTVVGQYDLLSHWESTENIEVIGFNKGGTVALGDVAVTMVHAVHSSSFGTDAGPSVPGTECGYMITGEGHTIYVSGDTDVMADMGVFNALHQPDIGILCAGGHFTMDMRRAAYAAKTFFDFKTVIPCHYRTFPILEQSAAALIDALPGVDVIEPEVLHPIEL

SEQ ID NO: 61649 - DNA, 684 bp, Oceanicola batsensis HTCC2597
  CDS (1)..(684): transl_table=11
atgaaaatcacctggctcggacattccggtttcaagatcgagatcgcgggagaaacgctgctgatcgacccgttcctgaacggcaacccgatcttccccgaagagcgcaaggccgaagcggtcgaaggcgtgacggcgatcctcgtctcgcacggacatggggatcacgtgggcgacgcgatcgacgtggccaaggccggtggcctgccggtctacacgatggtcgagctgtcgggctggctggccaatcagggcgtcgagaacgtgaccggattcaacaagggcggaacggtcgcgatcggcgacgtgaaggtgacgatggtccacgcgacgcattcctcgtcggcgccggacgggtcctatgccgggggcgaggccgggttcatgatctcgggcgagggacatacgatctatttctcgggcgatacggatgtcatggccgacatgaaggtgttccacgacctgcacgagccggatatcgggctgctgtgttcgggcgggttctacacgatggacatgcgccgcgcctcctatgcggcgaagacgttcttcgacttcaagacggtcatcccctgtcactacaagaccttccccgcgctcgaacagtcggcgcaggagatgatcgacgcgctgccgggggtgaaggtgatcgagcccgaagtgctgaaggcgatcgagatctga

SEQ ID NO: 61650 - protein, 227 aa, Oceanicola batsensis HTCC2597
MKITWLGHSGFKIEIAGETLLIDPFLNGNPIFPEERKAEAVEGVTAILVSHGHGDHVGDAIDVAKAGGLPVYTMVELSGWLANQGVENVTGFNKGGTVAIGDVKVTMVHATHSSSAPDGSYAGGEAGFMISGEGHTIYFSGDTDVMADMKVFHDLHEPDIGLLCSGGFYTMDMRRASYAAKTFFDFKTVIPCHYKTFPALEQSAQEMIDALPGVKVIEPEVLKAIEI

SEQ ID NO: 61651 - DNA, 702 bp, Desulfitobacterium hafniense DCB-2
  CDS (1)..(702): transl_table=11
atggaaattcgctttcacggtcatgcttgcttcgaaatcattggggaaaagggcagaatactgattgatcctttcctgaaggggaacccggcagccgatgtggggccggaacatttcactcacctggacgggattctggtttcccacgggcattccgatcatttaggggatgccatcgaactctcacaaaagaccggagcccctcttatttgtgtctttgagctggcccgtctctgtgccaggtatggggcgaagacccatgccatgcatatcggcggcaagcatacctttaactttggcacggtgcgtttgacccaagccctgcacggctcggtctttgaaccgccgggagaagaagaatcctttacttatgccggtatggcctgcggatttttgatccagatggatggcaagtggatttatcatgcgggggatacggggcttttcggggatatggagctgatcggacggcggcaccccttggcagccgccatgctgcccattggggacaactacaccatggggcaggaggaagcggtctatgccgctaccctcttaaggcccagttatttgattcccatgcattataatacctttccggttatccagcaggaccctcaggagttcatcgagcttttaaagagaaagttcccggccagcaaaggggagattttagcccctggccaatctctgatcatttaa

SEQ ID NO: 61652 - protein, 233 aa, Desulfitobacterium hafniense DCB-2
MEIRFHGHACFEIIGEKGRILIDPFLKGNPAADVGPEHFTHLDGILVSHGHSDHLGDAIELSQKTGAPLICVFELARLCARYGAKTHAMHIGGKHTFNFGTVRLTQALHGSVFEPPGEEESFTYAGMACGFLIQMDGKWIYHAGDTGLFGDMELIGRRHPLAAAMLPIGDNYTMGQEEAVYAATLLRPSYLIPMHYNTFPVIQQDPQEFIELLKRKFPASKGEILAPGQSLII

SEQ ID NO: 61653 - DNA, 681 bp, Bacillus sp. SG-1
  CDS (1)..(681): transl_table=11
atgaaagtttcttatcatggacattcagttgttaaagtcgtgaccgaaacacacacaatcttaattgacccttttatcaatgggaatgaactcactgacctgaaagtagaaaatgaaaagccggatgtcattttgcttacccatggtcataatgatcatgtcggagatactgtccaactcgcaaagcaaagtgatgcgcttgtagtagctccttttgaattggctacatatttaagctggcagggtgtgaaaactcacccgctgcacattggcggagggtacgatttcgagttcggtagagtgaaactgactcaggcttttcatggttcttcatatgagacagaagacaagcaaatcatctacacaggtatgcctgcgggaattcttttcacagtagacgggaaaacgatctatcacgcaggggatactgcccttttctccgacatgaagctgatcggaatgcgcaattccattgacctggcattccttccaattggagataattttacaatgggaccggaggatgcagcgttggccgcagaatttgtgaacgccaaaactgttgttccgattcactacaatacattcccgccaatcaagcaggaccctgagaagtttgtctccatgttaaatggccaggaagccaaagtaatgaatgcaggagatgtcatcgagctataa

SEQ ID NO: 61654 - protein, 226 aa, Bacillus sp. SG-1
MKVSYHGHSVVKVVTETHTILIDPFINGNELTDLKVENEKPDVILLTHGHNDHVGDTVQLAKQSDALVVAPFELATYLSWQGVKTHPLHIGGGYDFEFGRVKLTQAFHGSSYETEDKQIIYTGMPAGILFTVDGKTIYHAGDTALFSDMKLIGMRNSIDLAFLPIGDNFTMGPEDAALAAEFVNAKTVVPIHYNTFPPIKQDPEKFVSMLNGQEAKVMNAGDVIEL

SEQ ID NO: 61655 - DNA, 681 bp, unidentified eubacterium SCB49
  CDS (1)..(681): transl_table=11
atgaaaatcacattttacggtcaaaactcattagcgattgcagtaggtgacacaaatattattgtagatccttttattactggtaacgacttagcaaaagataaggttgatataatgaccttaaaagcagactatatacttcttacacacgcacatcaagatcatatacttgatgcagaagccatcgcaaagaatacaggagctgttattgtaagtaattatgagatcgctatgcattatcaagaaaaaggttttgaggttcacccaatgaaccatggtggaagctgggattttgacttcggaaatgtgaagtacgtaaacgctattcataccagttcgtttccagacggaagttatggcggacaaccaggtggttttgtaatacaggccaatcaaaaaaatatttatatcgcgggggatactgccttaacaatggacatgaaacttatcccgttacgcaccaaactagatcttgccattttacctataggagataattttacaatgggaatagatgatgccattattgcaagtgattttgttgcatgcaataaagtgttaggagtgcattatgatacctttggatttattaaaatagatcatgaagttgcaaagcaaaagttttctgaagccaagaaagatttacttttattagctattggcgaatcgatagatttataa

SEQ ID NO: 61656 - protein, 226 aa, unidentified eubacterium SCB49
MKITFYGQNSLAIAVGDTNIIVDPFITGNDLAKDKVDIMTLKADYILLTHAHQDHILDAEAIAKNTGAVIVSNYEIAMHYQEKGFEVHPMNHGGSWDFDFGNVKYVNAIHTSSFPDGSYGGQPGGFVIQANQKNIYIAGDTALTMDMKLIPLRTKLDLAILPIGDNFTMGIDDAIIASDFVACNKVLGVHYDTFGFIKIDHEVAKQKFSEAKKDLLLLAIGESIDL

SEQ ID NO: 61657 - DNA, 1173 bp, Streptomyces kanamyceticus
  CDS (1)..(1173): transl_table=11
gtgactcagcaggcgcaacggacgcagcagatgcagcaggcgcaacaagcgcagcaggcgcaagaggcacagcgagtgcaggagacacagcaggcgcagcagatgcagcagatgcagcagacgtggcagacacagggggcgcaagaggcacagcaggtgcaagaggcgcagctgcagacggccgtgcggccggtctccccgcacgcgcccgccccgccgcacgcccccggcgggatccgccggtggccgaagtcgttcgccgaccggctcaccgcccccctgcccggccttcgcgccttcgcgcgcttcgcccgtgagggcgccctgcggccccgccccgacgggctcgccgacatccagcgactgccctacgaccccggcccgctgccgcgcgtcgacgcgggcaccgtcgccgtcacctgggcgggccacgccagttgggtgctgcgcgtcggcgggctcaccgtcctcaccgaccccgtctggtcccgcaagatcctcggcaccccggcccgggtcaccccggtcggcgtcgcctggagcgccctgccgcgcgtcgacgcggtcgtcatcagccacaaccactacgaccacctggacgccccgaccctgcgcagactccccagggacacccccgtcttcgtacccgcgggactcggccgctggttcacccgccgccgcttcagcagggtcaccgaactcgactggtgggagggggccgaactgggcggagtgcgcttcgacttcgtgcccgcgcaccactggtccaagcggagcctcctggacacctgccgcacgctgtggggcggctggctgctcaccgacgcgcgagggcagcgggtctacttcgcgggcgacaccggatacggccactggttcgagcggatcggcgcccgctaccccggcatcgacctcgcgctccttccgatcggcgcgtacgacccgcggtggtggctcagcgacgtgcactgcgacccggaggaggcggtccgcgccgccatcgacctcggagcgcggcggatggcgcccatgcactggggtacgttcctgctctccgccgagccggtgctcgaaccgctcaccagggtgcgtacggcatgggagaaggcgggcctggaccgcgaggacctgtgggacctgccggtgggggcgtcgcgggtgcttgccgcttga

SEQ ID NO: 61658 - protein, 390 aa, Streptomyces kanamyceticus
MTQQAQRTQQMQQAQQAQQAQEAQRVQETQQAQQMQQMQQTWQTQGAQEAQQVQEAQLQTAVRPVSPHAPAPPHAPGGIRRWPKSFADRLTAPLPGLRAFARFAREGALRPRPDGLADIQRLPYDPGPLPRVDAGTVAVTWAGHASWVLRVGGLTVLTDPVWSRKILGTPARVTPVGVAWSALPRVDAVVISHNHYDHLDAPTLRRLPRDTPVFVPAGLGRWFTRRRFSRVTELDWWEGAELGGVRFDFVPAHHWSKRSLLDTCRTLWGGWLLTDARGQRVYFAGDTGYGHWFERIGARYPGIDLALLPIGAYDPRWWLSDVHCDPEEAVRAAIDLGARRMAPMHWGTFLLSAEPVLEPLTRVRTAWEKAGLDREDLWDLPVGASRVLAA

SEQ ID NO: 61659 - DNA, 777 bp, Streptomyces kanamyceticus
  CDS (1)..(777): transl_table=11
gtgcccgtcgaggtcacatggtggggccacgccacctgcacggtcgaggactcgggcgtccgcgtactgaccgaccccctgttcgcgcgccgcctggcgcatctgcggcgccgcaggggcgcaccgccaccgccgggcgccgccgtcgccgacgtcgtgctcctttcgcatctgcacgccgatcatctgcacgtaccgtcgctcgcgcggctcacgccgggcacgcgtgcgctggtcccgcgcggggccgcgcgctcggtgccggggctcgcccgcaggctgccccagctgcgcttcaccgaggtcgtgccgggcgacgaggtacggatcgccgacgtcgtcgtacgcgtggtctccgcgctgcacgacggacggcggctgcccgtgggcccgcaccactcccccgcgctgggtttcgtggtgagcggtgaggcccgcacctacttcgcgggcgacaccgggctcttcgacgggatggcggcggaggtcggcgaggtggacgtggcgctgctgccggtcggcggctggggcccctacctcggccacggccatctgaacccctcccgtgccgccgaggcgctcgcccggatcgcgccgcgcagcgcggtcccggtgcactacggcacgtactggccgatcgggatggacgccgtgcgcccccatgagttccacgcgccgggccaggagttcgtgcgccaggcggcgcgtctcgcgccggaggtgagcgtgcaccggctggcgcacggcgagcgggtccggccggaggtcgccaagtga

SEQ ID NO: 61660 - protein, 258 aa, Streptomyces kanamyceticus
MPVEVTWWGHATCTVEDSGVRVLTDPLFARRLAHLRRRRGAPPPPGAAVADVVLLSHLHADHLHVPSLARLTPGTRALVPRGAARSVPGLARRLPQLRFTEVVPGDEVRIADVVVRVVSALHDGRRLPVGPHHSPALGFVVSGEARTYFAGDTGLFDGMAAEVGEVDVALLPVGGWGPYLGHGHLNPSRAAEALARIAPRSAVPVHYGTYWPIGMDAVRPHEFHAPGQEFVRQAARLAPEVSVHRLAHGERVRPEVAK

SEQ ID NO: 61661 - DNA, 711 bp, Streptomyces kanamyceticus
  CDS (1)..(711): transl_table=11
gtgcccgtcgaggtcacatggtggggccacgccacctgcacggtcgaggactcgggcgtccgcgtactgaccgaccccctgttcgcgcgccgcctggcacatctgcggcgccgcaggggcgcaccgccaccgccgggcgccgccgtcgccgacgtcgtgctcctttcgcatctgcacgccgatcatctgcacgtaccgtcgctcgcccggctcacgcccggcacgcgtgcgctggtcccgcgcgggaccgcgcgctcggtgccaggactggcccgcagactgccccagctgcgcttcaccgaggtcgtgccgggcgacgaggtccggatcggcgacctcgtcgtacgcgtggtctccgcgctgcacgacggacggcggctgccggtgggaccgcacctctcccccgcccttggtttcgtggtgagcggtgaggcccgcacctacttcgcgggcgacaccggcctcttcgacggcatggcggcggaggtcggcgaggtggacgtggcgctgctgccggtcggcggctggggcccctacctcggccacggccatctgaacccctcccgcgccgccgaagcactcgcccggctcgcgccgcgcagcgcggtcccggtgcactacggcacggagaatcaccagagagctgtcacctgcgcgaacatgcaggatggccacgcccgaggctactttgacggccgcgtaaccatctga

SEQ ID NO: 61662 - protein, 236 aa, Streptomyces kanamyceticus
MPVEVTWWGHATCTVEDSGVRVLTDPLFARRLAHLRRRRGAPPPPGAAVADVVLLSHLHADHLHVPSLARLTPGTRALVPRGTARSVPGLARRLPQLRFTEVVPGDEVRIGDLVVRVVSALHDGRRLPVGPHLSPALGFVVSGEARTYFAGDTGLFDGMAAEVGEVDVALLPVGGWGPYLGHGHLNPSRAAEALARLAPRSAVPVHYGTENHQRAVTCANMQDGHARGYFDGRVTI

SEQ ID NO: 61663 - DNA, 681 bp, Pyrococcus furiosus
  CDS (1)..(681): transl_table=11
atgatggtgaaggtaaggtttctagggcatgcggcatttgaaatagagggagaaggaaaaagaatactaatagacccattcttgaccgggaacccaaatgcagcagcaaaacctgaggactttgataaggttgacctgattcttgtaacccatgcacacggagatcacgttggcgatgcagtaaaaattgcccaaaaaactggggcaaagatagtagcaatgtacgacatagccaattatcttgtagaaaacaacaagggtataacgacaataggaatgaactacggcccaactgaggttgaaggagtcaaaataattcaagttccagcatggcattcaagcagcgacggaaaatacagcattggaaacgcctgcggatacatcatagaacttgaaggaaagaaaatctaccacgctggagacacctacgttttcaaggacatggagctcttcgctgaactttacggaatagatcttgccttgcttccaatagggggacacttcacgatggggcccaaagaggcggcaaaggccgttgaactcctcaagccgaaatacgttataccaatgcactatggaactttcccaccaatagctagggatccagaagaattcaaagagcttgttggggacaaagcagaggtcattatactaaaaccaggagaagtctttgagctttga

SEQ ID NO: 61664 - protein, 226 aa, Pyrococcus furiosus
MMVKVRFLGHAAFEIEGEGKRILIDPFLTGNPNAAAKPEDFDKVDLILVTHAHGDHVGDAVKIAQKTGAKIVAMYDIANYLVENNKGITTIGMNYGPTEVEGVKIIQVPAWHSSSDGKYSIGNACGYIIELEGKKIYHAGDTYVFKDMELFAELYGIDLALLPIGGHFTMGPKEAAKAVELLKPKYVIPMHYGTFPPIARDPEEFKELVGDKAEVIILKPGEVFEL

SEQ ID NO: 61665 - DNA, 783 bp, Deinococcus radiodurans; identical to SEQ ID NO: 61563
  CDS (100)..(783): transl_table=11

SEQ ID NO: 61666 - protein, 227 aa, Deinococcus radiodurans
MLKIRSLGHSTFFLDDGTHRLLIEPFLEGNPRCPVTLGEVQSWQPSAVLISHAHGDHWGNALDFGRAGVPIIATAEIAGYAGAHGANNAVGMNIGGTYRAEWGSVSLTPAWHSSSFPDGTYGGMPTGLVIEFGGQRLYFAGDTALFSDMRLIGDRELDLAFLPIGDHYTMGPEEAGRTLDLLRPRVAIPMHYATFPALTGDPAVFRTEGERRGVEVRVLDPGETTEL

SEQ ID NO: 61667 - DNA, 729 bp, Aeropyrum pernix
  CDS (1)..(729): transl_table=11
atggcgaggctcacatacctaggccacgcggccttccagctcgaggcggggggcaggaagatcctggtggacccctggctctcgaaccctaagagccccgtgaagcccgaggaggtcgagggggttgacctgatagtcataacccacagccacttcgaccacctcggcgacgtgggcaagattgccgccaagaacccgggcgcgaaggtcctcgccgtctacgaggtcgccgacctggcggcggaggagatagccaaggagacgggcgccagcaaggatgagctgttcaacgcggggagggttattggggcgaacataggcggccccgtagtcctccaggacctcggcctgaaggtggcgttcacacccgcaacccacagcagcgtgggcgtcgccgcaggggctgtgataataacgggcgagggcagggtctaccacgccggcgacacgggggttacgatggatatgaggcttgtgggcgagatatacaagccccacgtagccctcctcccgataggcggccacttcaccatggacccggtggaggcggcgaaggctgtagagctcatcagacccctggtggcgatacccatgcactacggaaccttcccagtgctctacggcgaccccgaggagttcaagaagagggtggaggagaagtgcctgccaacccaggttaggatactgaagcccggggagagctacgagttcgacttctccaaagcctag

SEQ ID NO: 61668 - protein, 242 aa, Aeropyrum pernix
MARLTYLGHAAFQLEAGGRKILVDPWLSNPKSPVKPEEVEGVDLIVITHSHFDHLGDVGKIAAKNPGAKVLAVYEVADLAAEEIAKETGASKDELFNAGRVIGANIGGPVVLQDLGLKVAFTPATHSSVGVAAGAVIITGEGRVYHAGDTGVTMDMRLVGEIYKPHVALLPIGGHFTMDPVEAAKAVELIRPLVAIPMHYGTFPVLYGDPEEFKKRVEEKCLPTQVRILKPGESYEFDFSKA

SEQ ID NO: 61669 - DNA, 681 bp, Thermotoga maritima
  CDS (1)..(681): transl_table=11
atgaaagtcacattcttaggacacgccgtggtgctgatagagggaaagaaaaacatcatcatcgatcctttcatttcagggaatcccgtctgtcccgtaaagctggagggacttccaaagatcgattacatactcgtgacacacggacacggtgatcatctcggtgatgccgtggaaatagcgaagaaaaacgatgccacggtgatatccaactacgaaatctgccattatctcggaaaaaagggtgtgaagacccatgccatgcacatcggtggaagctatctcttcgacttcggaagggtgaagatgacacctgccgttcatggctccggaattctcgatggtgacagtatgatctacggagggaatcccagtggttttctcatcacaattgagggaaagaagatataccacgcaggagacaccggtttaaccagggagatggaacttctcgctgaggagaacgtggatgttgcgtttcttccgatcggtggaaatttcgtcatggacgtggaggacgccgtgagggcggcagtgatgataaaaccgaagaaggttgttcccatgcactacggaacctgggaactcatctttgcggatgtagagctgttcaagaaaaaggtcgaggaaaagggtgttgaatgtgtgattcttgagccgggagaatcattagaattgtga

SEQ ID NO: 61670 - protein, 226 aa, Thermotoga maritima
MKVTFLGHAVVLIEGKKNIIIDPFISGNPVCPVKLEGLPKIDYILVTHGHGDHLGDAVEIAKKNDATVISNYEICHYLGKKGVKTHAMHIGGSYLFDFGRVKMTPAVHGSGILDGDSMIYGGNPSGFLITIEGKKIYHAGDTGLTREMELLAEENVDVAFLPIGGNFVMDVEDAVRAAVMIKPKKVVPMHYGTWELIFADVELFKKKVEEKGVECVILEPGESLEL

SEQ ID NO: 61671 - DNA, 654 bp, Methanococcus jannaschii
  CDS (1)..(654): transl_table=11
atgataacatggtatggtcatgcatgctttaaagtagataatgtgttaatagacccatttgttccaaatcctttatgtgatttgccttatgatgaaataatggaaggagttgaggtaatagcagtaactcatggccatgcagaccacttaggaaatgctgaagagttagctaaaacctacaatgttccagtagtaacgaaccatgagattagtgtctatttatcagaaagaggagtttgtgcagaaggaatgaacattggggggactatagagataaatggagcaaaattaacaatggttaaagctgagcactcatcagatatctctccaacaataagtgggggagttgctgctggatttattataaatgatagagtatatcatgcaggagatactggcttatttggagatatggagttaattggagagatttacgctccacaaatagctttattgccaattggtggaagatacacaatgggaattgatgaggcattagtggctattgagctaatatatccagagattgttattccaatgcattataatacattcccgttaattgaagtggatgtaaatgagtttgtgaaaaaagcagaggctttaggagttgaggtcatagttccaaagattggagaaccattggaattataa

SEQ ID NO: 61672 - protein, 217 aa, Methanococcus jannaschii
MITWYGHACFKVDNVLIDPFVPNPLCDLPYDEIMEGVEVIAVTHGHADHLGNAEELAKTYNVPVVTNHEISVYLSERGVCAEGMNIGGTIEINGAKLTMVKAEHSSDISPTISGGVAAGFIINDRVYHAGDTGLFGDMELIGEIYAPQIALLPIGGRYTMGIDEALVAIELIYPEIVIPMHYNTFPLIEVDVNEFVKKAEALGVEVIVPKIGEPLEL

SEQ ID NO: 61673 - DNA, 696 bp, Archaeoglobus fulgidus
  CDS (1)..(696): transl_table=11
atgaaaataacatggttgggacacgcggcctttttgcttgagggaagcatgaaggtgctgattgaccccttcctcacgggaaatcccaacgctcccgtaaagcctgaagaagtcaaggcggattacatcctcgtaacccacggccacggagaccatcttggagatgcggttgagattgccaagagaaacaacgcccccataatctgcattcacgagctttcgagaattctttcgaggtatgatgtcgaaactatgggaatgaacatgggtgggactgcgagaacgggaagcattgcagttacaatggttccagcctggcattcagcagatttggaagacgagcaggggaacataataagcgctggccttccagcgggctttatcgtctcaatggatggcgtgagagtttaccacactggcgacacggatgtctttctggacatgcagctaatcggagagctccacaggccagatgtgatgcttctgcccatcggagactactacaccatgggtattgccggagccgttaaggctttggagcttgttaagcccaaagtagcgataccgatgcactacaacaccttcccgctggtcgagaaggacccagaggacttcagaaaggctgtgaaggcgaaggggctggatgtcgaagttgtgattctaaagccgggagagagctacgagttcaacaagtaa

SEQ ID NO: 61674 - protein, 231 aa, Archaeoglobus fulgidus
MKITWLGHAAFLLEGSMKVLIDPFLTGNPNAPVKPEEVKADYILVTHGHGDHLGDAVEIAKRNNAPIICIHELSRILSRYDVETMGMNMGGTARTGSIAVTMVPAWHSADLEDEQGNIISAGLPAGFIVSMDGVRVYHTGDTDVFLDMQLIGELHRPDVMLLPIGDYYTMGIAGAVKALELVKPKVAIPMHYNTFPLVEKDPEDFRKAVKAKGLDVEVVILKPGESYEFNK

SEQ ID NO: 61675 - DNA, 693 bp, Methanosarcina acetivorans
  CDS (1)..(693): transl_table=11
atggctgacttaaaaataacctggcttgggcatgctgcttttttgctcgaagccgaaaaaaaattgctgatcgacccgtttatttccgaaaacccgaaagctccctgtacccccgaggagctgaatcccgatatcatagctgtgactcacgggcaccgcgaccatctgggagataccatcgagatcggagcccggacaggctgccggatcatctcgatccatgaggttgcaaattatatcaagtcaaaaggagtctttgccgaaggcatgaacaaaggcgggaccgttgacctcgaaggcgtcactttgacaatgactcaggcgcttcattcctcttcgattgatgcttctggcttcagtttcgacggaggcagcccggcagggtttgtgataggcattggtgggcattcaatttatcatgccggagatacggggattttcggggacatgcagcttatcggagaactctacgaacccgaaatcgccctgctgcccataggaagtcggtttactatggggataaaggaggccgtaaaggccgtggaactcattgagcctcagattgttgtgccgatgcattataacacctttgatgtcatcaaacaggaccctgaagttttcagaaaagccgttgaagcgaaagttgatacgaaagtaattattctggaccctggagaatctatagagctttga

SEQ ID NO: 61676 - protein, 230 aa, Methanosarcina acetivorans
MADLKITWLGHAAFLLEAEKKLLIDPFISENPKAPCTPEELNPDIIAVTHGHRDHLGDTIEIGARTGCRIISIHEVANYIKSKGVFAEGMNKGGTVDLEGVTLTMTQALHSSSIDASGFSFDGGSPAGFVIGIGGHSIYHAGDTGIFGDMQLIGELYEPEIALLPIGSRFTMGIKEAVKAVELIEPQIVVPMHYNTFDVIKQDPEVFRKAVEAKVDTKVIILDPGESIEL

SEQ ID NO: 61677 - DNA, 684 bp, Sulfolobus tokodaii
  CDS (1)..(684): transl_table=11
atgccacaattaagatggctaggtcacgcagcagttgaattaaatctaggcggtaagcatattgtaatagacccaatgataaaagataatccagtatcaccagtaaaattaaattattttgaaaataatttaaacttaataatagtaactcatgaccattatgaccatttaggagatactgttgaattaatgaaaataaatcctaaggcttatctatttgcaacttacgatttagaaaattatcttgctactcaatttaatataccttgggaaagaatgatcccggcaaatgtaggaggttacatagattttgatggcataaagttagcattaactaaggctgttcactcgagcgaacatagtgatcctactggggctattgtaagcggagaaggagttacaatttatcatgctggagatactggattattcgaggatatgaaacttattggagagatctttaaaccagattacgttcttttaccaataggagggcgctttactatggatccttatcaagctgcgattgctgtcgaaatgcttaaaccaaagaagtacgctattcctattcattataatacatgggatctaataaaagtagatcctaatgattttgtaaaagaagtttcaaaaagaggatataaagctttagtacttcagccagggcagagtgtggagttatag

SEQ ID NO: 61678 - protein, 227 aa, Sulfolobus tokodaii
MPQLRWLGHAAVELNLGGKHIVIDPMIKDNPVSPVKLNYFENNLNLIIVTHDHYDHLGDTVELMKINPKAYLFATYDLENYLATQFNIPWERMIPANVGGYIDFDGIKLALTKAVHSSEHSDPTGAIVSGEGVTIYHAGDTGLFEDMKLIGEIFKPDYVLLPIGGRFTMDPYQAAIAVEMLKPKKYAIPIHYNTWDLIKVDPNDFVKEVSKRGYKALVLQPGQSVEL

SEQ ID NO: 61679 - DNA, 675 bp, Pyrococcus kodakaraensis
  CDS (1)..(675): transl_table=11
atggtgaaggtgaagttcctgggccacgcggcttttctgatcgagggaagcaagaagatactcatagacccgttcctcagcggcaacccgaaggccgccgtcaagcctgaggaggttgaggcagacctcatactcgttacccacgcccacggcgaccacattggagatgctatagagatagcgaggagaagcggagcaaaaatagttgccatgtatgacatagccaactacatctcccagaaggcgagcgatgtagagaccattggcatgaactacgggccaaccactattgatggggtcttcatcgtccaggttccagcctggcactcaagcagtgatggagtgcacaacataggcaatccctgcggctacatagttaagctcgacggagtgaccatctaccacgcgggggatacattcgtcttcggagacatggcactcttcaacgagctctacggcccgattgacgttgccctcctcccgataggcgggcacttcacgatgggaccgagggaagccgccaaagccgtcgagctcctcaagccgaggaaagtcgttccgatgcactacaacacctggccgccgatcgcccaggaccccgaggagttcaagaggctcgtcggtgacaaggcggaggttgttatcctccagcctggagaggagcttgagctttga

SEQ ID NO: 61680 - protein, 224 aa, Pyrococcus kodakaraensis
MVKVKFLGHAAFLIEGSKKILIDPFLSGNPKAAVKPEEVEADLILVTHAHGDHIGDAIEIARRSGAKIVAMYDIANYISQKASDVETIGMNYGPTTIDGVFIVQVPAWHSSSDGVHNIGNPCGYIVKLDGVTIYHAGDTFVFGDMALFNELYGPIDVALLPIGGHFTMGPREAAKAVELLKPRKVVPMHYNTWPPIAQDPEEFKRLVGDKAEVVILQPGEELEL

SEQ ID NO: 61681 - DNA, 690 bp, Staphylococcus aureus
  CDS (1)..(690): transl_table=11
atgaagttatcatttcatggtcaatcaacgatttatttagaagggaacaacaaaaaggttatcgtagatccgtttatttcaaataaccctaagtgtgatttgaatattgaaacagtgcaggtagactatatcgttttaacgcacggtcattttgatcattttggtgatgttgtggaactagcaaagaaaacaggagcaacagtaattggaagtgcagaaatggctgactatctttcttcatatcacggtgttgaaaatgttcatggtatgaatattggtggtaaagcaaactttgatttcggaagcgttaaatttgttcaagcatttcatagttcaagttttacacatgaaaatggtattccagtttatttaggtatgccaatgggtatcgtgtttgaagttgaaggaaaaacaatttatcatactggtgatacaggtctgtttagtgacatgtcacttattgcgaaacgtcatccagttgatgtatgttttgtaccaattggagataattttacgatgggtattgatgatgcaagttatgctattaatgaatttattaaaccaaaaatttctgtaccgattcattatgatacattcccattaatcgaacaagatccacaacaatttaaagatgctgttaatgtaggggacgtgcaaattttaaaaccaggtgaatctgttcagttttaa

SEQ ID NO: 61682 - protein, 229 aa, Staphylococcus aureus
MKLSFHGQSTIYLEGNNKKVIVDPFISNNPKCDLNIETVQVDYIVLTHGHFDHFGDVVELAKKTGATVIGSAEMADYLSSYHGVENVHGMNIGGKANFDFGSVKFVQAFHSSSFTHENGIPVYLGMPMGIVFEVEGKTIYHTGDTGLFSDMSLIAKRHPVDVCFVPIGDNFTMGIDDASYAINEFIKPKISVPIHYDTFPLIEQDPQQFKDAVNVGDVQILKPGESVQF

SEQ ID NO: 61683 - DNA, 693 bp, Methanopyrus kandleri
  CDS (1)..(693): transl_table=11
atgaggataacgtggctgggtcatgcggcgttcgaagtggaaatcgacggagtcaacgtgctcatcgacccgttcttaagtgggaatccgaaggcggccaagtcaccggacgaggtggatccggaccttgtcctcgtgactcacggtcacggcgatcacctgggtgacgccgtcgagatctgcaagcgcactggagctacgctggtcgggatctacgagatcgccgtgtacgcccagggacagggcgtcgagaacgtggaggagatgaacatcggcggcaccatcgaggtggagggactggagatcacccaggtgccggcgtggcactcctcggagatcgtcgaagacggggagatagtcgccggcggcaccccggtgggttacgtggtatcaggtgaggaagggtcggtttaccacgcgggcgacaccggcctgtccatggacatgaagctcatcggtgagctctacgagccggaggtggcactgttaccgataggcagcaggttcaccatgggacccaaggaggccgctaaggccgtggagctgatcgagccggaggtggcgataccgatgcactacgggaccttcccgccgatcgagcaggatcccgaggaattcaaacgggaggtggaggaactcggactggacgtggaagtcgtgatcctggagccgggagagtcgtacgaaaggtag

SEQ ID NO: 61684 - protein, 230 aa, Methanopyrus kandleri
MRITWLGHAAFEVEIDGVNVLIDPFLSGNPKAAKSPDEVDPDLVLVTHGHGDHLGDAVEICKRTGATLVGIYEIAVYAQGQGVENVEEMNIGGTIEVEGLEITQVPAWHSSEIVEDGEIVAGGTPVGYVVSGEEGSVYHAGDTGLSMDMKLIGELYEPEVALLPIGSRFTMGPKEAAKAVELIEPEVAIPMHYGTFPPIEQDPEEFKREVEELGLDVEVVILEPGESYER

SEQ ID NO: 61685 - DNA, 711 bp, Pyrococcus horikoshii; identical to SEQ ID NO: 61557
  CDS (34)..(711): transl_table=11

SEQ ID NO: 61686 - protein, 225 aa, Pyrococcus horikoshii
MVKVKFLGHAAFYIEGSKKILIDPFLTGNPQAAARPEDFKDVDLILVTHAHGDHLGDAGEIARISGAKIVAMYDLANYISEKYKDVETIGMNYGPTEIDGVFIVQVPAWHSSSDGKYSIGNPSGYIVKLDDVTIYHAGDTYVFKDMELFAELYGPIDVALLPIGGHFTMGVREAAKAVELLKPRKVVPMHYNTWPPISADPEEFKRLVGDKAEVVILKPGEELKL

SEQ ID NO: 61687 - DNA, 678 bp, Pyrococcus furiosus
  CDS (1)..(678): transl_table=11
atggtgaaagtaacatttctcggacacgcagctttctacatagagggaagcaaaaaaatcctaatagacccattcctaagcggaaatccagtcgcaagcgctaagccagacgactttaagagtgtagacctaattttagtcacccacgcccatggagaccacctcggagatgtcggaactatagctaagagaacaggagcaaaggttgttgcaatgtatgatctggcaaactacatagcagagaagtacaagggagttgagacaatagggatgaactatggacccactaaggtcgatgaagtggagatagttcaagttcctgcttggcattcaagtagcgatggaaagtacagcataggaaacgcctgtgggtacatagtgaagctcgacggagtaacaatataccacgctggagatacctacgtattcaaagacatggagttatttgcagagctatatggcccaattgacgttgctctacttccaataggtggtcacttcacaatgggtgttagagaagcagcaaaagctgttgaactcctaaagccaagacatgtcatcccaatgcattacaacacctggccacctattgctgctgatccagaagagttcaagaagttggtaggagaaaaagcaaaggttgtcattctaaaaccaggggaatctttagagctctaa

SEQ ID NO: 61688 - protein, 225 aa, Pyrococcus furiosus
MVKVTFLGHAAFYIEGSKKILIDPFLSGNPVASAKPDDFKSVDLILVTHAHGDHLGDVGTIAKRTGAKVVAMYDLANYIAEKYKGVETIGMNYGPTKVDEVEIVQVPAWHSSSDGKYSIGNACGYIVKLDGVTIYHAGDTYVFKDMELFAELYGPIDVALLPIGGHFTMGVREAAKAVELLKPRHVIPMHYNTWPPIAADPEEFKKLVGEKAKVVILKPGESLEL

SEQ ID NO: 61689 - DNA, 690 bp, Staphylococcus aureus
  CDS (1)..(690): transl_table=11
atgaagttatcatttcacggtcaatcaacgatttatttagaagggaacaacaaaaaggttatcgtagatccgtttatttcaaataaccctaagtgtgatttgaatattgaaacagtgcaggtagactatatcgttttaacgcacggtcattttgatcattttggtgatgttgtagaactagcaaagaaaacagaagcaacagtaattggaagtgcagaaatggctgactatctttcttcatatcacggtgttgaaaatgttcatggtatgaatattggtggtaaagcaaactttgatttcggaagcgttaaatttgttcaagcatttcatagttcaagttttacacatgaaaatggtattccagtttatttaggtatgccaatgggtatcgtgtttgaagttgaaggaaaaacaatttatcatactggtgatacaggtctgtttagtgacatgtcacttattgcgaaacgtcatccagttgatgtatgttttgtaccaattggagataattttacgatgggtattgatgatgcaagttatgctattaatgaatttattaaaccaaaaatttctgtaccgattcattatgatacattcccattaatcgaacaagatccacaacaatttaaagatgctgttaatgtaggggacgtgcaaattttaaaaccaggtgaatctgttcagttttaa

SEQ ID NO: 61690 - protein, 229 aa, Staphylococcus aureus
MKLSFHGQSTIYLEGNNKKVIVDPFISNNPKCDLNIETVQVDYIVLTHGHFDHFGDVVELAKKTEATVIGSAEMADYLSSYHGVENVHGMNIGGKANFDFGSVKFVQAFHSSSFTHENGIPVYLGMPMGIVFEVEGKTIYHTGDTGLFSDMSLIAKRHPVDVCFVPIGDNFTMGIDDASYAINEFIKPKISVPIHYDTFPLIEQDPQQFKDAVNVGDVQILKPGESVQF

SEQ ID NO: 61691 - DNA, 681 bp, Oceanobacillus iheyensis
  CDS (1)..(681): transl_table=11
atgaaagtatcttatcatggtcactcagtagtacaagttgaaacagaaactcataagattgttattgatccgtttattaatggaaatgacgcttgtgatttaaatgcaagtacgttagaaaccgatgtaatattattaacacatgcacataatgatcatgtaggagacacatttgaaattgctaaaaataatgatgcatttattgttgcgccgaatgaattagctaactaccttagtgcacaaggtttgaatgcacacccaatgcatattggtggttcaagaaaatttgattttggaacagtaaaacttactcaagcattccacggatcttcctatgtagctgaagatgggtctgttatatatggtggaatgcctgcgggaattctccttactattgatggaaaaacaatttatcatgtaggagacactgcgttatttaccgatttaaaaatgtatggagaaatgcatgatattgatattgcatttattcctatcggggataactttacgatggggccggaagatgcggtatatgcagctgattggatcaatgcaaatatatcggttccagttcactacaatacatttccagtaatagaacaagatgcgaaagcctgggctaatcaaattaaaactggaaaaggttatgcaatgaatataggggaagttatcgatttgtag

SEQ ID NO: 61692 - protein, 226 aa, Oceanobacillus iheyensis
MKVSYHGHSVVQVETETHKIVIDPFINGNDACDLNASTLETDVILLTHAHNDHVGDTFEIAKNNDAFIVAPNELANYLSAQGLNAHPMHIGGSRKFDFGTVKLTQAFHGSSYVAEDGSVIYGGMPAGILLTIDGKTIYHVGDTALFTDLKMYGEMHDIDIAFIPIGDNFTMGPEDAVYAADWINANISVPVHYNTFPVIEQDAKAWANQIKTGKGYAMNIGEVIDL

SEQ ID NO: 61693 - DNA, 693 bp, Methanosarcina mazei
  CDS (1)..(693): transl_table=11
atggctgatttaaaaattacctggctcgggcatgctgcttttctgctcgaatctgaaaagaaactcctgatagacccttttatttcagaaaaccctaaatctccttgcagccctgaggaccttaacccggacataatagccgtaacccacggtcaccgggatcaccttggagacactatcgagatcggagcccgtacaggctgcagaattatttctattcatgaagttgcaaattatataaaatcaaaaggtgtctttgccgaaggcatgaacaagggaggcacagtagaagtggaaggcatagcccttaccatgacgcatgcacttcattcttcttcaattgatgcctccggtttcagcttcgatggaggaagccctgcaggttttgtaataaatatcggagggtattctgtttatcattctggggatactggagtttttggagatatgcaactcattggagagctttacaaacccgaaattgccctgctgcctatagggagcagatttaccatgggcataaaggaagctgtaaaagctgttgaacttatcgagccccggatcgttgtgccgatgcactataatacgtttgatgtcatcaggcaggaccctgaagagttcagaaaagccgtggaagcaaaggttgatacgaaagtaattatcatgagtcccggagagtcaatacagctttaa

SEQ ID NO: 61694 - protein, 230 aa, Methanosarcina mazei
MADLKITWLGHAAFLLESEKKLLIDPFISENPKSPCSPEDLNPDIIAVTHGHRDHLGDTIEIGARTGCRIISIHEVANYIKSKGVFAEGMNKGGTVEVEGIALTMTHALHSSSIDASGFSFDGGSPAGFVINIGGYSVYHSGDTGVFGDMQLIGELYKPEIALLPIGSRFTMGIKEAVKAVELIEPRIVVPMHYNTFDVIRQDPEEFRKAVEAKVDTKVIIMSPGESIQL

SEQ ID NO: 61695 - DNA, 687 bp, Bacillus clausii
  CDS (1)..(687): transl_table=11
gtgaaagtaagttaccatggccattccgttgtccagattgaaacaggtggaaaaacgattttaattgatccgtttattacaggaaatgaattgactgatttaaacgcagaccatgtggaagccgatgtcattctgttaacacatggccataatgaccatgtcggcgatacagtcgcgattgccaagcgcacaggggcactggttgtcgctgtagccgaattagcaacatacatgggctttcaaggagttgaaaacgttcatccgatgtccattggcggcgcataccagtttgactttggccgtgttaagtttacacaagccttccacggttcttcgttcacagaggaagatagccaaaaaattgtctatacaggcatgccaggcggcattctgttcactgctgaaggcaagaccatctaccatgcaggcgacacagctttgttcagcgacatgaagcttattggcgagcgccatcctatcgacttggcctttcttccaattggcgacaactttacaatggggccagaagatgcaaaaacagcaacagaatggattggcgccagcttaactgttccaattcattacaacacttttccgccgattaaacaggatcctcatgcttttgttaccagccttcaaagcggcgaagggcgtgtcttggaagttggcgaaacgatagaactgtaa

SEQ ID NO: 61696 - protein, 228 aa, Bacillus clausii
MKVSYHGHSVVQIETGGKTILIDPFITGNELTDLNADHVEADVILLTHGHNDHVGDTVAIAKRTGALVVAVAELATYMGFQGVENVHPMSIGGAYQFDFGRVKFTQAFHGSSFTEEDSQKIVYTGMPGGILFTAEGKTIYHAGDTALFSDMKLIGERHPIDLAFLPIGDNFTMGPEDAKTATEWIGASLTVPIHYNTFPPIKQDPHAFVTSLQSGEGRVLEVGETIEL

SEQ ID NO: 61697 - DNA, 681 bp, Bacillus halodurans
  CDS (1)..(681): transl_table=11
atgaaagtaagctatcatgggcattctgttgtcaaaattgaaacagaaggaaagacgatcgtgatagatccattcattacaggaaatgggctgacagacctatcagtcgatgacttgaaggtagatgtgattttgttaactcatggtcataatgatcacgtcggcgacactctccaactcgcaaagcaaaatgacgctcttgtgatcgctccatttgaattagctacatatcttagctggaaaggagtcaaggttcatgagatgcacattggcggagcccatcagtttgagttcggccatgtaaaattaacgcaagcatttcacggatcttcttacacagaggaaaaccaaaccattgtctataccgggatgccaagtggaattctttttacggcagaaggaaaaacaatcttccatgcaggcgatacagcgctattttctgacatgaagttaatcggtgagcggaacaccattgatgtagcatttttaccaattggcgataactttacgatggggcctgaagatgcagcggtcgccgcagagtggttacaagccaaaacagtagttccgatccactacaacacattccctgtcattgagcaagaccctgtcgcatttgcagagtcactgtcagggaaaaaaggaagagcattagccgttggcgaggcaattgaattataa

SEQ ID NO: 61698 - protein, 226 aa, Bacillus halodurans
MKVSYHGHSVVKIETEGKTIVIDPFITGNGLTDLSVDDLKVDVILLTHGHNDHVGDTLQLAKQNDALVIAPFELATYLSWKGVKVHEMHIGGAHQFEFGHVKLTQAFHGSSYTEENQTIVYTGMPSGILFTAEGKTIFHAGDTALFSDMKLIGERNTIDVAFLPIGDNFTMGPEDAAVAAEWLQAKTVVPIHYNTFPVIEQDPVAFAESLSGKKGRALAVGEAIEL

SEQ ID NO: 61699 - DNA, 684 bp, Bacillus thuringiensis subsp
  CDS (1)..(684): transl_table=11
atgaaagtatcttatcatggacattcagttgtgaaaattgagacgaatggaaaagttattttaattgatccgtttttaacaggaaatccgaaaacagatttaaaggctgaagatgtaaaagtagatgcgattcttttatcgcatggtcatggtgatcatgttggagatacagtagaacttgcgaagaaaaataatgcggttgttgtagcaccatttgaattagcgacatttttaagttggcaaggtgtaaatacacatccgatgcatattggtggttcgcatgaatttgatttcggaaaagtgaagtttacacaagcattccatggttctagttatattgatgaagaaaataagacgattacatatactggtatgccagcgggtattttagttacagcagaagagaaaactttgtaccatgcaggggatactgctctattctctgatatgaaattaattggagaactaaataacattgatgtagcatttttaccaattggtgataatttcacaatgggaccagaagatgctgttttagcagcaaaatgggttcaggcgaaaactgttgtaccgatgcattacaatacgttcccggttattgaacaagatccatatcaatttgtagaaaagctacaaaattgtacagggaaagtattagaagctggagaaagtattacactatag

SEQ ID NO: 61700 - protein, 227 aa, Bacillus thuringiensis subsp
MKVSYHGHSVVKIETNGKVILIDPFLTGNPKTDLKAEDVKVDAILLSHGHGDHVGDTVELAKKNNAVVVAPFELATFLSWQGVNTHPMHIGGSHEFDFGKVKFTQAFHGSSYIDEENKTITYTGMPAGILVTAEEKTLYHAGDTALFSDMKLIGELNNIDVAFLPIGDNFTMGPEDAVLAAKWVQAKTVVPMHYNTFPVIEQDPYQFVEKLQNCTGKVLEAGESITL

SEQ ID NO: 61701 - DNA, 684 bp, Bacillus cereus
  CDS (1)..(684): transl_table=11
atgaaagtatcttatcatggacattcagttgtgaaaattgagacgaatggaaaagttattttaattgatccgtttttaacaggaaatccgaaaacagatttaaaggctgaagatgtaaatgtagatgcgattcttttatcgcatggtcatggtgatcatgttggagatacagtagaacttgcgaagaaaaataatgcggttgttgtagcaccatttgaactagcgacatttttaagttggcaaggtgtaaatacacatccgatgcatattggtggttcacatgaatttgatttcggaaaagtgaagtttacacaagcattccatggttctagttatattgatgaagaaaataagacgattacatatactggtatgccagcgggtattttatttacagcagaagagaaaactttgtaccatgcaggggatactgctctattctctgatatgaaattaattggagaactaaataacattgatgtagcatttttaccaattggtgataatttcacaatgggaccagaagatgctgttttagcagcaaaatgggttcaggctaaaactgttgtaccgatgcattacaatacgttcccagtaattgaacaggatccatatcaatttgtagaaaagctacaaaattgtacagggaaagtattagaagctggagaaagtattacactatag

SEQ ID NO: 61702 - protein, 227 aa, Bacillus cereus
MKVSYHGHSVVKIETNGKVILIDPFLTGNPKTDLKAEDVNVDAILLSHGHGDHVGDTVELAKKNNAVVVAPFELATFLSWQGVNTHPMHIGGSHEFDFGKVKFTQAFHGSSYIDEENKTITYTGMPAGILFTAEEKTLYHAGDTALFSDMKLIGELNNIDVAFLPIGDNFTMGPEDAVLAAKWVQAKTVVPMHYNTFPVIEQDPYQFVEKLQNCTGKVLEAGESITL

SEQ ID NO: 61703 - DNA, 684 bp, Bacillus cereus
  CDS (1)..(684): transl_table=11
atgaaagtatcttatcatggacattcagttgtgaaaattgaggcgaatggaaaagttattttaattgacccgtttttaacaggtaatccgaaaacagatttaaaaactgaagatgtaaaagtggatgcaattcttttatcgcatggacacggtgatcatgttggagatacagtagaacttgcgaagaaaaataatgcagttgttgtagcgccatttgaactagcaacatttttaagttggcaaggtgtaaatacacacccgatgcatattggtggttcacatgaatttgacttcggaaaagtgaagtttacacaagcattccacggctctagttatattgatgaagaaaataagacgattacatatacaggtatgccagcaggtattttatttacagcagaagagaaaactgtataccacgcaggagatactgcactattctctgatatgaagttaattggggaattaaataaagttgatctagcatttttaccaattggtgataatttcacaatggggccagaagatgctgtactagcggcaaaatggattaatgcgaaaactgttgtaccgatgcattacaatacgttcccagttattgaacaagatccatatcaatttgtagaaaagctacaaaattgtacagggaaagtattagaagctggagaaagtattacactatag

SEQ ID NO: 61704 - protein, 227 aa, Bacillus cereus
MKVSYHGHSVVKIEANGKVILIDPFLTGNPKTDLKTEDVKVDAILLSHGHGDHVGDTVELAKKNNAVVVAPFELATFLSWQGVNTHPMHIGGSHEFDFGKVKFTQAFHGSSYIDEENKTITYTGMPAGILFTAEEKTVYHAGDTALFSDMKLIGELNKVDLAFLPIGDNFTMGPEDAVLAAKWINAKTVVPMHYNTFPVIEQDPYQFVEKLQNCTGKVLEAGESITL

SEQ ID NO: 61705 - DNA, 684 bp, Bacillus cereus
  CDS (1)..(684): transl_table=11
atgaaagtatcttatcatgggcattcagttgtaaagattgaaacgaatggaaaagtaattttaattgatccgtttttaacaggaaatccgaaaacagatttaaaggctgaagatgtaaaagtagatgcgattcttttatcgcatggacatggtgatcatgttggagatacagtagagcttgcgaagaaaaataatgcagttgtagtggcaccatttgaactagcgacatttttaagttggcaaggtgtaaaaacacatccgatgcatattggtggttcacatgaatttgacttcggaaaagtgaagtttacacaagcattccacggctctagttatattgatgaagaaaataagacgattacatatacaggtatgccagcgggtattttatttacagcagaagagaagactttgtaccatgcaggggataccgctctattctctgatatgaaattaattggggaattaaataacattgatgtagcatttttaccaattggtgataatttcacaatgggaccagaagatgctgttttagcagcaaaatgggttcaggcgaaaactgttgtaccgatgcattacaatacgttcccagtaattgaacaagatccatatcaatttgtagaaaagctacaaaattgtacagggaaagtattagaagctggagaaagtattacactatag

SEQ ID NO: 61706 - protein, 227 aa, Bacillus cereus
MKVSYHGHSVVKIETNGKVILIDPFLTGNPKTDLKAEDVKVDAILLSHGHGDHVGDTVELAKKNNAVVVAPFELATFLSWQGVKTHPMHIGGSHEFDFGKVKFTQAFHGSSYIDEENKTITYTGMPAGILFTAEEKTLYHAGDTALFSDMKLIGELNNIDVAFLPIGDNFTMGPEDAVLAAKWVQAKTVVPMHYNTFPVIEQDPYQFVEKLQNCTGKVLEAGESITL

SEQ ID NO: 61707 - DNA, 684 bp, Bacillus anthracis
  CDS (1)..(684): transl_table=11
atgaaagtatcttatcatggacattcagttgtaaagattgaaacgaatggaaaagttattttaattgatccgtttttaacaggaaatccgaaaacagatttaaaggctgaagatgtaaaagtagatgcgattcttttatcgcatggtcatggtgatcatgttggagatacagtagaacttgcgaagaaaaataatgcggttgttgtagcaccatttgaactagcgacatttttaagttggcaaggtgtaaatacacatccgatgcatataggtggttcgcatgaatttgatttcggaaaagtgaagtttacacaagcattccacggttctagttatattgatgaagaaaataagacgattacatatactggtatgccagcgggtattttatttacagcagaagagaaaactttgtaccatgcaggggatactgctctattctctgatatgaaattaattggagaactaaataacattgatgtagcatttttaccaattggtgataatttcacaatgggaccagaagatgctgttttagcagcaaaatgggttcaggctaaaactgttgtaccgatgcattacaatacgttcccagtaattgaacaagatccatatcaatttgtagaaaagctacaaaattgtacaggaaaagtattagaagctggagaaagtattacactatag

SEQ ID NO: 61708 - protein, 227 aa, Bacillus anthracis
MKVSYHGHSVVKIETNGKVILIDPFLTGNPKTDLKAEDVKVDAILLSHGHGDHVGDTVELAKKNNAVVVAPFELATFLSWQGVNTHPMHIGGSHEFDFGKVKFTQAFHGSSYIDEENKTITYTGMPAGILFTAEEKTLYHAGDTALFSDMKLIGELNNIDVAFLPIGDNFTMGPEDAVLAAKWVQAKTVVPMHYNTFPVIEQDPYQFVEKLQNCTGKVLEAGESITL

SEQ ID NO: 61709 - DNA, 678 bp, Pyrococcus abyssi
  CDS (1)..(678): transl_table=11
atggtgaaggtgaagttcctgggacacgctgcattttacatagagggaagcaagaaaatacttatcgacccgttcttaaccgggaacccgcaagctgtagcaaagccagaggacttcaaggacgttgaccttatattggttacccacgcccacggggatcacataggggacgccggggagatagcgaagattagcggtgccaagatagttgcaatgtacgacatagccaactacatagccgagaagtttaagggagttgaaaccgttggaatgaactacgggccgactgaggttgatggggtattcatagtccaagtcccagcgtggcactcgagtagcgatggaaagtacagcataggcaacgcctcgggcttcatagttaagctagatggcaaaacgatttatcacgctggtgacacctacgtatttaaggatatggagctgttctccgagctctacggtccgatagatgtggctttacttccaataggcgggcacttcactatgggggttaaggaggctgcgaaggccgttgagctactgaagccaagaacagtagttccgatgcactataacacttggccaccgatttctgcggatcccgaggaatttaagaagttagttggggataaggcaaaggtcgtagtactaaagccaggggaagagctagagctttaa

SEQ ID NO: 61710 - protein, 225 aa, Pyrococcus abyssi
MVKVKFLGHAAFYIEGSKKILIDPFLTGNPQAVAKPEDFKDVDLILVTHAHGDHIGDAGEIAKISGAKIVAMYDIANYIAEKFKGVETVGMNYGPTEVDGVFIVQVPAWHSSSDGKYSIGNASGFIVKLDGKTIYHAGDTYVFKDMELFSELYGPIDVALLPIGGHFTMGVKEAAKAVELLKPRTVVPMHYNTWPPISADPEEFKKLVGDKAKVVVLKPGEELEL

SEQ ID NO: 61711 - DNA, 708 bp, Rhizobium loti
  CDS (1)..(708): transl_table=11
atgaaactgacctggtacggccactcggccttccgtatcgaaaccggcgacgccaagatcctcatcgacccctatctgatcggcaacccgtcctggacgggcggctgggaagggccggccgaagggatcacgcatgtcctgctgacgcacggacacagcgaccacatcagcggcgcgctggaagtgctcggcaagagcggcgcgcaacttgtcgccaatttcgagatttgcatgtatctggtcggcaagggtgccgacggcagcaagatcaatcccggcaacatcggcggcacggtcgattgcggcggcttcaccaccactttcgtccaggcgctgcactcttcctcatttggcgaagacggcggcaagaacgtctatctcggcaatcccggcgggctggtcctgcacttcccggaagaccgcacgctctaccatatgggcgataccgacatcttttccgacatggcgttgatcaacgaattgcatgagccgaagatcggcatcgtgccgatcggcgatcggttcaccatgggcggcgcggtggcggcacttgcctgccgccgcttcttcaagttcgacacggtcgtcccttgccacttcggcacgtttccgatgatcgatccgacgcccgagaaattcgaggccggcctcgaagggtccggtgtgaaggtcgcgttgccgaaaatcggtgaaacgattacgatctag

SEQ ID NO: 61712 - protein, 235 aa, Rhizobium loti
MKLTWYGHSAFRIETGDAKILIDPYLIGNPSWTGGWEGPAEGITHVLLTHGHSDHISGALEVLGKSGAQLVANFEICMYLVGKGADGSKINPGNIGGTVDCGGFTTTFVQALHSSSFGEDGGKNVYLGNPGGLVLHFPEDRTLYHMGDTDIFSDMALINELHEPKIGIVPIGDRFTMGGAVAALACRRFFKFDTVVPCHFGTFPMIDPTPEKFEAGLEGSGVKVALPKIGETITI

SEQ ID NO: 61713 - DNA, 780 bp, Thermoplasma acidophilum
  CDS (106)..(780): transl_table=11
ttgcgatccgtacggtgggcctttgtatcttcccgtttggatagcgaatctggcagcaatttcttcccagggaaatgcttaaatctcatatacagatgtaaaaatatggagaacctaaagataatatggcatgggcatgcatgcttcagccttataggcaaaaagcatgtgctggtggatccgttcctgaccgataacccggttgccaaggtaaagccagaagaactgaagccagacctcatactggtcacacacgggcattcggatcactgcgaggacgcctcaaagatttcgaagaatacacatgcgcctgtggtggccgcctttgagctttccgaaatactcaaagaggagggtacggaaaccatagacataaaccctggcggcacaattgaatacgaaggcataagagtgaaggcaaccattgcaacgcattcatccagttacaacgggagatacgcgggcaacccgatgggctttgtcatagatatgggaaggaagatataccatgccggagatacaggctatttcaaggatatggaggctatcggcgctatggatcgtcctgatatagctcttctaccgatagggggccactacaccatggatgttgatggcgcctttgaggccgtgaaggccataaagccggccatagccattccgatgcattacaacacattcgatctgataagggcagatccggagaggttcaaagccctggcaggtacagttggaacatatgtgataatacctgaaatagaaaagccaatagagatctga

SEQ ID NO: 61714 - protein, 224 aa, Thermoplasma acidophilum
MENLKIIWHGHACFSLIGKKHVLVDPFLTDNPVAKVKPEELKPDLILVTHGHSDHCEDASKISKNTHAPVVAAFELSEILKEEGTETIDINPGGTIEYEGIRVKATIATHSSSYNGRYAGNPMGFVIDMGRKIYHAGDTGYFKDMEAIGAMDRPDIALLPIGGHYTMDVDGAFEAVKAIKPAIAIPMHYNTFDLIRADPERFKALAGTVGTYVIIPEIEKPIEI

SEQ ID NO: 61715 - DNA, 672 bp, Thermoplasma volcanium
  CDS (1)..(672): transl_table=11
atggatgtaaaaattatttggcatgggcatgcttgtttctctatagaaggaaaaaagaatgtgttgatagatccgtttctgacaggaaaccccatggctaaggtaaaggcagaggatctaaacccagacataatcttggttacgcatgggcattacgaccacgcagccgatgcagtctcaatatccaaaaggactggagccccggtgcttagcgtattcgaactttcagaaatattcaaggaatcagggatcaatacgattgacataaaccctggcggaacggttgagttcgaaggcgtaagcattaaagctacaatagcgacacattcctcaagctacgatggcagatatgcaggcaacccagttggttacgtgatcgacataggacgcaaaatataccacgccggcgacactggatactttaaggatatggagttaattggatctgtagataggccagagatctcgctcctccccataggtggccactatactatggacgtggatggagcagtagaagccctcaagatgctgaaatcgcccatagcaatacctatgcactacaacacctttgacgttataaaagcagatccgttaagattcaagaacctggcagcagccgtaggcacgtatgtaatcgtacctaaggtagaggagcctgtagaactctaa

SEQ ID NO: 61716 - protein, 223 aa, Thermoplasma volcanium
MDVKIIWHGHACFSIEGKKNVLIDPFLTGNPMAKVKAEDLNPDIILVTHGHYDHAADAVSISKRTGAPVLSVFELSEIFKESGINTIDINPGGTVEFEGVSIKATIATHSSSYDGRYAGNPVGYVIDIGRKIYHAGDTGYFKDMELIGSVDRPEISLLPIGGHYTMDVDGAVEALKMLKSPIAIPMHYNTFDVIKADPLRFKNLAAAVGTYVIVPKVEEPVEL

SEQ ID NO: 61717 - DNA, 684 bp, Bacillus subtilis
  CDS (1)..(684): transl_table=11
atgaaagtgacatatcacggacattctgtaatcacagtggaaacgaaggaccatcatattatttttgatccgtttttaacagggaattcattaacggatataaagccggaggatgtaaaagcggatgtcatcttactaacgcacggccacaatgaccatgtcggtgatactgaacaaatcgccaagcaaaataacgcgctggttatagccccgaacgagctcgctgtgtacttaggctggaaaggcttgaatgttcatccaatgcatattggcggctcccgccagttcgattttggaaaagtgaagctcacacaggcctttcatggatcagccatcacagatgaagaaaacaaaacgatcacttacacaggcatgcctgccggtattttgctgactgtagaagataaaacgattttccacgcgggcgatacggcacttttctctgatatgaaactcattggcgaattgaatcatatcgaccttgctttccttccgattggcgataactttacaatggggcctgaagacgccaagcttgctgctgaatggctgcgcgcaaaacaggtcgtgccggtgcattacaatacattcccggtcatcgaacaagacccagaagcattcgctgacagcctgccgggcggagtcggcaaagtcatgtcggtcggtgagacgatcgagctttaa

SEQ ID NO: 61718 - protein, 227 aa, Bacillus subtilis
MKVTYHGHSVITVETKDHHIIFDPFLTGNSLTDIKPEDVKADVILLTHGHNDHVGDTEQIAKQNNALVIAPNELAVYLGWKGLNVHPMHIGGSRQFDFGKVKLTQAFHGSAITDEENKTITYTGMPAGILLTVEDKTIFHAGDTALFSDMKLIGELNHIDLAFLPIGDNFTMGPEDAKLAAEWLRAKQVVPVHYNTFPVIEQDPEAFADSLPGGVGKVMSVGETIEL

SEQ ID NO: 61719 - DNA, 21 bp, Artificial sequence
  primer
atggtggaggttcggtatctc

SEQ ID NO: 61720 - DNA, 23 bp, Artificial sequence
  primer
ttagtcaaggcggagaacctctc

SEQ ID NO: 61721 - protein, 256 aa, Artificial sequence
  consensus sequence
  Variant (3)..(12): Xaa in position 3 to 12 is any amino acid
  Variant (13)..(17): Xaa in position 13 to 17 is any or no amino acid
  Variant (20)..(30): Xaa in position 20 to 30 is any amino acid
  Variant (31)..(59): Xaa in position 31 to 59 is any or no amino acid
  Variant (61)..(62): Xaa in position 61 to 62 is any amino acid
  Variant (64)..(64): Xaa in position 64 is any amino acid
  Variant (66)..(66): Xaa in position 66 is any amino acid
  Variant (69)..(92): Xaa in position 69 to 92 is any amino acid
  Variant (93)..(120): Xaa in position 93 to 120 is any or no amino acid
  Variant (122)..(129): Xaa in position 122 to 129 is any amino acid
  Variant (130)..(137): Xaa in position 130 to 137 is any or no amino acid
  Variant (139)..(139): Xaa in position 139 is any amino acid
  Variant (141)..(148): Xaa in position 141 to 148 is any amino acid
  Variant (149)..(163): Xaa in position 149 to 163 is any or no amino acid
  Variant (165)..(171): Xaa in position 165 to 171 is any amino acid
  Variant (172)..(183): Xaa in position 172 to 183 is any or no amino acid
  Variant (185)..(186): Xaa in position 185 to 186 is any amino acid
  Variant (190)..(191): Xaa in position 190 to 191 is any amino acid
  Variant (192)..(194): Xaa in position 192 to 194 is any or no amino acid
  Variant (196)..(205): Xaa in position 196 to 205 is any amino acid
  Variant (206)..(212): Xaa in position 206 to 212 is any or no amino acid
  Variant (214)..(214): Xaa in position 214 is any amino acid
  Variant (216)..(218): Xaa in position 216 to 218 is any amino acid
  Variant (219)..(226): Xaa in position 219 to 226 is any or no amino acid
  Variant (229)..(232): Xaa in position 229 to 232 is any amino acid
  Variant (234)..(235): Xaa in position 234 to 235 is any amino acid
  Variant (237)..(246): Xaa in position 237 to 246 is any amino acid
  Variant (247)..(250): Xaa in position 247 to 250 is any or no amino acid
  Variant (252)..(252): Xaa in position 252 is any amino acid
  Variant (255)..(255): Xaa in position 255 is any amino acid
GHXXXXXXXXXXXXXXXDPXXXXXXXXXXXXXXXXXXXXXXXXXXXXXXXXXXXXXXXXLXXHXHXDHXXXXXXXXXXXXXXXXXXXXXXXXXXXXXXXXXXXXXXXXXXXXXXXXXXXXGXXXXXXXXXXXXXXXXAXHXXXXXXXXXXXXXXXXXXXXXXXGXXXXXXXXXXXXXXXXXXXYXXGDTXXXXXMXXXXXXXXXXXXXXXXXPXGXXXXXXXXXXXTMXXXXAXXAXXXXXXXXXXXXXXPXHYXT

SEQ ID NO: 61722 - protein, 9 aa, Artificial sequence
  protein pattern
  Variant (2)..(2): Xaa in position 2 is Ile, Leu or Val
  Variant (3)..(3): Xaa in position 3 is Ser or Thr
  Variant (5)..(5): Xaa in position 5 is any amino acid
  Variant (7)..(7): Xaa in position 7 is any amino acid
LXXHXHXDH

SEQ ID NO: 61723 - DNA, 612 bp, Thermus thermophilus
  CDS (1)..(612): transl_table=11
atgctggagctctttctcaagtccttcctgaccctcttcgtggtcatggacccggtggggctcgtccccgtcttcgtggccttggcgggggaccgcccccaccggacccaggtcctcatcgcccgcaaggcggtcctggtggcgggggggctgctcaccttcttctactttttcgggcgggagcttctggggcacctcgggatctccctcgaggccctgcgcatcgcgggcggggtgctcctcttccgcatcgccacggagatggtcttcgcccaccacgagcgggagacggaggaggagcgggacgaggccttgagccgggcggacatctccgtctttcccctcgccatccccctcatcgccgggcctggggccttggccagcgtcctggtcctgggggccgaggccaagggggtgccctacggcttcgccgtggtccttttcaccgcctacctcgtcctcttcctggcctacctcttcctccggggggccacggcggtgcgccgggccctggggcggacgggggtgaacgtggtcacccgcgtcctgggcctcctcctcgccgccctggccgtgcagtacgtggcggacggggtgaggggcctcctctaa

SEQ ID NO: 61724 - protein, 203 aa, Thermus thermophilus
MLELFLKSFLTLFVVMDPVGLVPVFVALAGDRPHRTQVLIARKAVLVAGGLLTFFYFFGRELLGHLGISLEALRIAGGVLLFRIATEMVFAHHERETEEERDEALSRADISVFPLAIPLIAGPGALASVLVLGAEAKGVPYGFAVVLFTAYLVLFLAYLFLRGATAVRRALGRTGVNVVTRVLGLLLAALAVQYVADGVRGLL

SEQ ID NO: 61725 - DNA, 609 bp, Methanopyrus kandleri
  CDS (1)..(609): transl_table=11
ctggggttggaggccttggacccgtacggcgtgctcaagggcgtgatcgagctattcgtggtcgtcgatcccatcgggaacgtgccggcgctcctcgcggtcacttcggaactccgaccccgggaccgcgtacgcgtcgtccacagggctgtcgccttcgccgccgtgctcatcctcggcttcgcggtcgccggcaaggccaccctcgattatctcgggatctccgtcgaggcactcatgatcgccggcggtatcctcctgctccgcgccgccttcgggatggtcgagggagatcccacgggcttccgcatagaaccggggtcacacatcgacgtggcttatgtccccctcggaacgcccctcctcgcgggtcccggcgccatcgtcaccgtgatcgtcatgctccaccgtcacggtcgcctcgagacgatactggcctgcctcatcgtcatgctcctcaccttagtgaccttccgagccgcggagcgtctcgctcggttcctcggtcgctccggcatccgagtcctcacgcgcgtcatgggggttctgctcgcggccatcggggttcagatggtcctcgacggcgtcagcgccttcgtacgggggtga

SEQ ID NO: 61726 - protein, 202 aa, Methanopyrus kandleri
LGLEALDPYGVLKGVIELFVVVDPIGNVPALLAVTSELRPRDRVRVVHRAVAFAAVLILGFAVAGKATLDYLGISVEALMIAGGILLLRAAFGMVEGDPTGFRIEPGSHIDVAYVPLGTPLLAGPGAIVTVIVMLHRHGRLETILACLIVMLLTLVTFRAAERLARFLGRSGIRVLTRVMGVLLAAIGVQMVLDGVSAFVRG

SEQ ID NO: 61727 - DNA, 669 bp, Klebsiella pneumoniae subsp. pneumoniae MGH 78578
  CDS (1)..(669): transl_table=11
atgttcgatttgtttaaagcaatagggctcggcctggcggtgcttttaccgctggcgaatccactcacaaccgtggcgctgttccttggcctggccggtaatatgaacaacgccgagcgtaataaacaggcgttaatggcatcggtgtatgtcttcgccatcctgatggtgtcgtggtatgccggtcaggtggtgatgaatacattcggcatatcaatacctgggctgcgtatcgccggcggattgattgtggcctttatcggtttccgcatgctgtttccccagcaaaaagcccacgattcgatggaagcgaagatcaaatcggaagaactgcaggatgaaccgaccgccaatatcgcctttgtgccgctggcgatgccaagcaccgccggtccgggcaccatcgcgatgattattagctccgcctcgaccgttaagcacggcgtggacttcccggagtgggtggtgctggcggcgccgccgatcatctttttgctgttaggggtgattctgtgggcttgtctgcgcagttccggcgcgattatgcgtctggttggcaaaggcggcatcgaggccatctcgcgactgatgggctttctgctggtctgcatgggcgtgcagtttattattaacggcgtgctggagatcatttcgacctggcatccctga

SEQ ID NO: 61728 - protein, 222 aa, Klebsiella pneumoniae subsp. pneumoniae MGH 78578
MFDLFKAIGLGLAVLLPLANPLTTVALFLGLAGNMNNAERNKQALMASVYVFAILMVSWYAGQVVMNTFGISIPGLRIAGGLIVAFIGFRMLFPQQKAHDSMEAKIKSEELQDEPTANIAFVPLAMPSTAGPGTIAMIISSASTVKHGVDFPEWVVLAAPPIIFLLLGVILWACLRSSGAIMRLVGKGGIEAISRLMGFLLVCMGVQFIINGVLEIISTWHP

SEQ ID NO: 61729 - DNA, 684 bp, Xanthobacter autotrophicus Py2
  CDS (1)..(684): transl_table=11
atgcgcgtgggctatttcagcaattccatcaatatcttcctcgccgtcttcgctgccctctttcccatcgtgaacccgcttggcggggcaccgatcttcctcaatttcgtgcgcggctgctccgcgtcgacccgggaactgctggcccgctccgtcgccgtctacggcttcctgatgcttctgggctcgctgatcatcggcgcgcaggtgctcctgttcttcggcatcaccttgccggtgctgcgggtggccggcggcgtggtggtgacctccgtgggctggaacctgctgcaccagggcgacgagccggccaagcgcgccgacggcacgccgctggatgatgcccacgccaaggaccaggccttctatcccctgaccctgccgctcacggtggggcccggctccatcgccaccaccatcgcgctggccgccagccacaggtccaccttcgacaccgatctggccatgtccgtgtcgtccctcatcggggcggtggcgggactgatcggggtggcgctcaccgtctatttcgccttccgggaggcgcccaccatcgagcgcgtgctgggcaagaacggcaccaacgtgctggtgcggctgttcgccttcatcctgttcgccatcggcgtgcagatcatctggctcggtgcccgtgacctgctgggcgagattccggggcgctga

SEQ ID NO: 61730 - protein, 227 aa, Xanthobacter autotrophicus Py2
MRVGYFSNSINIFLAVFAALFPIVNPLGGAPIFLNFVRGCSASTRELLARSVAVYGFLMLLGSLIIGAQVLLFFGITLPVLRVAGGVVVTSVGWNLLHQGDEPAKRADGTPLDDAHAKDQAFYPLTLPLTVGPGSIATTIALAASHRSTFDTDLAMSVSSLIGAVAGLIGVALTVYFAFREAPTIERVLGKNGTNVLVRLFAFILFAIGVQIIWLGARDLLGEIPGR

SEQ ID NO: 61731 - DNA, 630 bp, Mesorhizobium loti MAFF303099
  CDS (1)..(630): transl_table=11
atgccgagtttcgacagcctgttcaatgccttcgtcaccattctcgtgaccatcgatccgcccggcctggcgccgctgttcctcgccgtgacccgcggcatgaaccgcgaggagcgccagcaggtgtcggtccgcgcctcggtcatcggcttcctggtgatggcgttgttcgcggttgccggcgcctcgatcctgtcggtgttcggcatcacgctgccggcattccgggttgccggcggtttcctgctgttcttcatcgccttcgaaatggtcttcgagcggcgccaggaccgcaaggagaagatcggagacgtcgccattaccaaggacatgatccacaacatcgccgccttcccgctggcgatcccgctgatcgccggccccggtgcgatttcagcgaccgtgctgctttccggctcgtttcagggctttgccgcgcaggcagcccttgtcggcatcatcttcgtctgcctcgccatcacctacctggtgttcgtgctgtcggaacgcatcgatcgcatcctcggccagaccggccgctcgatcctgacccgcctgctcggcgtcatcttggcggcgctggccgtgcagttcgtggccgacggcatcaaggcgctgatggcggggtga

SEQ ID NO: 61732 - protein, 209 aa, Mesorhizobium loti MAFF303099
MPSFDSLFNAFVTILVTIDPPGLAPLFLAVTRGMNREERQQVSVRASVIGFLVMALFAVAGASILSVFGITLPAFRVAGGFLLFFIAFEMVFERRQDRKEKIGDVAITKDMIHNIAAFPLAIPLIAGPGAISATVLLSGSFQGFAAQAALVGIIFVCLAITYLVFVLSERIDRILGQTGRSILTRLLGVILAALAVQFVADGIKALMAG

SEQ ID NO: 61733 - DNA, 612 bp, Thermoplasma volcanium GSS1
  CDS (1)..(612): transl_table=11
gtgaatgatatagttgaattcctcaaggtgttcatccctctcttcattgttatagacccgtttggcagcttagtgctgtttacatcaatgacttacaattttaacgaaggagaaaaaatgcgtgctacaaaagatgcagttgtatatggtgggataatactcgtcatgttcgctcttgcgggccagtttataatatatttctttggtatatccatagaagcgttagagatggccggtggggtcatcttactgctgatggccgtagagatgatcatggaaggaaaccgtcccaagacttcaggatcagaagttaccacggatctcgatatcggtatagttccgtttgctacgcctcttcttgcaggccccggggccatttctcttgttataatactaatgaagggcccattaatagataagatattcactttcgtatcaataggaataatatttctcatggtatacatattcttcaaggaggcttcaatagtctctaaattcataggaaacaaagcgatgaaggccgtttcaaggatattcggattgctgctggctggatttgcaatacagtatttcatagatgcagtaactgccctgttcctagtgcactag

SEQ ID NO: 61734 - protein, 203 aa, Thermoplasma volcanium GSS1
MNDIVEFLKVFIPLFIVIDPFGSLVLFTSMTYNFNEGEKMRATKDAVVYGGIILVMFALAGQFIIYFFGISIEALEMAGGVILLLMAVEMIMEGNRPKTSGSEVTTDLDIGIVPFATPLLAGPGAISLVIILMKGPLIDKIFTFVSIGIIFLMVYIFFKEASIVSKFIGNKAMKAVSRIFGLLLAGFAIQYFIDAVTALFLVH

SEQ ID NO: 61735 - DNA, 600 bp, Aeropyrum pernix K1
  CDS (1)..(600): transl_table=11
atggctgacctatatactgttgtatcatcgataatactcctcttcatagttctcgaccccgtaggcgtttcgccctacgtagcctctatagtggcgcgtaggcctgagggagagagggagaggatagttaggacagctctcgcgagcgccggggcgattttggtggcattcaccctgataggtgtggctgtgctagacatacttggcgtgtctatggacgagtttaaagtagccgctggccttctcctcctgatatatgccactgcagacctcttcgaaataaagataggctactctgagccctccggcgacgaggttgcgatattcccgctcgcaaccccccttcttgcaggtcctggcagcatagctactgtgatgtacattatgggctctagtggaatagccgttgccctgatagcgatactggttaacctagttctagcatatcccatactccacgctagcctaaagctcgtgcgcctattggggagacacggctctctgctggtggccaagttcaccgcgttcctaatggtgggattcgcagtctccatcatatttgacggtctacggggaatagttccaggcgtcttctcataa

SEQ ID NO: 61736 - protein, 199 aa, Aeropyrum pernix K1
MADLYTVVSSIILLFIVLDPVGVSPYVASIVARRPEGERERIVRTALASAGAILVAFTLIGVAVLDILGVSMDEFKVAAGLLLLIYATADLFEIKIGYSEPSGDEVAIFPLATPLLAGPGSIATVMYIMGSSGIAVALIAILVNLVLAYPILHASLKLVRLLGRHGSLLVAKFTAFLMVGFAVSIIFDGLRGIVPGVFS

SEQ ID NO: 61737 - DNA, 639 bp, Vibrio cholerae O1 biovar eltor str. N16961
  CDS (1)..(639): transl_table=11
atgcaaagctttgaaattgctatattcctccaattttttctcggccttgtcgctgcagtaaaccctgtaggcattatgccggtatttgtttctcttactggccacatgacgctggaagagaaaaataaaaccgcagcgaccgcgaatatcgccgtggccatcatcttgatcatcgccttactggcgggtcaaatgctgctcgacctcttcagtatttctctcgattcattccgtgttgcaggcggtttactgctgcttagcatcgccttttcgatgatgagcggtaagctcggtgaggataagcagaataaacaggaaaaatccgaatacatcagccgtgagcaaattgcggttgtcccactggcgatgccactcatggccggccccggagccatcagttcaacgattgtttatggctcacgttatccaaatatgctggataccttggggatcattttgaccgttgtcgccttcagtttttgctcttggctgcttttccgttcagcaccgtatatcgtccgcttgctcggacaaaccggtatcaacgtaatcacccgtatcatgggtctgatccttggtgcgctcggtattgaatttattgccaatgggctacgtaacttgtttcccggcttagcgtaa

SEQ ID NO: 61738 - protein, 212 aa, Vibrio cholerae O1 biovar eltor str. N16961
MQSFEIAIFLQFFLGLVAAVNPVGIMPVFVSLTGHMTLEEKNKTAATANIAVAIILIIALLAGQMLLDLFSISLDSFRVAGGLLLLSIAFSMMSGKLGEDKQNKQEKSEYISREQIAVVPLAMPLMAGPGAISSTIVYGSRYPNMLDTLGIILTVVAFSFCSWLLFRSAPYIVRLLGQTGINVITRIMGLILGALGIEFIANGLRNLFPGLA

SEQ ID NO: 61739 - DNA, 627 bp, Pasteurella multocida subsp. multocida str. Pm70
  CDS (1)..(627): transl_table=11
atggattttgcgatctatcttcaattctttattggactcatcgctttagttaacccaataggggttgtgccaattttctactccatgacatcaaccttgtcaaaagagcaacaaaatagaaccagtttcatcacctgtatttctattagtgtgatcttgttggtcagttttttctttggtagctttattttaaatgcatttcatatctcaattgattctttccgaattgctggtgggatcgtggtgattttaattgcgttaaccatgattaacggaaaaatcggtgagcataagatgaataaagaggaaaaaagtgaaaacttcgatgactacaataatattgcggtcgtcccccttgccacgccaattatggcaggccccgggtcgattagtgcgaccattgtttttagctcgacacaaaatagccttattaactatttctattcctcaattacgatcatcctgtttggtgtaggctgttatattttattacgttactcaaaacccgtgattaaacgcttgggtaaaacgggttctaatgtgatcactcgtattatgggattactcttaatgtcgcttggtattgagatcatcattggtggcttaagaaacttaggcattgtttaa

SEQ ID NO: 61740 - protein, 208 aa, Pasteurella multocida subsp. multocida str. Pm70
MDFAIYLQFFIGLIALVNPIGVVPIFYSMTSTLSKEQQNRTSFITCISISVILLVSFFFGSFILNAFHISIDSFRIAGGIVVILIALTMINGKIGEHKMNKEEKSENFDDYNNIAVVPLATPIMAGPGSISATIVFSSTQNSLINYFYSSITIILFGVGCYILLRYSKPVIKRLGKTGSNVITRIMGLLLMSLGIEIIIGGLRNLGIV

SEQ ID NO: 61741 - DNA, 618 bp, Pasteurella multocida subsp. multocida str. Pm70
  CDS (1)..(618): transl_table=11
atgtttgattcgttaatcgtgcaatttgttgtattgtgggcagtaatcgacccaattggatccgtaccggtttatttgaccaaaaccgtagggctatcgctagaagatagacgtaaaattgccttaaaagcggtagtgatcgcaacggggatcttaatgttctttttgattctaggtcaggggctattagaagcgatgcaaattccgctcaccgcgttccaaattgccgggggcttagtgttactgttattcgccttaaccatgatttttggtgaaggtaagccagaacatgaaatgcgtatgacatccagtttaagtgagctggcggtttatcctcttgcggtgccgtccattgcttcaccgggtgcgatgatggcaatcgtattattgaccgataatcatcggttcagttttttcgatcaagttatcaccactgtgattatgctttccattttatttatcacttacctgcttttcttgatggcaaaccgtattcaacgtttaattggtaacactggcgctgccgtaataagccgggtcatgggattaatccttgctgccgtggcgatcaataatatgttagtgggaattcgtgacttttttacgcaagtggtgtaa

SEQ ID NO: 61742 - protein, 205 aa, Pasteurella multocida subsp. multocida str. Pm70
MFDSLIVQFVVLWAVIDPIGSVPVYLTKTVGLSLEDRRKIALKAVVIATGILMFFLILGQGLLEAMQIPLTAFQIAGGLVLLLFALTMIFGEGKPEHEMRMTSSLSELAVYPLAVPSIASPGAMMAIVLLTDNHRFSFFDQVITTVIMLSILFITYLLFLMANRIQRLIGNTGAAVISRVMGLILAAVAINNMLVGIRDFFTQVV

SEQ ID NO: 61743 - DNA, 654 bp, Neisseria meningitidis MC58
  CDS (1)..(654): transl_table=11
atgggattgggcatggaaatcggcaagctgattgtggcttttttggtgctgattaatccgtttagcgcgttgtcgctttaccttgacctgaccaacgggcacagcacgaaggagcgcaggaaggtcgcgcggacggccgccgttgccgtgtttgccgtgattgcggtatttgcgctgatcggcggtacgctgctgaaggttttgggcatcagcgtcggttcgtttcaggtcggcggcgggattttggtgctgctgatcgccatttcgatgatgaacggcaacgacaatcccgccaagcagaatctcggcgcgcagccggaaacggggcaggcgcgccccgcccgcaatgccggagcgattgccgtcgtgcccatcgccataccgatcaccatcggcccgggcggtatttcgaccgtgattatttacgcttcggcggctaaaacatacggcgacatcgcgttgattatcgcggccggtttggtggtcagtgcgatttgttatgccattttaatcgttgccgggaaggtcagccgcctgctgggcgcgacggggctgacgattttaaaccgcattatgggtatgatgctggcggcggtatcggtggagattattgtgtcgggactgaaaacgatattcccgcaactggcaggttga

SEQ ID NO: 61744 - protein, 217 aa, Neisseria meningitidis MC58
MGLGMEIGKLIVAFLVLINPFSALSLYLDLTNGHSTKERRKVARTAAVAVFAVIAVFALIGGTLLKVLGISVGSFQVGGGILVLLIAISMMNGNDNPAKQNLGAQPETGQARPARNAGAIAVVPIAIPITIGPGGISTVIIYASAAKTYGDIALIIAAGLVVSAICYAILIVAGKVSRLLGATGLTILNRIMGMMLAAVSVEIIVSGLKTIFPQLAG

SEQ ID NO: 61745 - DNA, 666 bp, Escherichia coli O157:H7 EDL933
  CDS (1)..(666): transl_table=11
  misc_feature (288)..(288): k is g or t
atgttagatttgtttaaagcaattggcctggggctggtggtgttactgccgttagctaacccattaacaactgtcgcgttatttcttggcctggcaggcaacatgaacggtgccgaacgtaatcgtcagtcgttgatggcctcggtgtacgtctttgccatcatgatggtggcgtattacgccgggcaactggtgatggatacatttggcatttcgattcccggtctgcgaattgcaggcggcttaatcgtcgcgtttatcggttttcggatgctttttccgcaacakaaagcgattgattcaccggaggcgaaaagcaagtcggaagagctggaagatgaacccagcgccaatattgcttttgtaccactggcaatgccaagtaccgccggtccgggaaccattgcgatgattattagctcggcgtccacagtgcgtcagagttcaaccttcgctgattgggtactgatggttgcgccgccgctgatctttttcctggtggcggttattttgtggggaagtctacgcagctctggcgcaattatgcggctggtgggcaagggtggcattgaagcgatctcccgcttgatggggttcctgctggtatgtatgggtgtacagtttattattaacggcatcctggaaatcattaaaacgaatcattaa

SEQ ID NO: 61746 - protein, 221 aa, Escherichia coli O157:H7 EDL933
  misc_feature (96)..(96): The Xaa at location 96 stands for Gln, or His.
MLDLFKAIGLGLVVLLPLANPLTTVALFLGLAGNMNGAERNRQSLMASVYVFAIMMVAYYAGQLVMDTFGISIPGLRIAGGLIVAFIGFRMLFPQXKAIDSPEAKSKSEELEDEPSANIAFVPLAMPSTAGPGTIAMIISSASTVRQSSTFADWVLMVAPPLIFFLVAVILWGSLRSSGAIMRLVGKGGIEAISRLMGFLLVCMGVQFIINGILEIIKTNH

SEQ ID NO: 61747 - DNA, 654 bp, Deinococcus radiodurans R1
  CDS (1)..(654): transl_table=11
gtggattggtccgaggtcatcaccctgagttaccggacatttttgaccatgctggtcatcatggacccggtgggcctcgcgcccatgttcatcgcgctggcgcgcgaccgccccgccttcgagaaaaagcggctcgccctcaaggccacgctggtggcgggcggcatcatcttcgtcttcgggcttttcgggcgggcgctgctcgaacacctcggcatcagcctgagcgcctttcgcatcgccgggggcatcttgctgttcatggtggcgctcgacatggtgtcggcccgccagagtgccacccgcgaaaccccagaggaagaacgcgaagcccaggaacgcgaggacatcagtgtctttccgctcgccattccgctgattgccggccccggcaccctcgccagcatcatgattcagacgaacgccgcgcacggcaacccgatcctgatgttcgcggtgtttctggtgacggggattgtcctggcgctgtgttacctcgccctgcggctgagcaaccagattgccaaggcgctcggcctgaccggcgtcaatgtggtgacccgcgtgctgggcgtgctgctcggcgcactggccgtgcagtacatcgccgacggcaccctggaactgatgcgcggcggcttgccgctgaactga

SEQ ID NO: 61748 - protein, 217 aa, Deinococcus radiodurans R1
MDWSEVITLSYRTFLTMLVIMDPVGLAPMFIALARDRPAFEKKRLALKATLVAGGIIFVFGLFGRALLEHLGISLSAFRIAGGILLFMVALDMVSARQSATRETPEEEREAQEREDISVFPLAIPLIAGPGTLASIMIQTNAAHGNPILMFAVFLVTGIVLALCYLALRLSNQIAKALGLTGVNVVTRVLGVLLGALAVQYIADGTLELMRGGLPLN

SEQ ID NO: 61749 - DNA, 597 bp, Xylella fastidiosa 9a5c
  CDS (1)..(597): transl_table=11
atgacgattatgtctgctgcgttgttactgttcctgatccttgacccattgggcaacatcccggtgtttctcagcgtactcaaaccattgcctgcccaacggcaacgcgtagtactggcgcgtgaattgctgattgcgctggtcgtactcatgggtttcctatggggtggcaagtacgtattggagttgatgcacttgcgacaggagtcggtatcgattgccggaggcatcgttttatttctcattggtatccggatgatctttccccgcccagaagggttgatgggggaaatccctgagggagagcctttcatcgtcccattagcaatcccattagtcgctggcccatcgggcatggccgcagtgatgctgatggggagcaacgaacccgcccgcttgtgggattggaactgggcgttgttgctggcctggggtggggcagcagcgatcttattttccgcgccgctcttgtacacgctgctgggccatcgtgtgttgacagcattggagcgcttaatgggaatgttgttagtggcaatctcggtgcaaatgtttatggacggaatcagcacatacctcaaagcgtcaatgcattga

SEQ ID NO: 61750 - protein, 198 aa, Xylella fastidiosa 9a5c
MTIMSAALLLFLILDPLGNIPVFLSVLKPLPAQRQRVVLARELLIALVVLMGFLWGGKYVLELMHLRQESVSIAGGIVLFLIGIRMIFPRPEGLMGEIPEGEPFIVPLAIPLVAGPSGMAAVMLMGSNEPARLWDWNWALLLAWGGAAAILFSAPLLYTLLGHRVLTALERLMGMLLVAISVQMFMDGISTYLKASMH

SEQ ID NO: 61751 - DNA, 630 bp, Sinorhizobium meliloti 1021
  CDS (1)..(630): transl_table=11
atgttcgacgtcgatctcttgatcaatgcgctgacgacgctgctcgtcacgcttgatccgcccggccttgcgccgatcttcctgagcctgaccgtcggcttgagccggcagcagcgcttccaggtcgcgacccgcggctcgctcatcgcttttttcatcctcgccgcctttgcgctattcggcgacggcatcctcggtctgctcggcatctcgatcggcgccttccggatcgccggcggcatgctgctcttctggatcgctttcgagatgattttcgagaaacgccaggagcgaaaggagaaggccggggaaacggcgatcacgaaggaccacctccacaatatcgcggtcttccctctcgcactgcccctgattgccgggccgggagcgatctcggcaaccatccttctcggcagctcatttccctcggcactggagcgggtgcagctcatcgtcgtcatcgccgcatcgatggcgatactgttcctggcgctggtgatcgccgagcgtatcgaccggttcctgggcgtcaccggccgggcgatcctcacccgcctcctcggcgtcatccttgcggcactcgccgttcaattcgtcgtggacggcgtgcgttcggcgtttcaggtctga

SEQ ID NO: 61752 - protein, 209 aa, Sinorhizobium meliloti 1021
MFDVDLLINALTTLLVTLDPPGLAPIFLSLTVGLSRQQRFQVATRGSLIAFFILAAFALFGDGILGLLGISIGAFRIAGGMLLFWIAFEMIFEKRQERKEKAGETAITKDHLHNIAVFPLALPLIAGPGAISATILLGSSFPSALERVQLIVVIAASMAILFLALVIAERIDRFLGVTGRAILTRLLGVILAALAVQFVVDGVRSAFQV

SEQ ID NO: 61753 - DNA, 699 bp, Caulobacter crescentus CB15
  CDS (1)..(699): transl_table=11
atgaccgaggccaatcttgccgtcaacttcttcgtcgccctgttcgccctgatcgacccgatcggcaacgtgccgctgttcgccgccgccaccctgggcgcggccgccgccggacgtcggatggtggccgtctatatcggcctgttcatggccgccttcctgatctttttctacttcacgggcgtgggcctgctggagttcttcggcatctcgatgccggccttccggatcgccggcggcatcatcctgttcatcctgggcctggacatggtgcgcgacgacttcaccaccatgttcgccgacgccgccgaggggatcgaggaccagtcgccccgcgcctacgccaagcagcggttcgagcggctgatcgtgccgttcgccatgccgttgctgatcgggccgggctcgatctcgaccgtgatcatctacgccgccgaggccaaggacttcggcgcggcgggcatgggcatcggggtcgcggtgatcgcggccgtgtcgctggtgacggtgctgaccttctgggcctcgccgctggtcagcaaggtgctgggccgcatcggcatgagcatcgtggtccgcgtgctgggcctgatcctctgcgccctggcggtgcagttcgtcctggtcggtgtggccgacgccacgcgcggcctgatcaagaacgacgccaaggcgccctacgccgagagccataagtag

SEQ ID NO: 61754 - protein, 232 aa, Caulobacter crescentus CB15
MTEANLAVNFFVALFALIDPIGNVPLFAAATLGAAAAGRRMVAVYIGLFMAAFLIFFYFTGVGLLEFFGISMPAFRIAGGIILFILGLDMVRDDFTTMFADAAEGIEDQSPRAYAKQRFERLIVPFAMPLLIGPGSISTVIIYAAEAKDFGAAGMGIGVAVIAAVSLVTVLTFWASPLVSKVLGRIGMSIVVRVLGLILCALAVQFVLVGVADATRGLIKNDAKAPYAESHK

SEQ ID NO: 61755 - DNA, 687 bp, Caulobacter crescentus CB15
  CDS (1)..(687): transl_table=11
atggacttcagccccctgcccacctccagcctgatcggcgcctttctgttggcgttcccggcgctgttctcgatcgtcaatccggtcggggcggcgctgatcttcgaccaggccatgggcggtcgctcgcgtcccgaacgcctgaagctggcgcgcgccatcggcttctatgccttcctggtgctactggggtctttgctgctgggcggctatatcctgaacttcttcggcgtcagcatcggcgccttgcgggtggcgggcggcctcgtcgtggcgatccgggcctggggcctcctgatggaccccgagcaaaacgaggaccgcaaggtcaaccagaccgagtcggctcagagtcatcacgacgtagccttcttcccgctgaccatgcccttcaccaccggtcccggctcgatctcggtggccatcgctctgtcatctcagcgaccgacagaaggcgacgcggtggcgccgttcttcatcggcgccagcctcgcagccgccctggtcgctgtgctggtctggctttgctacagcgcctcgggacaggtcatgcgcctgctgggcccgtcgggcgcgcgggtgctgtcgagactggtggccttcctgctgctgtgcatcggcgtgcagatcatcgcgtcgggcgtggagaacctggtggcgaagttcctgctcgcgcacccgggttaa

SEQ ID NO: 61756 - protein, 228 aa, Caulobacter crescentus CB15
MDFSPLPTSSLIGAFLLAFPALFSIVNPVGAALIFDQAMGGRSRPERLKLARAIGFYAFLVLLGSLLLGGYILNFFGVSIGALRVAGGLVVAIRAWGLLMDPEQNEDRKVNQTESAQSHHDVAFFPLTMPFTTGPGSISVAIALSSQRPTEGDAVAPFFIGASLAAALVAVLVWLCYSASGQVMRLLGPSGARVLSRLVAFLLLCIGVQIIASGVENLVAKFLLAHPG

SEQ ID NO: 61757 - DNA, 648 bp, Salmonella typhimurium LT2
  CDS (1)..(648): transl_table=11
gtgattcaaccgctttttgattttcctgtttactttaagttctttatcgggctctttgcgctggttaacccggtggggattatccccgttttcatcagcatgaccagctaccagacggccacggcgcgtaataaaactaacctcaccgcgaatctgtcggttgcgattatcttgtggagttccttattcctcggcgatggcatcctgcaactctttggtatttctattgattcgttcagaattgcgggcggtatcctggttgtcaccattgcaatgtcgatgatcagcgggaagctgggggaagataaacaaaacaagcaagaaaagtcagagacggccatacgcgagagcattggcgttgtgccgttagcgctgccgttaatggcggggccaggggcgatcagctccactatcgtctgggggacgcgttatcacagcatcgcgcatttgcttggcttttcagttgccattgcgctttttgcgctttgctgctggggcgtgttccgtatggcgccgtggctggttcgtttgctggggcaaactggtatcaacgttattacccgaatcatggggttgttgttaatggcgctcggcatcgaatttattgtcacaggaataaaaggcattttccccggcttgctcaactaa

SEQ ID NO: 61758 - protein, 215 aa, Salmonella typhimurium LT2
MIQPLFDFPVYFKFFIGLFALVNPVGIIPVFISMTSYQTATARNKTNLTANLSVAIILWSSLFLGDGILQLFGISIDSFRIAGGILVVTIAMSMISGKLGEDKQNKQEKSETAIRESIGVVPLALPLMAGPGAISSTIVWGTRYHSIAHLLGFSVAIALFALCCWGVFRMAPWLVRLLGQTGINVITRIMGLLLMALGIEFIVTGIKGIFPGLLN

SEQ ID NO: 61759 - DNA, 594 bp, Nostoc sp. PCC 7120
  CDS (1)..(594): transl_table=11
gtggatacatctattctgattcaaacttttattgctgtgttcgtcttggcagatgcgataggtaatatacccatagttttagctttaaccaagggtatggaaccggaggataggaatagagtaattgataaagcgagtattgtggcgatcgcagttctattactatttgcctttggtggtcaatatattttgacttatttagaaattagcatggcatccttacgggtagccggggggttgctgttgctgttaattgctttgcaaatgctgcggggagaattggagacaccaattaccgaagaaggaagggatgtggcaattacacccttggctttgccattgttagccgggccgggtacgctaacaacagtgatgttatttatgtctaaatcccaaagtccacatttggctgtagtgttagggattttggcggcgatgtttgttacttggttgattttgcgcctagcaaatcccatagaaaaacggattggtgtagaaggtggggtaattgtcacccagcttttgggttttctcttggcggcgttggcagtggagattggtagtacagggattcgggagttatttttgcagtga

SEQ ID NO: 61760 - protein, 197 aa, Nostoc sp. PCC 7120
MDTSILIQTFIAVFVLADAIGNIPIVLALTKGMEPEDRNRVIDKASIVAIAVLLLFAFGGQYILTYLEISMASLRVAGGLLLLLIALQMLRGELETPITEEGRDVAITPLALPLLAGPGTLTTVMLFMSKSQSPHLAVVLGILAAMFVTWLILRLANPIEKRIGVEGGVIVTQLLGFLLAALAVEIGSTGIRELFLQ

SEQ ID NO: 61761 - DNA, 594 bp, Ralstonia solanacearum GMI1000
  CDS (1)..(594): transl_table=11
atggaatacacgttcgcgtccgctaccgtcctgctgctgctgatcaccgatccgctcggcaacatccccatcttcatctcggccctgcggccggtggcgcccgagcggcgcaaccgagtggtgctgcgcgaggtcggcatcgccttcgcgctgctgctggtgttcatgttcttcggcgaggcgttcctgcgcatgatgagcctgacggatctgtcgctgcagatcgcgggcggcatcgtgctgttcctgatcgcgctgcggatgatctttccgcgcgagggcccggccgacgggcagctcaccggcgagcccttcatcgtgccgttggcgattccggccatcgccggtccgtcggcgctggcgaccgtgatgctgctggtgtcgcaggcgccggggcggatgtggacctggatcggctcgctgagcgcgacgatggcggtgtgcgcggtggtgctgctcagcgccacgcgcatccagcgcctggtcggcgagcggaccgtgatggcgttcgagcggctgatggggctgatcctggtggcgatctcggtggagatgctgctcaaggggatccgcgcgtttgtgcatcagctgtga

SEQ ID NO: 61762 - protein, 197 aa, Ralstonia solanacearum GMI1000
MEYTFASATVLLLLITDPLGNIPIFISALRPVAPERRNRVVLREVGIAFALLLVFMFFGEAFLRMMSLTDLSLQIAGGIVLFLIALRMIFPREGPADGQLTGEPFIVPLAIPAIAGPSALATVMLLVSQAPGRMWTWIGSLSATMAVCAVVLLSATRIQRLVGERTVMAFERLMGLILVAISVEMLLKGIRAFVHQL

SEQ ID NO: 61763 - DNA, 624 bp, Ralstonia solanacearum GMI1000
  CDS (1)..(624): transl_table=11
atggatctgaccaagagcttcttttcgctgctggcactgatcaacccgatcggggcgatcccgttcttcatcagtttgaccgagagccagacggatgaggaaaagcggcgcacgatcaagaccgcgtcggtttcggtggcgctggtgatcggcatcagcgcgctgctgggcgagcagatcatcggtttcttcggtttttcggtcggctcgctgcaggtgggcggcgggatcatcatgatcatgatcgcgctgaacatgctgaacgcgcagaccagccgcaccaaggccacgccggaggaagaggacgaggccggcgtgcgggccagcatcgcggtggtgccgctggcgatccccttgctgacgggcccgggctcgatcagcacggtgatcgtctacgcgggcaagactcagcactggtacgagctgctcttcctggccggcgtgggcgtgctgatcgcgctggtggtgtggatcgtgctgcgcgcagccgagccgatcgcccgcgtgatcggccgcaccggtatcaacgtcggcacgcgcctgatggggttgatcctcgcggcgctggccgtggaattcatcgtcgacgggctgaaaaccctgttgcctgttctcaaatcatga

SEQ ID NO: 61764 - protein, 207 aa, Ralstonia solanacearum GMI1000
MDLTKSFFSLLALINPIGAIPFFISLTESQTDEEKRRTIKTASVSVALVIGISALLGEQIIGFFGFSVGSLQVGGGIIMIMIALNMLNAQTSRTKATPEEEDEAGVRASIAVVPLAIPLLTGPGSISTVIVYAGKTQHWYELLFLAGVGVLIALVVWIVLRAAEPIARVIGRTGINVGTRLMGLILAALAVEFIVDGLKTLLPVLKS

SEQ ID NO: 61765 - DNA, 630 bp, Agrobacterium tumefaciens str. C58
  CDS (1)..(630): transl_table=11
atggccagcagcgaaaccctcatcaacgcgcttaccacacttctggtcacgctcgatccgcccggtctcgcccccgttttcctggcgctcaccgtcggcatgacgcgcgatcagcgcagccaggtagcgttgcgcggctccatcatcgcctttggcattctcgccgtcttcgcgctcttcggtctcgccattctcaacctgctcggcatttcgctcggtgccttccgcatcgccggtggccttctgctgttctggatttccttcgagatgattttcgagaaacgccaggagcgcaaggaaaagacctcggaaatcgccatcaccaaggatcatctgcataatctggcggtctttccgctggccctgccgctaatcgccgggccgggcgccatttccgccaccgtgctgcttgccggctcaatgaaaaccaccgtcgagatggtggtgctcatcctgatcctcgctttcgccatggccctcgtttatgccgcgctgatcgtctcggaacgcatggaccgttttctcggcaataccggccgcgccatcctcacccggctgctcggcgtgctgttggcagcactctcggtacaattcgtggtcgacggcataaagtcggccttcgatttctga

SEQ ID NO: 61766 - protein, 209 aa, Agrobacterium tumefaciens str. C58
MASSETLINALTTLLVTLDPPGLAPVFLALTVGMTRDQRSQVALRGSIIAFGILAVFALFGLAILNLLGISLGAFRIAGGLLLFWISFEMIFEKRQERKEKTSEIAITKDHLHNLAVFPLALPLIAGPGAISATVLLAGSMKTTVEMVVLILILAFAMALVYAALIVSERMDRFLGNTGRAILTRLLGVLLAALSVQFVVDGIKSAFDF

SEQ ID NO: 61767 - DNA, 615 bp, Brucella melitensis 16M
  CDS (1)..(615): transl_table=11
atggaaaccggaatgatcgtcggcaaattgctcccattgttgttcaacatgatgggtccgatcgggctgatgcccatttttgcggccatgaccgtgcagatggacaagccgacgcgcaacagcgtggcggcgcgagcagcgatttttgcagcactcggcattctcattgccatattcatcggcgaccctatcctgcaaagctgggggatcagcaaaccggcattgatccttgcagcaggcgtcatcctgacattaagctcgatccgggccgtgctgatgcctccggcagcgccctcacagcctgcggcagcgggggacccaaaggcgctggcgataaggccattggcttttccgacgatcgtatccccgcaaggcgtcggcgttctgattattttcgtcgccttcctgtcatcgctttcctccaccatcaccatcctgacggtagcaggcgtcatcgttctccttgattatggtgcgatgcggatcgcccattggttcatggcaacggtcggcatggtgccactcctggtgctgggggctgtgtttggcgtgcttcaggtggcgcttggcatagaaatgatgctttcaggactcctgctcgttctgaactcctga

SEQ ID NO: 61768 - protein, 204 aa, Brucella melitensis 16M
METGMIVGKLLPLLFNMMGPIGLMPIFAAMTVQMDKPTRNSVAARAAIFAALGILIAIFIGDPILQSWGISKPALILAAGVILTLSSIRAVLMPPAAPSQPAAAGDPKALAIRPLAFPTIVSPQGVGVLIIFVAFLSSLSSTITILTVAGVIVLLDYGAMRIAHWFMATVGMVPLLVLGAVFGVLQVALGIEMMLSGLLLVLNS

SEQ ID NO: 61769 - DNA, 636 bp, Pyrococcus furiosus DSM 3638
  CDS (1)..(636): transl_table=11
atggaagttctaaaagactttttactcttttatggaggtcttttcgcgataactaatccaataggggctgttccagtgtttatagctgtaactagaaatttaagtccagagaagagaaaggaaatagcaaggaaaacttccactacagttatggtaactctcttagtctttgctctagtgggggagtggattttcaagttcttcggagcatctacagatgcattttcaatagcaggagggataattctctttagaatgtctctagagatgctctcaggaaagctttcttccgtaaaaataagtgaagaagaagaacatatcagtgaagaagctgtaacacttgaggaagtggctataattccactcgcgattcctttactttcaggcccaggtgccataaccaccacaatgctctacatggctaagagctctacaatgattgaaaaatctatagtgctactagtagtggtagcaatagggattacagtgtggataattctttcagccgctaacagaatacatcaaaagttgggaaccattgggattaaggtaatgacaagaatgatgggtcttattttggcatcaatggcagttcaaatggttataaatggtgtcaaaggagcgttcaacatttag

SEQ ID NO: 61770 - protein, 211 aa, Pyrococcus furiosus DSM 3638
MEVLKDFLLFYGGLFAITNPIGAVPVFIAVTRNLSPEKRKEIARKTSTTVMVTLLVFALVGEWIFKFFGASTDAFSIAGGIILFRMSLEMLSGKLSSVKISEEEEHISEEAVTLEEVAIIPLAIPLLSGPGAITTTMLYMAKSSTMIEKSIVLLVVVAIGITVWIILSAANRIHQKLGTIGIKVMTRMMGLILASMAVQMVINGVKGAFNI

SEQ ID NO: 61771 - DNA, 609 bp, Methanopyrus kandleri AV19; identical to SEQ ID NO: 61725
  CDS (1)..(609): transl_table=11

SEQ ID NO: 61772 - protein, 202 aa, Methanopyrus kandleri AV19
MGLEALDPYGVLKGVIELFVVVDPIGNVPALLAVTSELRPRDRVRVVHRAVAFAAVLILGFAVAGKATLDYLGISVEALMIAGGILLLRAAFGMVEGDPTGFRIEPGSHIDVAYVPLGTPLLAGPGAIVTVIVMLHRHGRLETILACLIVMLLTLVTFRAAERLARFLGRSGIRVLTRVMGVLLAAIGVQMVLDGVSAFVRG

SEQ ID NO: 61773 - DNA, 639 bp, Methanosarcina acetivorans C2A
  CDS (1)..(639): transl_table=11
atggtaagtgaaaacctcggttttttcatttatgtattctcatccatttttgtggttgtaagccctgtcggcggagttgtaacttttatctccctgacaagtaagatgacccgcaaggaaaaaaacgagatcgcaaaaaaagcagtgattcttgcatgttcaattgccctcttttttgcaattaccggaagtatgatcctgaacttattcagcatcagtgttgattcgcttcgggttgccggaggaattctgcttttcactatagcatttgacatgatgcaggcaaaggtctcaagggagagcattaccgaagaagaaattacccagtcccaggaaagggaagatatctgggtctttccgatcgggcttccgctcctgacaggcccgggtacgatcagcacggttattgtcctcatggggatggcagatggcgttcaacaaaaaggagttgtgctcgtatcgataatagctacattcctcatctgccttatcgtcttccacttttcaaggagactccacaagttcataggctataacggaatgctcgtcttcacaaggctcatgggacttttgcttgcagctctggcagtggatctgacttccacgggaataataaatatattcggactgggaacttga

SEQ ID NO: 61774 - protein, 212 aa, Methanosarcina acetivorans C2A
MVSENLGFFIYVFSSIFVVVSPVGGVVTFISLTSKMTRKEKNEIAKKAVILACSIALFFAITGSMILNLFSISVDSLRVAGGILLFTIAFDMMQAKVSRESITEEEITQSQEREDIWVFPIGLPLLTGPGTISTVIVLMGMADGVQQKGVVLVSIIATFLICLIVFHFSRRLHKFIGYNGMLVFTRLMGLLLAALAVDLTSTGIINIFGLGT

SEQ ID NO: 61775 - DNA, 606 bp, Streptomyces coelicolor A3(2)
  CDS (1)..(606): transl_table=11
atgttcgacgtcgccgtcttcggctccctcttcctgaccctttttgtcatcatggatccccccgggatcaccccgatcttcctcgcgctcacctccggccgccccggcaaggtgcagaagcggatggccctccaggccgtctgcgtcgccggtggtgtgatcacggtgttcggtctgctcgggcaccagatcctggactacctgcacgtgtccgtgcccgccctgatgatcgcgggcgggctgctgctcctgctgatcgccctcgacctgctcaccggcaagacggacgagccgaagcagaccaaggacgtcaacgtcgccctcgtaccgctgggcatgccgctgctcgccgggcccggagcgatcgtgtcggtcatcctggccgtgcagaaggcggacagcgtgaccacgcaggtctcggtgtgggcggcgatcctcgccatccacgtggtgctgtggctggtgatgcggtactcgctgctgatcatccgggtcatcaaggacggcggcgtggtcctggtgacccgcctcgccggcatgatgctctccgcgatcgccgtgcagcagatcatcaacggcgtcacgcaggtgatccagggcgcgtga

SEQ ID NO: 61776 - protein, 201 aa, Streptomyces coelicolor A3(2)
MFDVAVFGSLFLTLFVIMDPPGITPIFLALTSGRPGKVQKRMALQAVCVAGGVITVFGLLGHQILDYLHVSVPALMIAGGLLLLLIALDLLTGKTDEPKQTKDVNVALVPLGMPLLAGPGAIVSVILAVQKADSVTTQVSVWAAILAIHVVLWLVMRYSLLIIRVIKDGGVVLVTRLAGMMLSAIAVQQIINGVTQVIQGA

SEQ ID NO: 61777 - DNA, 639 bp, Methanosarcina mazei Go1
  CDS (1)..(639): transl_table=11
atggtaaccgaaaatctcggattttttatttatgtattctcatccatctttgtggttgtaagccctatcagtggagttgtaacttttatctccatgacaagcaagatgacccgcaaagaaaaaaacgatatcgcaaaaaaagcagtcatactagcatgtgtaattgccctgttttttgcgattactggaagtatgatacttaaattattcagcatcagtgtggactccctcagggttgccggaggtcttttgcttttcagcatagcgtttgacatgatgcacgcaaaggtctcacgtgagagcattacagaagaagaaattactcagtcccaggaaagggaagatatctgggtcttccctataggccttccacttctgacaggacccggtacgatcagcacagtaattgtcattatgggcatggcagaaggtgttcaacaaaaagcaatagtagttgcctcaataatactgacattcattatttgcctgtttatcttccttttctcaaggaggctgcacaaattcataggatacaatggaatgctggtcttcacaaggcttatggggcttttgcttgcggctcttgcagttgacctgaccgctgcgggaataataaatatatttgggctcacaatttaa

SEQ ID NO: 61778 - protein, 212 aa, Methanosarcina mazei Go1
MVTENLGFFIYVFSSIFVVVSPISGVVTFISMTSKMTRKEKNDIAKKAVILACVIALFFAITGSMILKLFSISVDSLRVAGGLLLFSIAFDMMHAKVSRESITEEEITQSQEREDIWVFPIGLPLLTGPGTISTVIVIMGMAEGVQQKAIVVASIILTFIICLFIFLFSRRLHKFIGYNGMLVFTRLMGLLLAALAVDLTAAGIINIFGLTI

SEQ ID NO: 61779 - DNA, 600 bp, Xanthomonas campestris pv. campestris str. ATCC 33913
  CDS (1)..(600): transl_table=11
atgaccatcctatcggcagcgctgctgctgttcctgatcctcgacccgctcggcaacatcccggtgtttctcagcgtgctcaagccgctgccgccgaagcgccagcgcttcgtgctcgcgcgcgagttgctgatcgccctgttcgtcctgatggcgtttctatggggcggcaagtacgcactggagttgatgcatctgcggcaggaatcggtggcgatcgccggcggcatcgtgctgttcctgatcggcattcgcatgatcttcccgcgccccgaaggcctgatgggcgagattcccgacggcgagcccttcatcgtgccgctcgcaatcccgctggtggccggcccgtccggcatggccgcagtgatgctgatgggcagcaacgaacccacccggttatgggattggagcctggcgctgatgattgcctggatcggtgcatccacgatcctggcctcggccccgctgttgtacaaactgctcggtcatcgcgcgttgaccgcaatcgagcgcctgatgggcatgttgctggtggccatttcggtgcagatgttcctggatggcctgggcacgtatttcaagcttccggtgtcgatctga

SEQ ID NO: 61780 - protein, 199 aa, Xanthomonas campestris pv. campestris str. ATCC 33913
MTILSAALLLFLILDPLGNIPVFLSVLKPLPPKRQRFVLARELLIALFVLMAFLWGGKYALELMHLRQESVAIAGGIVLFLIGIRMIFPRPEGLMGEIPDGEPFIVPLAIPLVAGPSGMAAVMLMGSNEPTRLWDWSLALMIAWIGASTILASAPLLYKLLGHRALTAIERLMGMLLVAISVQMFLDGLGTYFKLPVSI

SEQ ID NO: 61781 - DNA, 642 bp, Chlorobium tepidum TLS
  CDS (1)..(642): transl_table=11
atggcaaatttgtggattcacgcacttacggtgttcatggggtttttcgcgattatgaaccccatcgccaacgtgccgatttttctgagtctgacggagggcgacgataaaaagacgacggcgatggtagcatcccgagcgctgctgctggcgtttctgatcgtgacgatcttttcggtggccggaaaacttatcttcgatctgttcggcatcacgttgcccgcgtttcagatcacgggcggcctgctggtttttctgatcggctttcacatgctgcaaggcgaccagtcaagcgtgcagcacccgagtgaaacgggcaagaaaaaatcgcccgaagcggccctcagcgtaacggtctccccgctggcgatgccgatcctcgccgggccgggcaccatcgccacggcaatgaacttctcgacgggcgagaattttatggagatggccgtgaccatcgtagtgttcggcgtgctgtgtctcatcacctacgtgctgttcgtttcgggcgaaaagttcgtcacctacattggagccagcgcgttgggagtcattacccgaatgatgggcctgatcctcgccgtcatcggagcgcagatggtgattgccggaatccacggagcgttcgggctgggtgctgggtga

SEQ ID NO: 61782 - protein, 213 aa, Chlorobium tepidum TLS
MANLWIHALTVFMGFFAIMNPIANVPIFLSLTEGDDKKTTAMVASRALLLAFLIVTIFSVAGKLIFDLFGITLPAFQITGGLLVFLIGFHMLQGDQSSVQHPSETGKKKSPEAALSVTVSPLAMPILAGPGTIATAMNFSTGENFMEMAVTIVVFGVLCLITYVLFVSGEKFVTYIGASALGVITRMMGLILAVIGAQMVIAGIHGAFGLGAG

SEQ ID NO: 61783 - DNA, 714 bp, Yersinia pestis KIM
  CDS (1)..(714): transl_table=11
ttgattgatgttatttgcggagtaggatccatgctaagtattttcgaattatttaaagccgttggcttaggattagtattgctgctgccattggcaaatccactgacgacggtggccttattgctagggttatccggtaatatgacccgcgaggagcgtaataatcagtcgttaatggcggcaatttatgtcttctttatcatgactatcgcgttttatgccggtcagatcgtcatgagtacatttggtatctctattcccggtctgcgtatagctggtggcttaattgtcgcgtttattggttttcgtatgctctttccgcaacaatcggctgaagatactcaactggaggcaaaatcccaggatttaaaaaaacgtaaatccatcaatattgcctttgtaccgctggcaatgccgagtactgcggggccaggtacgattgcaatgatcatcagttccgctgcaacaatgaaagaccagacaatgtttgcaccatgggtattggccatcgcccccgtaatcacattcttatgcgtttcgttgattttgtggggatctttactcagctcaggagcgattatgcgctgggttggtaaaagcggtattgaagcaatttcacgtttgatgggattcttgctggtatgtatgggtgtgcaatttattattaatggcgtcttagagttgatctcaacttatcaacctgtcatggcttaa

SEQ ID NO: 61784 - protein, 237 aa, Yersinia pestis KIM
MIDVICGVGSMLSIFELFKAVGLGLVLLLPLANPLTTVALLLGLSGNMTREERNNQSLMAAIYVFFIMTIAFYAGQIVMSTFGISIPGLRIAGGLIVAFIGFRMLFPQQSAEDTQLEAKSQDLKKRKSINIAFVPLAMPSTAGPGTIAMIISSAATMKDQTMFAPWVLAIAPVITFLCVSLILWGSLLSSGAIMRWVGKSGIEAISRLMGFLLVCMGVQFIINGVLELISTYQPVMA

SEQ ID NO: 61785 - DNA, 630 bp, Thermosynechococcus elongatus BP-1
  CDS (1)..(630): transl_table=11
atgcagcccctgttgacgtttctcctgggcacaatcgcggctctatttcccattaccgatcccattgccgccattcctgtgttctatgccctgacggccaagcaatcccgtcggcagcggctcaagcaggctaggcaagtagcaatcaatgtggccgctgtacttacagttttcttctttatggggaagttgatcctagccttctttggtatttctctgcccgttgtccgcattgccggtggcttaatcgttgggcatacggcttggcagatggtgacttctcaggatcgcttaacgcaacaggagcacatagaagcggcagataaggtggatatttccttaacgccaatggccattcccctcattagtgggccgggggcgatcgccatgaccattagcctctctactcgctgccatacttggctagaatatttgggagcatggctggggattttgttgctgagtgccatggtttacttgttcctgatcttaggggaacccctcagtcgagcttggggaattaccgatcgcggcgccttgacaagactgttgggctttttaattctggcgatcgccgtccagttcattgccgatggcagtctggcgcttctgcagaccctgttgagttag

SEQ ID NO: 61786 - protein, 209 aa, Thermosynechococcus elongatus BP-1
MQPLLTFLLGTIAALFPITDPIAAIPVFYALTAKQSRRQRLKQARQVAINVAAVLTVFFFMGKLILAFFGISLPVVRIAGGLIVGHTAWQMVTSQDRLTQQEHIEAADKVDISLTPMAIPLISGPGAIAMTISLSTRCHTWLEYLGAWLGILLLSAMVYLFLILGEPLSRAWGITDRGALTRLLGFLILAIAVQFIADGSLALLQTLLS

SEQ ID NO: 61787 - DNA, 630 bp, Brucella suis 1330
  CDS (1)..(630): transl_table=11
atggggttctacgatacggttttcagcgctttcgtgaccctcctcgtcacaatcgatccgccaggtctggcgccgctgtttctggccatcacccccggcatgagccgccataagcgcggacaggttgcgcttcgcgcctcgatcatcagtttcatcgtcatggcgctttttgcaattgcgggcgcgcaaattctcggcatgttcggcataaccatcggcgccttccgggtggccggtggcttgctcctgttctggatcgcatttgaaatgattttcgagaagcgcacggaacgtaaggaaaaaagcgccgaggttgccataacccgggatcatatccgcaatatagccgccttcccgctcgccattcctctgattgccgggccgggcgccatttcggctatcgtgctgacatcggaatcgtttcctagtgttggttcgcgtgccgcacttctcggcgttattttcgtttgcctgctgattacctattttgtgctgctgctcgcagaacgggtcgatcgttttctgggggaaacaggccgctccattctcacccgccttctcggcgtcatcctggcagcacttgccgtgcagttcgtcgccgatggtatcaagacactcatcattggttag

SEQ ID NO: 61788 - protein, 209 aa, Brucella suis 1330
MGFYDTVFSAFVTLLVTIDPPGLAPLFLAITPGMSRHKRGQVALRASIISFIVMALFAIAGAQILGMFGITIGAFRVAGGLLLFWIAFEMIFEKRTERKEKSAEVAITRDHIRNIAAFPLAIPLIAGPGAISAIVLTSESFPSVGSRAALLGVIFVCLLITYFVLLLAERVDRFLGETGRSILTRLLGVILAALAVQFVADGIKTLIIG

SEQ ID NO: 61789 - DNA, 597 bp, Pseudomonas putida KT2440
  CDS (1)..(597): transl_table=11
atgctccatgagttgttcagcgtctacctgaaaatgctcgtgctctacagcccgttcttcgtgctgtcgtgtttcatcagcctgacccgtggccactccagcaaggagcgcaagcaactggcctggaaggtcgcgttcgcagccttggtcgccagcgtgttgctgtacctgttcgggcgggcgatcttcggaattttcggcatcaccgccgatgccttccgcatcggtgctggcagcgtgctgttcatttcggccctgggcatggcccagggcaagccggcggtacaggcagacaacgttcagcaggatgtgaccatcgtaccgctgaccattccgctgaccgttggccccggcaccatcggtgccctgctggtgatgggggtgagccagccgcactgggatgaaaaactgctggccatcgtcagcattgccctggccagctttaccgtaggcctggtgctgtatctatcgcacggtatcgagcgcctgctcggcgaccagggtttgcaaatcgtcagccgcctgatgggcctattcgtctgcgccctggcagcacagatcatctttaccgggattcgcggttacctgctgccctag

SEQ ID NO: 61790 - protein, 198 aa, Pseudomonas putida KT2440
MLHELFSVYLKMLVLYSPFFVLSCFISLTRGHSSKERKQLAWKVAFAALVASVLLYLFGRAIFGIFGITADAFRIGAGSVLFISALGMAQGKPAVQADNVQQDVTIVPLTIPLTVGPGTIGALLVMGVSQPHWDEKLLAIVSIALASFTVGLVLYLSHGIERLLGDQGLQIVSRLMGLFVCALAAQIIFTGIRGYLLP

SEQ ID NO: 61791 - DNA, 624 bp, Vibrio vulnificus CMCP6
  CDS (1)..(624): transl_table=11
ttgctcagtattctcatcactcaatttgttgttctttgggccgtgattgaccctgttggttcagtgcctgtttatctttcgcaaacccaacatctgaccgccaagcagcgtcgtctcgtcgcgctcaaagcggttggtatctcagcaggggtattgctgtttttcttaatcgccgggcaaatgctgcttgaagcgatgcagatcccactacccgcctttcaggctgcgggtgggctggttttattgctattcgcactgagtatgattttcggtgaaagtaaacctgagcaagagcagaagctaagcgaagagttggataaatccgccctcgcagatttggccgtctacccgctggccattccttccatcgcgtcacctggcgccatgatggcggtggtgatgctgacagacaaccatcgctattcctttgctgatcaagcgattaccgcgggcgtcatgttggcggtcttgctgatcacactggttctgttactcggagccaacacgattcaaaaatggattggcaatgttggcgctgccatcatcagccgtgtgatgggtttgatcctcgccgccgtcgcactcaacaatttgctgcaaggaattaaagatttttacctgtag

SEQ ID NO: 61792 - protein, 207 aa, Vibrio vulnificus CMCP6
MLSILITQFVVLWAVIDPVGSVPVYLSQTQHLTAKQRRLVALKAVGISAGVLLFFLIAGQMLLEAMQIPLPAFQAAGGLVLLLFALSMIFGESKPEQEQKLSEELDKSALADLAVYPLAIPSIASPGAMMAVVMLTDNHRYSFADQAITAGVMLAVLLITLVLLLGANTIQKWIGNVGAAIISRVMGLILAAVALNNLLQGIKDFYL

SEQ ID NO: 61793 - DNA, 639 bp, Vibrio vulnificus CMCP6
  CDS (1)..(639): transl_table=11
atgcaaacgttcgaagtcgctatctttttgcagtttttcttaggcttagtggccgcagtaaaccctgtgggcatcatgccagtatttgtgtcgcttacaggccacatgacaccggaagaaaaatacaaaaccgcacttaccgccaatgtggcggtggcgattattctgaccgtttcattgctagccggtcagatgctactcgacatgtttagtatttctctcgactccttccgcgttgccggtggtttactactacttagcatcgccttttcgatgatgagcggtaagttgggtgaagataaacaaaacaaacaagagcagtcggaatacgtgagtcgcgaacaaattggtgttgtgcctttggcaatgcctttaatggcaggccctggtgcgattagctcgaccatcgtttatggctctcgctacccaagtatgttcgataccatgggtattgtgatcactatagttgcctttagcttttgctcatggctgctatttcgctcagcgccaattatcgttcgctttttagggcaaacaggcatcaacgtgatcacccgtattatgggtcttatcttgggtgcactcggcatcgagttcatcgccaatggcctgcgtaatctcttccccggattagcctga

SEQ ID NO: 61794 - protein, 212 aa, Vibrio vulnificus CMCP6
MQTFEVAIFLQFFLGLVAAVNPVGIMPVFVSLTGHMTPEEKYKTALTANVAVAIILTVSLLAGQMLLDMFSISLDSFRVAGGLLLLSIAFSMMSGKLGEDKQNKQEQSEYVSREQIGVVPLAMPLMAGPGAISSTIVYGSRYPSMFDTMGIVITIVAFSFCSWLLFRSAPIIVRFLGQTGINVITRIMGLILGALGIEFIANGLRNLFPGLA

SEQ ID NO: 61795 - DNA, 627 bp, Bradyrhizobium japonicum USDA 110
  CDS (1)..(627): transl_table=11
atgctcgacttcgccctgtccgccttcgtgacgctgctgctggtggtcgatcccgtcggccttgcgccggccttcctggccgcgaccgggggcatgcccgacacggtcaagcgcacgatcgcgctgcgcgcgccgctgatcgcagcctcgatcctggtggtgatcgcgctggtcggaaactggctgttgcgccagctcgggatcggcatccccgcgttccagatcgcgggcgggctgctgctgttcggcgtctcctaccagatgatcttcggcgaccgcccgcatcgcgaggcccgcgaggccgacaaggcgacctcggagcacgcgtccgatgtcgcggtgtttccgctggcgatccccatgatggccggccccggtgcgatcgcgaccacattgctgttgacgggcgatgccggctacggggcgcggcgcgcgatcatcatcgcggtcgtcctctcggtgtgcctgctctgcatgctgtgctttctgtccgcgagcctgatcgcccgcaccctcgggcgcaccggaaatgccgtgctttcgcgcgtgctcggcatgctgctcgccgcctattccgtgcagttcgtgatcaacggcatcgcggccgtccgggcgagcctgccgtag

SEQ ID NO: 61796 - protein, 208 aa, Bradyrhizobium japonicum USDA 110
MLDFALSAFVTLLLVVDPVGLAPAFLAATGGMPDTVKRTIALRAPLIAASILVVIALVGNWLLRQLGIGIPAFQIAGGLLLFGVSYQMIFGDRPHREAREADKATSEHASDVAVFPLAIPMMAGPGAIATTLLLTGDAGYGARRAIIIAVVLSVCLLCMLCFLSASLIARTLGRTGNAVLSRVLGMLLAAYSVQFVINGIAAVRASLP

SEQ ID NO: 61797 - DNA, 597 bp, Xylella fastidiosa Temecula1
  CDS (1)..(597): transl_table=11
atgacgattatgtctgctgcgttgttactgttcctgattcttgacccattgggcaacatcccggtgtttctcagcgtactcaaaccattgcctgcccaacggcaacgcgtggtactggcgcgtgaattgctgattgcgctgatggtactcatgggtttcctatgggggggcaaatacgtcttggagttgatgcatttgcgacaggagtcggtatcgattgccggaggcatcgtcttattcctcattggtatccggatgatctttcctcggccagaaggattgatgggggaaatccctgagggagagccttttatcgtgccattagcaatcccattggttgctggtccatcgggcatggctgcagtgatgctgatggggagcaacgagccggcccggttgtgggattggaactgtgcgttgttgctggcttggggcggagcagcagcgatcttattttctgcgacgttcttgtacaaactgttgggccatcgtgtgttgacagcattggagcgcttaatgggaatgttgttggtggcaatctcggtgcaaatgtttatggacggaatcagcacatacctcaaagcgtcaatgcattga

SEQ ID NO: 61798 - protein, 198 aa, Xylella fastidiosa Temecula1
MTIMSAALLLFLILDPLGNIPVFLSVLKPLPAQRQRVVLARELLIALMVLMGFLWGGKYVLELMHLRQESVSIAGGIVLFLIGIRMIFPRPEGLMGEIPEGEPFIVPLAIPLVAGPSGMAAVMLMGSNEPARLWDWNCALLLAWGGAAAILFSATFLYKLLGHRVLTALERLMGMLLVAISVQMFMDGISTYLKASMH

SEQ ID NO: 61799 - DNA, 597 bp, Pseudomonas syringae pv. tomato str. DC3000
  CDS (1)..(597): transl_table=11
atgcttcacgtgttgttcagcgtctatctgaaaatgctggtgctttacagcccgtttttcgttctttcctgcttcatcagcctcacgcgtggtcactcgcgcaaggaacagcggcgcctggcctggaaggtggcgttggcgacgctggtgtccagtgtgctgctttatctgttcggccgattcattttcgatattttcgggatcaccgtggatgcgttccggattggtgccggcagtgtgctgttcatttcggcactgggcatggcccagggcaagtctgcggtccagaccgataacgtccagcaggacgtcaccattgttccgttgaccatcccgcttaccgtaggccccggcaccatcggcgcgctgctggtcatgggcgtcagtcagccgcattgggacgacaagctcacggccatcctgagtatcgccctggccagcctgacagtcggggtggtgctatatctcgccaaccgtatcgaacgtattctcggtgatcagggcctgcagattgtcagccgcttgatggggttgttcgtctgtgcgctggctgcgcaaatcatcttcaccggcatcaggggctatctgctgccctga

SEQ ID NO: 61800 - protein, 198 aa, Pseudomonas syringae pv. tomato str. DC3000
MLHVLFSVYLKMLVLYSPFFVLSCFISLTRGHSRKEQRRLAWKVALATLVSSVLLYLFGRFIFDIFGITVDAFRIGAGSVLFISALGMAQGKSAVQTDNVQQDVTIVPLTIPLTVGPGTIGALLVMGVSQPHWDDKLTAILSIALASLTVGVVLYLANRIERILGDQGLQIVSRLMGLFVCALAAQIIFTGIRGYLLP

SEQ ID NO: 61801 - DNA, 639 bp, Vibrio parahaemolyticus RIMD 2210633
  CDS (1)..(639): transl_table=11
atgcagactttagagctagccattttcctgcagtttttcttggggttggttgccgccgttaaccctgtaggcatcatgcctgttttcgtgtctttaagcggacatatgacaccagaagaaaagatcaaaaccgcgacaacagccaatgtggcagtggccgtgatcctgatcatttccctgcttgcaggtcagttactgttggatatgttcagtatttcactggattcattccgagtggcaggtggcttgctgctgttaagcatcgccttttcgatgatgagcggtaagctcggtgaggataagcagaacaaacaagaaaaatctgaatacgttagccgcgaacagatcggcgttgtaccactagcgatgccactaatggctggtcctggtgcaatcagctcaacaatcgtttatggcgcgcgttacccaagtatgttcgataccgtgggcatcgttatcacgattggtctgttttgcctttgttcttggttgctatttcgttcggcacctttgatcgttcgtttcttgggtcaaacaggcatcaacgtgatcacacgtatcatgggtttgattcttggtgcgctaggcatcgagtttattgcaaacggcttacgtaacttgttccctggattagcctga

SEQ ID NO: 61802 - protein, 212 aa, Vibrio parahaemolyticus RIMD 2210633
MQTLELAIFLQFFLGLVAAVNPVGIMPVFVSLSGHMTPEEKIKTATTANVAVAVILIISLLAGQLLLDMFSISLDSFRVAGGLLLLSIAFSMMSGKLGEDKQNKQEKSEYVSREQIGVVPLAMPLMAGPGAISSTIVYGARYPSMFDTVGIVITIGLFCLCSWLLFRSAPLIVRFLGQTGINVITRIMGLILGALGIEFIANGLRNLFPGLA

SEQ ID NO: 61803 - DNA, 585 bp, Vibrio parahaemolyticus RIMD 2210633
  CDS (1)..(585): transl_table=11
atggatattctttctgcagcgaccatgctgtttcttatcatggaccctcttggcaatttgcccattgtgttgtccattcttaaacacatcgatccaaaacgtcgtcgtaaggtgctcatccgcgagctgatttttgccttattgattttgatgttgttcttgttcgccggacaaagcatcctgagttttttgcacgtacagccggaaaccttgagtatctctggtggcatcatcttatttatcatcgcaattaagatgattttcccaagtgcagggagcatcaccgggttagcggcgggtgaagagccgtttattgtgccaatggcaattccaatgattgctggtccatcagtgattgccgcgttgcttctgctttcttcccagcatcccgacaaactggtcgaactctcagcgtcggtggtgattgcgtggggcgcgaccttctttattttgatgttctatggctttttcaatcgtctgttgggcgaacgcggtctgaaagcggtggaacgcttaatgggcttgttattggtgatgatttccacccagatgttcctagatggtgtgaaaagctatttgggataa

SEQ ID NO: 61804 - protein, 194 aa, Vibrio parahaemolyticus RIMD 2210633
MDILSAATMLFLIMDPLGNLPIVLSILKHIDPKRRRKVLIRELIFALLILMLFLFAGQSILSFLHVQPETLSISGGIILFIIAIKMIFPSAGSITGLAAGEEPFIVPMAIPMIAGPSVIAALLLLSSQHPDKLVELSASVVIAWGATFFILMFYGFFNRLLGERGLKAVERLMGLLLVMISTQMFLDGVKSYLG

SEQ ID NO: 61805 - DNA, 642 bp, Vibrio parahaemolyticus RIMD 2210633
  CDS (1)..(642): transl_table=11
atgaaagagctgatacttcataccgtcacagtgttcatggggttctttgcgatcatgaatcccattgccaatattcctatctttttgagcctcacggcggatgaagataaagagaccgttcgatcaatagcacttcgttcggtgtttattgcttttgtcatcgtggctatttttgccatcgcaggaaaagtgattttcgacctctttggtatcaccctttatgcgctgcgcattactgggggaatcttagtcttcatgattggttttaatatgttgcaaggagattccacgcatcaaaaaaccaaggaaaaagcgtattcgcctgcgcagcaacaggcagccttgagtattgctgtatcaccgttggcgatgccaatactcgcggggccgggtacgattgcgacagcgatgaactttgcgaccacaggtggttttgaccaaaccattattaccatcgtttcatttgcggttctttgtatcatcacctacatattgttcctgtttggggacaaactggtcaaagcggtagggcctagtgctttgaatgtggtgacaaaaatgatgggcctgattttggcagttatcggcacccaaatgttcatcgatggtgctggcgaagcctacaaaaccgtatttgcctaa

SEQ ID NO: 61806 - protein, 213 aa, Vibrio parahaemolyticus RIMD 2210633
MKELILHTVTVFMGFFAIMNPIANIPIFLSLTADEDKETVRSIALRSVFIAFVIVAIFAIAGKVIFDLFGITLYALRITGGILVFMIGFNMLQGDSTHQKTKEKAYSPAQQQAALSIAVSPLAMPILAGPGTIATAMNFATTGGFDQTIITIVSFAVLCIITYILFLFGDKLVKAVGPSALNVVTKMMGLILAVIGTQMFIDGAGEAYKTVFA

SEQ ID NO: 61807 - DNA, 726 bp, Bacteroides thetaiotaomicron VPI-5482
  CDS (1)..(726): transl_table=11
atgcaaaatttaatattgcagaatgctatctggtatgttttttgcgatataataatcgataataaactatatgtcatcatggatatatttgtatatttaacattgtgtttcacttcgctattcaccttgatggaccctcttggagtgatgccggtattcctgcaaatgactgatggaatggatacgaaagaacgcagatatatcgccttgaaagcatgtaccattgcatttatcatattagtcctttttacattatcgggcaggtttctgtttcattttttcggcatctcaacaaacggattccggattgtgggaggtatcatcatctttaaaatcggatatgatatgttgcaggcacattttacccatgtgaaactgaatgaaactgaacgaaaagaatattccaaagatataaccatcacacctcttgccattccgatgttatgcggtccgggagcgatttccagtggaataacattgatggaagatgcttcggaatatactttcaaaatagtattgcttggcgtaatcgctttggtctgcattctttccttctttattctgtgcgcgtccacccagcttttaaaaatcttgggagagacgggaaacaatgtgatgatgagactgatgggacttattctaatggtgatcgccgtggaatgttttatcagcgggatacgtccggtattaattgaaatcttgaaacaagcccatgcttgttcttaa

SEQ ID NO: 61808 - protein, 241 aa, Bacteroides thetaiotaomicron VPI-5482
MQNLILQNAIWYVFCDIIIDNKLYVIMDIFVYLTLCFTSLFTLMDPLGVMPVFLQMTDGMDTKERRYIALKACTIAFIILVLFTLSGRFLFHFFGISTNGFRIVGGIIIFKIGYDMLQAHFTHVKLNETERKEYSKDITITPLAIPMLCGPGAISSGITLMEDASEYTFKIVLLGVIALVCILSFFILCASTQLLKILGETGNNVMMRLMGLILMVIAVECFISGIRPVLIEILKQAHACS

SEQ ID NO: 61809 - DNA, 660 bp, Bacteroides thetaiotaomicron VPI-5482
  CDS (1)..(660): transl_table=11
atggatagtacgcttctgccatttgccttactttgttttacttcgttctttacgctgaccaatcctttggggacaatgccggtctttctgaccatgacacacggaatgacagataaggagcgacagactattgtgcgccgtgccaccatcgtgtcgtttataacgttgatggtgtttgtctttgccgggcagttccttttcaaattcttcggtatctctaccaatggtttccgtattgccggcggagtaattatctttaagattggttttgatatgcttcaggcacggtatactccgatgaaacttaaagacgaagagattaaaacctatgccgatgacatctccattactcctcttggaattccgatgttgtgtggtcccggggctatcgctaacgctatcgttttgatgcaggactctcatacttacgccatgaaaggtatattgatcggaacaatcgctttgatttatctgttgacgttcttcattctccgtgcttccacccgactggtgaaagtactgggagagaccggaaataatgtgatgatgcgtttgatgggattgattctgatggtgattgcagtggaatgctttgtgagtggagcgaagccgatattggcggatattgtgagagaagggctgagcggtatctgcaagtag

SEQ ID NO: 61810 - protein, 219 aa, Bacteroides thetaiotaomicron VPI-5482
MDSTLLPFALLCFTSFFTLTNPLGTMPVFLTMTHGMTDKERQTIVRRATIVSFITLMVFVFAGQFLFKFFGISTNGFRIAGGVIIFKIGFDMLQARYTPMKLKDEEIKTYADDISITPLGIPMLCGPGAIANAIVLMQDSHTYAMKGILIGTIALIYLLTFFILRASTRLVKVLGETGNNVMMRLMGLILMVIAVECFVSGAKPILADIVREGLSGICK

SEQ ID NO: 61811 - DNA, 606 bp, Streptomyces avermitilis MA-4680
  CDS (1)..(606): transl_table=11
gtgttcgacgtcgccgtcttcggctcactcttcctcaccctcttcgtgatcatggatccccccgggatcaccccgatcttcctcgcgctcaccgccggccggcccgccaaggtgcagaagcggatggcgttccaggccgtctgcgtggccggtggagtcatcaccgtcttcgggttgctcgggcaccagatcctcgactacctgcatgtctccgtgcccgcgctgatgatcgccggcggactgctgctcctgctcatcgccctcgacctgctgaccggcaagacggacgagcccaagcagaccaaggacgtcaacgtcgccctcgtaccgctgggcatgccgctgctcgccggccccggcgcgatcgtctccgtgatcctggccgtccagaaggccggcagtgtggcgacccaggtgtccgtgtgggccgcgatcctcgcgatccatgtcgtgctgtgggtggtgatgcggtactcgctgctgatcatccgtgtcatcaaggacggcggcgtcgtgctggtgacgcggctcgcgggcatgatgctctccgcgatcgccgtgcagcagatcatcaacggggtcacccaggtgattcgggggagctga

SEQ ID NO: 61812 - protein, 201 aa, Streptomyces avermitilis MA-4680
MFDVAVFGSLFLTLFVIMDPPGITPIFLALTAGRPAKVQKRMAFQAVCVAGGVITVFGLLGHQILDYLHVSVPALMIAGGLLLLLIALDLLTGKTDEPKQTKDVNVALVPLGMPLLAGPGAIVSVILAVQKAGSVATQVSVWAAILAIHVVLWVVMRYSLLIIRVIKDGGVVLVTRLAGMMLSAIAVQQIINGVTQVIRGS

SEQ ID NO: 61813 - DNA, 675 bp, Wigglesworthia glossinidia endosymbiont of Glossina brevipalpis
  CDS (1)..(675): transl_table=11
gtgtttatgtttgaattatttaaagcggttggtttaggtttaatggtgcttctgccgttagtaaatccattgacaacagtagctttgtttttaagcttaagcaaaaatatgacatcagatgaaagaaaccaacaagcaagaatggcatcaatatatgttttttctattatgatggttactttttacgctggaacagttgtgatgagtactttcggaatttctataccaggcttaagaattgctggcggtttaattgtatcctttataggatttagaatgttattttctatatcttcagaagaagagcctaattttaaaaagggacaaattataaaaaattttaaaaataaaacagcaaatattgcttttattccattagcaatgccaagtacagctggccctggaacaattgctatgatcataagttgggtttctactgtaaatgaagatgtttatttttcttcttggattacagacctagccccgattttagtatttttaaccattagcataatagtttggattgctttgcgtagttcaagtgctattatgcatgtaataggttctagcggaattgaagctatttctagacttatgggtttcttgttggtttgcatgggagttcaatttgttattaatggagtgatagaagtaatttcagattatggtgtttaa

SEQ ID NO: 61814 - protein, 224 aa, Wigglesworthia glossinidia endosymbiont of Glossina brevipalpis
MFMFELFKAVGLGLMVLLPLVNPLTTVALFLSLSKNMTSDERNQQARMASIYVFSIMMVTFYAGTVVMSTFGISIPGLRIAGGLIVSFIGFRMLFSISSEEEPNFKKGQIIKNFKNKTANIAFIPLAMPSTAGPGTIAMIISWVSTVNEDVYFSSWITDLAPILVFLTISIIVWIALRSSSAIMHVIGSSGIEAISRLMGFLLVCMGVQFVINGVIEVISDYGV

SEQ ID NO: 61815 - DNA, 594 bp, Wigglesworthia glossinidia endosymbiont of Glossina brevipalpis
  CDS (1)..(594): transl_table=11
atggacaaatatttatcaaatataattttattattttttataatagacccactaggaaatttgcctgttattttatccatgttgtcttcttttgaagctaaaaaaaaacgtcttataatattaagagaaatgttaattgcattaattttaatgattatatttttattttatggagaaaaagtattatttatatttaatataaaaatggaaataatttctatttctggaggaatcattttatttttgatgtctattaaaatgatttttaaagaaaatgagaataatgttattaaaaaagaaaagaaagcgccatttatagttccaattgcaattccattgctagcagggccaggggttttttcaactttgatatttttatctgataaaaatgtcaataaatcttatgaaatattattatctttaataatagcatggactttttctttaataatttttttattttcaactataatttctaatttttttaatgaaaaaagatctaatgaaatagaaagactaatgggtttaattttaataatgatatctgtacaaatgatatttgaaggcgtaaaaaattattttttgattaactaa

SEQ ID NO: 61816 - protein, 197 aa, Wigglesworthia glossinidia endosymbiont of Glossina brevipalpis
MDKYLSNIILLFFIIDPLGNLPVILSMLSSFEAKKKRLIILREMLIALILMIIFLFYGEKVLFIFNIKMEIISISGGIILFLMSIKMIFKENENNVIKKEKKAPFIVPIAIPLLAGPGVFSTLIFLSDKNVNKSYEILLSLIIAWTFSLIIFLFSTIISNFFNEKRSNEIERLMGLILIMISVQMIFEGVKNYFLIN

SEQ ID NO: 61817 - DNA, 648 bp, Haemophilus ducreyi 35000HP
  CDS (1)..(648): transl_table=11
gtggacattcttgttaattttgccatttatcttcaattctttataggattgtttgcaatcgtcaatccatttggatccttacccattttttttacgatgacggctaatcagtatgaaactgagcgtaatcatactagtttaatagcagcctcttcaatcggcattattttattagtcagtttgttttttggtaaattaattttagatacatttagcatttcattagactcttttcgtgtagcgggtggctttttgatcgcaagcattgcgatgacgatgattagtggcaaactgggtgagcataaacaaaataaagaagaaaaaaatgctgatgtcagtgaatatgagaatattgcagttgtgccattagcgatgccgattatggcaggaccgggtgccattggttcaactatcgtgtggggaactcgttataataatgtagtagattatgttggctttagccttgcgattctgctttttgcattagtgtgttatttgctttttcgtttttcagcgccattggtgaaaaaactcggtaaaacaggctctaatgtagtgacgcgtattatggggttaattctaatggcgttaggtattgaaattattgtaacgggattaggaaatctatttcctggcttggttaaatag

SEQ ID NO: 61818 - protein, 215 aa, Haemophilus ducreyi 35000HP
MDILVNFAIYLQFFIGLFAIVNPFGSLPIFFTMTANQYETERNHTSLIAASSIGIILLVSLFFGKLILDTFSISLDSFRVAGGFLIASIAMTMISGKLGEHKQNKEEKNADVSEYENIAVVPLAMPIMAGPGAIGSTIVWGTRYNNVVDYVGFSLAILLFALVCYLLFRFSAPLVKKLGKTGSNVVTRIMGLILMALGIEIIVTGLGNLFPGLVK

SEQ ID NO: 61819 - DNA, 594 bp, Candidatus Blochmannia floridanus
  CDS (1)..(594): transl_table=11
atgaacgaaatgatatccgctaccattctattatttttaataatggatcctatcggaaatttaccaatctttatgtcaatattaaagaacctgaatcctaacagacgtcaaattattatcattagagaaatgataattgctttattattaatgttaagctttttattcattggagaacatattttacaatttcttaatttacaaacagaaacagtatctatctctgggggcattgtcttatttttaattgctataaaaatgatttttcctaatcaagaaggaaatacctctggattcgcaaatgaagaagaacctttcttagtaccacttgctatcccattagtagcaggaccatcaattttagcaacattactattattacaccaccaatatcctaatgataccaatttattaattgttgcattaataattgcttggggtttctctgtattaattcttatgctatcaaacttattctctcgtttattaggtaataaaggcattaatgcattagaacgattaatgggtctgttattaataatgatttctactcaaatgttgcttgatggtatacgtaactacttacatacataa

SEQ ID NO: 61820 - protein, 197 aa, Candidatus Blochmannia floridanus
MNEMISATILLFLIMDPIGNLPIFMSILKNLNPNRRQIIIIREMIIALLLMLSFLFIGEHILQFLNLQTETVSISGGIVLFLIAIKMIFPNQEGNTSGFANEEEPFLVPLAIPLVAGPSILATLLLLHHQYPNDTNLLIVALIIAWGFSVLILMLSNLFSRLLGNKGINALERLMGLLLIMISTQMLLDGIRNYLHT

SEQ ID NO: 61821 - DNA, 660 bp, Bordetella pertussis Tohama I
  CDS (1)..(660): transl_table=11
atgggtaatttcgtgtcggagatcctgtttggctacacgacgctcatcagcatcatcaacccgctgggcctggccttcgtcttcctgaacaagaccgccacgctcacgcccgaggaacgcgcccggctggcctacagcgtggcgctcaacgcgatgttcctgctgctggtgacgtttttcatcggcgcctacatcctgcacttgttcggcatttcgctggaggcgctgcgcgtggcgggcggcctgtcggtggccgtgtccggctgggccatgctcaacgccccggagccgcacccgcaggcccaggcgctgcagcagatcacgcccagcatggcgcgcgagatggtgttcttcccgctcaccatgcccctgaccaccggcccgggcacggtcgcggcgaccatcgccctgagcgccaaccgcaccaacgaattgcgcgacttcctgctggccagcctggcgtcggtcctgatcaccatggcggtagccgccacggtatatctcgcctatagccgagccggcacgctggcgcgctacctgggcgcggacggcacccgcatcgtcacccgggtatcggcgttcctgctgctgtgcgtgggcgtgcagatcatgctgaccgggctggagcaattcctgcgtccgatcatcggccacggctga

SEQ ID NO: 61822 - protein, 219 aa, Bordetella pertussis Tohama I
MGNFVSEILFGYTTLISIINPLGLAFVFLNKTATLTPEERARLAYSVALNAMFLLLVTFFIGAYILHLFGISLEALRVAGGLSVAVSGWAMLNAPEPHPQAQALQQITPSMAREMVFFPLTMPLTTGPGTVAATIALSANRTNELRDFLLASLASVLITMAVAATVYLAYSRAGTLARYLGADGTRIVTRVSAFLLLCVGVQIMLTGLEQFLRPIIGHG

SEQ ID NO: 61823 - DNA, 741 bp, Bordetella parapertussis 12822
  CDS (1)..(741): transl_table=11
atgctgcgtggccggcgccggcttgcgtggcggcgcaaaagcgcggacactggctgcgccccgatggccgcgaggaagaacatgggtaatttcgtgtcggagatcctgtttggctacacgacgctcatcagcatcatcaacccgctgggcctggccttcgtcttcctgaacaagaccgccacgctcacgcccgaggaacgcgcccggctggcctacagcgtggcgctcaacgcaatgttcctgctgctggtgacgtttttcatcggcgcctacatcctgcacttgttcggcatttcgctggaggcgctgcgcgtggcgggcggcctgtcggtggccgtgtccggctgggccatgctcaacgccccggagccgcacccgcaggcccaggcgctgcagcagatcacgcccagcatggcgcgcgagatggtgttcttcccgctcaccatgcccctgaccacctgcccgggcacggtcgcggcgaccatcgccctgagcgccaaccgcaccaacgaattgcgcgacttcctgctggccagcctggcgtcggtcctgatcaccatggcggtagccgccacggtatatctcgcctatagccgagccggcacgctggcgcgctacctgggcgcggacggcacccgcatcgtcacccgggtatcggcgttcctgctgctgtgcgtgggcgtgcagatcatgctgaccgggctggagcaattcctgcgtccgatcatcggccacggctga

SEQ ID NO: 61824 - protein, 246 aa, Bordetella parapertussis 12822
MLRGRRRLAWRRKSADTGCAPMAARKNMGNFVSEILFGYTTLISIINPLGLAFVFLNKTATLTPEERARLAYSVALNAMFLLLVTFFIGAYILHLFGISLEALRVAGGLSVAVSGWAMLNAPEPHPQAQALQQITPSMAREMVFFPLTMPLTTCPGTVAATIALSANRTNELRDFLLASLASVLITMAVAATVYLAYSRAGTLARYLGADGTRIVTRVSAFLLLCVGVQIMLTGLEQFLRPIIGHG

SEQ ID NO: 61825 - DNA, 702 bp, Bordetella bronchiseptica RB50
  CDS (1)..(702): transl_table=11
gtgatcatcgaatacctgcaactggtcggcctcggcctggtcaccatgctgcccgtggccaacccgctgaccagcaccacgctgctgctggcgctgggcagcggcttcacgcgcgacgagcgcaaccgccagatcggccgcgccaccgtatatgtggccgccatcatcctggcctcgttctatgccggcaacgccatcatcagcagcttcggcatttccattcccggcctgcgcatcgccggcggactgatcgtcgcctacatcggcttcaccatgctgttcccggccacctcgcagaacgaggcgcaggcgcaagtcgagatggcgccggacgacccgcacatccaggtcccgggcgccgcgcacaccggcccgcgcccgcgcgacatctcgttcgtgccgctggcgctgccgggcaccgccggccccggcacgatcgccctgatcatcagctccgcctcgaccctgcacagccatggcggcatcaccctcatccaccatttcgccgtcatcaccgtcacgctcctgctggcgctgctgttctgggcctgcctgcgcagcgccgagcgggtcatgcgcatgctgggccagtccggcatcgacgccatctcgcgcgtcatgggctttctgctcatctgcatgggcgtgcaattcatcatcgacggcgtgttcgagctgatccgccatccgcccggcgcctga

SEQ ID NO: 61826 - protein, 233 aa, Bordetella bronchiseptica RB50
MIIEYLQLVGLGLVTMLPVANPLTSTTLLLALGSGFTRDERNRQIGRATVYVAAIILASFYAGNAIISSFGISIPGLRIAGGLIVAYIGFTMLFPATSQNEAQAQVEMAPDDPHIQVPGAAHTGPRPRDISFVPLALPGTAGPGTIALIISSASTLHSHGGITLIHHFAVITVTLLLALLFWACLRSAERVMRMLGQSGIDAISRVMGFLLICMGVQFIIDGVFELIRHPPGA

SEQ ID NO: 61827 - DNA, 630 bp, Chromobacterium violaceum ATCC 12472
  CDS (1)..(630): transl_table=11
atggaaatcgaaatcgcaaaaatcttcatcgcgctgctggtgctggtcaatccgcttggcgccatccccatcttcatcagcttgacgcccaacgccggccaggaggaaaggcggaaaatcgccaagaccaccgccatcgccgtcgccatcgtgctcagcctgttcgcggtggtgggcgagacgctgctgcgctttctgggcatcagcataggctcgttccaagtcggcggcggcatcctggtgatgctgatcgccatcgcgctgatgaacgccaagcccggtccgaccaagaccaccaagcaggaacgcgaggaggcgggccacaagaccaatatcgcggtggtgccgatggccatcccgctgatgaccggcccgggcaccatctccacggtgatcatctacgccagcaccgcccactcctggatacaggtggtctacctgctgatcagcggcctcctggtggccgtcacctgctacggcgcgctggtgctggcctcgccgctgtcccggctgctgggccagaccgggatcaatatcgtcaaccgggtgatgggcatgctgctcgccgcggtatcggtggaaatcatcgtcgacggcgtttaccggctgtttccgcaactgactcgctga

SEQ ID NO: 61828 - protein, 209 aa, Chromobacterium violaceum ATCC 12472
MEIEIAKIFIALLVLVNPLGAIPIFISLTPNAGQEERRKIAKTTAIAVAIVLSLFAVVGETLLRFLGISIGSFQVGGGILVMLIAIALMNAKPGPTKTTKQEREEAGHKTNIAVVPMAIPLMTGPGTISTVIIYASTAHSWIQVVYLLISGLLVAVTCYGALVLASPLSRLLGQTGINIVNRVMGMLLAAVSVEIIVDGVYRLFPQLTR

SEQ ID NO: 61829 - DNA, 702 bp, Chromobacterium violaceum ATCC 12472
  CDS (1)..(702): transl_table=11
atgcagttgctgtccaccttcattaccaagtttttgttcgtgatggcggcgctgttgccgatcatgaatccgcccggcctggtgcccatcttcatctcgatgacggcacgcaacacgccgcagcagcggcgctacctggcgcggcgcatcgcgatctattgcgcgctgctgctggtgggcagcatgttcgtcggcggctacgtgctgtccttcttcggcgtgtcgctgccggtggtgcagatgtccggcggcttgctgatcaccttcgccgcctggcgcatgctgaacgacacgccggccgagtccagccagccgtccgccgagcaggccagggtggacagccaggccgagctcaagcagcgcgccttctatccgttgacctttccgctgaccgtggggccgggctcggtgtcggtggccatcaccatcggcgccacgctgaccggcagcggcaaggggctggtgcgcttcgtgatcagcccgatcgccggactatcggcggtgctggtgggcagcaccctggtctacctgtgctacgccaacgccgacaagctgctgcgctatctgggccagaccggctccgtggtgttcctgcggctgtccgccttcattctgctgtgcctgggcgtgcagatcatgtgggacggcttcggcgagctggccagccagtggctgcgggacaacgccgggctgctgcattga

SEQ ID NO: 61830 - protein, 233 aa, Chromobacterium violaceum ATCC 12472
MQLLSTFITKFLFVMAALLPIMNPPGLVPIFISMTARNTPQQRRYLARRIAIYCALLLVGSMFVGGYVLSFFGVSLPVVQMSGGLLITFAAWRMLNDTPAESSQPSAEQARVDSQAELKQRAFYPLTFPLTVGPGSVSVAITIGATLTGSGKGLVRFVISPIAGLSAVLVGSTLVYLCYANADKLLRYLGQTGSVVFLRLSAFILLCLGVQIMWDGFGELASQWLRDNAGLLH

SEQ ID NO: 61831 - DNA, 603 bp, Chromobacterium violaceum ATCC 12472
  CDS (1)..(603): transl_table=11
atgcaaacctcgtttctgtccgccaccatcctgttgatcctgatcaccgacccgctgggcaacatcccgctgttcatcgccgcgctgaagcaggtgaagcccgagcgccgcaagcgcgtggtctaccgcgaatgcctgatcgccttcctggtgctgagcgtgttcatgctgttcggccgcaacttcctcgacctgatgcacctgaccgacgaatcgatgcgcatcgccggcggcgtgatcctgttcctgatcgccatcaagatgatcttccccggcgaaggcagcgtgttcggcggcgacaagatgagcggcgaacccttcatcgtgccgatcgccatcccgctgatcgccggcccgtcggcgatggccaccgtgctgttgctgtccacccgcgagccgggccggatgctggagtggatgggcgcgctgaccatctgcatgctggtcaccaccgtcaccttcctgttctccagccgcctgcagaagctgctgggcgaacaggcgatcaccgcgctggagcggctgatgggcctggtgctgaccgcgatctcggtggagatgctgctcagcggcttcgcgtcctacctgaagcagctgcactga

SEQ ID NO: 61832 - protein, 200 aa, Chromobacterium violaceum ATCC 12472
MQTSFLSATILLILITDPLGNIPLFIAALKQVKPERRKRVVYRECLIAFLVLSVFMLFGRNFLDLMHLTDESMRIAGGVILFLIAIKMIFPGEGSVFGGDKMSGEPFIVPIAIPLIAGPSAMATVLLLSTREPGRMLEWMGALTICMLVTTVTFLFSSRLQKLLGEQAITALERLMGLVLTAISVEMLLSGFASYLKQLH

SEQ ID NO: 61833 - DNA, 648 bp, Chromobacterium violaceum ATCC 12472
  CDS (1)..(648): transl_table=11
atgttcaaaaccctgtcgctgcaattcctgttcggcggtctgctcagcctgatcaccatcaccaatccgctgtccaagattccgctgttcatcacgctgacccgcgaaatgagcgactcgcaccgcgactcacaagcccgccgcgcctgcgtgttcgcagccgccatcatggcggtgagcctgctggccggcaacctgatcatggccgccttcggcatttcctacggcgcgctgcgcatcgccggcggcttcgtggtggcggtgctgggctaccgcatgctgttcctgtcgcaggatccgggccaggcgcccagacagtcgggcgaacgcgaggactacgccttcttcccgctggcgatgcccggcatcagcggtccgggcaccatcgcggtggtgatcggcatctccaccgagatcgcggagctctccacgctgccggccaaggcgctggccttcgcgatgaccttcgccgccatcggcctgacctgcgtcggcatgtggctgacgctgaagtcgtcgctgctgatctcggagcggctgggccgcggcggccgcgaggtgatgacccggctgatgggcttcttgctgatctgcatcggcgtgcagttcgtcggctccggcatccgcaccttcatggccggctcttga

SEQ ID NO: 61834 - protein, 215 aa, Chromobacterium violaceum ATCC 12472
MFKTLSLQFLFGGLLSLITITNPLSKIPLFITLTREMSDSHRDSQARRACVFAAAIMAVSLLAGNLIMAAFGISYGALRIAGGFVVAVLGYRMLFLSQDPGQAPRQSGEREDYAFFPLAMPGISGPGTIAVVIGISTEIAELSTLPAKALAFAMTFAAIGLTCVGMWLTLKSSLLISERLGRGGREVMTRLMGFLLICIGVQFVGSGIRTFMAGS

SEQ ID NO: 61835 - DNA, 639 bp, Wolinella succinogenes DSM 1740
  CDS (1)..(639): transl_table=11
atgctacattttcgtcaaatcttttcgaaggtgtttctagtgagtccgctcagcctcttttttgccatctatgtgaagtttttcttcatcctttcgccctttttcgttctctccgtcttcctctctctgaccaaagagatgagccgccctgcgatgggcaagctcgccctaagaaccactgtggcgattctcatcgcctcttttgtgctttttttctttggagagggcattttcaaggtgctaggaatcaccatcgattcgtttagaatcggcgcgggagcgctcctcttcctttcggctgtttcgctcattcaagataagaagatcatgatcggtgatgaagtcggtgatcctgcggtcgttcctttggccattcccgtcacggttggacctgccaccacggggatgcttcttgtgatgggagccgagaccaaggagctcgtggagatggttgtgagcttaagcgctctctttggcgccgtcgtaagcacgggcattctgctttatctaggaagctaccttgagcagctcattggaaaaataggaatcagcatcctcactaaactcacaggactcttcctagccgcgctctcagcggagatcatcttcactggcgtgaaaaacagcctcaccctctaa

SEQ ID NO: 61836 - protein, 212 aa, Wolinella succinogenes DSM 1740
MLHFRQIFSKVFLVSPLSLFFAIYVKFFFILSPFFVLSVFLSLTKEMSRPAMGKLALRTTVAILIASFVLFFFGEGIFKVLGITIDSFRIGAGALLFLSAVSLIQDKKIMIGDEVGDPAVVPLAIPVTVGPATTGMLLVMGAETKELVEMVVSLSALFGAVVSTGILLYLGSYLEQLIGKIGISILTKLTGLFLAALSAEIIFTGVKNSLTL

SEQ ID NO: 61837 - DNA, 627 bp, Gloeobacter violaceus PCC 7421
  CDS (1)..(627): transl_table=11
gtgcggccgatgtgggagagtgtgctcggttctgccgctggaacttttctggcgctgttgccggtgaccgatccgttgggggcggtgccgattttttatagtcttaccagttcgggaagcgacagttaccgtcgccggcaggcgcggttgacgaccattcatgtgctctggctgctggcaggttttttgctggtgggcaaggtggtgctcgaattttttgggatttcctttgcggtgctgcgcatcgccggcgggttgctcattgcccagaccggctgggagatggtcaactcccaccgccacgagggcgacaccgccctggcggcgaacacctcgggggacattgcctttgcgccgatggcgatgccgctggtcagcggtccgggggccatcggtgtggtaattgggttgtcctcgaaggcgtccggctggcccgactactttggcagcctggtgggtatcgccctggtggccggcgtgctctatctgtgtctgatgctcggggagcctttgctcaagcggttgggccgggcgggcacccgcgccctcaaccagattttgggatttttgatcctggccatcgccctgcagtttatggtcgacgggctgcgcgaattgctgcgttga

SEQ ID NO: 61838 - protein, 208 aa, Gloeobacter violaceus PCC 7421
MRPMWESVLGSAAGTFLALLPVTDPLGAVPIFYSLTSSGSDSYRRRQARLTTIHVLWLLAGFLLVGKVVLEFFGISFAVLRIAGGLLIAQTGWEMVNSHRHEGDTALAANTSGDIAFAPMAMPLVSGPGAIGVVIGLSSKASGWPDYFGSLVGIALVAGVLYLCLMLGEPLLKRLGRAGTRALNQILGFLILAIALQFMVDGLRELLR

SEQ ID NO: 61839 - DNA, 645 bp, Photorhabdus luminescens subsp. laumondii TTO1
  CDS (1)..(645): transl_table=11
gtgggtgacttactgctggatctgccaggttacattaagttttttgttgggctatttgcactggtcaatcctgttggtattttgccggtttttatcagtatgactcactaccaagcccaatcggcgcgtaatagaactaactttattgccaatatttctgttgccatcattttatggacagctttgctgttaggtgacttgatactgcgtatgtttggcatttccattgactcttttcgcattgccggtgggattttggttgtgaccatcgcgatgtcgatgattaacggtaaacttggagaggacaaacagaataagcaggaaaaatcagaaacagccgttagagaaagtgtgggtgtggtgccgttggcattgccgttaatggcaggtcccggtgcaatcagttcttgtattgtctggagttctcgttatcagggatggcagaattttattgggttgatgcttaccagcgcgttgtttgctttttgctgttggttattgtttcgatctgcacctttagtcgtcaaatatcttgggcaaacaggcattaacgttatcacccgaattatgggactgctattgatgtctttggggattgaactgattgtgacagggatcagagcgctattcccagggttgctttga

SEQ ID NO: 61840 - protein, 214 aa, Photorhabdus luminescens subsp. laumondii TTO1
MGDLLLDLPGYIKFFVGLFALVNPVGILPVFISMTHYQAQSARNRTNFIANISVAIILWTALLLGDLILRMFGISIDSFRIAGGILVVTIAMSMINGKLGEDKQNKQEKSETAVRESVGVVPLALPLMAGPGAISSCIVWSSRYQGWQNFIGLMLTSALFAFCCWLLFRSAPLVVKYLGQTGINVITRIMGLLLMSLGIELIVTGIRALFPGLL

SEQ ID NO: 61841 - DNA, 708 bp, Vibrio vulnificus YJ016
  CDS (1)..(708): transl_table=11
gtgaagtcgcgcaatatcgactatatttcgccaacaatctgttctcctatctttcgtgtggtttctctaatgcaaacgttcgaagtcgctatctttttgcagtttttcttaggcttagtggccgcagtaaaccctgtgggcatcatgccggtatttgtgtcgcttacaggccacatgacaccggaagaaaaatacaaaaccgcacttaccgccaatgtggcggtggcgattattctgaccgtttcattgctagctggtcagatgctactcgacatgtttagtatttctctcgactccttccgcgttgccggtggtttactactacttagcatcgccttttcgatgatgagcggtaagttgggtgaagataaacaaaacaaacaagagcagtcggaatacgtgagtcgcgaacaaattggtgttgtgcctttggcaatgcctttgatggcgggtcctggtgcgattagttcgaccatcgtttatggttctcgctacccaagcatgttcgataccatgggtattgtgatcaccattgttgcctttagcttttgctcatggctgctattccgctcagcgccaattatcgttcgctttttaggacaaaccggcatcaacgtgatcacccgtattatgggtctgatcttgggcgcactcggcatcgaatttatcgccaatggtctacgtaatctcttccccggattagcctga

SEQ ID NO: 61842 - protein, 235 aa, Vibrio vulnificus YJ016
MKSRNIDYISPTICSPIFRVVSLMQTFEVAIFLQFFLGLVAAVNPVGIMPVFVSLTGHMTPEEKYKTALTANVAVAIILTVSLLAGQMLLDMFSISLDSFRVAGGLLLLSIAFSMMSGKLGEDKQNKQEQSEYVSREQIGVVPLAMPLMAGPGAISSTIVYGSRYPSMFDTMGIVITIVAFSFCSWLLFRSAPIIVRFLGQTGINVITRIMGLILGALGIEFIANGLRNLFPGLA

SEQ ID NO: 61843 - DNA, 624 bp, Vibrio vulnificus YJ016
  CDS (1)..(624): transl_table=11
ttgctcagtattctcatcactcaatttgttgttctttgggccgtgattgaccctgttggttcagtgcctgtttatctttcgcaaacccaacatctgaccgccaagcagcgtcgtctcgtcgcgctcaaagctgttggtatctcagcaggggtattgctgtttttcttaatcgccgggcaaatgctgcttgaagcgatgcagatcccactacccgcctttcaggctgcgggtgggctggttttattgttattcgcactgagtatgattttcggtgaaagtaaacctgagcaagagcagaagctaagcgaagagttggataaatccgccctcgcagatttggccgtctacccgctggccattccttccatcgcgtcaccaggcgccatgatggcggtggtgatgctgacagacaaccatcgctattcctttgctgatcaagcgattaccgcgggtgtcatgttgatggtcttgctgatcacactggctctgttactcggagccaacacgattcaaaaatggattggcaatgttggcgcagccatcatcagccgtgtgatgggtttgatcctcgccgctgtcgcactcaacaatttactgcaaggcattaaagatttttacctgtag

SEQ ID NO: 61844 - protein, 207 aa, Vibrio vulnificus YJ016
MLSILITQFVVLWAVIDPVGSVPVYLSQTQHLTAKQRRLVALKAVGISAGVLLFFLIAGQMLLEAMQIPLPAFQAAGGLVLLLFALSMIFGESKPEQEQKLSEELDKSALADLAVYPLAIPSIASPGAMMAVVMLTDNHRYSFADQAITAGVMLMVLLITLALLLGANTIQKWIGNVGAAIISRVMGLILAAVALNNLLQGIKDFYL

SEQ ID NO: 61845 - DNA, 609 bp, Geobacter sulfurreducens PCA
  CDS (1)..(609): transl_table=11
atgagcatctacgccaacttcttcgtcgctatctggctcaagttcttctttctcctgaccccgttcttcgtgatgtcggtcttcctctccatgacccaggagatcgcaccccgggaccgacggcggctcgccctcaaggtgaccgtggcggtgctggtcgcctgcttcaccctcttcttcttcggcaaccacctcttctccctgttcggcatcactatcgactcgttccggatcggcgccggcgccctcctcttcctctccgcggtgcagatggtccagggtgatgccgccgtctcccccagcgaccggcagggcgacatctccgtggtgccgctggcgatccccgtcaccgtgggccccgccaccaccggtgcgctcctggtcatgggggccgaactccagggggcctggcagaccgtgatcggctgcgcggccctggccgcggcagtcctctgcatcggggcactgctgggctccgccgcctccatcgagcacgtgatcggcaagcggggaatcaccatcctgagcaagctgaccgggctcatgctcgccgcgctggcggcccagatcgtcttcacgggcatcaagagctttctcgccatccactga

SEQ ID NO: 61846 - protein, 202 aa, Geobacter sulfurreducens PCA
MSIYANFFVAIWLKFFFLLTPFFVMSVFLSMTQEIAPRDRRRLALKVTVAVLVACFTLFFFGNHLFSLFGITIDSFRIGAGALLFLSAVQMVQGDAAVSPSDRQGDISVVPLAIPVTVGPATTGALLVMGAELQGAWQTVIGCAALAAAVLCIGALLGSAASIEHVIGKRGITILSKLTGLMLAALAAQIVFTGIKSFLAIH

SEQ ID NO: 61847 - DNA, 642 bp, Methanococcus maripaludis S2
  CDS (1)..(642): transl_table=11
atggacgtacaatttataatattggcatttacatcattattttccatattgaacccctttggagtaattccaacttatttagtccttactagccagtactccaaagttgagaaaataaaaatcatacgtaaatccatgcttgcagcatttgcacttctaatgatgtttgcacttcttggaaatcagatcatcgggttttttggaatttcaattcctgcaatcaagattacaggtggagttttactcttcttaattgcacttgatatgattcaaggaaacacttccaaggtagaaaaaagcccaaaacttgaatcccatttaaaaagtcacagcgaagaaattgaagatatggatgaaatcgcaatagtccctttaactgttccactactaacgggaccgggttcaatcagtgcagttattgctatgatggcacagacaagtgattttgatggaaaactttccgtgataattgcaatatcactttgtataattatatcatacttcgtgctcaaattttcaaaagatttagaaaaaatgctcggtaaaatcggatttaaagtacttacaaagatgatgggtcttgtacttaccgcaatatctatccagatggcccttgatggaatattaatggtctttggataa

SEQ ID NO: 61848 - protein, 213 aa, Methanococcus maripaludis S2
MDVQFIILAFTSLFSILNPFGVIPTYLVLTSQYSKVEKIKIIRKSMLAAFALLMMFALLGNQIIGFFGISIPAIKITGGVLLFLIALDMIQGNTSKVEKSPKLESHLKSHSEEIEDMDEIAIVPLTVPLLTGPGSISAVIAMMAQTSDFDGKLSVIIAISLCIIISYFVLKFSKDLEKMLGKIGFKVLTKMMGLVLTAISIQMALDGILMVFG

SEQ ID NO: 61849 - DNA, 618 bp, Prochlorococcus marinus str. MIT 9303
  CDS (1)..(618): transl_table=11
atgtctcttctaaacactgccattggaatctttactgttgccaaccctattggcaatctgccgatctatctttcattcacagatggagatcaaaaaaccgataaggcaatcgcacgcaacagtgcttttaccttcctaatcgcacttctcttggctacatggctcggaaatgatttgctggcaattttcggcataagccaaggagcctttcaaatatctggtgggttaattgttatcttgatcggcctttctatgctccgatccaaaccaccagaggagcaccatgacccagcctcgattgatcgagataagggttcctcagggaaaggaatcgtgcctatcggcattcctcttcttgcaggccctggcacactgacgattgcaattgccgacccggtgaattcttccatcgatggcaaaatttcattgagcttaatagtcttaatactaactttgatgatctatcttatttttgatgcggccgagatgctttcctccaagattagcatatcagccctgcaagtgctaacaaaagtaatgggaatagtgcttacatctattgctgttcagatgttgcttgatggcctcaaaatctcgttcccaagcatttcacaataa

SEQ ID NO: 61850 - protein, 205 aa, Prochlorococcus marinus str. MIT 9303
MSLLNTAIGIFTVANPIGNLPIYLSFTDGDQKTDKAIARNSAFTFLIALLLATWLGNDLLAIFGISQGAFQISGGLIVILIGLSMLRSKPPEEHHDPASIDRDKGSSGKGIVPIGIPLLAGPGTLTIAIADPVNSSIDGKISLSLIVLILTLMIYLIFDAAEMLSSKISISALQVLTKVMGIVLTSIAVQMLLDGLKISFPSISQ

SEQ ID NO: 61851 - DNA, 681 bp, Herminiimonas arsenicoxydans
  CDS (1)..(681): transl_table=11
atgctgatactgtttttcaaggctgcaatcctgataccgattaccttggtacccatcctcaatcctttcggcaatgcggcgatatttgccagtctcgcgggcgatatcgaccgcgatgcagagaagcggctggcgcgtcaggtggcgatcaattgttttgtcatgctgctgggaaccatgttcatcggctcgcacgtgttgatgttcttcggcatttcgctgcctatcgtgcgtatcggtggcggcatactggtggcggctaccggctggcggctgttgaacgataaggggcaggatgacatccgtacgcaagtggcaagcaagccgcgcgaagtctggtccgaggatgatttcaaggtgcgcagtttttatccgatcagctttccactgacagtcggccccggcacaattgcggcgtcgattacgctgggtgcaagtgcaccgtcccgtttatcgaatctgtttgtttcaatcggcagtgcagctttgggcgcggccatgacggcgctggtgatttttctctgttatcgctatgcgaacaagatggtcaggctgctgggacgcctgggtacgatggtggtgctgcggctgtcggctttcatcctgctgtgcataggcatagaaattttctggcagggtatgctgggcttgttggctgaggcaggtattacgcttcattag

SEQ ID NO: 61852 - protein, 226 aa, Herminiimonas arsenicoxydans
MLILFFKAAILIPITLVPILNPFGNAAIFASLAGDIDRDAEKRLARQVAINCFVMLLGTMFIGSHVLMFFGISLPIVRIGGGILVAATGWRLLNDKGQDDIRTQVASKPREVWSEDDFKVRSFYPISFPLTVGPGTIAASITLGASAPSRLSNLFVSIGSAALGAAMTALVIFLCYRYANKMVRLLGRLGTMVVLRLSAFILLCIGIEIFWQGMLGLLAEAGITLH

SEQ ID NO: 61853 - DNA, 675 bp, Burkholderia vietnamiensis G4
  CDS (1)..(675): transl_table=11
atgatcgtcaaccgtcttgtttccgagatcctgttcggcttcaccggcctgatcggcatcatcaatccgatcggcatcgccttcctgttcctcgagcgtaccgaggcgctgaccgaacacgagcgcaacctgctcgcgcagaaggtggcgttcaacgcgttcatcgtgctgctggtcgcgttcttcgccggcacgccggtgctgcatttcttcgggatctcgatggaagcgctgcgcatcgggggcggcttcgcggtcgccgtcgccggctggcagatgctcaacgagccggacggcccggccggcggcggcgacacgccgatcaagccgatcgatgcgagcgcaatcatgacgcgcgcattcttcccgctcaccgtgccgctgaccgtcggtcccggttcgatcgccaccgcgatcgcgctgaacgcgaaccgcacgcacaagctgtctgaattcatgctgtcgagcatcgtgtcgatcacggtgtccgtgctggttgcggtcgtgatctggctgacctacagccgcgccgcgctgctcgcgcgctatctcggcaccgaaggcaccaaggtcgcgaagcgcgtgtcggcgtttctgctgctgtgcatcggcgtgcagatcatgctgaccggcttctccgagttcctccagccgctcgccgaccagatcaagtaa

SEQ ID NO: 61854 - protein, 224 aa, Burkholderia vietnamiensis G4
MIVNRLVSEILFGFTGLIGIINPIGIAFLFLERTEALTEHERNLLAQKVAFNAFIVLLVAFFAGTPVLHFFGISMEALRIGGGFAVAVAGWQMLNEPDGPAGGGDTPIKPIDASAIMTRAFFPLTVPLTVGPGSIATAIALNANRTHKLSEFMLSSIVSITVSVLVAVVIWLTYSRAALLARYLGTEGTKVAKRVSAFLLLCIGVQIMLTGFSEFLQPLADQIK

SEQ ID NO: 61855 - DNA, 621 bp, Burkholderia vietnamiensis G4
  CDS (1)..(621): transl_table=11
atggatctgctcaaatcgttcatttcgctgcttgcgctgatcaatccggtcggcgcggtgccgttcttcctgagcctgaccgcgcagcagacggagcacgagcggcgccgcacgatccggatcgcgtcggtgtcggtgttctgcgtgatgacgatcacgacgctgctcggccagcagatcatcgatttcttcggcatttcggtcggctcgctcgaagtggggggcgggatcatcatgctgctgatggcgatcaacatgctgaacgcgcagatcggcaatacgcgatcgacgcccgaggaacgcgacgaggccgagctgaaggacaacatcgcggtcgtgccgctggcgattccgctgctgacgggccccggctcgatcagcacggcgatcatctatgcggcgaactcgcatcactggtatgaacgggcggggctcgtcgcgatcggcgcggtcctcgctctgctgtgtttcctcgcgatgcggcttgccgagccgatcgcgaactggatcggccgcaccggcatcaacatcgccacgcggctgatgggtctgatgctgtcggcgctggcggtggaattcatcgtcaatggactgagggcactactgcctgcactgagatga

SEQ ID NO: 61856 - protein, 206 aa, Burkholderia vietnamiensis G4
MDLLKSFISLLALINPVGAVPFFLSLTAQQTEHERRRTIRIASVSVFCVMTITTLLGQQIIDFFGISVGSLEVGGGIIMLLMAINMLNAQIGNTRSTPEERDEAELKDNIAVVPLAIPLLTGPGSISTAIIYAANSHHWYERAGLVAIGAVLALLCFLAMRLAEPIANWIGRTGINIATRLMGLMLSALAVEFIVNGLRALLPALR

SEQ ID NO: 61857 - DNA, 603 bp, Burkholderia vietnamiensis G4
  CDS (1)..(603): transl_table=11
gtggaatacaccttcctgtcggccaccgtgctgctcgtgctgatcacggatccgctcggcaacatcccgctgttcatcacggcgatgcgcgacgtgccgcgcgagcggcgcgtgaagctgatcctgcgcgaagtgggaatcgcgttcgtgatcctgctgttcttcatggtggtcggcgaccgcttcctgcggatgatgagcctcaccgacctgtcgctgcggctcggcggcgggatcgtgctgttcctgatcgcgctgcggatgatcttcccgcatccggacggcgcgctcggcagcgatccgcgcgcgggcggcgagccgttcatcgtgccgctcgcgattccggcgctcgccgggccgtccgcgctcgcgactgtgatgctgctcacgtcgcaggcgcccggcaagatgttcgaatgggtcggcgcgctgacggtcacgatgctcgtctgtgcggtcacgctggtgctcgccgagcgcatccagcagtggctcggcgagcggaccgtcgcggcgttcgagcggctgatggggctcgtgctcgtcgcgatttcggtcgagatgctgctggccggcgtgcgcgcgttcgtgcatcagctgtaa

SEQ ID NO: 61858 - protein, 200 aa, Burkholderia vietnamiensis G4
MEYTFLSATVLLVLITDPLGNIPLFITAMRDVPRERRVKLILREVGIAFVILLFFMVVGDRFLRMMSLTDLSLRLGGGIVLFLIALRMIFPHPDGALGSDPRAGGEPFIVPLAIPALAGPSALATVMLLTSQAPGKMFEWVGALTVTMLVCAVTLVLAERIQQWLGERTVAAFERLMGLVLVAISVEMLLAGVRAFVHQL

SEQ ID NO: 61859 - DNA, 606 bp, Dichelobacter nodosus VCS1703A
  CDS (1)..(606): transl_table=11
atgtcgctaacagcagcaattctaactttatttttaattatcaatccattgggaaacgtccccgtttttctgtcgattttaaaaaatttatcgccgaaacggcaacgcattgttttattgcgtgaattatgtattgcttacgccattatggtggtttttttgtttggcggttcgtcgattttgcacggcttaaatatttcgcgtgaagccgtttccatttctggcgcaattgttttatttatcattgccttaagaatgattttcccgttaagaagcggcagcgtgatgggcgctgatgataccgaaggcgaagaagagccgttgattgtgccgattgcaattccttttgttgccggaccttctttgcttgctactttaattatgatggtggaaagtgatcccagtttgacgacgcgctggttttttgcaatgacgatttcgtggtttatttctttgctgatttttttatgcgcgccgtttttcttcaaaattttgcgcaaacgcggattaaaagccgtagaacgtttaatgggtatgattttaatctcaatttctgtacaaatgatgcttaatgtttatatggcattacaagcgacaggcgcttag

SEQ ID NO: 61860 - protein, 201 aa, Dichelobacter nodosus VCS1703A
MSLTAAILTLFLIINPLGNVPVFLSILKNLSPKRQRIVLLRELCIAYAIMVVFLFGGSSILHGLNISREAVSISGAIVLFIIALRMIFPLRSGSVMGADDTEGEEEPLIVPIAIPFVAGPSLLATLIMMVESDPSLTTRWFFAMTISWFISLLIFLCAPFFFKILRKRGLKAVERLMGMILISISVQMMLNVYMALQATGA

SEQ ID NO: 61861 - DNA, 633 bp, Synechococcus sp. WH 7803
  CDS (1)..(633): transl_table=11
atgtctctactgcacacagctgtcgggatcttcacgatctcaaaccccatcggcaatctgccgatctacctgtcgtttaccgatgggaaccggcgcaaagatcgcgccatcgcccgcagcagtgcagtcacatttctggtcagcctgatgctggccacctggctgggcaacgacctgctgggatttttcggaatttcacgcccggcattccaggtggccggcgggctgatcgtggttctgatcggcctctccatgctgcgctcagaaccatccaaggttcaccatgatccagcgtccatcgaacgcgatcaggattccgctgtgaaggggattgttcccctcggcatccccctgttggctggcccgggaaccctcaccgtggtgatcgcagatccgaatgcggcgagcatgggcggaaaactcggcatcagtggcgtggtgctgctgctcaccgtggtggtgtacgtgatcttcgaagcaggggagatgctttcctccaagatcagtgcgtcagcacttcaagtgctcaccaagatcatgggacttcttctcacctccattgcggtgcagatgatcttcaccggtttacgtgcaggcttccccgtcttgaaggcgctcggcatcagcgggtga

SEQ ID NO: 61862 - protein, 210 aa, Synechococcus sp. WH 7803
MSLLHTAVGIFTISNPIGNLPIYLSFTDGNRRKDRAIARSSAVTFLVSLMLATWLGNDLLGFFGISRPAFQVAGGLIVVLIGLSMLRSEPSKVHHDPASIERDQDSAVKGIVPLGIPLLAGPGTLTVVIADPNAASMGGKLGISGVVLLLTVVVYVIFEAGEMLSSKISASALQVLTKIMGLLLTSIAVQMIFTGLRAGFPVLKALGISG

SEQ ID NO: 61863 - DNA, 603 bp, Desulfovibrio vulgaris subsp. vulgaris str. Hildenborough
  CDS (1)..(603): transl_table=11
atggataacgccctcaatatactcatcagcacttggatcaagcttttcttcgttctcgcaccgttcttcgtgctgacgatgtttcttgcgctgacgcgttcgttcaccccgcaacagcaacgccgcaccgccgtgaaggtaaccgtcgccgtctatgtcatctgcatgtgtctctacttcttcggtgataccattttcgccatcttcggtatcacactcgatgccttccgcatcggtgcaggggcgttgctgttcctctcggccgtgagcctcgtgcggggtccgcagcccgcgcaagaaccgcttgcggaaggtgacatcagcgtcgtgccgcttgccatccccatcacggtcggccctgcgacgacgggtgcactgatggtcatgggggcgaccgtccgcacgcccatggaacgcgtcatgggaagcgtctcgctgctggcggcagtgctcaccgtgggaggactcctctacctcgccaaccccatagaaaggatgctggggcgcattggcatctccatcctcaccaaactgacggggctcattctggctgcactcgccgcgcaaatcatcttcacgggaatccgcaactttctcggctag

SEQ ID NO: 61864 - protein, 200 aa, Desulfovibrio vulgaris subsp. vulgaris str. Hildenborough
MDNALNILISTWIKLFFVLAPFFVLTMFLALTRSFTPQQQRRTAVKVTVAVYVICMCLYFFGDTIFAIFGITLDAFRIGAGALLFLSAVSLVRGPQPAQEPLAEGDISVVPLAIPITVGPATTGALMVMGATVRTPMERVMGSVSLLAAVLTVGGLLYLANPIERMLGRIGISILTKLTGLILAALAAQIIFTGIRNFLG

SEQ ID NO: 61865 - DNA, 630 bp, Picrophilus torridus DSM 9790
  CDS (1)..(630): transl_table=11
atgaactatgcctatctatttatatcatcgcttgtcacgctttttgcgataatgaacccgataggagctgtgccaatactaattgcactgaccgacggctataccaaagatgaaagaaacaatgtgattttaaaaagtgtttttactgctgccggcatgatgcttggctttatgctcatcggtgtttacatattccaggtgttaagaataagcatatatgattttgagatagccggtggcatgcttctctttaaggttgcattcgacatgcttcagggaaggacatcaccaacgaagataacaagcacagaaaaggaggaatccgttgaaagggaggccattggtgtggccccccttggaacgccattgctggcaggccccggaacgataacaactgcaataatcttttttaacggcaacggaaacgcaataatgacaagatttgttgttataatgagcgttataatactgatcattttaacatatataatactcaagttttcaataccaatattcgcaaggcttggaaagacaggatctatagttataacaaggattatgggtcttctgcttgcatcaataggtgttcagcttgttgcctctggaataatcaacgttttccatatttaa

SEQ ID NO: 61866 - protein, 209 aa, Picrophilus torridus DSM 9790
MNYAYLFISSLVTLFAIMNPIGAVPILIALTDGYTKDERNNVILKSVFTAAGMMLGFMLIGVYIFQVLRISIYDFEIAGGMLLFKVAFDMLQGRTSPTKITSTEKEESVEREAIGVAPLGTPLLAGPGTITTAIIFFNGNGNAIMTRFVVIMSVIILIILTYIILKFSIPIFARLGKTGSIVITRIMGLLLASIGVQLVASGIINVFHI

SEQ ID NO: 61867 - DNA, 567 bp, Picrophilus torridus DSM 9790
  CDS (1)..(567): transl_table=11
atgccgctgctcgttgttattgatccgtttggcagcctggcaatcttcgtatcaatgacggcaagttataataaggatacaaaattatcaatttcaagggatgctgtactctatggtggaatgatattaatcatttttgcagccctgggggagataataatacaattttttggcatatcaatagaggcgcttgaaatcgccggtggtataatattactattaatgggtatagagatggtgcgtgagggtgcaaagccagaatcaagctctggcagcaagaaccttggcatagtgccatttgcaacaccacttctcgcaggccctggtgcaatatcccttgttataatattaatgaagggctcattaacaacaaagatatttacaatagtctcaattttaatagttctggcactggtctacatatttttcatattttcatcaaaaatactcgagatccttggagagaagataatgacggcaataacaaggatattcggtcttttacttgcaggctttgcaatacagtacttccttgacgccctaatatcgcttggcctcataaaataa

SEQ ID NO: 61868 - protein, 188 aa, Picrophilus torridus DSM 9790
MPLLVVIDPFGSLAIFVSMTASYNKDTKLSISRDAVLYGGMILIIFAALGEIIIQFFGISIEALEIAGGIILLLMGIEMVREGAKPESSSGSKNLGIVPFATPLLAGPGAISLVIILMKGSLTTKIFTIVSILIVLALVYIFFIFSSKILEILGEKIMTAITRIFGLLLAGFAIQYFLDALISLGLIK

SEQ ID NO: 61869 - DNA, 675 bp, Erwinia carotovora subsp. atroseptica SCRI1043
  CDS (1)..(675): transl_table=11
atgctggaattgattcaaaccattggccttggtctggtgttaatcctgccactcgcgaatccactgacaacggtagcggtattcttggcgatgtcaggcaacatgagtcaaggggagcgaaatcgccagatctttcaggcctcgatctatgtcttcatcatcatgaccgtcgcgtactacgcgggccaaatcgttatgaatactttcgggatttctattcccggattgcgtattgccggtgggctcattgtggcattcatcggttttcgcatgcttttcccccagcaaaagccagaacacgcacctgaagtcaaaagtaaaaaagaagaaattgacgacagtttctccgccaatgaagtcaatattgccttcgttccactggcgatgcccagcaccgcggggccaggaaccattgccctcatcatcagttctgcatcacaaatcaagagcggcgtcgacatcacgccatgggttgttaccgttgcccccgtactcacttttatgttaatcagcctgatagtctggctcagtctgaaaagttctggcctgattatgcgtctgatcggaaaaagcggtattgaagccatttcacggctgatgggttttttgctggtttgcatgggtgtgcagttcatcattaacggcacactggagatcgtgcattctctccattaa

SEQ ID NO: 61870 - protein, 224 aa, Erwinia carotovora subsp. atroseptica SCRI1043
MLELIQTIGLGLVLILPLANPLTTVAVFLAMSGNMSQGERNRQIFQASIYVFIIMTVAYYAGQIVMNTFGISIPGLRIAGGLIVAFIGFRMLFPQQKPEHAPEVKSKKEEIDDSFSANEVNIAFVPLAMPSTAGPGTIALIISSASQIKSGVDITPWVVTVAPVLTFMLISLIVWLSLKSSGLIMRLIGKSGIEAISRLMGFLLVCMGVQFIINGTLEIVHSLH

SEQ ID NO: 61871 - DNA, 594 bp, Erwinia carotovora subsp. atroseptica SCRI1043
  CDS (1)..(594): transl_table=11
atgacagaaatgatctctgcaacagtactgctgttgctcataatggacccactcggcaacctgccgattttcatgtccgtactcaagcacctcgaccctaaacgccgacgtgtggtgctgatccgcgaaatgctgattgcgctcgggctgatgctgattttcctgttcgccggtgaacacattctggcgttcctgaatctgcgcaccgaaacggtatctatttccggcggtatcgtgctgttcctcattgcgattcggatgattttcccctcgcaggaaggcaatagcagcggactgccagctggagaagaaccgtttctggtgccaatggcgattccattggtggcggggccgtcgattctggctgcgctgatgctgctttcccaccagtatcccaatcagttatcccatctgacgctggcactgtttatcgcctggacgatctctttcatcatcttgctgatgtctgatttgttcttgcgtttgctgggtgagaaaggcgtgagcgcgctggagaaattgatgggcctgattctggtgatgctatcgacgcagatgttcctcgacggcatacgtgcttacatgaagttatag

SEQ ID NO: 61872 - protein, 197 aa, Erwinia carotovora subsp. atroseptica SCRI1043
MTEMISATVLLLLIMDPLGNLPIFMSVLKHLDPKRRRVVLIREMLIALGLMLIFLFAGEHILAFLNLRTETVSISGGIVLFLIAIRMIFPSQEGNSSGLPAGEEPFLVPMAIPLVAGPSILAALMLLSHQYPNQLSHLTLALFIAWTISFIILLMSDLFLRLLGEKGVSALEKLMGLILVMLSTQMFLDGIRAYMKL

SEQ ID NO: 61873 - DNA, 633 bp, Bacillus licheniformis ATCC 14580
  CDS (1)..(633): transl_table=11
gtgtttgcttttatcatccacgtttttgtatcattgttcgccgtcacaaatccgatcggcaatgttccgatctttttagcgctcacagaaggctacgaagcgaaagaacgcaccgcattggcgagaaaggccgcggttttatcgtttctgatcctgatcgcgtttctcatattcggagagtttatcttcaggctttttgacatcaacatccatgcgctgcgaattgccggcggcatatttatattcggaattgcctacaacctgctgaatgcaaagcagtcccatgttcagtcgctgcatcatgctgagcatcgcgagagcaaggaaaaggaggatatatcggtgacgccgctcagcattccgatcatttcggggccaggaacgattgcgacggtgatgagcctttcggccggaagccgcagtctggtgcattttggcggaatgatcatcggcatcgccgccgtcctcctgctgacgtttgcggcctttcattattctacgctgatcagcaacaaattgggccagacggagatgaacgtgatcacccggctgatgggcctgattttggctgtcgtggcggtcggcatgatcggaacgggattgaaagggatgtttccggtgttggcgggataa

SEQ ID NO: 61874 - protein, 210 aa, Bacillus licheniformis ATCC 14580
MFAFIIHVFVSLFAVTNPIGNVPIFLALTEGYEAKERTALARKAAVLSFLILIAFLIFGEFIFRLFDINIHALRIAGGIFIFGIAYNLLNAKQSHVQSLHHAEHRESKEKEDISVTPLSIPIISGPGTIATVMSLSAGSRSLVHFGGMIIGIAAVLLLTFAAFHYSTLISNKLGQTEMNVITRLMGLILAVVAVGMIGTGLKGMFPVLAG

SEQ ID NO: 61875 - DNA, 618 bp, Mannheimia succiniciproducens MBEL55E
  CDS (1)..(618): transl_table=11
atgtttgattctttatttgtccaattcgtcgtgttatgggcggtaattgacccaatcggttccgtccccgtttacttatcgaaaacggttgggttgtctgtagaagaacgtcataaagtcgcccgcaaatccgtaattattgccacaattgtgctaatgttctttttggttatcggacaaggtttattcgaaaccatgcagattccgctttccgccttccagattgccggcgggctggtgttgcttttatttgccttaaccatgatttttggtgaaggtaagcccgaaaccgagatgaaaatgcgcacaagtttaagtgaactggcggtttatccgcttgccgttccgtctatcgcctcgcccggcgcgatgatggcgattgtcttattaacggataatcatcgctttgatttttttgaacaatgcctaaccaccgtagtgatgttgttgattctgtttattacttatttgctgtttttgatagcgaataaaattcaacgggtaatcggtaacacgggggctgcggtgatcagccgggtaatgggattgattttggccgcagtcgcagtgaacaacgtattggtgggaattcgggattttttcggtattgccctttaa

SEQ ID NO: 61876 - protein, 205 aa, Mannheimia succiniciproducens MBEL55E
MFDSLFVQFVVLWAVIDPIGSVPVYLSKTVGLSVEERHKVARKSVIIATIVLMFFLVIGQGLFETMQIPLSAFQIAGGLVLLLFALTMIFGEGKPETEMKMRTSLSELAVYPLAVPSIASPGAMMAIVLLTDNHRFDFFEQCLTTVVMLLILFITYLLFLIANKIQRVIGNTGAAVISRVMGLILAAVAVNNVLVGIRDFFGIAL

SEQ ID NO: 61877 - DNA, 600 bp, Mannheimia succiniciproducens MBEL55E
  CDS (1)..(600): transl_table=11
ttggtggcggtgattaatccgtttggtgttttgcctgtttttgtcaatatgacaaatcatcaaaccaaggctgaacgtaatcatactaatttaatcacttcattttctgtaggggtgattttgctggtaagtttattttttggcaaaattattctgagcctgttcagtatttcaattaactcattccgcattgccggcgggattttgatcattagcattgcgatgaccatgattagcggtaaactcggcgaagataaacagaataaagatgaaaaaaacgctgacttcgctaatatgaacagtatcgccgtcgtgcctttggcaatgcctattttagccggccccggtgcgattagttccactatcgtatgggcttctcaatattcaagctggtttgactggattggttttagctttgcgattatcctgttttccctgttatgttacggattattccgttcgggcccgacaatcgtcaatgcgctgggtaaaacgggcagcaatgtagtgacccgtattatggggttgattttgatgtcgttaggtattgaaagtattgtggtcggcattaccaagctgttcccgggattaacgcattag

SEQ ID NO: 61878 - protein, 199 aa, Mannheimia succiniciproducens MBEL55E
MVAVINPFGVLPVFVNMTNHQTKAERNHTNLITSFSVGVILLVSLFFGKIILSLFSISINSFRIAGGILIISIAMTMISGKLGEDKQNKDEKNADFANMNSIAVVPLAMPILAGPGAISSTIVWASQYSSWFDWIGFSFAIILFSLLCYGLFRSGPTIVNALGKTGSNVVTRIMGLILMSLGIESIVVGITKLFPGLTH

SEQ ID NO: 61879 - DNA, 645 bp, Bacillus licheniformis ATCC 14580
  CDS (1)..(645): transl_table=11
gtggctttaaccgtgtttgcttttatcatccacgtttttgtatcattgttcgccgtcacaaatccgatcggcaatgttccgatctttttagcgctcacagaaggctacgaagcgaaagaacgcaccgcattggcgagaaaggccgcggttttatcgtttctgatcctgatcgcgtttctcatattcggagagtttatcttcaggctttttgacatcaacatccatgcgctgcgaattgccggcggcatatttatattcggaattgcctacaacctgctgaatgcaaagcagtcccatgttcagtcgctgcatcatgctgagcatcgcgagagcaaggaaaaggaggatatatcggtgacgccgctcagcattccgatcatttcggggccaggaacgattgcgacggtgatgagcctttcggccggaagccgcagtctggtgcattttggcggaatgatcatcggcatcgccgccgtcctcctgctgacgtttgcggcctttcattattctacgctgatcagcaacaaattgggccagacggagatgaacgtgatcacccggctgatgggcctgattttggctgtcgtggcggtcggcatgatcggaacgggattgaaagggatgtttccggtgttggcgggataa

SEQ ID NO: 61880 - protein, 214 aa, Bacillus licheniformis ATCC 14580
MALTVFAFIIHVFVSLFAVTNPIGNVPIFLALTEGYEAKERTALARKAAVLSFLILIAFLIFGEFIFRLFDINIHALRIAGGIFIFGIAYNLLNAKQSHVQSLHHAEHRESKEKEDISVTPLSIPIISGPGTIATVMSLSAGSRSLVHFGGMIIGIAAVLLLTFAAFHYSTLISNKLGQTEMNVITRLMGLILAVVAVGMIGTGLKGMFPVLAG

SEQ ID NO: 61881 - DNA, 705 bp, Burkholderia mallei ATCC 23344
  CDS (1)..(705): transl_table=11
atggcgcggccgcgcgagcggcctccgataacccttgtccgtccttcccgcttcccgatgatcgtcgaccgcctgatctccgaaatcctgttcggcttcaccggcctcatgggcatcatcaatccgttcggcatcgcgttcctgttcctcgagcgcaccgagtcgctgaccgaggcgcagcgcgcggcgctcgcgcgcaaggtcgcgatcaacgcattcatcgtgctgctcgccgcgttcttcgtcggcatctcgctcgaggcgctgcgcatcggcggcggcctcgcggtcgcggtggcgggctggcagatgctcaacgagccggacgtgccgacgggcggcgacaccgccgcgcagcccgtcgagccgcgcaacgcgatggcgcgcgcattcttcccgctgacgattccgctgaccaccggccccggctcgatcgcgaccgcgatcgcgctgaacgcgaaccgcacgcacaagctctcggagttcgtgctgtcgagcatcgtgtcggtcgcggtatcggcgctcgccgcgctcgtgatctggcagacgtacagtcgcgccgcgtttctcgcgcgctatctcggcaccgagggcacgaaggtcgcgatgcgcgtgtcggcgttcctgctgctgtgcgtcggcgtgcagatcatgctcacgggcttctccgagttcctgcggccgatcgccgatcaggtgaagtga

SEQ ID NO: 61882 - protein, 234 aa, Burkholderia mallei ATCC 23344
MARPRERPPITLVRPSRFPMIVDRLISEILFGFTGLMGIINPFGIAFLFLERTESLTEAQRAALARKVAINAFIVLLAAFFVGISLEALRIGGGLAVAVAGWQMLNEPDVPTGGDTAAQPVEPRNAMARAFFPLTIPLTTGPGSIATAIALNANRTHKLSEFVLSSIVSVAVSALAALVIWQTYSRAAFLARYLGTEGTKVAMRVSAFLLLCVGVQIMLTGFSEFLRPIADQVK

SEQ ID NO: 61883 - DNA, 585 bp, Methylococcus capsulatus str. Bath
  CDS (1)..(585): transl_table=11
atgacactggcccaggtcgccgtattgttgtttctgatcactgatcctttcggcaatttgcccctgctgctgacagtactgcaacggctggggcatgcggcttacctccgtgccgtgttgcgtgaaacggcgatcgccttcgtggtgctggtcgtgttcgcctggaagggcgatctgttgctgggttacctcaacgtgacccagccgtctttgaacatcgcgggcggggtgatcctgaccatcatatccctgaaaatgattttcggcggggctcaggagactttcgatgaccgttacgcgaatgatccccttgtcgtccccatcgccatacccgccattgccgggcctgcagcattgaccacggtgatgctgctcagcaaacagcaggggattccgtttccgacgctgttcaccgccctgacactggtttttctggcgaacttgaccaccttcctgctcggtcggctgctcggagaatggctgggaccgcggggtttgactgccctggagcggctgatgggactcctgctcaacctggtcgccgtggacatgaccatggcaggtatcaagcgcttcttcacctga

SEQ ID NO: 61884 - protein, 194 aa, Methylococcus capsulatus str. Bath
MTLAQVAVLLFLITDPFGNLPLLLTVLQRLGHAAYLRAVLRETAIAFVVLVVFAWKGDLLLGYLNVTQPSLNIAGGVILTIISLKMIFGGAQETFDDRYANDPLVVPIAIPAIAGPAALTTVMLLSKQQGIPFPTLFTALTLVFLANLTTFLLGRLLGEWLGPRGLTALERLMGLLLNLVAVDMTMAGIKRFFT

SEQ ID NO: 61885 - DNA, 621 bp, Silicibacter pomeroyi DSS-3
  CDS (1)..(621): transl_table=11
atgatcgacaccgcctttctgatcaccgcattcaccacgcttttcgtggtgatcgacccgccgggccagacgccgatcttcatggcgctgacccagggtatggacagccgcaccaaacgcgccatcgcgctgcgcgcctgcctgacggcggcggggatcctggcgatgttcgcggcctttggcgaggcggtgctgggttttgtcggcatctcgatgcccgcctttcgggtcgcgggcggcgtgctcttgttcctcaccgcgctcgacatgctgttcgagcggcgcaccaagcggcgcgaggaccgggccgaggccgaggaacacgccgacccctcggtgtttccgctgggcataccgttgatcgccggtcccggctcgatcgccaccatgatcctgctggcaggccagcatccgggcgccgaggggctggccacggtgattgcggtcatgctggcggtgctggcggtggtgctgttcctctacctgatctcgggtctgttggggcggcttctgggcaagaccgggctgaacgtggtgacccgcctcttgggcatgctgctggcggcgctggcggtgcagttcatcctcgacgggctcagggcctttggctttgccagctga

SEQ ID NO: 61886 - protein, 206 aa, Silicibacter pomeroyi DSS-3
MIDTAFLITAFTTLFVVIDPPGQTPIFMALTQGMDSRTKRAIALRACLTAAGILAMFAAFGEAVLGFVGISMPAFRVAGGVLLFLTALDMLFERRTKRREDRAEAEEHADPSVFPLGIPLIAGPGSIATMILLAGQHPGAEGLATVIAVMLAVLAVVLFLYLISGLLGRLLGKTGLNVVTRLLGMLLAALAVQFILDGLRAFGFAS

SEQ ID NO: 61887 - DNA, 789 bp, Synechococcus elongatus PCC 6301
  CDS (1)..(789): transl_table=11
gtgccagctagcaaaaatgcgcttactctggctgtgggtgttgagtttcgactcccaggtatcacattagtgccacagagtactagctccatgagttttccgtcccaggctgcctttgcgacaaccctgtttgcaatgctcaatcccttggggatgctgcctgtttttattagctacaccgagagtgagcgccgacaagtacaacgctgggctgcgctctttatctctctgacagtctttgcccttctcatcttattcctgctaacaggatccacgctactaagattctttgggatcagcctttcatcattccgaattgccggaggtattttgttgctattgctcggcattaatctcacaattgacaacactgctaaacagacacgggccatcgtcaagcatgaacaggaaagcagtctgcgggcggcagagtccgtctataaaaagattgtgattcccttggccgtaccccttttggttggtccaggagcgatcgctaatgtcattctccacggcactctggctgaaaccgagcaacagtatgggctattggctgagtttgcgttaatcattgccctgatatctctgctcacgtttatcatttttcagtcggggcgctggtttcaaaaggtgatcggggatgttggactctcgattctgacccgtattctgggcctactcgtagcagcgatcggaattcaatttctagtcgctggggtggcagatgttgctgctactgtcgttacgcccgctgtgctccaacagctgcagcgatcgcccatgccttag

SEQ ID NO: 61888 - protein, 262 aa, Synechococcus elongatus PCC 6301
MPASKNALTLAVGVEFRLPGITLVPQSTSSMSFPSQAAFATTLFAMLNPLGMLPVFISYTESERRQVQRWAALFISLTVFALLILFLLTGSTLLRFFGISLSSFRIAGGILLLLLGINLTIDNTAKQTRAIVKHEQESSLRAAESVYKKIVIPLAVPLLVGPGAIANVILHGTLAETEQQYGLLAEFALIIALISLLTFIIFQSGRWFQKVIGDVGLSILTRILGLLVAAIGIQFLVAGVADVAATVVTPAVLQQLQRSPMP

SEQ ID NO: 61889 - DNA, 651 bp, Thermococcus kodakarensis KOD1
  CDS (1)..(651): transl_table=11
atgttagaagtggtggagtttctcaagtatctgatacttctctacggaggcttgtttgcgataacgaaccccgtgggtgcagtccccgtctttttgagcgttacccacgacctgtcctggagggagcggagggagatcgcatctaagacagccatatcggtagttgcaacccttgtggtcttcgccctgctcgggcagtggatattcaagttcttcgggtcgagcacagatgcgtttgccatagcaggtgggatactgttattcaggatggccctcgatatgctctccggaaagctgtcatcggtaaagatcagcaacgaagaaaccgaggagttcagcgaggaagttgtaactcttgaggaagttgcaataattccgctggcgataccacttatctccggcccgggtgcgataacgacggttatgctctacatggccaaaagcacgaccaaccttcagaggttcgcggtaattctgacgataatcctgattgggattaccgtctggttcgttctctgctccgccaacaggataaaggcccggcttgggcgggtcgggatcaaggtgatgacgaggatgatgggtctgatactgacatcaatggcagttcagatgataatcaacggcataaagggcgcgtttggactttag

SEQ ID NO: 61890 - protein, 216 aa, Thermococcus kodakarensis KOD1
MLEVVEFLKYLILLYGGLFAITNPVGAVPVFLSVTHDLSWRERREIASKTAISVVATLVVFALLGQWIFKFFGSSTDAFAIAGGILLFRMALDMLSGKLSSVKISNEETEEFSEEVVTLEEVAIIPLAIPLISGPGAITTVMLYMAKSTTNLQRFAVILTIILIGITVWFVLCSANRIKARLGRVGIKVMTRMMGLILTSMAVQMIINGIKGAFGL

SEQ ID NO: 61891 - DNA, 645 bp, Bacteroides fragilis NCTC 9343
  CDS (1)..(645): transl_table=11
atggacactctcttacctttcgctttactctgttttacctctttctttacgttgactaaccccttgggaacaatgcctgtctttttaaccatgacccatggtatgactgataaggagcgacaagctgttgttcgccgtgctactttcgtttcgtttatcactttaatggtatttgtttttgccggacaattcctttttaagttctttggtatttctaccaatggattccgtattgcaggtggggttatcatttttaagattggttttgatatgttgcaggcccggtatactccaatgaaattgaaagacgaagagattaaaacttatgcggatgatatttcgattactccacttgccataccgatgctttgtggtccgggcgcaatagcaaatgctatcgtgctaatggaagatgcccatacgattgagatgaagggaacgctaattggcattattgctttgatttattttattacttttctgatattgcgcgcttctacccgattggtcaaagtgttgggcgaaacgggaaacaatgtgatgatgcgtttgatggggcttatcctgatggtgattgcagtcgagtgttttgttagtggattacacccgatattggtaggtatcttgaaagaagggctgctttaa

SEQ ID NO: 61892 - protein, 214 aa, Bacteroides fragilis NCTC 9343
MDTLLPFALLCFTSFFTLTNPLGTMPVFLTMTHGMTDKERQAVVRRATFVSFITLMVFVFAGQFLFKFFGISTNGFRIAGGVIIFKIGFDMLQARYTPMKLKDEEIKTYADDISITPLAIPMLCGPGAIANAIVLMEDAHTIEMKGTLIGIIALIYFITFLILRASTRLVKVLGETGNNVMMRLMGLILMVIAVECFVSGLHPILVGILKEGLL

SEQ ID NO: 61893 - DNA, 597 bp, Pseudomonas syringae pv. syringae B728a
  CDS (1)..(597): transl_table=11
atgcttcacgtgttgttcagcgtctatctgaaaatgctggtgctttacagcccgtttttcgttctttcctgcttcatcagcctcacgcgtggtcactcgcgcaaggaacagcgacgcctggcctggaaggtggcactggcgacactggtttccagcgtattgctctatctgttcggacgcgtgattttcgatgtattcggcatcaccgtggatgcgttccggattggtgccggcagcgtgctgttcatatcggcactgggcatggcccagggcaagtcggcggtgcagaccgacaatatccagcaggatgtgaccatcgttcctttgaccatcccgcttaccgtcggccccggcacgatcggtgcgctgctggtcatgggcgtcagtcagccccactgggacgacaaactcaccgccatcctgagtattgcgctggccagcctgaccgtaggcgtcgtgctttacctctccaaccgtatcgaacgaatcctcggcgatcagggtttgcagattgtcagccgcttgatggggttgttcgtctgtgcgctggccgcgcaaatcatcgtcaccggcatccggggctacctgctgccctga

SEQ ID NO: 61894 - protein, 198 aa, Pseudomonas syringae pv. syringae B728a
MLHVLFSVYLKMLVLYSPFFVLSCFISLTRGHSRKEQRRLAWKVALATLVSSVLLYLFGRVIFDVFGITVDAFRIGAGSVLFISALGMAQGKSAVQTDNIQQDVTIVPLTIPLTVGPGTIGALLVMGVSQPHWDDKLTAILSIALASLTVGVVLYLSNRIERILGDQGLQIVSRLMGLFVCALAAQIIVTGIRGYLLP

SEQ ID NO: 61895 - DNA, 606 bp, Psychrobacter arcticus 273-4
  CDS (1)..(606): transl_table=11
atggtattgattaatccgtttagcgctctgacgctatttttggattcgacccgcggttattcgatgaataatcgacgtaaagttgcccgtgttgcttgtctgacgatttttattaccatcagtttttttacgctagcaggcgaaacgcttctcaaagtcttgggtatttcaatcggctcgtttcagttggccggcggtatcttggtgtttttaatcgctctcaatatgatgaatggcgatggtaatccggttaagcctgatcaagaaaacttcgatgtcgaccatctgcaaggtgcgccgccaacgatggcagccgctgttgtaccgattgctattccgatgatgattggaccgggtggtatttcaacggtgattatttactcatcacaagtttccggtatcttgcaagtatccgccattttgattgcgggtttgtttattagtctattttgttatttggcattgatggcagccggtcgtatcagtcgcttattgggtgatacaggactcaatattatgagtcgaattatgggcatgctactcgctgcagttgctatcgaaattatcattaacgggctccgcacgctgttccctgatttgatgtag

SEQ ID NO: 61896 - protein, 201 aa, Psychrobacter arcticus 273-4
MVLINPFSALTLFLDSTRGYSMNNRRKVARVACLTIFITISFFTLAGETLLKVLGISIGSFQLAGGILVFLIALNMMNGDGNPVKPDQENFDVDHLQGAPPTMAAAVVPIAIPMMIGPGGISTVIIYSSQVSGILQVSAILIAGLFISLFCYLALMAAGRISRLLGDTGLNIMSRIMGMLLAAVAIEIIINGLRTLFPDLM

SEQ ID NO: 61897 - DNA, 624 bp, Colwellia psychrerythraea 34H
  CDS (1)..(624): transl_table=11
atgaatttattaatggaacatgcattaaccgttttcatggctttttttgccataatgaaccctatcgccaacaccgcagttttcgcaggattaaccggagataaaaataagcttgaacagagaaaaattgcagctaaggccttaattattacctttatagttattgctagctttgcaattttaggtaaatcaatctttcacttatttggtataacgctcccagcgctgcgaataaccggtggtatattagtctttattgtcggttaccatatgcttcaaggttccggttctaagcttcatcatacccaaggtgatgatagctctgattctgatgtagcagtgtctccattggctgtgccacttcttgcaggaccaggcaccattgccacagcaatgaattattcatcatctaacggatggatggaaataataatcaccctctcagtatttgcagctttatgcctaattacctttatttgttttatctttagttcgcgtattttagccgctataggtaaaagtggcttgagtattgttactcgattgatggggttaattttagctgtcataggcgttcagatgttattagttggaatcaaagcagtcattagcacgctaggctaa

SEQ ID NO: 61898 - protein, 207 aa, Colwellia psychrerythraea 34H
MNLLMEHALTVFMAFFAIMNPIANTAVFAGLTGDKNKLEQRKIAAKALIITFIVIASFAILGKSIFHLFGITLPALRITGGILVFIVGYHMLQGSGSKLHHTQGDDSSDSDVAVSPLAVPLLAGPGTIATAMNYSSSNGWMEIIITLSVFAALCLITFICFIFSSRILAAIGKSGLSIVTRLMGLILAVIGVQMLLVGIKAVISTLG

SEQ ID NO: 61899 - DNA, 597 bp, Pseudomonas syringae pv. phaseolicola 1448A
  CDS (1)..(597): transl_table=11
atgcttcacgtgttgttcagcgtctatctgaaaatgctggtgctttacagcccgtttttcgttctttcctgcttcatcagcctgacccgcggtcactcgcgcaaggaacagcggcgtctggcctggaaggtggcgctggcgacactgatttccagcatcttgctgtatctgttcggtagagtgattttcgatgtattcggaatcacggtcgatgccttcaggattggggctggcagcgtgctgttcatatccgcgctgggtatggcccaaggcaaatcggccgtccagaccgataatatccagcaggatgtgaccattgttccgctgaccattccccttaccgtcggccccggcaccatcggtgcgctactggtcatgggcgtcagtcagcctcattgggatgacaaactcactgccatcctgagtattgcactggccagcctcacggttggcgtggtgctttacctctccaaccgcatcgaacgtatcctgggcgatcagggtttgcagattgtcagccgcctgatggggttgttcgtctgtgcgttggcggcacaaatcatctttaccggtataaggggctatctgctgccctga

SEQ ID NO: 61900 - protein, 198 aa, Pseudomonas syringae pv. phaseolicola 1448A
MLHVLFSVYLKMLVLYSPFFVLSCFISLTRGHSRKEQRRLAWKVALATLISSILLYLFGRVIFDVFGITVDAFRIGAGSVLFISALGMAQGKSAVQTDNIQQDVTIVPLTIPLTVGPGTIGALLVMGVSQPHWDDKLTAILSIALASLTVGVVLYLSNRIERILGDQGLQIVSRLMGLFVCALAAQIIFTGIRGYLLP

SEQ ID NO: 61901 - DNA, 624 bp, Ralstonia eutropha JMP134
  CDS (1)..(624): transl_table=11
atggatacgctcaagtcgttcatctcgctgttggcgctgatcaacccgatcggcgccattccgtttttcatcagcctgaccagccagcagtcggaagcggaaaagctgcgtaccatcaagactgcatcggtctcggtggcgatcgtggtggcggtgtcggcgctgctgggccagcagatcatcgagttcttcaatatctcggtggcgtcgctgcaggtcggcggcgggctcatcatgatcatgatggccatgaacatgctgaacgcccagaccagccgcaccaaggccacgcccgaagaagaggacgaggccgaggcgcggtcaagcatcgcggtggtgccgctggcactgccgctgctgaccgggccgggctcgatcagtaccgtgatcgtttatgcgggcaagacgcagcactggtaccagttgctgatcctggtcggaatcggcgtggtgcttggtgcggtggtgtatggggtgttccgcgcggccgatccgatcgcccgcgtggtggggcgtaccggcatcaatatcggcacgcgcctgatggggctgatcctgtcggcgctggccgttgaattcattgtggacgggctgaagacattattgcctgttttgaaatcatga

SEQ ID NO: 61902 - protein, 207 aa, Ralstonia eutropha JMP134
MDTLKSFISLLALINPIGAIPFFISLTSQQSEAEKLRTIKTASVSVAIVVAVSALLGQQIIEFFNISVASLQVGGGLIMIMMAMNMLNAQTSRTKATPEEEDEAEARSSIAVVPLALPLLTGPGSISTVIVYAGKTQHWYQLLILVGIGVVLGAVVYGVFRAADPIARVVGRTGINIGTRLMGLILSALAVEFIVDGLKTLLPVLKS

SEQ ID NO: 61903 - DNA, 639 bp, Methanosarcina barkeri str. Fusaro
  CDS (1)..(639): transl_table=11
gtgataactggaaacatcgggtttttaatccacgttttcacaattatcttcgttgttgtcaaccctatcagtggagtggtgactttcatctctttgaccagcaagatgagggatgaggaaaaaaacgaaatcgcaaaaaagtcagtcatacttgcgtgcgtaattgccttattttttgcaattgcaggagatatcatacttaacctgttcagcattagcgttgattcactgcggattgcaggaggaatcctgcttttcagcattgcttttgatatgatgcatgctaagatctcaaaggggagaattactgaagaagagatttctcactctcaggagcgagaagacatctggatcttcccgataagccttccgcttctgacaggacccggtacgatcagtacagtgattgtcctgatgggaggaacaggagcaattgtgcaaaaaataataattcttgtatcaatcacactggcgttcattatctgctattacatcttccaattctccaggatgattcacaagctgataggatataatgggatgctggtctttacaaggctgatgggtcttttgcttgctgctcttgcagtggatttaattgttaaaggtatactaaatatataccagttaacaatttga

SEQ ID NO: 61904 - protein, 212 aa, Methanosarcina barkeri str. Fusaro
MITGNIGFLIHVFTIIFVVVNPISGVVTFISLTSKMRDEEKNEIAKKSVILACVIALFFAIAGDIILNLFSISVDSLRIAGGILLFSIAFDMMHAKISKGRITEEEISHSQEREDIWIFPISLPLLTGPGTISTVIVLMGGTGAIVQKIIILVSITLAFIICYYIFQFSRMIHKLIGYNGMLVFTRLMGLLLAALAVDLIVKGILNIYQLTI

SEQ ID NO: 61905 - DNA, 648 bp, Thiobacillus denitrificans ATCC 25259
  CDS (1)..(648): transl_table=11
atgatgcatgacatggacctcctcgaactgctgaaggcggcgctcgcgctgttcgcgatcgtcgatcccgtcggtgtcatcccgatctttctgatggcgacgcacggcttcacgcttacgcaaagtcgcgcggccgcgcgcatcgcggcgctgacggtgcttggcgtgctgacgatcttcgcgttcgccggtgaaacgctgctgaccttcttcggaatccggctcgcggcgttctcggtcgccggcggtttgctgcttcttttgctggcgctgtcgatggtcgaggcgcacgtcagcccgcagcggcagacgcaggacgaggccgtcgaggcggaagagaaagactcggtcggagtcgtgccgcttggcgtcccgcttctcgccggccctggcgcgatcacccacgtcatcgtcgccgccggcgcactcgagggccacacgctgcagcgtggcctgctgctgctaccggtcgggctcgtcgcgctgtcggtatggctcgctttccgcgccgcgcccgtgatcgcgaagcgactcggaaaaaccggcattcacgtcgtcacccgcttgatgggtctgatcatcgcggcgatctcgatcgagatgatcgcccgcggtctcggtgaactgtttccgggcctgctaacctga

SEQ ID NO: 61906 - protein, 215 aa, Thiobacillus denitrificans ATCC 25259
MMHDMDLLELLKAALALFAIVDPVGVIPIFLMATHGFTLTQSRAAARIAALTVLGVLTIFAFAGETLLTFFGIRLAAFSVAGGLLLLLLALSMVEAHVSPQRQTQDEAVEAEEKDSVGVVPLGVPLLAGPGAITHVIVAAGALEGHTLQRGLLLLPVGLVALSVWLAFRAAPVIAKRLGKTGIHVVTRLMGLIIAAISIEMIARGLGELFPGLLT

SEQ ID NO: 61907 - DNA, 594 bp, Anabaena variabilis ATCC 29413
  CDS (1)..(594): transl_table=11
gtggatacgtctattttgattcaaacttttattgctgtgttcgtcttagcagatgcgataggtaatatacccatagttttagctttgaccaagggtatggaaccggaggataggaatagagtaattgataaagcgagtattgtggcgatcgcagttctattactatttgcctttggtggtcaatatattttgacttatttagaaatcagcatggcatctttacgggtagctggggggctgttgttgctgttaattgctttgcaaatgctgcggggagaattggagacaccaaccatcgaagaaggaagggatgtggcgattacacccttggctttaccattgttagccgggccgggtacgctaacaacagtgatgttatttatgtctaaatcccaaagtccacatttggctgtagtgttagggattttagcggcgatgtttgtcacttggttgattttgcgcttggcaaatcccatagaaaaacggattggtttagaaggtggggtaattgtcacccagcttttaggtttcctcttggcggcgttggctgtggagattggtagtacaggaattcgagagttatttttgcagtga

SEQ ID NO: 61908 - protein, 197 aa, Anabaena variabilis ATCC 29413
MDTSILIQTFIAVFVLADAIGNIPIVLALTKGMEPEDRNRVIDKASIVAIAVLLLFAFGGQYILTYLEISMASLRVAGGLLLLLIALQMLRGELETPTIEEGRDVAITPLALPLLAGPGTLTTVMLFMSKSQSPHLAVVLGILAAMFVTWLILRLANPIEKRIGLEGGVIVTQLLGFLLAALAVEIGSTGIRELFLQ

SEQ ID NO: 61909 - DNA, 621 bp, Rhodobacter sphaeroides 2.4.1
  CDS (1)..(621): transl_table=11
atgatcgagacgggcttcctcatcaccgccttcgccacgctcttcgtggtggtcgatccgctggggctggtgccgctcttcatcgcgctgacgcccggcatgacgcgcgaggagcgccgcgcgatcggccttcgcgcctgcttcgtggcggtgggcatcctcaccaccttcggccttctcggcgaggcggtgctgggcttcatcggcatctcgatgtccgccttccgcatcgcgggtgggatccttctgttcctcaccgcgctcgacatgctgttcgagcgccgcacccagcgccgcgagggccagaccgcggccgaccacgaccacgatccgtccgtcttcccgctcgccatcccgctcatcgcgggcccgggcgccatcgcctcgatgatcctgctcgtgggatcggccgaggactggacgggcgttctggccgtccatctggtgatgctggtgacggtggcctcggccttcctcctgttcctcgtcgcaggtccgctcgagcggctgctgggccggatcggcacgctcgtcatcacccggcttctcggcatgctgctcgcggccctctcggtgcagttcgtgatcgacggcatccgcggctcgggcctgctcggctga

SEQ ID NO: 61910 - protein, 206 aa, Rhodobacter sphaeroides 2.4.1
MIETGFLITAFATLFVVVDPLGLVPLFIALTPGMTREERRAIGLRACFVAVGILTTFGLLGEAVLGFIGISMSAFRIAGGILLFLTALDMLFERRTQRREGQTAADHDHDPSVFPLAIPLIAGPGAIASMILLVGSAEDWTGVLAVHLVMLVTVASAFLLFLVAGPLERLLGRIGTLVITRLLGMLLAALSVQFVIDGIRGSGLLG

SEQ ID NO: 61911 - DNA, 639 bp, Burkholderia sp. 383
  CDS (1)..(639): transl_table=11
gtggccttcgacctgaccttttccatcaaggtgttcgcggcgctgttcgcgatcatgaacccgatcgcgaacattcccgtgttcctgtcgctgacggaaggcgcggcggacggcgcgcgccgcaaggttgcgctgacggccgcgatcggcgtgacggtcggctgcatcgtgtcggccgtcgcgggcggtgcgatcctgcacgtgttcggcctgacgatcgacgattttcgccttgcgggcgggctgctggtgctgctgatcgcgctgtcgatgctgcacggcgcaccgagccgccagcattcgccgggcgacgacgaaggcgccgatccggccgcggccgagagcgtcgcgatctatccgctgacgatcccgctgctcgtcggccccggcacgatcgcgacgatgatcgtgctcgggcacagcgcgctgtcgaccgggcaggaactcgcgttcgcgctcgggctcgccgcgtttctcgtgctgctggccgtttcgttgttgtcggcgccgctgatcggccattacctgtcgccgcgcgtgacggcggtgacgcagcgcctgatggggatgattctcgcggcgatcgcgatgcagatgatcgtcgcgagcctgaaggccgcgttcggggtgccgcattga

SEQ ID NO: 61912 - protein, 212 aa, Burkholderia sp. 383
MAFDLTFSIKVFAALFAIMNPIANIPVFLSLTEGAADGARRKVALTAAIGVTVGCIVSAVAGGAILHVFGLTIDDFRLAGGLLVLLIALSMLHGAPSRQHSPGDDEGADPAAAESVAIYPLTIPLLVGPGTIATMIVLGHSALSTGQELAFALGLAAFLVLLAVSLLSAPLIGHYLSPRVTAVTQRLMGMILAAIAMQMIVASLKAAFGVPH

SEQ ID NO: 61913 - DNA, 621 bp, Burkholderia sp. 383
  CDS (1)..(621): transl_table=11
atggatctgctcaaatcgttcatttcgctgctggcgctgatcaacccggtcggtgcggtgccgttcttcctgagcctgacggcgcagcagacggatgccgagcggcggcgcacgatccggatcgcgtcggtgtcggtgttctgcgtgatcacggtgacgacgctgctcgggcagcagatcatcaacttcttcggcatttcggtcgggtcgctcgaagtgggcggcgggatcatcatgctgctgatggcgatcaacatgctgaacgcacagatcggcaacacgcgatcgacgccggaggagcgccacgaggccgagctgaaggacaacatcgcggtcgtgccgctggcgattccgctgctcacgggccccggctcgatcagcacggtgatcatctatgcggcgaactcgcatcactggtatgagcgggccgggctggtcgcgatcggcgcggtcctggcttttctgtgtttcgtcgcgatgcggctcgccgagccgatcgcgaactggatcggccgcacgggcatcaacatcgccacgcggctgatgggtctgatgctgtcggcgctggcggtggaattcatcgtcaatggactgagggcgctactgcctgcactgagatga

SEQ ID NO: 61914 - protein, 206 aa, Burkholderia sp. 383
MDLLKSFISLLALINPVGAVPFFLSLTAQQTDAERRRTIRIASVSVFCVITVTTLLGQQIINFFGISVGSLEVGGGIIMLLMAINMLNAQIGNTRSTPEERHEAELKDNIAVVPLAIPLLTGPGSISTVIIYAANSHHWYERAGLVAIGAVLAFLCFVAMRLAEPIANWIGRTGINIATRLMGLMLSALAVEFIVNGLRALLPALR

SEQ ID NO: 61915 - DNA, 624 bp, Desulfovibrio desulfuricans G20
  CDS (1)..(624): transl_table=11
atggcagacctgtctttccgcagtgttttcgagatagccctgccgctgtttctgattatggacccgctgggcaacgccgcagtgtgcatcggcatgctgaaaggtacaacaccccgcgccatgcgggctatcctgctgcgcgagctgtgcatcgctctcggaatcattttcctgttctattacgtgggcgacgccatgctcgccatgctggatatccatccgtccaccctgcggctggcgggcggcatcatcctcttcatgatatccatcaagatgatttttccgcgggatgaagggtataccgaaaaaacgcaggatcccttcatcgttcccattgcggtaccgcttattgccggaccatcgctgctggcggctgtcatgctgtatgctcaccgtgccgaagcgccgtttcccggttctccggcagtgctgctgggcattctcagcgcatggctgggtaccgcggttatcatgctgttcacccccgaaatgacccgcgtgctgggaaagcgcggcatgcgcgcagccgagcggcttatggggcttatactggtgcttctggcggtgcagatgctggaaaacggcctgatgctctttgtccagagcctgcagagtgcgctctga

SEQ ID NO: 61916 - protein, 207 aa, Desulfovibrio desulfuricans G20
MADLSFRSVFEIALPLFLIMDPLGNAAVCIGMLKGTTPRAMRAILLRELCIALGIIFLFYYVGDAMLAMLDIHPSTLRLAGGIILFMISIKMIFPRDEGYTEKTQDPFIVPIAVPLIAGPSLLAAVMLYAHRAEAPFPGSPAVLLGILSAWLGTAVIMLFTPEMTRVLGKRGMRAAERLMGLILVLLAVQMLENGLMLFVQSLQSAL

SEQ ID NO: 61917 - DNA, 699 bp, Synechococcus elongatus PCC 7942
  CDS (1)..(699): transl_table=11
atgagttttccgtcccaggctgcctttgcgacaaccctgtttgcaatgctcaatcccttggggatgctgcctgtttttattagctacaccgagagtgagcgccgacaagtacaacgctgggctgcgctctttatctctctgacagtctttgcccttctcatcttattcctgctaacaggatccacgctactaagattctttgggatcagcctttcatcattccgaattgccggaggtattttgttgctattgctcggcattaatctcacaattgacaacactgctaaacagacacgggccatcgtcaagcatgaacaggaaagcagtctgcgggcggcagagtccgtctataaaaagattgtgattcccttggccgtaccccttttggttggtccaggagcgatcgctaatgtcattctccacggcactctggctgaaaccgagcaacagtatgggctattggctgagtttgcgttaatcattgccctgatatctctgctcacgtttatcatttttcagtcggggcgctggtttcaaaaggtgatcggggatgttggactctcgattctgacccgtattctgggcctactcgtagcagcgatcggaattcaatttctagtcgctggggtggcagatgttgctgctactgtcgttacgcccgctgtgctccaacagctgcagcgatcgcccatgccttag

SEQ ID NO: 61918 - protein, 232 aa, Synechococcus elongatus PCC 7942
MSFPSQAAFATTLFAMLNPLGMLPVFISYTESERRQVQRWAALFISLTVFALLILFLLTGSTLLRFFGISLSSFRIAGGILLLLLGINLTIDNTAKQTRAIVKHEQESSLRAAESVYKKIVIPLAVPLLVGPGAIANVILHGTLAETEQQYGLLAEFALIIALISLLTFIIFQSGRWFQKVIGDVGLSILTRILGLLVAAIGIQFLVAGVADVAATVVTPAVLQQLQRSPMP

SEQ ID NO: 61919 - DNA, 672 bp, Synechococcus elongatus PCC 7942
  CDS (1)..(672): transl_table=11
atgaattggcccttagtgctgaattttgcagtcgctctctttgccgtcaccaaccctctgggcaatcttcccatcttcatcagctacgtgggcaaggaaaagccttcggttcaacgtctgcttgctctctttttagtgctgacagtttttatttctcagctagtgttcctgctgagcggcaccgccatccttcgcttcttcgggatttctttggccgcttttcggattgccggcggcatcattttgctgctgattggtatcaacatgattcaaggcgatcgcacgaaagccaaccaaaagcttgctgacattgggattaagagcgcgtttcgtcgagcggaaaccgtctatcaatcttttttcatccctttaggtatcccgatctttgtcggccctgcctcaattagcaccgctgttctttacggcaatttagccaataacctagcaaccaacttgggcttaattggcgcagtcattgctatttgtatagtgagttggctcacgctttcagttgccagctggttcgagcggatcttgggtgatctcggattagaaattacctcccgtcttttgggattaatgctagcggcaatcggagttcagttcattttgaatggattgggcgaagctacgattggctttatcaatcgggccattatcaatagtccctga

SEQ ID NO: 61920 - protein, 223 aa, Synechococcus elongatus PCC 7942
MNWPLVLNFAVALFAVTNPLGNLPIFISYVGKEKPSVQRLLALFLVLTVFISQLVFLLSGTAILRFFGISLAAFRIAGGIILLLIGINMIQGDRTKANQKLADIGIKSAFRRAETVYQSFFIPLGIPIFVGPASISTAVLYGNLANNLATNLGLIGAVIAICIVSWLTLSVASWFERILGDLGLEITSRLLGLMLAAIGVQFILNGLGEATIGFINRAIINSP

SEQ ID NO: 61921 - DNA, 654 bp, Rhodospirillum rubrum ATCC 11170
  CDS (1)..(654): transl_table=11
atggattatttcggccttgccgcgaaatacattcccttcgtcacgctcggattgctgccgatcatgaatccgctaagcaccgtgccgctgtttctggaattgaccaagcgcatgtcgcccgagcgcaagcaccagcaggcgcgccgggcctgtctttacgccctgtcgattctcgccgtgttcttgttcatcggcaacggcatcatcacgctgtttggcatctcgctggccggcatccgggtggccggcgggctgatcattctggtgctggccttccgcatgctgttctcgggcgaaggcgaagaagcctcgatcgaaacggaagccaccgagatcaagcgcgccaacctcgatttctcgttctctccgttggccatgcccagcctcgccggcccgggatcgatcgccgtggtcatgagctacggctcgcagatccccgatgacgccctggtctttggccatttcatcgtcatctgcggcatctcgatcaccgtgctcatcgcctatatcgcccttgccggctcggcctggatcgccaaattcctcggcgagcacggcattcaggcggtcaccaagatcatgggctttctgctgacctgcatcgccgtccagttcatcgcctcgggcatccgcgatttctcgcaaaccctgtag

SEQ ID NO: 61922 - protein, 217 aa, Rhodospirillum rubrum ATCC 11170
MDYFGLAAKYIPFVTLGLLPIMNPLSTVPLFLELTKRMSPERKHQQARRACLYALSILAVFLFIGNGIITLFGISLAGIRVAGGLIILVLAFRMLFSGEGEEASIETEATEIKRANLDFSFSPLAMPSLAGPGSIAVVMSYGSQIPDDALVFGHFIVICGISITVLIAYIALAGSAWIAKFLGEHGIQAVTKIMGFLLTCIAVQFIASGIRDFSQTL

SEQ ID NO: 61923 - DNA, 636 bp, Rhodospirillum rubrum ATCC 11170
  CDS (1)..(636): transl_table=11
atgatcgattccttgttatcgcagatcaccaccttgctcgttcttgtcgatccgctgggtctgctggcgattttcgtcgggctgaccgccgggcgaccggcggcctatcgccgtcaggtggcgatcaagggtaccttgctcgccaccttcgtgctcgtcgccttcgccgtggccggcggtaaattcctgcatttgctggggatcgacatctcggccttccgtatcgccggcggcctgatgctgctggtgctggcccatgagatgatcttcgccaagcgcaccatccgccgcaacgaaagcgccaaggccatggacaaggagatgggcggcgaaacctccgatcccagcgtctttcccttggccatcccgctgatcgccggtcccggggcgatcaccgccgtgttgctgttctcgcgcgaaagcgatggcaccgccattggcctgatgtgggtgatcgtcgccattctggccgtgaccttgcccacgctcgcccttctgctgaccgccggggcggtccagcgcatgctgggcgaaaccctgacccatacgctcgaccgcctgctcggcattatcctgggcgccttggccgtccagttcatcatcagcggcgccaaggaggccctgggcgccctgtaa

SEQ ID NO: 61924 - protein, 211 aa, Rhodospirillum rubrum ATCC 11170
MIDSLLSQITTLLVLVDPLGLLAIFVGLTAGRPAAYRRQVAIKGTLLATFVLVAFAVAGGKFLHLLGIDISAFRIAGGLMLLVLAHEMIFAKRTIRRNESAKAMDKEMGGETSDPSVFPLAIPLIAGPGAITAVLLFSRESDGTAIGLMWVIVAILAVTLPTLALLLTAGAVQRMLGETLTHTLDRLLGIILGALAVQFIISGAKEALGAL

SEQ ID NO: 61925 - DNA, 633 bp, Moorella thermoacetica ATCC 39073
  CDS (1)..(633): transl_table=11
ttgtctgtctttttcttacatgccgtcgtatcaatcctggccatccttaatcccattggtaacctgcctatcttcctctccctggtcgaaggggaggcaacggccgatcaaatcgccaccgccagaagggctaccctggccgccttcggcttcctaacactctttgtcctcctgggtaataatatcctcctcttcttcggcatcaccctggctgccttccgggttgccggcagtattatcctgtttagcatcggctataaaattctccagggtcgtaacattcacagccgcagcctggcgccggatatccatgaagacatcatggcccgggacgatgtagccattactcccctggccactcctatccttgccggtcctggttccatcaccaccgtcatgctcctggtcggctccgagtggcggctccggaccatcctcctgaccgttgccgctatagccgtcgtcaccctgggcacctacttaatcttccgttatgccacccttattacccgtcacctgggacccatggaaatgaatatcatcagccgcgtcatgggtctcctcctggcagtgatcgccgtccagatgggcgcttccggcctgctggaactcttcccgggcctgggaaggtga

SEQ ID NO: 61926 - protein, 210 aa, Moorella thermoacetica ATCC 39073
MSVFFLHAVVSILAILNPIGNLPIFLSLVEGEATADQIATARRATLAAFGFLTLFVLLGNNILLFFGITLAAFRVAGSIILFSIGYKILQGRNIHSRSLAPDIHEDIMARDDVAITPLATPILAGPGSITTVMLLVGSEWRLRTILLTVAAIAVVTLGTYLIFRYATLITRHLGPMEMNIISRVMGLLLAVIAVQMGASGLLELFPGLGR

SEQ ID NO: 61927 - DNA, 603 bp, Burkholderia thailandensis E264
  CDS (1)..(603): transl_table=11
ttggagtcgaacttcctgtcggcgacggtgctcctcatcctcatcaccgatccgctcggcaacatcccgctcgtcatcgcggcgctgcgggatgtgccgcgcgagcggcgcgtgaaggtgatcctgcgcgaagtcgcgatcgcgttcgtgatcctgctgttcttcatggtcgtcggcgaccgcttcctgcggatgatgagcctcaccgacctgtcgctgcggatcggcggcgggatcgtgttgtttctgatcgcgctgcggatgatctttccgcacccggacggcgcgctcggcaacgatccgcgcgcgggcggcgagccattcatcgtgccgctcgcgattccggcgctcgccggaccctcggcgctcgcgacggtgatgctgctcacgtcgcaggcgcccggcaagacgctcgagtgggcgggcgcgctgaccgtgacgatgctcgtttgcgcgatcacgctcgtgcttgccgagcggattcagcagcggctcggcgagcgcaccgtgatcgcgttcgagcggctgatggggctcgtgctcgtcgcgatttccgtcgaaatgatgatggcgggcatccgcgcgttcgttcaccagttgtga

SEQ ID NO: 61928 - protein, 200 aa, Burkholderia thailandensis E264
MESNFLSATVLLILITDPLGNIPLVIAALRDVPRERRVKVILREVAIAFVILLFFMVVGDRFLRMMSLTDLSLRIGGGIVLFLIALRMIFPHPDGALGNDPRAGGEPFIVPLAIPALAGPSALATVMLLTSQAPGKTLEWAGALTVTMLVCAITLVLAERIQQRLGERTVIAFERLMGLVLVAISVEMMMAGIRAFVHQL

SEQ ID NO: 61929 - DNA, 597 bp, Syntrophus aciditrophicus SB
  CDS (1)..(597): transl_table=11
atgaaatctttctggctgtgttttgtccccctttttgtcgccgttgacgccgtcgggattctacctctgtttatgagtctcactgaggggctggaaacccggaaactgcggaggatcatctctcaatccgtcataaccgccattgccgtggcactggtatttctcgttctgggtaaggccctgatggatctgctgggaatcaccatcgcggatttcatggtggcgggcggcattctcctgttcgtcatttccctgaacgatgttctggccacggaaaaagcccagcagcacacagttgatcccgacagcctgggagcggtgccgctgggggttcccctcatctccgggcccgcggtgctgactaccacgttgttgctgagtaattcctacgggtttgttccgacggccacggccctgattctgaacatcctgctggccggcggcgtttttttctcttcccggataatttatcgatttctcggtaaaaccggtgccaagacaatttccaagatcacaagcctcctgctggcggccatcgccgtgatgatcattcgccgggggctcttcatcatcctcgatctcgaaatcgccggatag

SEQ ID NO: 61930 - protein, 198 aa, Syntrophus aciditrophicus SB
MKSFWLCFVPLFVAVDAVGILPLFMSLTEGLETRKLRRIISQSVITAIAVALVFLVLGKALMDLLGITIADFMVAGGILLFVISLNDVLATEKAQQHTVDPDSLGAVPLGVPLISGPAVLTTTLLLSNSYGFVPTATALILNILLAGGVFFSSRIIYRFLGKTGAKTISKITSLLLAAIAVMIIRRGLFIILDLEIAG

SEQ ID NO: 61931 - DNA, 621 bp, Novosphingobium aromaticivorans DSM 12444
  CDS (1)..(621): transl_table=11
atgtggcagcttttcctttcggcgttcgtcaccctgttcgtggtgatcgacccgcccggctgcgcaccgatctatgcggggctcaccgccaacgccaccgcgcggcaggccttcagcatggccctgcgcgcctgcctgatcgcaaccggcatccttctggtcttcgcgctgttcggcgaggacctgcttggcgcattgcacatcgaactcgacagcttccgcatcgccggtggcatcatgctgttcctgatcgcgctcgacatggtattcgagaagcgcaccgaacgccgcgaggaacgtgccgagaaggtgcgcaccgcccagccgcaggtggaggacgtctcggtcttccctatggccatgccgatgctcgcggggccggggtcgatcgcttcggtcatgctgctgacggcgcgggccaacggcacgcaggaaaccgccatcatccttggcgctctggcggtggtcatgatcctcagcttcgccgcgctcgtcgccgcacggccgctgatccgcgcgctgggctcgcaggtcgaggcggtcatcacccgtctgctcggcgtgctcctggcagcccttgccgcgcagttcgtgatcgacgggatacaggcgcaattctga

SEQ ID NO: 61932 - protein, 206 aa, Novosphingobium aromaticivorans DSM 12444
MWQLFLSAFVTLFVVIDPPGCAPIYAGLTANATARQAFSMALRACLIATGILLVFALFGEDLLGALHIELDSFRIAGGIMLFLIALDMVFEKRTERREERAEKVRTAQPQVEDVSVFPMAMPMLAGPGSIASVMLLTARANGTQETAIILGALAVVMILSFAALVAARPLIRALGSQVEAVITRLLGVLLAALAAQFVIDGIQAQF

SEQ ID NO: 61933 - DNA, 624 bp, Saccharophagus degradans 2-40
  CDS (1)..(624): transl_table=11
atgatagattatttggccgtttttataaccttttttgcagttatagacccaataggcaccgtgccggtgtttattgctgtaacgcgtgagtacgatcaaaaaacaaagcgtcgtatagcattgctggccactattgttgctgcgtgtgtattgctgttttttgtggttataggcgaaataatcctaaaggcgctatctattccgctttcggcatttcagatatctggggggatagtgttatttctgtttgcgcttaatatgatttttggagacagtaaaccagaagaagagattaagtttctagaggatgatcacaaggatacggctattttcccgttggccgtgccctccattgctagccctggggcaatgttggcggctgtgctgctaacagaaaacgcaatattcagtttgttcgagcaagttcaaacagtggtaatgatgttgctggttttggtagtggtttacatattaatgctcttgtccgggttcattactcgatttattggtactagcggtgccagcgtggtaagccgggtaatgggattgattttatctgcaattgctaccactaatatattaacgggtattaatgaatactatcaatttgtgccagcgtcatag

SEQ ID NO: 61934 - protein, 207 aa, Saccharophagus degradans 2-40
MIDYLAVFITFFAVIDPIGTVPVFIAVTREYDQKTKRRIALLATIVAACVLLFFVVIGEIILKALSIPLSAFQISGGIVLFLFALNMIFGDSKPEEEIKFLEDDHKDTAIFPLAVPSIASPGAMLAAVLLTENAIFSLFEQVQTVVMMLLVLVVVYILMLLSGFITRFIGTSGASVVSRVMGLILSAIATTNILTGINEYYQFVPAS

SEQ ID NO: 61935 - DNA, 660 bp, Methylobacillus flagellatus KT
  CDS (1)..(660): transl_table=11
atgagcatactggaagccctcaaatacatttccatcgtcgtgatcggcctcctgcccatcatgaaccccttgaccacgatcccgctctacatggcgctgacgcaacgcatgacgccggaaacgcgcaagctgcaggcacgcaaggcctgcatctatgcgttcttcatactcacgaccttcctgctgctgggcaatggcatcattgcgctgttcggcatctcgatggccggcatccgggtggcgggcggcctcatcatcctcatcctggcattgcgcatgatcttctccgggctggattcatcctccagcgtggactccgaacccgaggaaatcaagagtgccaacctggattactcattctcgccgctggcgatgcccagcctggccgggccaggctcgatcgccgtcgtcatgagtttcggctcgcagattccggaaggctcccacctcatcggtgaccccatcgtcatcgccgggatcgccatcaccatcggcatcgcctacttggcgctgtcatcggccacccatatcgagaaaatgctcggcgagcacggcatgcaggcagtgaccaaaatcatggggttcctgctcacctgcgtggcagtgcagttcctggcttccggcatccgcgatttctatatcgagttttccaccatataa

SEQ ID NO: 61936 - protein, 219 aa, Methylobacillus flagellatus KT
MSILEALKYISIVVIGLLPIMNPLTTIPLYMALTQRMTPETRKLQARKACIYAFFILTTFLLLGNGIIALFGISMAGIRVAGGLIILILALRMIFSGLDSSSSVDSEPEEIKSANLDYSFSPLAMPSLAGPGSIAVVMSFGSQIPEGSHLIGDPIVIAGIAITIGIAYLALSSATHIEKMLGEHGMQAVTKIMGFLLTCVAVQFLASGIRDFYIEFSTI

SEQ ID NO: 61937 - DNA, 600 bp, Burkholderia xenovorans LB400
  CDS (1)..(600): transl_table=11
gtggagtacaccttcctgtccgcgaccatcctgctgattctgatcaccgacccgctcggcaacattccgctcttcatcagctgtttgcgcggtgtgtcgccgaagcggcgcacgatcgtcattctccgcgaggtggcaatcgccttcgcgatcctgctggtcttcatggtggccggcgacggctttctgcgcatgatgagcctgaccgatcagtcgctgcgcatcggcggcgggatcgtgctgtttctcattgcgctcaggatggtgtttccgcacccggacggtccattcggcggcgacacgcgcggcggcgaaccgttgatcgtgccgctcgccattccggccctggcaggaccgtccgcgctggccaccgtgatgctgctgacgtcgcaggcgcccggcaagatgttcgagtggatcgccgcgctaaccgtcaccatgatcgtctgtgcggtcgtgctgatgctggcggagcgcattcaggcgtggctcggcgagcgcgccatgatggccttcgaacggttgatgggtctcgtgctggtggcaatttcggtggagatgatgctcggcggtatccggtcgttcgtgcatcaactgtga

SEQ ID NO: 61938 - protein, 199 aa, Burkholderia xenovorans LB400
MEYTFLSATILLILITDPLGNIPLFISCLRGVSPKRRTIVILREVAIAFAILLVFMVAGDGFLRMMSLTDQSLRIGGGIVLFLIALRMVFPHPDGPFGGDTRGGEPLIVPLAIPALAGPSALATVMLLTSQAPGKMFEWIAALTVTMIVCAVVLMLAERIQAWLGERAMMAFERLMGLVLVAISVEMMLGGIRSFVHQL

SEQ ID NO: 61939 - DNA, 621 bp, Burkholderia xenovorans LB400
  CDS (1)..(621): transl_table=11
atggacattctgaagtcgtttatttcgctgctggcgttgatcaacccggtcggcgccatcccgttcttcatgagcctgacagcgcatcagagcgacgccgagcggcgtagaaccatccggatcgcggccatttcggtgttctgcgtgattgcggtgaccacgctgctcgggcagcagatcatcgccttcttcggcatttcggtcggctcgctcgaagtgggcggcgggatcatcatgctgctgatggcgatcaacatgctgaacgcgcagatcggcaacagccgttccacgccggaagagcgccacgaagcggagcagaaggacaacatcgcggtcgtgccgctggcgattccgttgttgaccggtccgggcgcgatcagtactacgatcatctatgcggccggctcggcgcattggtacgaccggatcagcctcgtcgcgatcggcgcggtattggcggcgatctgctttttttcgctgcgccttgccgaaccgattgcccgctgggtgggtcgcacgggtatcaacatcggcacgcggctcatgggtttgatgttatcggcgctggcggtggaattcatcgtcgatggattgaaggcattgctgcctaatttgaaatga

SEQ ID NO: 61940 - protein, 206 aa, Burkholderia xenovorans LB400
MDILKSFISLLALINPVGAIPFFMSLTAHQSDAERRRTIRIAAISVFCVIAVTTLLGQQIIAFFGISVGSLEVGGGIIMLLMAINMLNAQIGNSRSTPEERHEAEQKDNIAVVPLAIPLLTGPGAISTTIIYAAGSAHWYDRISLVAIGAVLAAICFFSLRLAEPIARWVGRTGINIGTRLMGLMLSALAVEFIVDGLKALLPNLK

SEQ ID NO: 61941 - DNA, 645 bp, Methanococcoides burtonii DSM 6242
  CDS (1)..(645): transl_table=11
atggatcatgtcagttatttcattaattcatttatcacattgtttgttattgtaagcccgattacaggagtaattacatttataacactgaccaatggtctgagtttacgtgaaaagaacgtaattgctaaaaaatctgtcacattggcatttataatttccatgttcttcatttttacagggaccattattcttgacgttcttgggataagtcttgattcactaaaagttgccggtggtcttttacttctaacggtagcttttgatatgatgcatgccaagatatcaagacaaagcatcactgataaagagataaatgcatcctatgaacgtgatgatatctggatcttcccaattgcaatgcctatactggcaggtcctgctaccataacaacagccataattcttacagaaactgctgaagtggtccagcaaaaaatgctcctcatactcgcagcagtaataacatattcagtagccatggtaacatttctcttttccagaagaattcacaaaaaaatgggatataatggaatgctggtgctcacaaggctattcggtctgttcctaggtgcaatttcagtagatatgatcgccagtggcgtctggggactttatatgagcatgactatactgccaatttaa

SEQ ID NO: 61942 - protein, 214 aa, Methanococcoides burtonii DSM 6242
MDHVSYFINSFITLFVIVSPITGVITFITLTNGLSLREKNVIAKKSVTLAFIISMFFIFTGTIILDVLGISLDSLKVAGGLLLLTVAFDMMHAKISRQSITDKEINASYERDDIWIFPIAMPILAGPATITTAIILTETAEVVQQKMLLILAAVITYSVAMVTFLFSRRIHKKMGYNGMLVLTRLFGLFLGAISVDMIASGVWGLYMSMTILPI

SEQ ID NO: 61943 - DNA, 639 bp, Methanococcoides burtonii DSM 6242
  CDS (1)..(639): transl_table=11
atggattctgtgggttattttatttattcatttatcacattgctcgtcattgtgagccctattaccgcagtaattacatttataacgctcaccaatagtctgactctggatgaaaagaatgtaattgcaaaaaaatcggttgctctggcttttgtcattgccgtaattttcatgtttacgggaaacattattttggatgttcttgggataagtcttgattcactgaaagttgctggtggtctgttactgatcatgatagcttttgaaatgatgcaagctaagacctcaagagaaagcattactgataaagagatggatgaatcttctaaacgtgaagatatctggatattcccaattgccatgcctatactaacagggcctgccacaataacaacagtcatagttcttacagagactgctggattagttcagcaaaaaacgctcattatgctcgcattggtactaacttattcaataaccctggtaacatttctattttccagaagaatacacaaaaaaatgggatacaatggaatgctggtacttaccagactgtttggcctgttcctgggtgcaatttcagtgagtatgatcgccagtgggatctggggactttatttgagtctgaatccactataa

SEQ ID NO: 61944 - protein, 212 aa, Methanococcoides burtonii DSM 6242
MDSVGYFIYSFITLLVIVSPITAVITFITLTNSLTLDEKNVIAKKSVALAFVIAVIFMFTGNIILDVLGISLDSLKVAGGLLLIMIAFEMMQAKTSRESITDKEMDESSKREDIWIFPIAMPILTGPATITTVIVLTETAGLVQQKTLIMLALVLTYSITLVTFLFSRRIHKKMGYNGMLVLTRLFGLFLGAISVSMIASGIWGLYLSLNPL

SEQ ID NO: 61945 - DNA, 651 bp, Acidobacteria bacterium Ellin345
  CDS (1)..(651): transl_table=11
atgcgcggggcgtttgaggcgcatatcgtccagttcacgctggtcgcgctgagctctgtctttttcctggtggatccgttcgcgatcatcccgaccttcctcgtgatgacggcgcggcacgatcccattacacgccggcggatggcggcacgggcatgctggaccgcatttattgtgctgacggcatttgcgtttgcgggcacggctatcttcaaaatctttggcattactttgccggcatttgagatcgcgggaggtctgatcctattgctgatcgggctcgacatgatgcaggccgagcgtccgacgcaagagggttcgcctgaaacggccgagggttcggtgaaagacgacgtcagcatcacgccgctcggcatcccgatgcttgccgggcccggagcgatctctacggtgatggtgctgaacggcaccgcgcgcgattggtccacgacgattccggtatttgcggcaatcgcgctgacgtgtttcgcttcctactggattttgcgtggcgcggaacgcgtgagccagaagatgggacagactggcatccgtgtgctgatgcgaatcatgggacttctgttgatggcgatcgccattcagttcatgattaacgggcttaccaatctaggtgtaatccacgctgattga

SEQ ID NO: 61946 - protein, 216 aa, Acidobacteria bacterium Ellin345
MRGAFEAHIVQFTLVALSSVFFLVDPFAIIPTFLVMTARHDPITRRRMAARACWTAFIVLTAFAFAGTAIFKIFGITLPAFEIAGGLILLLIGLDMMQAERPTQEGSPETAEGSVKDDVSITPLGIPMLAGPGAISTVMVLNGTARDWSTTIPVFAAIALTCFASYWILRGAERVSQKMGQTGIRVLMRIMGLLLMAIAIQFMINGLTNLGVIHAD

SEQ ID NO: 61947 - DNA, 624 bp, Silicibacter sp. TM1040
  CDS (1)..(624): transl_table=11
atgattgataccgcgtttctgattacctcttttgtgacgctatttgtgatcatcgacccgattggattgatgccggtgttcctggccctgacccaaggcatgaccagcaagcagcgccgcgccattgccattcgcgcctcgatcaccggtattggcatccttgcggtttttgcgctctttggcgaaagcgttctgggctttatcggcatctccatgccggcattccgtgtggcgggtggtatcctgttgttcctaaccgcgctcgacatgctctttgaacgccgcacggcccgtcgtcagcaccagggcgacgagattgcgcccgaggatgacccttcggtctttccaatggcgattccgctgatcgcggggcccggctccattgcgacagtgatccttctgaccgggcagcaccccggtatcgaagggtttgcctcggtcatggccatcgttgttgcggtcatcgcattgatgcttgggatgttttccatctccggcgcactggaacgcctgctcggccccgtgggcatcaatgtcgcgacacgccttttggggatgcttctcgcggcactctctgtgcaatttgtcctcgacgggctgagcgcttttggttttgccagctag

SEQ ID NO: 61948 - protein, 207 aa, Silicibacter sp. TM1040
MIDTAFLITSFVTLFVIIDPIGLMPVFLALTQGMTSKQRRAIAIRASITGIGILAVFALFGESVLGFIGISMPAFRVAGGILLFLTALDMLFERRTARRQHQGDEIAPEDDPSVFPMAIPLIAGPGSIATVILLTGQHPGIEGFASVMAIVVAVIALMLGMFSISGALERLLGPVGINVATRLLGMLLAALSVQFVLDGLSAFGFAS

SEQ ID NO: 61949 - DNA, 627 bp, Myxococcus xanthus DK 1622
  CDS (1)..(627): transl_table=11
atgccggaatacgcgtcgctgttcctcgtctcgctgtcggccatcttcttcgtggtggaccccattggcgtcgtcccgctgttcctggcgatgacggccggggactcgcaggagaaggtgcgccgcactgccatgcgcgcctgcctggtggcctgcgggatgatgctgttcttcgccctcttcggcggcgtcatcttcaaggtgttcggcgtgtcgctgggcgccttccgggtggccggtggcatcctgctgctcatcaccgcgttggacatgcttcgcgcccgcccggcggagacgcgcaccacgccgtccgaggaacaggaaggcgtggtgaaggaggacgtggccatcgtccccctcgccattccactgctggcgggcccgggcgccatcgccaccgccatggtgctgatggccaagggcgacacgctcgtctccgccatccccgtgctggccgccgtcgtgctgacgttcgtggccagctacttcatcctccgcgcctccgggctcatccagcgcgtgctgcgccaatccggcgtggccatcgtcgagcgggtgatgggactcatcctggccgccatcgcggtgcagttcatcgcggacggtggcaaggagctgttcaagtag

SEQ ID NO: 61950 - protein, 208 aa, Myxococcus xanthus DK 1622
MPEYASLFLVSLSAIFFVVDPIGVVPLFLAMTAGDSQEKVRRTAMRACLVACGMMLFFALFGGVIFKVFGVSLGAFRVAGGILLLITALDMLRARPAETRTTPSEEQEGVVKEDVAIVPLAIPLLAGPGAIATAMVLMAKGDTLVSAIPVLAAVVLTFVASYFILRASGLIQRVLRQSGVAIVERVMGLILAAIAVQFIADGGKELFK

SEQ ID NO: 61951 - DNA, 618 bp, Rubrobacter xylanophilus DSM 9941
  CDS (1)..(618): transl_table=11
gtgctcgactacgccttcaacgcgttcgtcacgctgctcgtggtggtggacccgccggggctcgcccccgtcttcgcggcgctcaccggcgggtaccccgcaaagcgcaagcgggagaccgcgctcaggggcgcgctgctgggggcggcgatcctcctcgggttcgccctcgccggggacgtgctgctcggggcgctcggcataagcctcgccgccttcaggatcgcggggggcatcctgctgttcatcctcgcgctggacatggtcttctcctccccccgcggcctgcgctcgcgcaccgtgcgcgagcaggaggaggaccactacgaccacgacatctccgtcttcccgctggccatcccgctcatcgccggccccggcgcgatagccaccgtgctgctgtacaccggcgggcggggcgcgctggagctcgcggtcttcgtgggggtgctgctcgcggtgctgctgctcaccctcgcctcgctcctgctcgcctccaggatcatgggcctcctcggggagaccggggccaacgtcctctcgcgggtgctgggggtggtcatcgcggcgctggcggcccagttcgtgctcgacggggtgcgctcgagcctcctctga

SEQ ID NO: 61952 - protein, 205 aa, Rubrobacter xylanophilus DSM 9941
MLDYAFNAFVTLLVVVDPPGLAPVFAALTGGYPAKRKRETALRGALLGAAILLGFALAGDVLLGALGISLAAFRIAGGILLFILALDMVFSSPRGLRSRTVREQEEDHYDHDISVFPLAIPLIAGPGAIATVLLYTGGRGALELAVFVGVLLAVLLLTLASLLLASRIMGLLGETGANVLSRVLGVVIAALAAQFVLDGVRSSLL

SEQ ID NO: 61953 - DNA, 654 bp, Mesorhizobium sp. BNC1
  CDS (1)..(654): transl_table=11
atgcagattcgaaagatgcccatgccgccctacgacgccatcctgaatgctttcaccacactgcttgtgacggttgatccgccgggtctggcacccttgttcctggcactgacggctggcatgaaccgccaggaacgccatcaagtcgcgatccgcgcgtgcctgatctcccttggcgtgctggtgttgttcgcgctggcgggaagctcgatcctctccgtcctcggcatcacgatcccggctttccgcgtcgccggcgggatgcttctttttgttatcgccttcgaaatgatcttcgaacgccggcagcagcgccacaagaggagcgccgaacgcgcgatcacgcgcgatatgatccacaacatcgccgcctttccgttggcgatcccgctcaccgccgggccgggcgcgatctcggccacgctccttctttccggcaccgcctcggcccctggcgcgcggctggtgatggtcgcgatcctgctggtggtcatcctgatcacctatctcgtcttcgtgctggccgagcgcatcgatcggtttttgggcgaaacgggacggtcgattttgacccgccttctgggcttacttctgtccgcacttgcggtgcagttcgtggctgatggcgccagggaacttattcagaacggctag

SEQ ID NO: 61954 - protein, 217 aa, Mesorhizobium sp. BNC1
MQIRKMPMPPYDAILNAFTTLLVTVDPPGLAPLFLALTAGMNRQERHQVAIRACLISLGVLVLFALAGSSILSVLGITIPAFRVAGGMLLFVIAFEMIFERRQQRHKRSAERAITRDMIHNIAAFPLAIPLTAGPGAISATLLLSGTASAPGARLVMVAILLVVILITYLVFVLAERIDRFLGETGRSILTRLLGLLLSALAVQFVADGARELIQNG

SEQ ID NO: 61955 - DNA, 627 bp, Haemophilus somnus 129PT
  CDS (1)..(627): transl_table=11
atggaattttctgtttatctacaattttttattgggttaattgcgttggttaatccaattggggttgttcctatcttttatacgatgacatctggtcaaagtcgtgttcagcaaagtcatactgctatgattacttgtttttcgattgtcgttattttattgatcagtttttatttcggtaatttcattttaagttcgttcaatatatcgattaattcattcagaattgccggcggtattgtcgttgtgatgattgctttaactatgattaatggaaaaattggtgatcacaaaattaataaagaggaacaaaaagaggattttagcgaaaaagataatattgcagtcgttccgttagctatgccaattttagcgggtccaggatcaattagtgctactattgttctaggttctagtcagagttcatggagcgaatacttatattcgtctattacaatcgcactttttgggttaacttgttatattttatttcgttattcagagccagttatagaaaaattaggtaagacaggatcaaatgtaataacaaggattatggggttattgctaatgtctttaggtgtagaaattatcactaccggcttaaaaaatataggcgttttttag

SEQ ID NO: 61956 - protein, 208 aa, Haemophilus somnus 129PT
MEFSVYLQFFIGLIALVNPIGVVPIFYTMTSGQSRVQQSHTAMITCFSIVVILLISFYFGNFILSSFNISINSFRIAGGIVVVMIALTMINGKIGDHKINKEEQKEDFSEKDNIAVVPLAMPILAGPGSISATIVLGSSQSSWSEYLYSSITIALFGLTCYILFRYSEPVIEKLGKTGSNVITRIMGLLLMSLGVEIITTGLKNIGVF

SEQ ID NO: 61957 - DNA, 600 bp, Shewanella sp. MR-4
  CDS (1)..(600): transl_table=11
atggatatattttctgctgcggtaatgttgtttttgatcatggatcccctcggtaatttaccgattttcgcgtcgattttaaggcatatcgatccgaaaaaacgtcgtagggttttgatccgtgaactgattttcgcattattgatcatgttggccttcctgtatgccggcgaagccatcctcagtttcttaaatctgcgttccgagtcagtcagtattgctggcgggattatcctgttcctgatcgccattcgaatgattttccctcagccgggcggcgtggttggtcttgcggcgggagaggaaccctttatcgtccctatggccattcctttgatggcggggccatcgattctggctgcgcttattttactcgcgcacaccgacagcactcgcatgggtgactggacgatagcgctagtgtctgcgtggggagcgagtgcagttatcctaatgttctataagctttttacccgtatgttgggtgaaaaaggcttaacggcagttgagcgcttgatgggaatggtactggttatgatctcggtgcaaatgtttctcgatggggtgtcgaattatctgaagactgcgagcccgatctaa

SEQ ID NO: 61958 - protein, 199 aa, Shewanella sp. MR-4
MDIFSAAVMLFLIMDPLGNLPIFASILRHIDPKKRRRVLIRELIFALLIMLAFLYAGEAILSFLNLRSESVSIAGGIILFLIAIRMIFPQPGGVVGLAAGEEPFIVPMAIPLMAGPSILAALILLAHTDSTRMGDWTIALVSAWGASAVILMFYKLFTRMLGEKGLTAVERLMGMVLVMISVQMFLDGVSNYLKTASPI

SEQ ID NO: 61959 - DNA, 633 bp, Shewanella sp. MR-4
  CDS (1)..(633): transl_table=11
ttggagttaacactttacgttaaattttttcttggtctggttgccattatcaaccccattggtttgttgccagtgtttgtgagccttactagccatcaaaccgaagccgagcgtaaccatacgggtaaagtggctaactttgcggtggtggtgatcctgctggtgaccatagtggcggggcaacatattttaaatatgtttagcatttcactctcagcctttaggatcgctggcggcacgctgatcgcgattattgcgatgtcgatgctgcagggtaaattaggtgaagtaaaacgcaaccaagaggaagaccgcgaatcttcggcgatggagtccgtggcggtggtgccgttagccttgccgttaatggcaggccctggtgcgattagttcggtcatcgtgtttgccgcagagcataattccttctccaattttgtggcgatgtttatcacagtgatcatttttggcttggtaagttttgccctgttcagaatggcgtcaatcatttacaaaattcttggtaaaacaggcattaacgttattacccgtttgatggggctattaatgctgtcgatcgggattgaggtgattgccgctggtattaaagggctgttcccacaactctttagctaa

SEQ ID NO: 61960 - protein, 210 aa, Shewanella sp. MR-4
MELTLYVKFFLGLVAIINPIGLLPVFVSLTSHQTEAERNHTGKVANFAVVVILLVTIVAGQHILNMFSISLSAFRIAGGTLIAIIAMSMLQGKLGEVKRNQEEDRESSAMESVAVVPLALPLMAGPGAISSVIVFAAEHNSFSNFVAMFITVIIFGLVSFALFRMASIIYKILGKTGINVITRLMGLLMLSIGIEVIAAGIKGLFPQLFS

SEQ ID NO: 61961 - DNA, 594 bp, Shewanella sp. MR-7
  CDS (1)..(594): transl_table=11
atggatatattttctgctgcggtaatgttgtttttgatcatggatcccctcggtaatttaccgattttcgcgtcgattttaaggcatatcgacccgaaaaaacgtcgtagagttttgatccgcgaactgatttttgcattagtgatcatgttggctttcctgtatgccggcgaagctatcttaagtttcttaaatctacgttccgagtccgtcagcattgctggcgggattattctattcctgatcgccattcgaatgattttccctcagccgggcggtgtggtgggtctcgcggcgggagaggaaccctttatcgtccctatggccattccattgatggcggggccatcgattctggctgcgcttattttactcgcgcacaccgacagcactcgcatgggcgactggacgatagcgctagtatcagcttggggagcgagtgcggttatcctaatgttctataagctctttacccgcatgttgggtgaaaaaggactaacggccgttgagcgcttgatggggatggtactggtaatgatatcggtgcaaatgttcctcgatggggtttcaaattatatgaaaaccgccagctaa

SEQ ID NO: 61962 - protein, 197 aa, Shewanella sp. MR-7
MDIFSAAVMLFLIMDPLGNLPIFASILRHIDPKKRRRVLIRELIFALVIMLAFLYAGEAILSFLNLRSESVSIAGGIILFLIAIRMIFPQPGGVVGLAAGEEPFIVPMAIPLMAGPSILAALILLAHTDSTRMGDWTIALVSAWGASAVILMFYKLFTRMLGEKGLTAVERLMGMVLVMISVQMFLDGVSNYMKTAS

SEQ ID NO: 61963 - DNA, 633 bp, Shewanella sp. MR-7
  CDS (1)..(633): transl_table=11
ttggagttaacactttacgttaaattttttctcggcctcgttgccattatcaaccccattggtttgctgccagtgtttgtgagcttaaccagtcatcaaaccgaagccgagcgtaaccatacgggtaaagtggcgaactttgcggtggtggtgatcctgctagtgaccatagtggcgggacaacatattttgaatatgtttagcatttcgctctcggcctttaggatcgcaggcggcaccttgatcgcgattattgcgatgtcgatgctgcaggggaaattgggggaagtgaaacgcaaccaagaagaagatcgcgaatcttcggccatggagtccgtggctgtggtgccgttagccttgccgttaatggctggccccggcgcgattagctcggtcatcgtgtttgccgctgagcataataccttctccaattttgtggcgatgtttattaccgtgattatttttggtttggtgagttttgccttgtttagaatggcatcaatcatttataaaattctcggtaaaacaggtattaacgttattacccgtctgatggggctattaatgctgtcgatcgggatcgaggtgattgccgctggaattaaagggctgttcccacaactctttagctaa

SEQ ID NO: 61964 - protein, 210 aa, Shewanella sp. MR-7
MELTLYVKFFLGLVAIINPIGLLPVFVSLTSHQTEAERNHTGKVANFAVVVILLVTIVAGQHILNMFSISLSAFRIAGGTLIAIIAMSMLQGKLGEVKRNQEEDRESSAMESVAVVPLALPLMAGPGAISSVIVFAAEHNTFSNFVAMFITVIIFGLVSFALFRMASIIYKILGKTGINVITRLMGLLMLSIGIEVIAAGIKGLFPQLFS

SEQ ID NO: 61965 - DNA, 630 bp, Alkalilimnicola ehrlichei MLHE-1
  CDS (1)..(630): transl_table=11
gtgctggaactggccaccatcgccttcgccacctttttcattaccatcggtccggtggacgtggccttcgtctatgccgcgctcaccacccggctgagcctggctcagcgccgacggatggccgtgcggggcacattgatcgccactctgatcctgttgcccgtcctgttctttggtgaggccgcattggcctggctggggatctcctttccggcgctgcagaccgcgggcggcatcctgctattgctgattggcatcgatatggtctttgcccgcatgtccggtggcatttcgaccacggaggaggagacccgtgaggcccagggccgggacgatatctcggtctttccactggccaccccgttgatcgccgggccgggcgccatgggtgccgcggtgctgatggccggacgcgctggtgacgactggtgggcccagggggtggtgctggcggccctgttggtggtgctggcactgatgctcgtgtgcctgctggttgcggtgcagattcagcggttcttgggcaccaccggggcgcatgtggtcacccgcgtcttcggcgtgttgctatgcgccctggccgtgcagtttattttcgacggtctggcggacagcggtctggtgggctga

SEQ ID NO: 61966 - protein, 209 aa, Alkalilimnicola ehrlichei MLHE-1
MLELATIAFATFFITIGPVDVAFVYAALTTRLSLAQRRRMAVRGTLIATLILLPVLFFGEAALAWLGISFPALQTAGGILLLLIGIDMVFARMSGGISTTEEETREAQGRDDISVFPLATPLIAGPGAMGAAVLMAGRAGDDWWAQGVVLAALLVVLALMLVCLLVAVQIQRFLGTTGAHVVTRVFGVLLCALAVQFIFDGLADSGLVG

SEQ ID NO: 61967 - DNA, 747 bp, Alkalilimnicola ehrlichei MLHE-1
  CDS (1)..(747): transl_table=11
atgctggtattgctcgagtacctgatcattactttcgtcgcggtcttcgtgatcgtcaacccgttgacgacctcgttcgtcttcatggcgttactgcccaccgcctcggcgcgacggcgccggaccatcgcccggcgcgccaccgtcatcgccaccgccctgttttttctcttcgccaccctgggtgggctgatcttccagatcttcggcatcaccctggccgccttccgcatcgccggcgggctcatcctgttcggggtggccatggcgatgatccgccagaccctgccctcggaggccgaaacggcggaacaggcacgcaacgacgaagggcggatcaccgatgacatctcggttatcccgctggccatcccctttatcagcgggcctggggccatcgccacggtcatgatcctgaccagtgaggcccccacgctctaccacttggcgctggtctacctggcggtattaagctgcacggtcacctgctacttcgcgatgatttactcgcgccatatcgtccgctttctcggcgataccgggaaggagatcctgaccaagatcttcggactgatcctggcggtcctggccatccagttcgtgattaatggcgtgagcgacgccgtcaccggctacatgctcgattacaatctgctggacggcagccaggtcgaggacccgcgggcgatcgagcgccgggatctgcgcgatgaacgcggcccgggccccggggagggccgcgaatag

SEQ ID NO: 61968 - protein, 248 aa, Alkalilimnicola ehrlichei MLHE-1
MLVLLEYLIITFVAVFVIVNPLTTSFVFMALLPTASARRRRTIARRATVIATALFFLFATLGGLIFQIFGITLAAFRIAGGLILFGVAMAMIRQTLPSEAETAEQARNDEGRITDDISVIPLAIPFISGPGAIATVMILTSEAPTLYHLALVYLAVLSCTVTCYFAMIYSRHIVRFLGDTGKEILTKIFGLILAVLAIQFVINGVSDAVTGYMLDYNLLDGSQVEDPRAIERRDLRDERGPGPGEGRE

SEQ ID NO: 61969 - DNA, 651 bp, Hyphomonas neptunium ATCC 15444
  CDS (1)..(651): transl_table=11
atgtcgcctgaactgatctctctttttaccgctgcctttgtaaccttcttcgtgctgattgatgcgccgggggtggcgccgatctttgctacgctgacggcaaagggctcaccggcctatcgccgcaagatggcgtacaagtccgtcttcgtggcgacgatcatcatgctgctgttcgctttcggcggcgcctggctgctcgatgcgatgcacatctccatcgatgccttccgggcggccggcggcgttctgctgttcctgatcgcgctcgacatggtgttcgagaagcgcaccgagcggcgggaacagcgcgccgatgaagtgctcgaagaacaccggaatgatccggagccggaagacgtgtcggtgttcccgatgggcattccgatgattgccgggcctggatcgatcgccacggcgatgttttacatgacggaagcggaaagcattgcccatcagggcgtcgtgcttgccgcgatcggagctaacctcctgatcacgctgattatctttctgctggcaacgccgatcgttcgcctgatgggcgcgagcgtggccggggcgctgacgcggattctcggggttatcctggcggcgctttcggctcagctcatcctcgatggcatccgcggcgcgtttaatatcggctga

SEQ ID NO: 61970 - protein, 216 aa, Hyphomonas neptunium ATCC 15444
MSPELISLFTAAFVTFFVLIDAPGVAPIFATLTAKGSPAYRRKMAYKSVFVATIIMLLFAFGGAWLLDAMHISIDAFRAAGGVLLFLIALDMVFEKRTERREQRADEVLEEHRNDPEPEDVSVFPMGIPMIAGPGSIATAMFYMTEAESIAHQGVVLAAIGANLLITLIIFLLATPIVRLMGASVAGALTRILGVILAALSAQLILDGIRGAFNIG

SEQ ID NO: 61971 - DNA, 648 bp, Rhizobium leguminosarum bv. viciae 3841
  CDS (1)..(648): transl_table=11
atggcaagcgccgaccaattgatcaacgccttcacgacgctgctcgtcaccatcgacccaccggggctcgcgccgatctttctggggctgacgacaggcatgagccgaaccgagcgcaagcaggtggcgctgcgcggctcggtcatcgccttcatcatcctcgccgtcttcgcgctgtttggcgcaggcgttctcggcgtgctcgggatttcgatcggcgccttccgcatcgccggcgggctgctgctgttctggatcgccttcgagatggtgttcgagaggcggcagcagcgcaaagagaaggcgaccgaggcggcgatcaccaaggatcatatcgagaatatcgccgtcttccccctcgccttgccgctgattgccggcccgggtgcgatctcggcgacaatcctgctggccggcacgctggccacctcgatcgggaaagcgcaactgatcggcgtcattgccgccaatctgctgctgaccttcctcatgctgctcatcgccgaaaggctggaccgtttcctcggcgtcaccggccgggccatcctgacgcgactcctcggcgtcatcctcgccgcccttgccgcacagttcgtcgtcgacggggcgaaatcggcgttcaatctgatcagcgcgacaccgcactga

SEQ ID NO: 61972 - protein, 215 aa, Rhizobium leguminosarum bv. viciae 3841
MASADQLINAFTTLLVTIDPPGLAPIFLGLTTGMSRTERKQVALRGSVIAFIILAVFALFGAGVLGVLGISIGAFRIAGGLLLFWIAFEMVFERRQQRKEKATEAAITKDHIENIAVFPLALPLIAGPGAISATILLAGTLATSIGKAQLIGVIAANLLLTFLMLLIAERLDRFLGVTGRAILTRLLGVILAALAAQFVVDGAKSAFNLISATPH

SEQ ID NO: 61973 - DNA, 648 bp, Rhizobium leguminosarum bv. viciae 3841
  CDS (1)..(648): transl_table=11
atggatttcacagtcatcgatgccgcactcgtcggaaaacttctcctgctgcttctggtcggcctggggccgaagatcgccctggtgccgtttctggagaagacccatgccttcgataccgaaaccaaggcgcgcatcggccgccagatggttttggtcgcagtagtcacagccttgatcctttttgccaccggcgctttgctaatgcggcttctccatatcacgggtggcgcagtcgccgtcgccggcggtatcatcctcgcgcttatcgcgatcaagatggcatcaggaccaacagagaagccgcatgatgaaacggggcttcccgtcgatccagaaaagatcgccgtctttccgcttgcggtcccttacctgctcaatcctgtcggcatcaccgtcgtcatcatcgcctccggcgaagtcgtctcgattgccagcgcgatactcgtcatcggcctgatcctgatcgtcggcgcgttggactatctagtgttcaccaacatcgacgcgctcgccaagcgcatgaagcctgccagtctgatcgtctcggaggtcgtcttcggcattctgctgaccgcagtcgcagtccaactgatcgtcagcgggcttggcagtcttggcatcatcaccccgaccgctgcgcattag

SEQ ID NO: 61974 - protein, 215 aa, Rhizobium leguminosarum bv. viciae 3841
MDFTVIDAALVGKLLLLLLVGLGPKIALVPFLEKTHAFDTETKARIGRQMVLVAVVTALILFATGALLMRLLHITGGAVAVAGGIILALIAIKMASGPTEKPHDETGLPVDPEKIAVFPLAVPYLLNPVGITVVIIASGEVVSIASAILVIGLILIVGALDYLVFTNIDALAKRMKPASLIVSEVVFGILLTAVAVQLIVSGLGSLGIITPTAAH

SEQ ID NO: 61975 - DNA, 594 bp, Pseudomonas aeruginosa UCBPP-PA14
  CDS (1)..(594): transl_table=11
atggatatgttcggcgtcgccgtcctgatctttctggtcaccgatcccttcggcaacatcgccgtgttcctcgccgcgctgaaaggcgtcgcccccgggcgccgcctgcgcgtggcgtttcgcgagctggccttcgccctgggcctgctgctgctcttcctcaccctcggcgagcacatcctcagcggcctcggcctgtcccgcgaggcgaccgggatcgcgggtggcatcatcctgttcgtgatcgccatgcgcctgatcttcccctcgccccaagggctgctcggcgaagtgcccgacggcgagccgctgctggtgcccctggccaccccggcggtggccgggccctcggcgctggcgatgctgatcaccctgcgcaccaccttcgacggtccgctgtgggagctttacctggcggtggtgctggcctgggccgctactgcgctgatcctgctgcaggcggcgttcctccagcgtttcctcggcccgcgcgggctgaccgccatcgagcgcctggccggcatgctgctgatcatgctcagcgtcgatatgctgttggacaacctgcgcagcgtgttgcacatcgccgcctga

SEQ ID NO: 61976 - protein, 197 aa, Pseudomonas aeruginosa UCBPP-PA14
MDMFGVAVLIFLVTDPFGNIAVFLAALKGVAPGRRLRVAFRELAFALGLLLLFLTLGEHILSGLGLSREATGIAGGIILFVIAMRLIFPSPQGLLGEVPDGEPLLVPLATPAVAGPSALAMLITLRTTFDGPLWELYLAVVLAWAATALILLQAAFLQRFLGPRGLTAIERLAGMLLIMLSVDMLLDNLRSVLHIAA

SEQ ID NO: 61977 - DNA, 618 bp, Azoarcus sp. BH72
  CDS (1)..(618): transl_table=11
atggaaaccctgaaggccttcgtcaccctgctcgcgctgatcaacccggccggggcgattccgctctttctcagcctcaccgccagccagagcccggggcaggtgaagcgcaccgtgaagaccgcgtccatcgccaccgccgtggtgatcgcggtggcggcgttgttcggcgagatcctgctgcgcatcctcggcatctcgatcgcctcgctgcaggtgggcggcggcatcctgctgttcggcatcgcgctgaagatgttcaacgccgagctgggcggcgcgcgcagcacgccggaggaagccgacgaggcggccgagcgcaacagcatcgcggtggtgccgctgaccatcccgatgctggccggcccgggcacggtgagcaccgtcatcatctacgccgaacgcgcgcatcagtggtgggaggtgctggctttgctggcgatcggcgcggtgatcggcgccatcgtgtggctgacgctgaacctcgccgggccgatcagccggctcgccggccagaccggcatcaacatcatgacccgcgtgatgggcctgctgctggcggcgctggcggtggagttcatcgcggtcggcgtgcgcaccctggtcgcggtgtcatga

SEQ ID NO: 61978 - protein, 205 aa, Azoarcus sp. BH72
METLKAFVTLLALINPAGAIPLFLSLTASQSPGQVKRTVKTASIATAVVIAVAALFGEILLRILGISIASLQVGGGILLFGIALKMFNAELGGARSTPEEADEAAERNSIAVVPLTIPMLAGPGTVSTVIIYAERAHQWWEVLALLAIGAVIGAIVWLTLNLAGPISRLAGQTGINIMTRVMGLLLAALAVEFIAVGVRTLVAVS

SEQ ID NO: 61979 - DNA, 639 bp, Acidovorax sp. JS42
  CDS (1)..(639): transl_table=11
atggacttgaagccgctcatcacgctgctggccatcgtgaatccattggccatcgtgccgttcttcatccactacaccagcggtttcaacgccgcgcagcgccggcgcaccgtccaggtggcggcgttcagcgcgttttgcgtgatcgcggcctgcgcgctcgtcggcctgcaaatcctggacttcttcaacatctcgttgcagagcttccaggtgggcgggggcatgctgctgctgatcagcgccatgaacatgctcaatgcgcagccggccgaggccaagccgcacacccacgagctggagcagggcgccgaaaaggcggccgcgggcagcagcatcgccgtggtgccgctgaccatcccgctgctcacggggccggcggccatgtccaccgtggtgatctacgccgaccgcgcgcagagcatctggcagcacctggcgctggtgggctacggcgtggtggtgggcgcggccacggcgctgtgctttgcactggccgagcccatcgagcgcgtgctcggcaagacgggcatcaacgtgatgacgcggctcatgggactgatcctcgcggcgctggccgtggaggtgatggccgacgggctgagcaagctgttcccggtgctggccgcgcgttcatag

SEQ ID NO: 61980 - protein, 212 aa, Acidovorax sp. JS42
MDLKPLITLLAIVNPLAIVPFFIHYTSGFNAAQRRRTVQVAAFSAFCVIAACALVGLQILDFFNISLQSFQVGGGMLLLISAMNMLNAQPAEAKPHTHELEQGAEKAAAGSSIAVVPLTIPLLTGPAAMSTVVIYADRAQSIWQHLALVGYGVVVGAATALCFALAEPIERVLGKTGINVMTRLMGLILAALAVEVMADGLSKLFPVLAARS

SEQ ID NO: 61981 - DNA, 597 bp, Xylella fastidiosa Ann-1
  CDS (1)..(597): transl_table=11
atgacgattatgtctgctgcgttgttactgttcctgattcttgacccattgggcaacatccctgtgtttctcagcgtactcaaaccattgcctgcccaacggcaacgcgtggtactagcgcgtgaattgctgattgcgctgatggtactcatgggtttcctatgggggggcaaatacgtcttggagttgatgcacttgcgacaggagtcggtgtcgattgccggaggcatcgtcttgttcctcattggtatccggatgatctttcctcggccagaaggattgatgggtgaaatccctgagggagagccttttatcgtgccattagcaatcccattggttgctggtccatcgggcatggctgcagtgatgctgatggggagcaacgagccggcccggttgtgggattggaactgtgcgttgttgctggcttggagtggagcagcagcgatcttattttctgcgacgttcttgtacaaactgctgggccatcgtgtgttgacagcattggagcgcttaatgggaatgttgttagtggcaatctcggtgcaaatgtttatggacggaatcagcacatacctcaaagcgtcaatgcattga

SEQ ID NO: 61982 - protein, 198 aa, Xylella fastidiosa Ann-1
MTIMSAALLLFLILDPLGNIPVFLSVLKPLPAQRQRVVLARELLIALMVLMGFLWGGKYVLELMHLRQESVSIAGGIVLFLIGIRMIFPRPEGLMGEIPEGEPFIVPLAIPLVAGPSGMAAVMLMGSNEPARLWDWNCALLLAWSGAAAILFSATFLYKLLGHRVLTALERLMGMLLVAISVQMFMDGISTYLKASMH

SEQ ID NO: 61983 - DNA, 582 bp, Croceibacter atlanticus HTCC2559
  CDS (1)..(582): transl_table=11
atggagttaaatttcaaggaaatatttacagcaactatggtattgtttgctgttatagatattataggtaatattcccattatactatccctaagggataaaaatggtcatatacattctgaaaaagcagctatagttgcagctgtagtaatgattgtatttttatttttaggagaaagtatactatcacttattgggattaatgtaaatgaatttgctgttgctggtgcttttatactattttttattgctttagaaatggtattaggagttacattgtttaaagaagatgaaagtagctcagaccttgcggcaattttccctttagcatttcctatgttggcaggtccaggtagtttaactactctgttatcactaagagcagaatactcattggcaaatgtaattgcagcaattattgtaaatattataattgtttatattgtactaaagacttcctctaggctacaacgatttttaggtaaaaatggaattatcgtaatacgtaaggtatttggggttattctattagcaattgcagtaaaattatttgcagaaaatattcaggaactttttaattaa

SEQ ID NO: 61984 - protein, 193 aa, Croceibacter atlanticus HTCC2559
MELNFKEIFTATMVLFAVIDIIGNIPIILSLRDKNGHIHSEKAAIVAAVVMIVFLFLGESILSLIGINVNEFAVAGAFILFFIALEMVLGVTLFKEDESSSDLAAIFPLAFPMLAGPGSLTTLLSLRAEYSLANVIAAIIVNIIIVYIVLKTSSRLQRFLGKNGIIVIRKVFGVILLAIAVKLFAENIQELFN

SEQ ID NO: 61985 - DNA, 615 bp, Croceibacter atlanticus HTCC2559
  CDS (1)..(615): transl_table=11
atgtctgaaattattaccactgtactatttttatttgctgttatagatccgcttggatcagtaccagtttacttagaggctactaagaaatttgacaaagcaaaaaaaacaagagtagctattagagcaacacttatagcattctctatcttattattctttatagtaattgggcagcttattttagaaggtatggaaatatctttagatgcatttcaaatttcaggaggtgtaatattattcctttttgcattaacaatgatttttggagacggaaaaccatcccaagaaaaaagtcatatagatgattataaacacgttgctgtatttccgttagctataccttcaattgcttcaccaggtgctattatggctgtggttttaatgacaaacaacaacctctatactattaaggaacaaatcattacaactattcttgttttagttgttataggccttacttgcttacttctacttgcagccaatgtagtacaaaaacgtattggagaatatgggattactgtaataagtaaagttatgggacttatactagcatcttatgctgtacaaagtatactaactgggttacgagattttttcaccgtacttaattaa

SEQ ID NO: 61986 - protein, 204 aa, Croceibacter atlanticus HTCC2559
MSEIITTVLFLFAVIDPLGSVPVYLEATKKFDKAKKTRVAIRATLIAFSILLFFIVIGQLILEGMEISLDAFQISGGVILFLFALTMIFGDGKPSQEKSHIDDYKHVAVFPLAIPSIASPGAIMAVVLMTNNNLYTIKEQIITTILVLVVIGLTCLLLLAANVVQKRIGEYGITVISKVMGLILASYAVQSILTGLRDFFTVLN

SEQ ID NO: 61987 - DNA, 660 bp, Sulfitobacter sp. EE-36
  CDS (1)..(660): transl_table=11
atgctggaatggcccaatctcttgcgagagttgattaccttgtttgtcgtgatcgaccctattggcagccttcccgtctttcttttcgcgacagccaacgtcccgcaacacctgcacaaaagctttgcgctgcgggccgtactggtggccggtctggtcttgcttgggttcctcgtgggcgggcaatatctgcttgagaaccttgggctgcggctggggtcgtttcaggtcgcgggcgggattatcctgttcctcttcgcgctcagcatgattttcggcgatccgaaaccgacgcaggaaatcgaggcggcagagcgggatcatctcgccggtgcggtctttccgctcgccatgccgtctatcgcctctccgggggcgatgctggcgattgtgatcctgactgacaaccacaccaaccagatatcagaccagctggtcacggcgggcctgctggttgtcgtgctgctgttcacgcttgtgcttctgttgctcgcagggcggatcggtcacctgatggggaccacaggcgccagcgtgatcagccgcgtcatggggatcattctggcgaccgtcgcggtagatgccacgcttggcgggctggatgcgctggatatcctcaacatcgcccccgtcgaagacgccccgcttagcgcagagtaa

SEQ ID NO: 61988 - protein, 219 aa, Sulfitobacter sp. EE-36
MLEWPNLLRELITLFVVIDPIGSLPVFLFATANVPQHLHKSFALRAVLVAGLVLLGFLVGGQYLLENLGLRLGSFQVAGGIILFLFALSMIFGDPKPTQEIEAAERDHLAGAVFPLAMPSIASPGAMLAIVILTDNHTNQISDQLVTAGLLVVVLLFTLVLLLLAGRIGHLMGTTGASVISRVMGIILATVAVDATLGGLDALDILNIAPVEDAPLSAE

SEQ ID NO: 61989 - DNA, 639 bp, Sulfitobacter sp. EE-36
  CDS (1)..(639): transl_table=11
atgatggcacttgatctggcattcatgatcaccgcgtttgcgacgatgatcgtgatcattgacccctttgcgattggcccgatgtttctggctctgacccccggtatgacaccgcgccagcgccggttgattgcgtggcggtctgtggtcatcgcggggctgctgctgctggtctttgctgcgtttggcgaggctgtgcttggctttatcgggatctccatgcccgccttccgtgtcgcgggcggcgtgctgctgtttctgaccgcgcttgatatgttgttcgaccgccgcacgaaacgccgcgagggccatgccgaggcggatgacgatcacgacgacccatcggtatttccgctggccattcccttgatcgcgggccctggctctatcgcgtcggtgatcctgttgacgggcgagaaaccgggccttgaagggctggtgaccgtcgtcgcgatcactttcgccgtcctgatcatcatgggcatcacgatgcaggccagcggttaccttgaaaacgctttgggcaaggtcgggatcaacgtgatcacgcggcttttggggatgctgcttgccgcgctgtcggtgcaattcgtgctcgacgggcttagcgcctttggtttcggaccgggtccgggctga

SEQ ID NO: 61990 - protein, 212 aa, Sulfitobacter sp. EE-36
MMALDLAFMITAFATMIVIIDPFAIGPMFLALTPGMTPRQRRLIAWRSVVIAGLLLLVFAAFGEAVLGFIGISMPAFRVAGGVLLFLTALDMLFDRRTKRREGHAEADDDHDDPSVFPLAIPLIAGPGSIASVILLTGEKPGLEGLVTVVAITFAVLIIMGITMQASGYLENALGKVGINVITRLLGMLLAALSVQFVLDGLSAFGFGPGPG

SEQ ID NO: 61991 - DNA, 615 bp, Roseovarius nubinhibens ISM
  CDS (1)..(615): transl_table=11
atggacaccgcctttctcatcaccgcctttgtcaccttcttcgtgatcatggacccgccgggcctcgccccggtctttgccgccctgacccaaggcatgtcggcccagcgccgccgcgccatcgcgctgcgcgcctgtctggtggcggccggtgtgctcatcgccttcgcggccttcggcgagtcgatcctcggctttatcggcatcaccatgcccgcctttcgcatcgccggcggcatccttcttttcctgaccgcgctcgacatgctctttgaacgccgcaaccagcggcgtcagacccgcggcgaagaggatgaccatgacgacccgtcggtctttcccatggcgatcccgctcatcgccgggccgggcaccatcgccaccgtgatcctgctcaccgggcagcaaccgggctgggaaggctttgcccttgtcgtcggcgtcatgctggcggtgctgacgctgaactttgtctttctgctcggggcgagcctcatcgaccgggcgctcggcaagaccggcatcgtggtggtgacgcggcttctcggcatgttgctggcggcgctggcggtgcaattcgtgctcgacggcgtgcgcggtttcggcctcgcctga

SEQ ID NO: 61992 - protein, 204 aa, Roseovarius nubinhibens ISM
MDTAFLITAFVTFFVIMDPPGLAPVFAALTQGMSAQRRRAIALRACLVAAGVLIAFAAFGESILGFIGITMPAFRIAGGILLFLTALDMLFERRNQRRQTRGEEDDHDDPSVFPMAIPLIAGPGTIATVILLTGQQPGWEGFALVVGVMLAVLTLNFVFLLGASLIDRALGKTGIVVVTRLLGMLLAALAVQFVLDGVRGFGLA

SEQ ID NO: 61993 - DNA, 621 bp, Oceanicola batsensis HTCC2597
  CDS (1)..(621): transl_table=11
gtggattacagcgtatatatcaccgccttcgtgacgctcttcgtcatcatcgacccggtcgggctgacgccgctcttcgctgcgctgacgcagggccagccaccggcccagcggcgtgccatcgccctgcgctcctgcgtgatcgcgctggccctgctggcgatcttcgccgtcttcggcgaggcggtgatgggtttcgtcggcatcaccatgccggccttccgcatcgcgggcggggtgctgctgttcctcaccgcgctcgaaatgctcttcgagaggcgcagcaaacggcgggaggaccaggccgaccatgtcgaggacctgcccgacccttccgtctttcccctcgccacgccgctgatcgccgggcctggcgccatcgccaccgtcatcctgctggccgggcggcagcccgactggatcggtgcggcgatgatcgtgggcgtcgcggcgctggtcatcctgatggtcttcaccctgttcctcaccgccggcctgctcgaacggctgctggggcgcacgggcatcaacgtggtcacgcgcgtgctgggcatgctgcttgccgcgctttcggtacagttcgtgctcgacgggctgcgggatttcggtctggcagggtga

SEQ ID NO: 61994 - protein, 206 aa, Oceanicola batsensis HTCC2597
MDYSVYITAFVTLFVIIDPVGLTPLFAALTQGQPPAQRRAIALRSCVIALALLAIFAVFGEAVMGFVGITMPAFRIAGGVLLFLTALEMLFERRSKRREDQADHVEDLPDPSVFPLATPLIAGPGAIATVILLAGRQPDWIGAAMIVGVAALVILMVFTLFLTAGLLERLLGRTGINVVTRVLGMLLAALSVQFVLDGLRDFGLAG

SEQ ID NO: 61995 - DNA, 633 bp, Synechococcus sp. RS9917
  CDS (1)..(633): transl_table=11
atgtctctgcttcacaccgccgtcggcatcttcaccatctccaacccgatcggcaacctgccgatctatctctcgttcaccgacgggaacaagcgaaaggatcgggcgattgcccgtagcagcgccttcacgtttttgattgccttgttgctggccacctggctgggcgacgccctgcttggtttcttcggcatcggtcgaccggccttccaggtggccggtggcctgatcgtggtgctgatcggcctgtcgatgctgcggtccgaaccctccaaggtgcatcacgaccccgactcggtggatcgggatcaggattccgccgtcaaaggcattgttcccctcggcatcccgctgctggctggccctggcaccctcacggtggtgatcgccgatcccgccgccgccagcatgggcggaaagttcggcctcagcctggtggtgcttcttctcaccgtggtggtgtatgtgatcttcgatgccggtgagatgctgtcgtcaaagatcagcacctcggcgttgcaggtgctcaccaagatcatgggcctgctgctcacggccatcgccgtgcagatgctcttcagtggactgagcgccggtttccctgtgctgatgcagcacgctctcagcgggtga

SEQ ID NO: 61996 - protein, 210 aa, Synechococcus sp. RS9917
MSLLHTAVGIFTISNPIGNLPIYLSFTDGNKRKDRAIARSSAFTFLIALLLATWLGDALLGFFGIGRPAFQVAGGLIVVLIGLSMLRSEPSKVHHDPDSVDRDQDSAVKGIVPLGIPLLAGPGTLTVVIADPAAASMGGKFGLSLVVLLLTVVVYVIFDAGEMLSSKISTSALQVLTKIMGLLLTAIAVQMLFSGLSAGFPVLMQHALSG

SEQ ID NO: 61997 - DNA, 666 bp, Synechococcus sp. WH 5701
  CDS (1)..(666): transl_table=11
atgccgccaccgatcattccccaccacttcatggttcagttcgtcacctccatggtggcgttgctgaatcccctgggcgatttcgccctgttcctggccctcacccagggacgcagccgcgccgagcagaagagcatcggcaatcaggcggctgtggcgatcggcgtgatcatgctcacctccctctggttgggcagagccattctgggcggcatcggtatcagcatcggcgcgttctcgattgcgggaggcattgtgctgttcggcatcggccttggcatgttgaacagcaaatccggtgactcctcaaagacagaatccaatcaggacaacatcgatgcgggtcggatgaaaacctcaccggcggtggttcccctggcgatcccgatctctgccgggcctggtgtgatcacggccctgcttgtggcctcccacagcaatgaggcagggattcccggcctgctggccctgtcggtcgccagtgtggtgatggcggggatgatggccgtggtgttctggtatgccccggccctcggcaggctgatgggcccctcgggtatgcagatcaccacccaaatcatgggactgatcgttacggcgatcgcctcccagatggtgctgaatggcttgaagagcgctgctccaatgttcatccccccgtcatag

SEQ ID NO: 61998 - protein, 221 aa, Synechococcus sp. WH 5701
MPPPIIPHHFMVQFVTSMVALLNPLGDFALFLALTQGRSRAEQKSIGNQAAVAIGVIMLTSLWLGRAILGGIGISIGAFSIAGGIVLFGIGLGMLNSKSGDSSKTESNQDNIDAGRMKTSPAVVPLAIPISAGPGVITALLVASHSNEAGIPGLLALSVASVVMAGMMAVVFWYAPALGRLMGPSGMQITTQIMGLIVTAIASQMVLNGLKSAAPMFIPPS

SEQ ID NO: 61999 - DNA, 639 bp, Photobacterium sp. SKA34
  CDS (1)..(639): transl_table=11
atgcacgacttaataacagtcgctattactgtattcatgggtttcttcgctatgatgaatccctttgcgaatacggcagtatttgtgggaatgacaggtggaatgccagcaaaacaaacaagagcaattgcatttaaggcgctggttacggctttttgtatcatcacaacgttctgttttttaggaaaagggatctttagtgtatttggtattacgctacctgcattacgtttagcgggggggattttagtctttcttgttggttatcacatgctacaaggtaatacatcaagcatgcatgcagcaaaggaagaagaaacatccgatattggtactgatattgcgatttctccattagctctacctttacttgcaggtcctggtacgattgcgacggccatgaactactctgctgcagggggaatgtttcatattcttgtaacggtttctgcctttgctttactgtgtgtgatcacgtttttttgctttatttatggccctaaactaatagaaaaaattggtcaaagtgggatcagtattattacgcgcttaatgggattaattttaaccgtgattggaatgcagatggggatccaaggggttcatgatgcagtcgtgttattctctggcgttaagtaa

SEQ ID NO: 62000 - protein, 212 aa, Photobacterium sp. SKA34
MHDLITVAITVFMGFFAMMNPFANTAVFVGMTGGMPAKQTRAIAFKALVTAFCIITTFCFLGKGIFSVFGITLPALRLAGGILVFLVGYHMLQGNTSSMHAAKEEETSDIGTDIAISPLALPLLAGPGTIATAMNYSAAGGMFHILVTVSAFALLCVITFFCFIYGPKLIEKIGQSGISIITRLMGLILTVIGMQMGIQGVHDAVVLFSGVK

SEQ ID NO: 62001 - DNA, 633 bp, Photobacterium sp. SKA34
  CDS (1)..(633): transl_table=11
ttgcttactgccttagttactcaatttgttcttatttgggctgttattgatcctatcggttcagtccccgtttacctttctcaaacccaacaattaactgcacagcaacaacgtattgttgctttaaaagccgttgctattgcaacaggtgtattattgttttttgttattgtcggtcaggtattattagaagcgatgcaaataccattgcccgcttttcaagctgctggcggacttgttctactactttttgctttaaccatgatttttggtgaggggaaagtcgatcatgaatgtaaaattagcaaagaagaggtcgctcattcagagttgggaaacttagctgtctacccacttgctattccctccattgcatctcctggcgccatgatggctatcgtgatgctgacagataacaaccgctacgccttgagtgaacaaatcattacaacactggtgatgatatcggtattaatgattaccctattactcttacttggcgctaataagatccaacgatatattggtaacgtgggagcggcgatcatcagccgtgtaatgggattgatattggccgctgttgccgtcaataatcttttaatgggaataaaagatttctacctattaacttag

SEQ ID NO: 62002 - protein, 210 aa, Photobacterium sp. SKA34
MLTALVTQFVLIWAVIDPIGSVPVYLSQTQQLTAQQQRIVALKAVAIATGVLLFFVIVGQVLLEAMQIPLPAFQAAGGLVLLLFALTMIFGEGKVDHECKISKEEVAHSELGNLAVYPLAIPSIASPGAMMAIVMLTDNNRYALSEQIITTLVMISVLMITLLLLLGANKIQRYIGNVGAAIISRVMGLILAAVAVNNLLMGIKDFYLLT

SEQ ID NO: 62003 - DNA, 639 bp, Photobacterium sp. SKA34
  CDS (1)..(639): transl_table=11
atgcaagccattgaatttggaatatttttacacttttttgtcgggctttttgctacggtaaaccctgttggcattatgcctgtcttcgtgtcattaacaggttcaatgacccctgaagagcgaaataaaactgcgttaacaaccaataccgctgttgttattatattggtagtggctctcgttgcaggccaacacttattggatctctttagtatctctattaattcgttccgagtcgctggcggcttgctattactgagtatcgctttttcaatgatgagcggtaagattggtgaggtgaaacagaataaggaagagaaatcagagtcagccattcgtgaacaagtaggtgtggttccacttgcaatgcctttaatggcagggccaggtgctatcagttcaaccattgtttatggttctaagtatccaacaatgacatcaacgattggcattgccattaccatcgttgtttttgcttttggctgttggttactgtttcgctctgcaccattaattgtacgcttcctaggtcaaacaggtattaacgtcattactcgtatcatgggtttgattctggccgcacttggtattgaatttattattaatgggttaaaagtgatgctaccaggcctagtttaa

SEQ ID NO: 62004 - protein, 212 aa, Photobacterium sp. SKA34
MQAIEFGIFLHFFVGLFATVNPVGIMPVFVSLTGSMTPEERNKTALTTNTAVVIILVVALVAGQHLLDLFSISINSFRVAGGLLLLSIAFSMMSGKIGEVKQNKEEKSESAIREQVGVVPLAMPLMAGPGAISSTIVYGSKYPTMTSTIGIAITIVVFAFGCWLLFRSAPLIVRFLGQTGINVITRIMGLILAALGIEFIINGLKVMLPGLV

SEQ ID NO: 62005 - DNA, 606 bp, Flavobacteria bacterium BBFL7
  CDS (1)..(606): transl_table=11
atggccgaaattttaaccgctatatttttcttatttgcagtaatagatcccataggcacggtacccgtttacctagaagcaactaaagagtttgataaactgcacaaacgtaaagttgcagtaagagcatctattgttgcgtttcttattcttttatttttcattgttatcggtcagattattctagaaggaatggaaattactttagatgcctttcaaatttcgggtggtgtaattctcttcctatttgctcttacaatgatttttggaagcggaaagccagaaaatgaaaaaagtcatatctctgattataaacatgttactatctttccggtcgctattccttccatagcttcaccaggagcgatattagccgttgtgctattaactgataaccacatttactctattgaacatcaagccatcaccacagtattagtattgcttgtaataggaattacatgtgttactctattactggcaaataatattcaaaaagcgattggaacttatggaataactgttatttctaaagtaatgggacttatattggcggcttatgcagtgcaaagcatactatcaggtattgctgattattttaaatga

SEQ ID NO: 62006 - protein, 201 aa, Flavobacteria bacterium BBFL7
MAEILTAIFFLFAVIDPIGTVPVYLEATKEFDKLHKRKVAVRASIVAFLILLFFIVIGQIILEGMEITLDAFQISGGVILFLFALTMIFGSGKPENEKSHISDYKHVTIFPVAIPSIASPGAILAVVLLTDNHIYSIEHQAITTVLVLLVIGITCVTLLLANNIQKAIGTYGITVISKVMGLILAAYAVQSILSGIADYFK

SEQ ID NO: 62007 - DNA, 630 bp, delta proteobacterium MLMS-1
  CDS (1)..(630): transl_table=11
atgcctgaattggccatcgtcgccctgatcaccttttttgtcaccgtcggccccatcgacgtggcggtgatttttgccattcttgcccgcaaccagccggcggcccaacgtcgcgccatggcccgccgcggcaccctgctggccgccgccattttgttgttttttgctcttttcggcgaggctttcctggccgttctgggcatcaccctgccggccctctatatcgccggtggcattctgctgctgctgatcggtatcgatatggtttttgcccgctcttccggcggggtctccaccaccgacgccgaaacccgggaggcggctgaccgtgccgatcttgcggtttttccgctggccaccccgctgttggccgggcccggggccatcagcgccgccattctgctgatgagcaaagccagtggcgactggctggcccagggcattgtcctgggagccctgctggtggtgatgctgctgaccttcttgtgcctgcggctggccacccatattcaacgctttttgggggttaccggcagccacgtcctgaccagaatcctgggggtgctgctctgtgccctggccatgcagttcatcctcgacggcctggccgaaagcggcctgctgggctga

SEQ ID NO: 62008 - protein, 209 aa, delta proteobacterium MLMS-1
MPELAIVALITFFVTVGPIDVAVIFAILARNQPAAQRRAMARRGTLLAAAILLFFALFGEAFLAVLGITLPALYIAGGILLLLIGIDMVFARSSGGVSTTDAETREAADRADLAVFPLATPLLAGPGAISAAILLMSKASGDWLAQGIVLGALLVVMLLTFLCLRLATHIQRFLGVTGSHVLTRILGVLLCALAMQFILDGLAESGLLG

SEQ ID NO: 62009 - DNA, 606 bp, Rickettsiella grylli
  CDS (1)..(606): transl_table=11
atgcattttcaaatgaacatttattctgcggcagtgacacttttctttgtgatggaccctctcggaaatattcctattttcttgtcattacttaaacaagttgatccttgtcgacgtactcaaattatctttcgtgagagcttaattgctttttttattttgacactttttttgttctgcgggaagcccattttaaatagcttacatattagcgaatccgcattaggtattgctggtggaattatcctattccttatcgccataaaaatgttatttcctgcgagccaaaataagcgtgaagtacaaacgaaaggtgagccgtttattgttcccatggctattcctcttctcgcaggaccttccggcatgaccatggttattttgctggcgagtcaagcgcctcacgaaatgggcaaatggtttgctgctttagcggctgcttcattggcagcaacattactgcttttaattgccatacctttacaaaaattgctgggtgttaaagtcattgctgcattagagcgtttaatgggaatgattttaaccacgattgcggtgcaaatgtttttaaccggtttagcgagatatctgaatagtataagttga

SEQ ID NO: 62010 - protein, 201 aa, Rickettsiella grylli
MHFQMNIYSAAVTLFFVMDPLGNIPIFLSLLKQVDPCRRTQIIFRESLIAFFILTLFLFCGKPILNSLHISESALGIAGGIILFLIAIKMLFPASQNKREVQTKGEPFIVPMAIPLLAGPSGMTMVILLASQAPHEMGKWFAALAAASLAATLLLLIAIPLQKLLGVKVIAALERLMGMILTTIAVQMFLTGLARYLNSIS

SEQ ID NO: 62011 - DNA, 627 bp, Oceanobacter sp. RED65
  CDS (1)..(627): transl_table=11
atgttagaaacctttgttattgcatttaccacgctttttgcagtggtcggccctattgatgtgagcgctgtgtatgccgctattacagtgggtaccagctcggctgagcgtaagagtatggcgtaccgtggcgttgctattgcccttgttattttgttgattttcgcttttattggtgagttgcttctagccaagcttgggatttcattacctgcccttaagatcgccggtggtatcttattgctattgatggcggtagatatggtgtatgcccgtagctcctctggtaattccactacggatgaggagcaaaccgaagcttccggcaagcaagatatttctgttttcccattggcaacgccactgttagcaggccctggtgccatgggtgccacgattctattaatggcaaaagccagtagtgatgtgtcccatcaagccatggtgattttggccatcttttcaattatggcgatctcacttgttttattattgcttgctaaaaacgttcagaggttttttggcttaaccggtatgcatgtcattagccgtattttcggtgtgttgttatgtgcgttggcggttcagtttatgattgatgggattttacaaagcggtatcgtgtaa

SEQ ID NO: 62012 - protein, 208 aa, Oceanobacter sp. RED65
MLETFVIAFTTLFAVVGPIDVSAVYAAITVGTSSAERKSMAYRGVAIALVILLIFAFIGELLLAKLGISLPALKIAGGILLLLMAVDMVYARSSSGNSTTDEEQTEASGKQDISVFPLATPLLAGPGAMGATILLMAKASSDVSHQAMVILAIFSIMAISLVLLLLAKNVQRFFGLTGMHVISRIFGVLLCALAVQFMIDGILQSGIV

SEQ ID NO: 62013 - DNA, 639 bp, Vibrio sp. Ex25
  CDS (1)..(639): transl_table=11
atgcaaacttttgaacttgctatcttcttgcagttttttcttggtttggtcgccgcagtaaaccctgttggtatcatgcctgtgtttgtgtcactaaccggacatatgacaccagacgaaaagcgcaatacggcaaccacagcgaacgtggctgttgcgatcatcctgatcatttcgctctttgctggccagttactattagatatgttcagcatttctctggattcgtttcgtgttgcaggtgggctactgctgcttagcatcgcgttctcgatgatgagcggtaaactgggggaagataaacaaaacaaacaggaaaaatcagaatacgtgagtcgcgagcagatcggtgttgttcctcttgcgatgccgctaatggcaggaccaggcgcaatcagttcgactattgtttacggtgcacgctacccaagcatgtttgatacggtaggcatcagcattacaattggcttgttctgtctatgctcgtggctgttgttccgctctgccccactgatcgtgcgatttttgggccaaactggtatcaacgtcattacccgtatcatgggtttgatattaggcgcattgggtattgagtttatcgccaatggtttacgcaacttatttccaggattagcctga

SEQ ID NO: 62014 - protein, 212 aa, Vibrio sp. Ex25
MQTFELAIFLQFFLGLVAAVNPVGIMPVFVSLTGHMTPDEKRNTATTANVAVAIILIISLFAGQLLLDMFSISLDSFRVAGGLLLLSIAFSMMSGKLGEDKQNKQEKSEYVSREQIGVVPLAMPLMAGPGAISSTIVYGARYPSMFDTVGISITIGLFCLCSWLLFRSAPLIVRFLGQTGINVITRIMGLILGALGIEFIANGLRNLFPGLA

SEQ ID NO: 62015 - DNA, 585 bp, Vibrio sp. Ex25
  CDS (1)..(585): transl_table=11
atggacattctttctgcagcgaccatgctgtttctaatcatggaccctctcggtaatttgccgattgtgttgtctattctcaagcacatcgatcctaagcgtcgccgtaaggtattgattcgtgaactactgtttgccttactaatcttgatgttgtttctgtttgcaggacaaagcatcttaagttttttgcatgtccagccagaaacgctcagtatttcaggtggcattattctcttcattatcgcgattaagatgatttttccgagcgctggcagcatcactggactggcggcaggcgaggagccctttattgttccgatggccattcctatgatcgccggcccttccgtgattgcagcattgcttttgctatcttcacagcatccagaaaaaatgttggaaatgtccgcatcagttgtgattgcgtggggcgcaacattttttattctaatgttttatggcttctttaatcgtttgttgggcgagcgtggcttaaaagcggtagagcgtttaatgggcttgttgctggtgatgatctctactcaaatgtttttggatggtgttaagagctatcttgggtga

SEQ ID NO: 62016 - protein, 194 aa, Vibrio sp. Ex25
MDILSAATMLFLIMDPLGNLPIVLSILKHIDPKRRRKVLIRELLFALLILMLFLFAGQSILSFLHVQPETLSISGGIILFIIAIKMIFPSAGSITGLAAGEEPFIVPMAIPMIAGPSVIAALLLLSSQHPEKMLEMSASVVIAWGATFFILMFYGFFNRLLGERGLKAVERLMGLLLVMISTQMFLDGVKSYLG

SEQ ID NO: 62017 - DNA, 642 bp, Vibrio sp. Ex25
  CDS (1)..(642): transl_table=11
atgaaagaactcatcgttcatacagtcacggtgtttatgggcttctttgcgatcatgaaccccatcgccaatattcctatctttttgagtttaacggcagatgaggataaagaaaccgtgcgttccatggcgcttcgttctgtttttattgcatttgtcatcattgcgatattttcgatcgccggtaaattaatttttgatttgtttggtatcacgctgtacgccttgcgaataacgggcggtatcttggtgtttttgatcggttttaatatgcttcaaggtgattcgacgcatcagaaaactaaagagaaagcgtattctccagcgcagcagcaggcggcgttgagcatcgccgtttctccacttgcaatgccgatattagcagggcctggaacgattgctaccgcgatgaactttgctacggcgggtggttttgatcaaaccattattaccatcgtttcttttgctgtgttgtgtgttattacctatatattgtttttatttggagacaaattggtcaaagcagttggaccgagtgctctgaacgtcgtgacgaaaatgatgggcttaatcctagcggttatcggtactcaaatgtttattgatggcgcgggcgaagcctataaaactgttttctcatag

SEQ ID NO: 62018 - protein, 213 aa, Vibrio sp. Ex25
MKELIVHTVTVFMGFFAIMNPIANIPIFLSLTADEDKETVRSMALRSVFIAFVIIAIFSIAGKLIFDLFGITLYALRITGGILVFLIGFNMLQGDSTHQKTKEKAYSPAQQQAALSIAVSPLAMPILAGPGTIATAMNFATAGGFDQTIITIVSFAVLCVITYILFLFGDKLVKAVGPSALNVVTKMMGLILAVIGTQMFIDGAGEAYKTVFS

SEQ ID NO: 62019 - DNA, 621 bp, Alteromonadales bacterium TW-7
  CDS (1)..(621): transl_table=11
atgaacgaattattagccatttttatcttcttttttgcggtgatagacccaataggaactgtacctgtatttattgcagtgacccgaggagaagatgataagtttaagcgcaaagtcatcttcaaggccgttggggtatcggctgttgtgctgctattttttgttgtagctggtgagcttttattaaatgcgattgaaattccattgtcggcttttcagatagcgggcggcatagtactgctgctttttgcactgtcgatgatttttggtgaaagcaaacccgaaacagaaataaaaagcgtacgtgacagcactgaaacagccatctttccattggctattccttcaatcgcaagcccaggcgctatgttaggtgctgtgcttatgacgcgtaatgaagagtttacttggattgagcaactgatgacgtcctcgatgatgcttgctgttttggctttggtactcatattacttttacttgcaacacatgtgcataaagttattggcgatagtggcgcgagtattataagtagaataatgggacttattttaagctctgttgcagtaactaatattttaaatggtatagcgcattactttggtttgcaggtatatagctaa

SEQ ID NO: 62020 - protein, 206 aa, Alteromonadales bacterium TW-7
MNELLAIFIFFFAVIDPIGTVPVFIAVTRGEDDKFKRKVIFKAVGVSAVVLLFFVVAGELLLNAIEIPLSAFQIAGGIVLLLFALSMIFGESKPETEIKSVRDSTETAIFPLAIPSIASPGAMLGAVLMTRNEEFTWIEQLMTSSMMLAVLALVLILLLLATHVHKVIGDSGASIISRIMGLILSSVAVTNILNGIAHYFGLQVYS

SEQ ID NO: 62021 - DNA, 603 bp, Candidatus Desulfococcus oleovorans Hxd3
  CDS (1)..(603): transl_table=11
atgacccatctttttttaagtctctggatcaagctctttttcgtgttcaccccgtttttcgggctttccatgtttctcagcctgacggaaggatacgacgaaccccgccggcgccgggtggccctgaccgtgtccctggctgttgcggtgctgtgcctgttgctgtttttcgggggccggcagatcttttcgctgttcggcatcacccttgacgcgttccggatcggggccggggcgcttctgtttctgtccggggtggggctggttcagggaaagccggtaaacgccggtgttgcctccggcagcgagctggcggtggtgcccctggccatgcccatcatcgtggggccggccaccatcggcattctgatggtcatgggcgcggaactggaaggcgtcagggagaaaatggccggctgcatggccctgcttgccgccgtggcctgcattaccgtggtcctgctgatggggtcatttatttaccgccgcctgggggccatgggcatcggcattctcagccgtctgaccggcctggtgctggccgccctgtccgcgcagatgatcatgacgggcattcaggcctttctctgcctgcatccatag

SEQ ID NO: 62022 - protein, 200 aa, Candidatus Desulfococcus oleovorans Hxd3
MTHLFLSLWIKLFFVFTPFFGLSMFLSLTEGYDEPRRRRVALTVSLAVAVLCLLLFFGGRQIFSLFGITLDAFRIGAGALLFLSGVGLVQGKPVNAGVASGSELAVVPLAMPIIVGPATIGILMVMGAELEGVREKMAGCMALLAAVACITVVLLMGSFIYRRLGAMGIGILSRLTGLVLAALSAQMIMTGIQAFLCLHP

SEQ ID NO: 62023 - DNA, 597 bp, Pseudomonas putida GB-1
  CDS (1)..(597): transl_table=11
atgctccatgagttgttcagcgtctacctgaaaatgctcgtgctctacagcccgttcttcgtgctgtcgtgcttcatcagcctgacccgcggccactccagcaaggagcgcaagcaactggcctggaaggtcgccttcgcagccttggtcgccagcgtgctgctgtacctgttcgggcgggtgatcttcggcattttcggcatcaccgccgacgccttccgcatcggggccggtagcgtgctgttcatttctgccttgggtatggcccagggcaagccggcggtgcaggccgacaacgtgcagcaggatgtgaccatcgtgccgctgaccattccactgaccgtcggccctggcaccatcggcgccttgctggtcatgggcgtgggccagccgcattgggatgacaaattgctggccatcgtcagcatcgcgctggccagctttaccgtcggcctggtgctgtacttgtcacacggcatcgaacgcatccttggcgaccaagggctgcagatcgtcagccggctgatggggttgttcgtctgcgccttggctgcgcaaatcatctttaccggcatcaagggctacctggtgccctaa

SEQ ID NO: 62024 - protein, 198 aa, Pseudomonas putida GB-1
MLHELFSVYLKMLVLYSPFFVLSCFISLTRGHSSKERKQLAWKVAFAALVASVLLYLFGRVIFGIFGITADAFRIGAGSVLFISALGMAQGKPAVQADNVQQDVTIVPLTIPLTVGPGTIGALLVMGVGQPHWDDKLLAIVSIALASFTVGLVLYLSHGIERILGDQGLQIVSRLMGLFVCALAAQIIFTGIKGYLVP

SEQ ID NO: 62025 - DNA, 684 bp, Marinobacter sp. ELB17
  CDS (1)..(684): transl_table=11
atgcttggcgcccaaaatctccttctgtggaattcttcggtaatgattgaattgtttttctcgacctacatcagtagctctatccgctttttgtttctgttagcgccgttttttgtggtgaccatgtttctggcgctaacccgcgggctgccggctgacgagaaaaccgcgattattcgtcgtgcctgcatatcggcgctggtgttgggtgtgattctgttttttgccggtccgctgttatttggtgccattggtatcaccctgaattcgttccgcattggtgcaggtacactgctgtttttgacggccatcagtctggttaacaatggaactcgcagccacgccacgggtttaccggatgacaatcgcgacgatattgcggtggtgcccctggcgattccggtcatgattggcccggcgactattggtgcgattctggtttacggtgcggagctgaaggaggttgcggcggtggccgggggcctgttggggttggtgtcgagtttgctgattctggcggtgttgttgcggttgtcgggttatctggaaaaggcgatgggtaagaatggcctgaatattatgtcgaagatcagcgggttgattttgtcggctatggcggctgagatcgtgttgaccggggtgtccgggtttattgcggcttctgggttggtggctggaaaatag

SEQ ID NO: 62026 - protein, 227 aa, Marinobacter sp. ELB17
MLGAQNLLLWNSSVMIELFFSTYISSSIRFLFLLAPFFVVTMFLALTRGLPADEKTAIIRRACISALVLGVILFFAGPLLFGAIGITLNSFRIGAGTLLFLTAISLVNNGTRSHATGLPDDNRDDIAVVPLAIPVMIGPATIGAILVYGAELKEVAAVAGGLLGLVSSLLILAVLLRLSGYLEKAMGKNGLNIMSKISGLILSAMAAEIVLTGVSGFIAASGLVAGK

SEQ ID NO: 62027 - DNA, 624 bp, Erythrobacter sp. SD-21
  CDS (1)..(624): transl_table=11
atgacccagcttttcctgtccgccttcatcacgctcttcgtggtgatcgacccgcccggctgcgcaccgatctacgcaggcctgaccaagggcgcgaccacggcgctgcgccgcaacatggcgatccgcgcaaccttgatcgcgggcgtgatcctgctgatcttcgcgctgttcggcgagcaattgctgggcgccctccatatcgacctcgacagtttccgtatcgcgggcgggctgatgctgttctggatcgccttcgaaatggtcttcgaaaagcgcacccagcgccgcgaggaacgcgcggaaaaggtggccgccacgcccgaagtggaagacgtgtcgatcttccccatggcgatccccatgctcgccgggcccggtgccatcgcggcgatcatgctgttgatgaacgaggcgcaggaccttacgcaaaccgtcacggttctcggcgcgctggcctcggtgctgatcatcaccatgctggcgttgatggcggccggcccgatcatgcggctgttcggcgacaaggtggaagcggccatcacccgcgtgctcggcgtgctgctcgccgcacttgcggcgcaatatgtgatcgacgggctgagaggttcgttcaacctctga

SEQ ID NO: 62028 - protein, 207 aa, Erythrobacter sp. SD-21
MTQLFLSAFITLFVVIDPPGCAPIYAGLTKGATTALRRNMAIRATLIAGVILLIFALFGEQLLGALHIDLDSFRIAGGLMLFWIAFEMVFEKRTQRREERAEKVAATPEVEDVSIFPMAIPMLAGPGAIAAIMLLMNEAQDLTQTVTVLGALASVLIITMLALMAAGPIMRLFGDKVEAAITRVLGVLLAALAAQYVIDGLRGSFNL

SEQ ID NO: 62029 - DNA, 603 bp, unidentified eubacterium SCB49
  CDS (1)..(603): transl_table=11
atgacagaaatcttaacgacaatatttttcctttttgcagtgatagaccctattggttctgtacctgtttaccttgaagcaacaaaagaatttgataaaaagcacaaacgaaaaattgctataagagcttcgtttattgcttttttaatcttgctcttttttattgtaataggtcaattaattttagaagggatggaggtgtcgttagatgcatttcagatttctggaggggttattttatttctttttgcattgaccatgatttttggagatggaaaaccagaaatagaaaaaagtaaaattacagactataaacatgtaactatatttcctgttgcaataccttctatcgcttctccaggggcgataatggcggttgtattattgacagacaaccatatttacacaattgaacaacagttgttaacaacaggtcttgtactcgttgtaatagggttgacatcaattatgcttttggcagcaagttctatccaagaacgaataggagcttatgggattacggtaattagtaaaattatgggattaatcttagcgtcttatgccgtacagagcatattaacaggaattagtgattatttttag

SEQ ID NO: 62030 - protein, 200 aa, unidentified eubacterium SCB49
MTEILTTIFFLFAVIDPIGSVPVYLEATKEFDKKHKRKIAIRASFIAFLILLFFIVIGQLILEGMEVSLDAFQISGGVILFLFALTMIFGDGKPEIEKSKITDYKHVTIFPVAIPSIASPGAIMAVVLLTDNHIYTIEQQLLTTGLVLVVIGLTSIMLLAASSIQERIGAYGITVISKIMGLILASYAVQSILTGISDYF

SEQ ID NO: 62031 - DNA, 609 bp, Moritella sp. PE36
  CDS (1)..(609): transl_table=11
atgattgattatatatcggtatttatatttttctttgctgtgatcgatcctgtgggcacagtgccagtatttattgccgcaaccagtcagtttgatgaaaaagccaaacgtaaaattgccttacaagcagcctgcgccgcggcgcttatactgttgttttttattgtcgctggggaattaattttaacggcgattgatataccgttaccggcatttgaaattgctggcggcatcatcttatttttatttgcgttaaccatgatatttggtgatagcaagcccgataccgaaatgcagctgctcaaagatggcagcgagacagccattttcccactggctgtgccgtctcttgcaagcccaggagcaatgttagccgctgtactactcactgaaaactcgagttttagtatttttcaacaagtgcaaaccgcgggcgtgatgctgtcggtattgtttatcgcgcttttgttcatgctcgcagcgagttggatccatcgcttcattggcaacagtggtgccagcattatcagtaaagtaatgggcatgatcttagcagccgttgcgaccaacagcgtactgtcaggtattaaggtttatttcttactttaa

SEQ ID NO: 62032 - protein, 202 aa, Moritella sp. PE36
MIDYISVFIFFFAVIDPVGTVPVFIAATSQFDEKAKRKIALQAACAAALILLFFIVAGELILTAIDIPLPAFEIAGGIILFLFALTMIFGDSKPDTEMQLLKDGSETAIFPLAVPSLASPGAMLAAVLLTENSSFSIFQQVQTAGVMLSVLFIALLFMLAASWIHRFIGNSGASIISKVMGMILAAVATNSVLSGIKVYFLL

SEQ ID NO: 62033 - DNA, 600 bp, Moritella sp. PE36
  CDS (1)..(600): transl_table=11
atggaaatggaaataatctcggcagcggtgatgctatttttgatcatggatccgctaggtaacttaccaatatttttgtctattttaaaacatattgataaaaagcgtcgacgtgcggtcatgatccgcgagttgctaattgccctgtttgtaatgctgctattcttattcttaggagaaaagatccttggtttcttaagtttaaaacaagaagcggtgaggatcgccggtggtattattttattcttgattgccattaagatgatcttcccgaccgaaggtggattaaccggcctagctgcaggtgaagaaccatttattgtgccaatggcgatcccattattagcgggaccatcaatcctcgctgcattgttgttattagcccatcaagatcccgataaaatgtttgaatggtctgcggccttgcttattgcctggggattgagtgcctttattctgatgttttatgaaggatttaatcgtattctcggtgataaaggcctagcggctgttgagcgattaatgggcatgttactcgtgatgatatcggtgcagatgttactggatggtattgctgattatctggcgacgttaagttga

SEQ ID NO: 62034 - protein, 199 aa, Moritella sp. PE36
MEMEIISAAVMLFLIMDPLGNLPIFLSILKHIDKKRRRAVMIRELLIALFVMLLFLFLGEKILGFLSLKQEAVRIAGGIILFLIAIKMIFPTEGGLTGLAAGEEPFIVPMAIPLLAGPSILAALLLLAHQDPDKMFEWSAALLIAWGLSAFILMFYEGFNRILGDKGLAAVERLMGMLLVMISVQMLLDGIADYLATLS

SEQ ID NO: 62035 - DNA, 621 bp, Burkholderia multivorans
  CDS (1)..(621): transl_table=11
atggatctgctcaaatcgttcatttcgctgctcgcgctgatcaatccggtcggcgcggtgccgttcttcctgagcctgactgcgcagcagaacgaagcggaacggcgccgcacgatccggatcgcgtcggtatcggtgttctgcgtgatgacggtgacggtgctgctcgggcagcagatcatccgcttcttcgggatttcggtcggctcgcttgaagtcggcggcgggatcatcatgttgctgatggcgatcagcatgctgaacgcgcagatcggcaacacgcgctcgacgccggaggaacgcgacgaggccgaactgaaggacaacatcgcggtggtgccgctcgcgatcccgctgctcacgggccccggctcgatcagcacggcgatcgtgtatgcggcgaatgcgcatcactggtatgagcgggccgggctcgtcgcgatcggcgcgattctggccctgctgtgtttcgttgcgatgcggctcgcggagccgatcgcgaactggatcggccgcaccggcatcaacgtcgccacgcggctgatgggtctgatgctgtcggcgctggcggtggaattcatcgtcaacggactgagggcgctattgcctgcactgagatga

SEQ ID NO: 62036 - protein, 206 aa, Burkholderia multivorans
MDLLKSFISLLALINPVGAVPFFLSLTAQQNEAERRRTIRIASVSVFCVMTVTVLLGQQIIRFFGISVGSLEVGGGIIMLLMAISMLNAQIGNTRSTPEERDEAELKDNIAVVPLAIPLLTGPGSISTAIVYAANAHHWYERAGLVAIGAILALLCFVAMRLAEPIANWIGRTGINVATRLMGLMLSALAVEFIVNGLRALLPALR

SEQ ID NO: 62037 - DNA, 651 bp, Thermococcus sp
  CDS (1)..(651): transl_table=11
atgttagaagtggtggagtttctcaagtatctgatacttctctacggaggcttgtttgcgataacgaaccccgtgggtgcagtccccgtctttttgagcgttacccacgacctgtcctggagggagcggagggagatcgcatctaagacagccatatcggtagttgcaacccttgtggtcttcgccctgctcgggcagtggatattcaagttcttcgggtcgagcacagatgcgtttgccatagcaggtggaatactgctcttcaggatggccctcgatatgctctccggaaagctgtcatcggtaaagatcagcaacgaagaaaccgaggagttcagcgaggaagttgtgactcttgaggaagttgcaataattccgctggcgataccacttatctccggcccgggtgcgataacgacggttatgctttacatggccaaaagcacgaccaaccttcagaggctcgcggtgattctgacgataatcctgattgggattaccgtctggttcgtcctttgctccgccaacaggataaaggcccggcttggacgggtcgggatcaaggtgatgacgaggatgatgggtctgatcctgacatcaatggcagttcagatgataatcaacggcataaaaggcgcgtttgggctttag

SEQ ID NO: 62038 - protein, 216 aa, Thermococcus sp
MLEVVEFLKYLILLYGGLFAITNPVGAVPVFLSVTHDLSWRERREIASKTAISVVATLVVFALLGQWIFKFFGSSTDAFAIAGGILLFRMALDMLSGKLSSVKISNEETEEFSEEVVTLEEVAIIPLAIPLISGPGAITTVMLYMAKSTTNLQRLAVILTIILIGITVWFVLCSANRIKARLGRVGIKVMTRMMGLILTSMAVQMIINGIKGAFGL

SEQ ID NO: 62039 - DNA, 609 bp, Pyrococcus furiosus
  CDS (1)..(609): transl_table=11
atgctaggggaaatactaagctcagcgctactaatgctaatcatgattgatcctagcgataaaattcttttggttactctactcaaggaagactttcacatagaagatgtgaagagtctaataatcaaagccaatttaattggattgatacttctacttctctttgctattgctggtaaagttatccttcaagacattttccacatagatgttgatgcccttagaattgcgggaggatttgtgctatttaagattggattggatgcgctagaaagcggcgctatggtaactataaggaaggaaagaaacattttagccctagcagcagttcccgttgctactcctttaattgcagggccagcagccataacagctgcgataaccctaacggcagagtatggaatctatgtatcaatattagccacagtaattgccataacaattaatgccttgctaatggcaatagccctctatgccctaaaaagtgtcagtaaaacactactaagcgttttgataaggataattggactgtttataatggcaattggagctcagatgatggtgacaggggtagggggaatattaataaacctcctcaaaggagcttaa

SEQ ID NO: 62040 - protein, 202 aa, Pyrococcus furiosus
MLGEILSSALLMLIMIDPSDKILLVTLLKEDFHIEDVKSLIIKANLIGLILLLLFAIAGKVILQDIFHIDVDALRIAGGFVLFKIGLDALESGAMVTIRKERNILALAAVPVATPLIAGPAAITAAITLTAEYGIYVSILATVIAITINALLMAIALYALKSVSKTLLSVLIRIIGLFIMAIGAQMMVTGVGGILINLLKGA

SEQ ID NO: 62041 - DNA, 666 bp, Escherichia coli
  CDS (1)..(666): transl_table=11
atgttagatttgtttaaagcaattggcctggggctggtggtgttactgccgttagctaacccattaacaactgtcgcgttatttcttggcctggcaggcaacatgaacggtgccgaacgtaatcgtcagtcgttgatggcctcggtgtacgtctttgccatcatgatggtggcgtattacgccgggcaactggtgatggatacatttggcatttcgattcccggtctgcgaattgcaggcggcttaatcgtcgcgtttatcggttttcggatgctttttccgcaacagaaagcgattgattcaccggaggcgaaaagcaagtcggaagagctggaagatgaacccagcgccaatattgcttttgtaccactggcaatgccaagtaccgccggtccgggaaccattgcgatgattattagctcggcgtccacagtgcgtcagagttcaaccttcgctgattgggtactgatggttgcgccgccgctgatctttttcctggtggcggttattttgtggggaagtctacgcagctctggcgcaattatgcggctggtgggcaagggtggcattgaagcgatctcccgcttgatggggttcctgctggtatgtatgggtgtacagtttattattaacggcatcctggaaatcattaaaacgtatcattaa

SEQ ID NO: 62042 - protein, 221 aa, Escherichia coli
MLDLFKAIGLGLVVLLPLANPLTTVALFLGLAGNMNGAERNRQSLMASVYVFAIMMVAYYAGQLVMDTFGISIPGLRIAGGLIVAFIGFRMLFPQQKAIDSPEAKSKSEELEDEPSANIAFVPLAMPSTAGPGTIAMIISSASTVRQSSTFADWVLMVAPPLIFFLVAVILWGSLRSSGAIMRLVGKGGIEAISRLMGFLLVCMGVQFIINGILEIIKTYH

SEQ ID NO: 62043 - DNA, 666 bp, Escherichia coli
  CDS (1)..(666): transl_table=11
atgttagatttgtttaaagcaattggcctggggctggtggtgttgctgccgttagctaacccattaacaactgtcgcgttatttcttggcctggcaggcaacatgaacagtgccgaacgtaatcgtcagtcgttgatggcctcggtgtacgtatttgccatcatgatggtggcgtattacgccgggcaactggtgatggatacatttggcatttcgattcccggtctgcgaattgcaggcggcttaatcgtcgcgtttatcggttttcggatgctctttccgcaacagaaagcgattgattcaccggaggcgaaaagcaagtcggaagagctggaagatgaacccagtgccaatattgcctttgtgccgctggcaatgccaagtactgccggtccgggaaccatagcgatgattattagctcggcgtccacagtgcgtcagagttcaaccttcgctgattgggtactgatggttgcgccgccgctgatctttttcctggtggcggttattttgtggggaagcctacgcagctccggcgcaattatgcggctggtgggcaagggtggcattgaagcgatctcccgtctgatgggattcctgctggtatgtatgggtgtgcagtttattattaacggcatcctggaaatcattaaaacgtaccattaa

SEQ ID NO: 62044 - protein, 221 aa, Escherichia coli
MLDLFKAIGLGLVVLLPLANPLTTVALFLGLAGNMNSAERNRQSLMASVYVFAIMMVAYYAGQLVMDTFGISIPGLRIAGGLIVAFIGFRMLFPQQKAIDSPEAKSKSEELEDEPSANIAFVPLAMPSTAGPGTIAMIISSASTVRQSSTFADWVLMVAPPLIFFLVAVILWGSLRSSGAIMRLVGKGGIEAISRLMGFLLVCMGVQFIINGILEIIKTYH

SEQ ID NO: 62045 - DNA, 666 bp, Salmonella typhi
  CDS (1)..(666): transl_table=11
atgatggatttgtttaaagcgattggattggggctggtcgtactgctcccgttagccaatccgctaaccaccgtggcgctgtttcttggccttgcgggcaatatgaatagtgcggaacgcaaccggcagtcctatatggcttcggtttatgtcttcgctattatgatggtggcgtactatgccgggcagttagttatgaacaccttcggtatttcgattccagggctacggatcgccggggggttaatcgtggcgtttatcggcttcagaatgcttttcccgcagcagaaggcgcatgagtcgccggaagcgaaaagcaaatcggaggagctggcagacgaaccgacggccaatattgcgtttgttccactggctatgccaagcaccgcaggaccggggaccatcgcaatgatcatcagttccgcttccacggtgcgtcatggcggcgagtttcccgactgggtcattatggtcgcgccgccgattatttttcttgccgtggcggtgatcctgtggggatgcttacgcagttctggcgctattatgcggctggtgggtaaaggggggattgaagcgatctcccgcttaatgggattcctgctggtgtgtatgggcgtgcaatttattatcaacggcgtgttggaaattattaaaacgtaccactaa

SEQ ID NO: 62046 - protein, 221 aa, Salmonella typhi
MMDLFKAIGLGLVVLLPLANPLTTVALFLGLAGNMNSAERNRQSYMASVYVFAIMMVAYYAGQLVMNTFGISIPGLRIAGGLIVAFIGFRMLFPQQKAHESPEAKSKSEELADEPTANIAFVPLAMPSTAGPGTIAMIISSASTVRHGGEFPDWVIMVAPPIIFLAVAVILWGCLRSSGAIMRLVGKGGIEAISRLMGFLLVCMGVQFIINGVLEIIKTYH

SEQ ID NO: 62047 - DNA, 606 bp, Pyrococcus abyssi
  CDS (1)..(606): transl_table=11
atgcttgaagtgttgaagacgtttgcagtactgtacgttggactattcgcgataacgaatccagtaggagccgtgcctatattcatgggagtcgtcagccatttagctccagataaaagacacgaagtcgccgagaaggtgtcgataaccgttctagttacattgctcacgttcgccttagttggcaagtggatattcaagttctttggttccagtgtggatgccttcgcaatagccggaggaatacttctatttaggatgggcatggagatgctctcgggaaagctttcctcagttaagatagacgaggaagatgtaactttagaggaggtagcggttatacccctcgcaattcccctaatctccggcccaggagcaataactacggttatgctctacatgaccagggaatctcccccgatagttatagcaacgataatagccataggaatctcagtatacataatcctagcatctggaaacaaaatcatagagaagctcggtagggtggggattaaggttacgacgagaatgatgggactaattctaacctcgatggcaattcaaatgataataaatggaataaagggggcgtttggaatctaa

SEQ ID NO: 62048 - protein, 201 aa, Pyrococcus abyssi
MLEVLKTFAVLYVGLFAITNPVGAVPIFMGVVSHLAPDKRHEVAEKVSITVLVTLLTFALVGKWIFKFFGSSVDAFAIAGGILLFRMGMEMLSGKLSSVKIDEEDVTLEEVAVIPLAIPLISGPGAITTVMLYMTRESPPIVIATIIAIGISVYIILASGNKIIEKLGRVGIKVTTRMMGLILTSMAIQMIINGIKGAFGI

SEQ ID NO: 62049 - DNA, 618 bp, Methanococcus jannaschii
  CDS (1)..(618): transl_table=11
atggatttgcaatattttatattggcattttcatctatattctcaattttaaacccatttggtgctgttcctgtatttataacattaactgagtcatatccaaaaaaggaaagggatttagtagctaagaaaacagttatttatgcacttgctatattattggcttttgcactttttggagagtggatattaaaattttttggtatatcattagatgcatttaagattgctggaggaattctactgctcttaatatcattagacatggttaggggtcagcaggaggctaaaattcatagaaaggaaattgaagcagcttatgagattgatgaaattgctctaatgcctttagcaactccattattagctgggcctggttcaataactgcctgtatggttgcaatggctgaggcatcagacattggagataagtttttggtaatattggctatactactatctcttggaataacctacctaaccctattatcagctgagagtgttttagataggattggaagattggggattaggatattaacaagaatgatgggtttgatattaacagcaatagcagttcagatgatagttaatggaattagaggggccttactctaa

SEQ ID NO: 62050 - protein, 205 aa, Methanococcus jannaschii
MDLQYFILAFSSIFSILNPFGAVPVFITLTESYPKKERDLVAKKTVIYALAILLAFALFGEWILKFFGISLDAFKIAGGILLLLISLDMVRGQQEAKIHRKEIEAAYEIDEIALMPLATPLLAGPGSITACMVAMAEASDIGDKFLVILAILLSLGITYLTLLSAESVLDRIGRLGIRILTRMMGLILTAIAVQMIVNGIRGALL

SEQ ID NO: 62051 - DNA, 642 bp, Archaeoglobus fulgidus
  CDS (1)..(642): transl_table=11
atggacatcgctggctacctcagcttcttttttgcaagcttcacgacgctcttcataataatcgaccctcctggaaatctgccgattttcatagcgttaacggagagattcagcgatgagtacagggagaaaatttcgaaaagagcaacaatcattgccttcctgattctgttcatcacgatggtgacgggcggtaaaattctcgactacttcggcgtttccatcagcagcctgaaaattgcgggaggaatacttctcttcatttcctcagtcgatatcctcctcggcgggactagaagggaggcttacaaaagaagggctgaggaaagcattgatgtggattccattgctgtattccccctcgccctgcctctctacactggccccggagcgattacggcaggaatcgtgctttactcgcaggcgggagatgtggtgatgaaactgctcgtcgttctgagtgccgcgctggtttactcgatcgtcaggctgagccacatctacagcgccccaatcatcagactcctcggccggagcggtgcggacattgcggcgagaatactcgccatattccttgctgcgatagctgtggagttcgtcttcgacgggcttgcagaaaaattggtttcaatggacctttga

SEQ ID NO: 62052 - protein, 213 aa, Archaeoglobus fulgidus
MDIAGYLSFFFASFTTLFIIIDPPGNLPIFIALTERFSDEYREKISKRATIIAFLILFITMVTGGKILDYFGVSISSLKIAGGILLFISSVDILLGGTRREAYKRRAEESIDVDSIAVFPLALPLYTGPGAITAGIVLYSQAGDVVMKLLVVLSAALVYSIVRLSHIYSAPIIRLLGRSGADIAARILAIFLAAIAVEFVFDGLAEKLVSMDL

SEQ ID NO: 62053 - DNA, 648 bp, Buchnera aphidicola subsp
  CDS (1)..(648): transl_table=11
atgaatgttgaaatgtttgatttttcaatttacattagtttctttttcagtttgtttgctttggtaaatcccattggtatgattcctattttcactagtatgacgaatcatcaatctatagtagaaagaaataaaactaatttaatagctaatttttcagtagctattattttatctatatcattaatatttggtagttttattttaaatttattcggaatttcaataaattcttttagaatttctggtgggatattagtaatgataattgcaatatctatgattaacggaaattttattaataatataaataatcaaaaaaatggaaagttagataaagatattgctagaaacatttctattgttcctttggctatgcctctaatagcaggtccgggagctattagttctacaatcgtatggagtacgcactattcaagtgtagaaaatatttttggatgtatggtaactatcatgttattttcatgtttttgttggacattatttaaagtgtctccgattatagttgatattttaggtcgcactggaattaatattatgacacgaattatgggtttattattgatgtctttaggtatagaatttattttagctggtttaaaagcttcatgttctaattatttttaa

SEQ ID NO: 62054 - protein, 215 aa, Buchnera aphidicola subsp
MNVEMFDFSIYISFFFSLFALVNPIGMIPIFTSMTNHQSIVERNKTNLIANFSVAIILSISLIFGSFILNLFGISINSFRISGGILVMIIAISMINGNFINNINNQKNGKLDKDIARNISIVPLAMPLIAGPGAISSTIVWSTHYSSVENIFGCMVTIMLFSCFCWTLFKVSPIIVDILGRTGINIMTRIMGLLLMSLGIEFILAGLKASCSNYF

SEQ ID NO: 62055 - DNA, 636 bp, Buchnera aphidicola subsp
  CDS (1)..(636): transl_table=11
atgcatatttcaatgtttgatttttctatatatataaaattttttgtaagtttatgtgctttagtgaatccaattggaatgattcctatatttacaactatgactaatcatcaatctcatttagaacgaaaaaaaactaatttagttgctaatttttctgcttttataattttattaatatctctttttgcaggtaatagtattttaaacgcttttggcatatctattaattcatttcgtattgcaggaggaatactaattattagtattgctttttctatgattagtggaaaatttacaaaaaataataaaacaagtaaagaaaaaaatcaagaaaatataagtgttgtaccgttagctatgccattaattgcaggaccgggagcaatcagttcaactattgtttggagtacgtattattctacttggtctgattttttaggttgtagtatagctatttttttatttgcttttgtttgttggttatgttttcgagccgctccatgtgtagttgaaatattaggaaaaacaggtattaatattattacacgtattatgggtttgttactgatgtctttaggaatcgaattccttagtattggaataaaatctattttttctgcattactacattaa

SEQ ID NO: 62056 - protein, 211 aa, Buchnera aphidicola subsp
MHISMFDFSIYIKFFVSLCALVNPIGMIPIFTTMTNHQSHLERKKTNLVANFSAFIILLISLFAGNSILNAFGISINSFRIAGGILIISIAFSMISGKFTKNNKTSKEKNQENISVVPLAMPLIAGPGAISSTIVWSTYYSTWSDFLGCSIAIFLFAFVCWLCFRAAPCVVEILGKTGINIITRIMGLLLMSLGIEFLSIGIKSIFSALLH

SEQ ID NO: 62057 - DNA, 648 bp, Buchnera aphidicola subsp
  CDS (1)..(648): transl_table=11
atgaatatttcaatttttgatttatctatatatataaaattttttataggtttatgtgctttagttaatccaattggaatgattcctatctttacaactatgacaaataatcaatcttttttagaaagaaagaagactaatatagtagctaatttttcagtatcattaattttattaatatcattattttttggtagtaatattttaaatatttttggtatatctattaattcttttcgtattgctggtggaattctaattattagcatagctttttctatgattagcggtcaattcattaaaacaataaaaactaaaaaagaaacaaaagaagaaaataaaatagataatattagtgttgttcccttggcaatgcctttaattgctggtccaggggcaattagttctactattgtttggagtacttattattcaagttgggctaatttatttttatgtagtttagtaattttcttattttcttttgtttgttggttatgttttgaagctgctccatatgttgtgcaaattctaggaaacacaggaattaatatcattactcgtattatgggtttattattaatgtctcttggaatagagtttattagtactggtataggtgctattttcccaggattattacattga

SEQ ID NO: 62058 - protein, 215 aa, Buchnera aphidicola subsp
MNISIFDLSIYIKFFIGLCALVNPIGMIPIFTTMTNNQSFLERKKTNIVANFSVSLILLISLFFGSNILNIFGISINSFRIAGGILIISIAFSMISGQFIKTIKTKKETKEENKIDNISVVPLAMPLIAGPGAISSTIVWSTYYSSWANLFLCSLVIFLFSFVCWLCFEAAPYVVQILGNTGINIITRIMGLLLMSLGIEFISTGIGAIFPGLLH

SEQ ID NO: 62059 - DNA, 600 bp, Buchnera aphidicola subsp
  CDS (1)..(600): transl_table=11
atgaaagaaataatttctgttaccattttattaattttaattatggatccactaggaaatctacctatattcatgtccatattaaaacatttagaaccacaaagacgaaaaaaaatattaattcgagaaatgatgattgcactattaataatgctattatttttattcgctggagaaaaaattttaatttttcttaatttgcgtgcagaaacagtatctgtctcaggtggaataatattatttttaatagcaataaaaatgatttttccgacctatgaaagcaaaaaaaaatcaggtaacattattaaaagagaagaaccatttttagtaccattagctattcccttagttgcaggaccatcattattagctacactaatgctattatctcatcaatatcctaaaaaaattttatatttaatcggatcattgctaatcgcatggatgataacggtagtcattttactattatctgacattttcttacgtctattcggatctaagggagtgaatgctttagaaagattaatgggattaattttaataatgttatctacacaaatgtttttagatggcatcaaatcttggttttatatataa

SEQ ID NO: 62060 - protein, 199 aa, Buchnera aphidicola subsp
MKEIISVTILLILIMDPLGNLPIFMSILKHLEPQRRKKILIREMMIALLIMLLFLFAGEKILIFLNLRAETVSVSGGIILFLIAIKMIFPTYESKKKSGNIIKREEPFLVPLAIPLVAGPSLLATLMLLSHQYPKKILYLIGSLLIAWMITVVILLLSDIFLRLFGSKGVNALERLMGLILIMLSTQMFLDGIKSWFYI

SEQ ID NO: 62061 - DNA, 591 bp, Buchnera aphidicola subsp
  CDS (1)..(591): transl_table=11
atgaatgaaataatctctacaactatattactaattttaataatggatcccttagggaaccttccaatttttatgaccatactaaaaaaattagatgcaaaaaggagaagaatagtagttatacgtgaaatgattatagctctgattgtgatgttaatatttttatttgtcggagaaaaaatacttactattcttaatttaaaaactgaaacagtttctatatctggaggaattattttatttcttattgctattaaaatgatttttccatccgatgaaggtaacaatggaacttcttcagaagaagaaccatttttagttccattagccatcccattagttgcaggaccttctttattggctacattaatgttgttatctcatcagtatttacatcatatgccttatttagtgggatcattactgattgcatggttttttacaatcataatattgttattatctggtttatttttaaaattatttggtgataagggtgtaaatgcattagaacgattaatgggtcttatattaataatgctttctacacaaatgtttcttgatggaataaaagcatggtttaaaaattaa

SEQ ID NO: 62062 - protein, 196 aa, Buchnera aphidicola subsp
MNEIISTTILLILIMDPLGNLPIFMTILKKLDAKRRRIVVIREMIIALIVMLIFLFVGEKILTILNLKTETVSISGGIILFLIAIKMIFPSDEGNNGTSSEEEPFLVPLAIPLVAGPSLLATLMLLSHQYLHHMPYLVGSLLIAWFFTIIILLLSGLFLKLFGDKGVNALERLMGLILIMLSTQMFLDGIKAWFKN

SEQ ID NO: 62063 - DNA, 645 bp, Aquifex aeolicus
  CDS (1)..(645): transl_table=11
atgataataacctggatggaggaatttggggttcttttcgtaaaagctttcctatctttgctcgcgataatgaacccattctccagcgttcctgtcgttatatcactgatgaacgagtattcaaaggaagaaattagggttattgctctgaaggcgagtgtttacgccttcttcatactcacctttttcttaataagcggggatttactcttcagatttatggggattacccttccagcctttaaagtaggcggtggtatcttactctttcttatagcccttaacttagttcagggagaggttacaaaagaaaagggaaaagctcacgaaattgaggctgcccttcgcagagataacatagccctcattcccctcgccatgcctctacttgctggaccaggctccataactacggttctcgtcctgagggggtacttaaacactttggagggaaaagtagcccttttctgtgccattttcttgagttcctttaccgcctttgttgtttactctctgagtacattcttctacagagtgctcggaaggaccggtattaacttaatcacgagaatttcgggcatactccttctggctatatccgttcaattcgtggtagatggcctcaaaaacctcttaaagcattaa

SEQ ID NO: 62064 - protein, 214 aa, Aquifex aeolicus
MIITWMEEFGVLFVKAFLSLLAIMNPFSSVPVVISLMNEYSKEEIRVIALKASVYAFFILTFFLISGDLLFRFMGITLPAFKVGGGILLFLIALNLVQGEVTKEKGKAHEIEAALRRDNIALIPLAMPLLAGPGSITTVLVLRGYLNTLEGKVALFCAIFLSSFTAFVVYSLSTFFYRVLGRTGINLITRISGILLLAISVQFVVDGLKNLLKH

SEQ ID NO: 62065 - DNA, 606 bp, Pyrococcus horikoshii
  CDS (1)..(606): transl_table=11
atgctagaagctataaaaacgttcatgatcctctacacaggaatgtttgccattacaaatcccattggggccgttcccgtatttatgagtgttgtcggtcatttacctgctgagattaagcatgaagtagctaagaaagtctcaattacagtcttcataactctcacagtctttgcactagttgggcaatggatattcaaattcttcggttcaagtatcgatgcctttgcaatagctgggggaatacttctgttcaggatgggaatggaaatgctgtctggaaagctttcctccgttaagatagatgaagaggatgtgacactggaagaggtagctgtaatacccctagccattccactaatctcagggcccggagctataacaaccgttatgctatatatgactaaggagtcccctgggatcgtaatcctcacgataattgcaatagggcttacaacttatggaatcttatattcaggtaacaagataatagagaggctcggaagggttggagttaaagtcacaacaagaatgatgggcctaattcttacttcaatggccatgcaaatgataataaatggaataaaaggagcattcggaatttaa

SEQ ID NO: 62066 - protein, 201 aa, Pyrococcus horikoshii
MLEAIKTFMILYTGMFAITNPIGAVPVFMSVVGHLPAEIKHEVAKKVSITVFITLTVFALVGQWIFKFFGSSIDAFAIAGGILLFRMGMEMLSGKLSSVKIDEEDVTLEEVAVIPLAIPLISGPGAITTVMLYMTKESPGIVILTIIAIGLTTYGILYSGNKIIERLGRVGVKVTTRMMGLILTSMAMQMIINGIKGAFGI

SEQ ID NO: 62067 - DNA, 687 bp, Methanococcus jannaschii
  CDS (1)..(687): transl_table=11
ttggtgggttattctggggagcattttatattcaatgtggtgaaatatatggatattcttaacttctacatctatggatttgtttctctttttattacaatagacccaattggcttaattccaatagtgcattctctaacctatccctatccaaaagaacagagaattagaattatcaaaaaggctataatctcatcaacggtagttttattgttatttgctttatttgggaattatatttttggctattttgggattacaatagatgcgtttagagtagctgggggaattttgctctttaaaatagcttgggacatgcttcacgcagaaattccaaaaacaaagcacaaaccagatgaaagattagaccttgaagatattgatagtatagtttatgtcccattggctattcctttaatctctggccctggagctataacaacaaccatgattttgattagcaaaacccagagtatcttagagaaaggggttgttgttctctctatattatcagctatgttagtttctggaatcattttatcattaactgactttataattagaagagttaatatttatggcattaacgcctttgtaagaattatgggattgctattagtagctatctcagtgcaaataatatttactggaatagttgggctatataatagcattagcgttcaataa

SEQ ID NO: 62068 - protein, 228 aa, Methanococcus jannaschii
MVGYSGEHFIFNVVKYMDILNFYIYGFVSLFITIDPIGLIPIVHSLTYPYPKEQRIRIIKKAIISSTVVLLLFALFGNYIFGYFGITIDAFRVAGGILLFKIAWDMLHAEIPKTKHKPDERLDLEDIDSIVYVPLAIPLISGPGAITTTMILISKTQSILEKGVVVLSILSAMLVSGIILSLTDFIIRRVNIYGINAFVRIMGLLLVAISVQIIFTGIVGLYNSISVQ

SEQ ID NO: 62069 - DNA, 648 bp, Escherichia coli
  CDS (1)..(648): transl_table=11
gtgattcagaccttttttgattttcccgtttacttcaaatttttcatcgggttatttgcgctggtcaacccggtagggattattcccgtctttatcagcatgaccagttatcagacagcggcagcgcgaaacaaaactaaccttacagccaacctgtctgtggccattatcttgtggatctcgctttttctcggcgacacgattctacaactttttggtatatcaattgattcgttccgtatcgccgggggtatcctggtggtgacaatagcgatgtcgatgatcagcggcaagcttggcgaggataaacagaacaagcaagaaaaatcagaaaccgcggtacgtgaaagcattggtgtggtgccactggcgttgccgttgatggcggggccaggggcgatcagttctaccatcgtctggggtacgcgttatcacagcattagctatctgtttggtttctttgtggctattgcattgttcgctttatgttgttggggattgttccgcatggcaccgtggctggtacgggttttacgccagaccggcatcaacgtgattacgcgtattatggggctattgctgatggcattggggattgaatttatcgttactggtattaaggggattttccccggcctgcttaattaa

SEQ ID NO: 62070 - protein, 215 aa, Escherichia coli
MIQTFFDFPVYFKFFIGLFALVNPVGIIPVFISMTSYQTAAARNKTNLTANLSVAIILWISLFLGDTILQLFGISIDSFRIAGGILVVTIAMSMISGKLGEDKQNKQEKSETAVRESIGVVPLALPLMAGPGAISSTIVWGTRYHSISYLFGFFVAIALFALCCWGLFRMAPWLVRVLRQTGINVITRIMGLLLMALGIEFIVTGIKGIFPGLLN

SEQ ID NO: 62071 - DNA, 594 bp, Escherichia coli O157
  CDS (1)..(594): transl_table=11
atgaatgaaatcatttctgcagcagttttattgatcctgattatggatccgctcggaaacctacctattttcatgtccgtactgaaacatactgaaccgaaaagacggcgggcaatcatggtgcgagagttgcttattgctctcctggtgatgctggtgttcctgtttgcgggtgagaaaattctggcatttctcagcctgcgagcagaaaccgtctccatttctggcggcatcattctgtttctaattgccattaagatgattttccccagcgcttcaggaaatagcagcgggcttccggcaggtgaagagccatttatcgtgccgctggcaattccgctggtcgccgggccaactattctcgccacgctgatgttgttgtctcatcagtacccgaatcagatgggacatctggtgattgctctgctgctggcctggggcggcacctttgtcatcctgctacagtcttcgctatttttacgtctgctgggcgagaaaggggtgaacgcacttgaacgcctgatgggattgattctggtgatgatggcaacccagatgttcctcgacggcattcgaatgtggatgaaggggtaa

SEQ ID NO: 62072 - protein, 197 aa, Escherichia coli O157
MNEIISAAVLLILIMDPLGNLPIFMSVLKHTEPKRRRAIMVRELLIALLVMLVFLFAGEKILAFLSLRAETVSISGGIILFLIAIKMIFPSASGNSSGLPAGEEPFIVPLAIPLVAGPTILATLMLLSHQYPNQMGHLVIALLLAWGGTFVILLQSSLFLRLLGEKGVNALERLMGLILVMMATQMFLDGIRMWMKG

SEQ ID NO: 62073 - DNA, 636 bp, Bacillus subtilis
  CDS (1)..(636): transl_table=11
atgatgttctcatttatcgttcacgtcttcatttctttattcgcagtatcgaatccgatcggaaacgtaccgatatttctgacgctgacagaaggctatactgcagcggaaagaaaagcgattgcccggaaggcagctattttatccttttttattctcgcagcttttttggttttcggtcatcttatctttaaactgtttgatatcaacattcacgcgctccgagtggcgggcggcatattcattttcggcattgcctataatctattgaatgcgaaagaatcgcacgtgcaatctcttcaccatgatgaacataaggaaagcaaggaaaaagcggatatatcagtcacacctttatccattccgatcattgctgggcccggaacgattgcaacagtgatgagcctttccgccggacatagcggcattggtcattatgcggctgtcatgatcggcatagccgccgttattgccctgacctttctctttttccactattctgcttttatcagcagcaaactcggaaaaaccgagatgaatgtgattaccagactgatgggattaatcttagccgtggttgcggtcgggatgattggtgccgggctgaaaggcatgtttccggtcttaacttcatga

SEQ ID NO: 62074 - protein, 211 aa, Bacillus subtilis
MMFSFIVHVFISLFAVSNPIGNVPIFLTLTEGYTAAERKAIARKAAILSFFILAAFLVFGHLIFKLFDINIHALRVAGGIFIFGIAYNLLNAKESHVQSLHHDEHKESKEKADISVTPLSIPIIAGPGTIATVMSLSAGHSGIGHYAAVMIGIAAVIALTFLFFHYSAFISSKLGKTEMNVITRLMGLILAVVAVGMIGAGLKGMFPVLTS

SEQ ID NO: 62075 - DNA, 21 bp, Artificial sequence
  primer
atgctggagctctttctcaag

SEQ ID NO: 62076 - DNA, 24 bp, Artificial sequence
  primer
ttagaggaggcccctcaccccgtc

SEQ ID NO: 62077 - protein, 206 aa, Artificial sequence
  consensus sequence
  Variant (2)..(37): Xaa in position 2 to 37 is any amino acid
  Variant (38)..(41): Xaa in position 38 to 41 is any or no amino acid
  Variant (43)..(51): Xaa in position 43 to 51 is any amino acid
  Variant (52)..(60): Xaa in position 52 to 60 is any or no amino acid
  Variant (63)..(71): Xaa in position 63 to 71 is any amino acid
  Variant (73)..(90): Xaa in position 73 to 90 is any amino acid
  Variant (91)..(113): Xaa in position 91 to 113 is any or no amino acid
  Variant (116)..(117): Xaa in position 116 to 117 is any amino acid
  Variant (119)..(121): Xaa in position 119 to 121 is any amino acid
  Variant (124)..(166): Xaa in position 124 to 166 is any amino acid
  Variant (167)..(179): Xaa in position 167 to 179 is any or no amino acid
  Variant (181)..(182): Xaa in position 181 to 182 is any amino acid
  Variant (184)..(188): Xaa in position 184 to 188 is any amino acid
  Variant (190)..(191): Xaa in position 190 to 191 is any amino acid
  Variant (193)..(194): Xaa in position 193 to 194 is any amino acid
  Variant (196)..(205): Xaa in position 196 to 205 is any amino acid
PXXXXXXXXXXXXXXXXXXXXXXXXXXXXXXXXXXXXXXXXGXXXXXXXXXXXXXXXXXXGGXXXXXXXXXMXXXXXXXXXXXXXXXXXXXXXXXXXXXXXXXXXXXXXXXXXPLXXPXXXGPXXXXXXXXXXXXXXXXXXXXXXXXXXXXXXXXXXXXXXXXXXXXXXXXXXXXXXXXGXXGXXXXXRXXGXXLXXXXXXXXXXG

SEQ ID NO: 62078 - protein, 17 aa, Artificial sequence
  protein pattern
  Variant (2)..(2): Xaa in position 2 is Leu or Met
  Variant (3)..(3): Xaa in position 3 is Ala, Gly, Ser or Thr
  Variant (4)..(4): Xaa in position 4 is any amino acid
  Variant (6)..(7): Xaa in position 6 to 7 is any amino acid
  Variant (8)..(8): Xaa in position 8 is Ala, Cys, Ser, Thr or Val
  Variant (11)..(11): Xaa in position 11 is Ala, Gly or Ser
  Variant (12)..(13): Xaa in position 12 to 13 is any amino acid
  Variant (14)..(14): Xaa in position 14 is Ala, Gly, Ser, Thr or Val
  Variant (15)..(16): Xaa in position 15 to 16 is any amino acid
  Variant (17)..(17): Xaa in position 17 is Ile, Leu, Met or Val
PXXXPXXXGPXXXXXXX

SEQ ID NO: 62079 - DNA, 429 bp, Thermus thermophilus
  CDS (1)..(429): transl_table=11
atgtggtatagtgggggcaccgcgggtggattccgcgcgaggagaaggaacgtggaactagaagcaggaaccgttgtggaaggccgcgtggtgcgggtggtgagctttggcgcgtttgtggagcttgcggggggggagcagggcctggtccacatctcccagatcgcccacgagtacgtgacgaacgttcgggactacctcaacgagggggacatcgtccaggtcctgattaaagggcgggacgccaaggggcggctggacctctccatcaaggacctgaccccggcccccgaagggggcgcgcccccgcccaggcccaggcggcttcccaaacaatcccccgagtttgagaacaagctcaagagcttcctccggggcaccggagggtttgggggcaagggcaaaaagggcggccggaagaagcgctaa

SEQ ID NO: 62080 - protein, 142 aa, Thermus thermophilus
MWYSGGTAGGFRARRRNVELEAGTVVEGRVVRVVSFGAFVELAGGEQGLVHISQIAHEYVTNVRDYLNEGDIVQVLIKGRDAKGRLDLSIKDLTPAPEGGAPPPRPRRLPKQSPEFENKLKSFLRGTGGFGGKGKKGGRKKR

SEQ ID NO: 62081 - DNA, 375 bp, Thermotoga maritima MSB8
  CDS (1)..(375): transl_table=11
gtgaaagttggtgaacttgtgaagggaaaggtttctaagatcgtgaagtacggagccttcgtggatatcgaagggggggaaagaggattcatccacatttccaagatctccaaaaactatgtgaagagaatcgaagattaccttcacgaggggcaggagatatccgcgaaggtgataggaagagccagaaacggcggctgggaactttccctgaaagatcttgaagaagaaacaccaaagacaggtgagaaatctgaagaaaagaaaaatatggatttcgagaaaaagctatccagattcttgaaagaaagcagtcagaagctttccgaatacaagaagagactcgagaaaaaaggcagaagaagcgcatggtaa

SEQ ID NO: 62082 - protein, 124 aa, Thermotoga maritima MSB8
MKVGELVKGKVSKIVKYGAFVDIEGGERGFIHISKISKNYVKRIEDYLHEGQEISAKVIGRARNGGWELSLKDLEEETPKTGEKSEEKKNMDFEKKLSRFLKESSQKLSEYKKRLEKKGRRSAW

SEQ ID NO: 62083 - DNA, 414 bp, Bacillus halodurans C-125
  CDS (1)..(414): transl_table=11
atggcaattgaagttggcagcaagttgcaaggcaaggtaacgggaatcaccaaatttggtgcatttgttgagttgccaggtggttctacaggtcttgtgcacatcagcgaggttgctgatcattatgtcaaggacattaatgagttgttgacagttggacaggaggttcaagtcaaggttttaaatgtagagtctgatgggaaaattggactttctatccgaaaagcccttgatcagcctgaacgaccgaaacgcccacatggaggtggaaatcgcggtcctcgtacaaatcgtccgggcccatcatttgaagataaaatggctcgcttcttgaaagacagcgaagagcgccttgctacgattaaaaggcaaacagagtcaaagcgtggtggacgcggcgcccgtcgagggtaa

SEQ ID NO: 62084 - protein, 137 aa, Bacillus halodurans C-125
MAIEVGSKLQGKVTGITKFGAFVELPGGSTGLVHISEVADHYVKDINELLTVGQEVQVKVLNVESDGKIGLSIRKALDQPERPKRPHGGGNRGPRTNRPGPSFEDKMARFLKDSEERLATIKRQTESKRGGRGARRG

SEQ ID NO: 62085 - DNA, 417 bp, Bacillus halodurans C-125
  CDS (1)..(417): transl_table=11
atgtcaaattatgaagtaggcagcattgtagaaggaaaagtcacaggaatcaagcccttcggtgcattcgttgcgatcgacgatcagaagcaaggattggttcacatttctgaagtagcgcatggttttgtgaaagacatcaatgatgttctttccgtaggtgacgaagtgaaggtgaaaattttatctgtagacgaagaaagtggaaaaatttctctttccatccgtgcaacacaagaggctcctgagcgtccagctcgcgcgccaaaaccacgcccagctggtggtggtggacgtaaaccacaaaaagggcaaagccaaggacaaggctttaatacattagaagataaactaaaagaatggttaaagcaatcaaacgaaattcaagcagacctaaacaaacgtgccaaaaaatag

SEQ ID NO: 62086 - protein, 138 aa, Bacillus halodurans C-125
MSNYEVGSIVEGKVTGIKPFGAFVAIDDQKQGLVHISEVAHGFVKDINDVLSVGDEVKVKILSVDEESGKISLSIRATQEAPERPARAPKPRPAGGGGRKPQKGQSQGQGFNTLEDKLKEWLKQSNEIQADLNKRAKK

SEQ ID NO: 62087 - DNA, 2205 bp, Escherichia coli O157:H7 EDL933
  CDS (1)..(2205): transl_table=11
  misc_feature (237)..(237): y is t or c
atgcgcagaagatcgggtattaacaccagtgccgtaaggtactgtctaagaaagagaaaggatattacattgcttaatccgatcgttcgtaaattccagtacggccaacacaccgtgactctggaaaccggcatgatggctcgtcaggctactgccgctgttatggttagcatggatgacaccgcggtatttgttaccgttgttggccagaaaaaagccaaaccaggtcaggacttyttcccactgaccgttaactatcaggagcgtacctacgctgctggtcgtatcccgggtagcttcttccgtcgtgaaggtcgtccaagcgaaggcgaaaccctgatcgcgcgtctgattgaccgcccgattcgcccgctgttcccggaaggcttcgtcaacgaagttcaggttatcgccaccgtggtttctgttaacccgcaggttaacccggatatcgtcgcgatgattggtgcttccgcagcactgtctctgtctggtattccgttcaatggcccgattggtgctgcccgcgtaggttacatcaatgaccagtacgtactgaacccgactcaggacgagctgaaagagagcaaactggatctggttgttgcgggtactgaagccgctgtactgatggttgaatctgaagctgaactgctgagcgaagaccagatgctgggcgcagtagtgttcggtcatgaacaacagcaggttgttattcagaacatcaatgaactggtgaaagaagccggtaaaccgcgttgggactggcagccggagccggtaaacgaagcgctgaacgcgcgcgttgctgcactggctgaagctcgtctgagcgatgcttaccgcatcaccgacaaacaagagcgttatgcgcaggttgatgtcatcaaatctgaaaccatcgcgacgctgcttgctgaagacgaaaccctggacgaaaacgaactgggtgaaattctgcacgcgatcgagaaaaacgttgttcgtagccgcgtactggcaggcgaaccgcgtatcgatggtcgtgaaaaagatatgatccgtggtctggatgtgcgtactggcgtgctgccgcgtactcacggttctgcgctgttcacccgtggtgaaacgcaggcgctggttaccgcaacgctgggtactgctcgtgacgcgcaggttcttgatgaactgatgggcgaacgtaccgataccttcctgttccactacaacttccctccgtactccgtaggcgaaaccggcatggtcggttctccgaagcgtcgtgaaattggtcacggtcgtctggcgaagcgcggcgtgctggcagtaatgccggatatggacaaattcccgtacaccgtacgtgttgtgtctgaaatcactgaatccaacggttcttcttctatggcttccgtgtgcggtgcgtctctggcgctgatggacgcaggtgtgccaatcaaagctgccgttgcgggtatcgcaatgggtctggtgaaagaaggcgacaactacgttgtactgtctgacattttgggcgacgaagatcacctgggcgatatggacttcaaagttgcgggttcccgcgacggtatctctgcactgcagatggatatcaaaattgaaggtatcaccaaagagatcatgcaggttgcactgaaccaggctaaaggtgcgcgtctgcacatcctgggtgtaatggaacaggcgatcaacgcgccacgtggcgatatctctgagttcgctccgcgtatccataccatcaagatcaacccggacaagatcaaagacgttatcggtaaaggcggctctgtgatccgtgccctgaccgaagaaactggcaccaccatcgaaatcgaagatgacggtactgtgaagatcgcagcgaccgatggcgagaaagcgaaacacgctattcgtcgtatcgaagagatcactgcagaaattgaagtgggccgcgtctacactggtaaagtgacccgtatcgttgacttcggcgcatttgttgccatcggcggcggtaaagaaggtctggtccacatctctcaaatcgctgacaaacgcgttgagaaagtgaccgattacctgcagatgggtcaggaagtaccggtgaaagttctggaagttgatcgccagggccgtatccgtctgagcattaaagaagcgactgagcagtctcaacctgctgcagcaccggaagctccggctgctgaacagggcgagtaa

SEQ ID NO: 62088 - protein, 734 aa, Escherichia coli O157:H7 EDL933
MRRRSGINTSAVRYCLRKRKDITLLNPIVRKFQYGQHTVTLETGMMARQATAAVMVSMDDTAVFVTVVGQKKAKPGQDFFPLTVNYQERTYAAGRIPGSFFRREGRPSEGETLIARLIDRPIRPLFPEGFVNEVQVIATVVSVNPQVNPDIVAMIGASAALSLSGIPFNGPIGAARVGYINDQYVLNPTQDELKESKLDLVVAGTEAAVLMVESEAELLSEDQMLGAVVFGHEQQQVVIQNINELVKEAGKPRWDWQPEPVNEALNARVAALAEARLSDAYRITDKQERYAQVDVIKSETIATLLAEDETLDENELGEILHAIEKNVVRSRVLAGEPRIDGREKDMIRGLDVRTGVLPRTHGSALFTRGETQALVTATLGTARDAQVLDELMGERTDTFLFHYNFPPYSVGETGMVGSPKRREIGHGRLAKRGVLAVMPDMDKFPYTVRVVSEITESNGSSSMASVCGASLALMDAGVPIKAAVAGIAMGLVKEGDNYVVLSDILGDEDHLGDMDFKVAGSRDGISALQMDIKIEGITKEIMQVALNQAKGARLHILGVMEQAINAPRGDISEFAPRIHTIKINPDKIKDVIGKGGSVIRALTEETGTTIEIEDDGTVKIAATDGEKAKHAIRRIEEITAEIEVGRVYTGKVTRIVDFGAFVAIGGGKEGLVHISQIADKRVEKVTDYLQMGQEVPVKVLEVDRQGRIRLSIKEATEQSQPAAAPEAPAAEQGE

SEQ ID NO: 62089 - DNA, 402 bp, Deinococcus radiodurans R1
  CDS (1)..(402): transl_table=11
ttgaggagaaaactcttggtgcagcttgattctggtgccgtcgcggaaggccgcatcactcgcgtcaccgacttcggcgcgttcgttcagttcgagaacggcgaaacaggactggttcacatctcgcaaatcgcgcactcgttcgtgcgcaacattcacgaccacgtgcgtgaaggcgagaatgtcgaggtcaaggtgctggggcgcgacgagcgcggacgcctcgacctgtccatcaaggaactgctggaggagcctgaggaagtgccccgcccccgcgccattggccggcagagcccgcagttcgaagccaagctgcgctcgttcatgcgtgacgccaaggaacgcggccccggcagcggtggcggcggcaaaaagcccgcaggcaagcgcaagaagtaa

SEQ ID NO: 62090 - protein, 133 aa, Deinococcus radiodurans R1
MRRKLLVQLDSGAVAEGRITRVTDFGAFVQFENGETGLVHISQIAHSFVRNIHDHVREGENVEVKVLGRDERGRLDLSIKELLEEPEEVPRPRAIGRQSPQFEAKLRSFMRDAKERGPGSGGGGKKPAGKRKK

SEQ ID NO: 62091 - DNA, 1890 bp, Deinococcus radiodurans R1
  CDS (1)..(1890): transl_table=11
atgcagcacaggtatcaggcaaggcccggagcgttccaacgcgaaggtttcaggccaggaggacaggagttcatggaagacaacacccagacccccgctgtcaacggcgggactcagcccacgacgggcgacaccagcacccagcaggccgaaggcacccagctcgaccaggagacccagtcgcaccagggcgcgctgaacgctcagaccgagcaggcgcagaccgaagtcagccagggcgagcaggcgcgtcagcaggagcaggccgccaagacccaggctcaggaagagcgcgactaccccgagatgaccatggaagacatcctcgccgccgaggcgcaggaaccccagtcggtcacccgtggtgacattgtcgacggcaccgtggtctttatcggccaggaaggcatcgccgtggacatcggcgccaaggtcgagggcgtcattcccctcaaccagctcggcgaagagcccgtgaccctcgagcaggcgcaggaaatgtacaagcccggcgacgccatcgaagcgtacgtcgtgcgcgtggacctgcccaacagccagatcgtgctcagcaagaagcgtgccgagcaggacaagggctggcgcgtgctggagcgcatgcaggaagccgacgaggctttcgaagtcgaggtgctggaaaaggtgcgcggcggtctggtcgcgcaggtcgagggcatccgtgcgttcctgcccgcctcgcaggtggacacccgccgcgtcaacgacctcgacccctacgtgggcaagcccctgatggtcaagctcatcgagctcaaccgcaagcgcaaccgcgtgatcatcagccaccgcgccatcatggaagccgagaaggccaaggcccgtgaagccacggtcggtcagctcgagcccggcgccgtgttcgaaggcgaagtggtcgaaatcaccgacttcggtgtgttcgtcaacctcggcggcatcgacggtctggtgcaccgcagcgaactgacctacgggcgcttcaaccacccccgcgacgtggtcaaggtgggcgacaaagtccaggttcaggttatcgacgtggacgaaggccgcgagcgcatcaacctgagcatgaaggccctgacccaggatccctgggaaggtgcgaccgagcgctaccacatcggccagcgcgtgaagggcaaggtcaccaacctgaccaacttcggcgccttcatcgaactcgaacccggcctcgaaggtctggtgcacgtcagcgaaatgagctggaccaagcgcgtgcgtcaccccaacgaagtcatgaaggaaggcgacgaggtcgaagccgtcatcctgcgcatcgacccccgcgagcgccggatcagcctcgggattcgtcagaccacggatgatccgtggagcgccttgcccgaccgctacccgcccggcaccccggtcaagggcaagatcaccggcatgaccgatttcggcgtgttcatggagatcgaagaagggatcgaaggcctgattcacatcagcgaactcgacacccagcgcgtcaacaaccccgccgacctgttcaagaagggcgacgagatcgaagccgtgattctgaacatcgacccggtggagcagcgcgccagcctcagccgtcgccgcttcctcggcggtggccccgtgccccagcgcggtgaaggcggccagcgcgactacgtcagccagggtggcggcagccgccgtgactcgaccttcggcggtggccagcgcggtggccgtggcggacgcggcggtgccgactacgcctacaacgccaaggacgcccagcagggtggcaagatcagcaccaagctcggcgacgtctacgcggacctgttcgcgcagttcggcctgggcaacgacaagaaggacgaaggcagcagcgaagaataa

SEQ ID NO: 62092 - protein, 629 aa, Deinococcus radiodurans R1
MQHRYQARPGAFQREGFRPGGQEFMEDNTQTPAVNGGTQPTTGDTSTQQAEGTQLDQETQSHQGALNAQTEQAQTEVSQGEQARQQEQAAKTQAQEERDYPEMTMEDILAAEAQEPQSVTRGDIVDGTVVFIGQEGIAVDIGAKVEGVIPLNQLGEEPVTLEQAQEMYKPGDAIEAYVVRVDLPNSQIVLSKKRAEQDKGWRVLERMQEADEAFEVEVLEKVRGGLVAQVEGIRAFLPASQVDTRRVNDLDPYVGKPLMVKLIELNRKRNRVIISHRAIMEAEKAKAREATVGQLEPGAVFEGEVVEITDFGVFVNLGGIDGLVHRSELTYGRFNHPRDVVKVGDKVQVQVIDVDEGRERINLSMKALTQDPWEGATERYHIGQRVKGKVTNLTNFGAFIELEPGLEGLVHVSEMSWTKRVRHPNEVMKEGDEVEAVILRIDPRERRISLGIRQTTDDPWSALPDRYPPGTPVKGKITGMTDFGVFMEIEEGIEGLIHISELDTQRVNNPADLFKKGDEIEAVILNIDPVEQRASLSRRRFLGGGPVPQRGEGGQRDYVSQGGGSRRDSTFGGGQRGGRGGRGGADYAYNAKDAQQGGKISTKLGDVYADLFAQFGLGNDKKDEGSSEE

SEQ ID NO: 62093 - DNA, 1203 bp, Streptococcus pneumoniae TIGR4
  CDS (1)..(1203): transl_table=11
atgaacgaatttgaagatttgctaaatagcgttagtcaagttgagactggtgatgttgttagtgctgaagtattgacagttgatgcgactcaagctaacgttgcaatctctggaactggtgttgaaggtgtcttgactcttcgcgaattgacaaacgatcgtgatgcagatatcaatgactttgttaaagtaggagaagtattggatgttcttgtacttcgtcaagtagttggtaaagatactgatacagttacataccttgtatctaaaaaacgccttgaagctcgcaaagcatgggacaaacttgttggtcgcgaagaagaagttgttactgttaaaggaacgcgtgccgttaaaggtggactttcagtagaatttgaaggtgttcgtggatttatcccagcttcaatgttggatactcgtttcgtacgtaacgctgagcgttttgtaggtcaagaatttgatactaaaatcaaagaagttaacgctaaagaaaaccgcttcatcctttcacgtcgtgaagttgttgaagcagctactgcagcagctcgcgctgaagtattcggtaaattggctgttggtgatgttgtaactggtaaagttgctcgtatcacaagcttcggcgctttcgtcgaccttggtggtgttgacggattggttcacttgactgaattgtcacatgaacgtaatgtatcaccaaaatcagttgtaactgttggtgaagaaattgaagtgaaaatccttgatcttaacgaagaagaaggacgtgtatcactttcacttaaagcaacagtaccaggaccatgggatggcgttgagcaaaaattggctaaaggtgatgtagtagaaggaacagttaaacgtttgactgacttcggtgcatttgttgaagtattgccaggtatcgatggacttgttcacgtatcacaaatttcacacaaacggattgaaaatccaaaagaagctcttaaagttggtcaagaagttcaagttaaagttcttgaagttaacgcagatgcagaacgcgtgtcactttctattaaagctcttgaagaacgtccagcccaagaagaaggacaaaaagaagaaaaacgtgctgctcgtccacgtcgtccaagacgtcaagaaaagcgtgatttcgaacttccagaaacacaaacaggattttcaatggctgatttgtttggtgatatcgaactttaa

SEQ ID NO: 62094 - protein, 400 aa, Streptococcus pneumoniae TIGR4
MNEFEDLLNSVSQVETGDVVSAEVLTVDATQANVAISGTGVEGVLTLRELTNDRDADINDFVKVGEVLDVLVLRQVVGKDTDTVTYLVSKKRLEARKAWDKLVGREEEVVTVKGTRAVKGGLSVEFEGVRGFIPASMLDTRFVRNAERFVGQEFDTKIKEVNAKENRFILSRREVVEAATAAARAEVFGKLAVGDVVTGKVARITSFGAFVDLGGVDGLVHLTELSHERNVSPKSVVTVGEEIEVKILDLNEEEGRVSLSLKATVPGPWDGVEQKLAKGDVVEGTVKRLTDFGAFVEVLPGIDGLVHVSQISHKRIENPKEALKVGQEVQVKVLEVNADAERVSLSIKALEERPAQEEGQKEEKRAARPRRPRRQEKRDFELPETQTGFSMADLFGDIEL

SEQ ID NO: 62095 - DNA, 1203 bp, Streptococcus pneumoniae R6
  CDS (1)..(1203): transl_table=11
atgaacgaatttgaagatttgctaaatagcgttagtcaagttgagactggtgatgttgttagtgctgaagtattgacagttgatgcgactcaagctaacgttgcaatctctggaactggtgttgaaggtgtcttgactcttcgcgaattgacaaacgatcgtgatgcagatatcaatgactttgttaaagtaggagaagtattggatgttcttgtacttcgtcaagtagttggtaaagatactgatacagttacataccttgtatctaaaaaacgccttgaagctcgcaaagcatgggacaaacttgttggtcgcgaagaagaagttgttactgttaaaggaacgcgtgccgttaaaggtggactttcagtagaatttgaaggtgttcgtggatttatcccagcttcaatgttggatactcgtttcgtacgtaacgctgagcgttttgtaggtcaagaatttgatactaaaatcaaagaagttaacgctaaagaaaaccgcttcatcctttcacgtcgtgaagttgttgaagcagctactgcagcagctcgcgctgaagtattcggtaaattggctgttggtgatgttgtaactggtaaagttgctcgtatcacaagcttcggcgctttcatcgaccttggtggtgttgacggattggttcacttgactgaattgtcacatgaacgtaacgtatcaccaaaatcagttgtaactgttggtgaagaaattgaagtgaaaatccttgatcttaacgaagaagaaggacgtgtatcactttcacttaaagcaacagtaccaggaccatgggatggcgttgagcaaaaattggctaaaggtgatgtagtagaaggaacagttaaacgtttgactgacttcggtgcatttgttgaagtattgccaggtatcgatggacttgttcacgtatcacaaatttcacacaaacggattgaaaatccaaaagaagctcttaaagttggtcaagaagttcaagttaaagttcttgaagttaacgcagatgcagaacgcgtgtcactttctattaaagctcttgaagaacgtccagcccaagaagaaggacaaaaagaagaaaaacgtgctgctcgtccacgtcgtccaagacgtcaagaaaagcgtgatttcgaacttccagaaacacaaacaggattttcaatggctgatttgtttggtgacatcgaactttaa

SEQ ID NO: 62096 - protein, 400 aa, Streptococcus pneumoniae R6
MNEFEDLLNSVSQVETGDVVSAEVLTVDATQANVAISGTGVEGVLTLRELTNDRDADINDFVKVGEVLDVLVLRQVVGKDTDTVTYLVSKKRLEARKAWDKLVGREEEVVTVKGTRAVKGGLSVEFEGVRGFIPASMLDTRFVRNAERFVGQEFDTKIKEVNAKENRFILSRREVVEAATAAARAEVFGKLAVGDVVTGKVARITSFGAFIDLGGVDGLVHLTELSHERNVSPKSVVTVGEEIEVKILDLNEEEGRVSLSLKATVPGPWDGVEQKLAKGDVVEGTVKRLTDFGAFVEVLPGIDGLVHVSQISHKRIENPKEALKVGQEVQVKVLEVNADAERVSLSIKALEERPAQEEGQKEEKRAARPRRPRRQEKRDFELPETQTGFSMADLFGDIEL

SEQ ID NO: 62097 - DNA, 2136 bp, Salmonella typhimurium LT2
  CDS (1)..(2136): transl_table=11
ttgcttaatccgatcgttcgtaaattccagtacggtcagcataccgttacgctggaaactggcatgatggcgcgtcaggccactgccgctgttatggtaagcatggatgacaccgccgtattcgttaccgttgtcggccagaaaaaagccaagccaggccaggacttcttcccactgaccgttaactatcaggagcgtacctacgctgctggtcgtatcccgggcagcttcttccgtcgtgaaggccgtccaagcgaaggcgaaaccctgatcgcgcgtctgattgaccgcccggttcgtccgctgttcccggaaggcttcgttaacgaagtgcaggttatcgcgaccgtcgtttccgttaacccgcaggttaacccggatatcgtggcgatgatcggcgcatccgctgcgctgtcgctgtccggcattccgttcaacggcccaatcggcgcggcgcgcgtaggttacatcaatgaccagtacgtgctgaacccgacccaggacgagctgaaagaaagcaagctggacctggtggttgccggtaccgaagcggctgtgctgatggtggaatccgaagctgaactgctgagcgaagacactatgctgggcgcggtggtattcggtcacgagcagcagcaggttgttatccaggcgatcaacgatctggtgaaagaagccggtaaaccgcgttgggactggcagccggaagccgtcaacgacgcgttgaacgcgcgtgttgctgcgctggctgaatctcgtctgagcgacgcgtaccgcatcaccgataaacaagagcgctatgctcaggttgacgtaatcaaatccgaaaccatcgagcagcttattgcagaagatgaaactctggatgctaacgagctgggcgaaatcctgcacgctatcgagaaaaacgtggtgcgtagccgcgtactggcaggcgagccgcgtattgatggccgtgaaaaagacatgatccgtggtctggacgtgcgcactggcgtactgccgcgtactcacggttccgctctgtttacccgtggtgaaacgcaggcgctggttaccgcaactctgggtactgcccgtgacgcgcaggtgcttgatgaactgatgggcgagcgtactgacagcttcctgttccactacaacttccctccgtactccgtaggcgaaaccggcatggtcggttctccgaagcgtcgtgaaattggtcacggtcgtctggcgaagcgcggcgtgctggcagtgatgccggacatggataaattcccgtacaccgttcgcgtggtgtctgaaatcaccgaatccaacggttcttcttctatggcttccgtgtgcggcgcttctctggcgctgatggacgctggcgtgccaattaaagccgccgtagcaggtatcgctatgggtctggtgaaagaaggcgacaactacgttgtactgtctgacattctgggcgacgaagatcacctgggcgatatggacttcaaagtggcgggttcccgcgacggtatctctgcgctgcagatggatatcaaaattgaaggtatcaccaaagagatcatgcaggttgcgttgaaccaggctaaaggtgcgcgtctgcacatcctgggcgtgatggaacaggcgatcaacgcgccgcgcggcgatatctctgaatttgcgccgcgtatccataccatcaagatcagcacggacaagatcaaagacgtgatcggtaaaggcggttctgtgatccgcgcgctgactgaagagaccggcaccaccatcgaaatcgaagatgacggtactgtgaagatcgcggcgaccgacggtgaaaaagcgaaatacgctatccgtcgtatcgaagagatcaccgcagagatcgaagtcggccgtatctacaatggtaaagtgacccgtatcgttgactttggcgcgtttgttgccatcggcggcgggaaagaaggtctggttcacatctctcaaatcgcggataaacgtgtagagaaagtgaccgactatctgcagatgggtcaggaagtcccggttaaggttctggaagttgaccgccagggccgtgtacgtctgagcattaaagaagcaaccgagcagtctcaacctgcggctgcgccggaagctccggcgagcgaacaggccgagtaa

SEQ ID NO: 62098 - protein, 711 aa, Salmonella typhimurium LT2
MLNPIVRKFQYGQHTVTLETGMMARQATAAVMVSMDDTAVFVTVVGQKKAKPGQDFFPLTVNYQERTYAAGRIPGSFFRREGRPSEGETLIARLIDRPVRPLFPEGFVNEVQVIATVVSVNPQVNPDIVAMIGASAALSLSGIPFNGPIGAARVGYINDQYVLNPTQDELKESKLDLVVAGTEAAVLMVESEAELLSEDTMLGAVVFGHEQQQVVIQAINDLVKEAGKPRWDWQPEAVNDALNARVAALAESRLSDAYRITDKQERYAQVDVIKSETIEQLIAEDETLDANELGEILHAIEKNVVRSRVLAGEPRIDGREKDMIRGLDVRTGVLPRTHGSALFTRGETQALVTATLGTARDAQVLDELMGERTDSFLFHYNFPPYSVGETGMVGSPKRREIGHGRLAKRGVLAVMPDMDKFPYTVRVVSEITESNGSSSMASVCGASLALMDAGVPIKAAVAGIAMGLVKEGDNYVVLSDILGDEDHLGDMDFKVAGSRDGISALQMDIKIEGITKEIMQVALNQAKGARLHILGVMEQAINAPRGDISEFAPRIHTIKISTDKIKDVIGKGGSVIRALTEETGTTIEIEDDGTVKIAATDGEKAKYAIRRIEEITAEIEVGRIYNGKVTRIVDFGAFVAIGGGKEGLVHISQIADKRVEKVTDYLQMGQEVPVKVLEVDRQGRVRLSIKEATEQSQPAAAPEAPASEQAE

SEQ ID NO: 62099 - DNA, 2142 bp, Agrobacterium tumefaciens str. C58
  CDS (1)..(2142): transl_table=11
atgttcaataaacactccgtggaaatcgaatgggcaggccgcccgttgaagctcgagaccggcaaggttgcccgtcaggctgacggcgccgtcatcgcaacctacggcgagacgatggttctcgcgaccgtggtttccgcaaagtctccgaagcccggccaggacttcttcccgctgaccgtcaactatcaggaaaagacctacgcagccggcaagatccccggtggctatttcaagcgcgaaggtcgtccgtcggaaaaggaaacactggtttcccgcctgatcgaccgtccgatccgcccgcttttccctgaaggttacaagaacgacacgcaggttgtcgtcacggtcattcagcacgatctggaaaatgatccggacgttctgtcgatggttgccgcatccgctgcgctcacactgtccggcattcctttcatgggtccggtcggcggcgcgcgtgttggctacatcaacggcgaatacgttctgaacccgcatctcgacgagatggatgaatcggttctggatctggttgttgccggcacgcaggacgccgtcctgatggtggaatcggaagccaaggaactcaacgaagagatcatgctcggcgccgtcatgttcggccacaagggcttccagccggttatcgacgcgatcatcaagctcgctgaagttgccgccaaggagccacgcgaattcgagccggaggatttctccgcactcgaaaacgaaatgctcggccttgccgaaaccgaactgcgcaccgcctacaagatcaccgaaaaggctgcccgttacgctgccgtcgacgccgtcaagacgaaggtcaaggcgcacttcctgccggaagaaggcgaagcgaagtacagcccggaagaaatcggcgctgtcttcaagcaccttcaggccaagatcgttcgctggaacgttctcgacaccaagagccgcatcgacggccgcgacctgtcgaccgttcgcccgatcgtttccgaagtcggcattctgccgcgcacccacggttcggcgctgttcactcgtggtgaaacgcaggcgatcgttgttgcgacgctcggcacaggcgaagacgaacagtatgtcgatagcctgaccggcatgtacaaggaacgtttcctgctgcattacaacttcccgccctactcggtcggcgaaacaggccgcatgggttccccgggccgtcgcgaaatcggtcacggcaagctcgcatggcgcgctatccgtccgatgctgccgactgcggaacagttcccctacacgctgcgcgtcgtttccgaaatcaccgagtccaacggctcctcgtcgatggcaacggtttgcggcacctcgcttgctctgatggacgccggcgtgccgcttgctaagccggttgccggtatcgccatgggcctgatccttgagggcgagcgctttgcggttctctccgacatcctgggtgacgaagatcacctcggcgacatggacttcaaggttgcgggtacggccgacggcatcacctcgctgcagatggacatcaagattgccggtatcaccgaagagatcatgaagatcgctctggagcaggcacagggtggccgcaagcacatcctcggcgaaatggccaacgccatcaccgagagccgtggccagctcggcgaattcgcaccgcgcatcgaagtcatgaacattccggtcgacaagattcgtgaagtcatcggttcgggcggcaaggtcattcgcgaaatcgtcgaaaagaccggcgccaagatcaacatcgaagacgacggcaccgtcaagatcgcttctgcttccggcaaggaaatcgaagcggcccgcaagtggatccactcgatcgttgcggaaccggaagtcggccagatctacgaaggcactgttgtcaagaccgctgacttcggcgctttcgtcaacttcttcggcgcccgtgacggcctcgtccacatctcgcagctcgcttccgagcgcgttgccaagacctccgacgtcgtcaaggaaggggacaaggtctgggtcaagctgatgggctttgatgagcgcggcaaggttcgcctgtccatgaaggttgtcgaccaggcaaccggcaaggaagtggctgccgacaagaaagacggcgaagccgctgccgaataa

SEQ ID NO: 62100 - protein, 713 aa, Agrobacterium tumefaciens str. C58
MFNKHSVEIEWAGRPLKLETGKVARQADGAVIATYGETMVLATVVSAKSPKPGQDFFPLTVNYQEKTYAAGKIPGGYFKREGRPSEKETLVSRLIDRPIRPLFPEGYKNDTQVVVTVIQHDLENDPDVLSMVAASAALTLSGIPFMGPVGGARVGYINGEYVLNPHLDEMDESVLDLVVAGTQDAVLMVESEAKELNEEIMLGAVMFGHKGFQPVIDAIIKLAEVAAKEPREFEPEDFSALENEMLGLAETELRTAYKITEKAARYAAVDAVKTKVKAHFLPEEGEAKYSPEEIGAVFKHLQAKIVRWNVLDTKSRIDGRDLSTVRPIVSEVGILPRTHGSALFTRGETQAIVVATLGTGEDEQYVDSLTGMYKERFLLHYNFPPYSVGETGRMGSPGRREIGHGKLAWRAIRPMLPTAEQFPYTLRVVSEITESNGSSSMATVCGTSLALMDAGVPLAKPVAGIAMGLILEGERFAVLSDILGDEDHLGDMDFKVAGTADGITSLQMDIKIAGITEEIMKIALEQAQGGRKHILGEMANAITESRGQLGEFAPRIEVMNIPVDKIREVIGSGGKVIREIVEKTGAKINIEDDGTVKIASASGKEIEAARKWIHSIVAEPEVGQIYEGTVVKTADFGAFVNFFGARDGLVHISQLASERVAKTSDVVKEGDKVWVKLMGFDERGKVRLSMKVVDQATGKEVAADKKDGEAAAE

SEQ ID NO: 62101 - DNA, 405 bp, Clostridium perfringens str. 13
  CDS (1)..(405): transl_table=11
atgaccttaatggcaggaaacatattagagggtagaataattaacatcacaaactttggtgcgtttgttgaagtggaaggaaagacaggtttagttcatatatctgaagtagcagatacttatgttaaagatataagagagcatcttaaagaagatgacaaagttaaagtgaaagtaatatcagttgatgataaaggcaaaataagcttatcaataaagcaagctatgccaccaaagaagaaatctgttaaacctgcagattttgattggaataatgaaaagaaagctaagccaaaacaaaactttgaagatataatgtcaaagtttttaaaggatagtgaagaaagacttcaagatgtaaaaaaacatcaagatgtaaaacaaagaaaaagaaaatcaatataa

SEQ ID NO: 62102 - protein, 134 aa, Clostridium perfringens str. 13
MTLMAGNILEGRIINITNFGAFVEVEGKTGLVHISEVADTYVKDIREHLKEDDKVKVKVISVDDKGKISLSIKQAMPPKKKSVKPADFDWNNEKKAKPKQNFEDIMSKFLKDSEERLQDVKKHQDVKQRKRKSI

SEQ ID NO: 62103 - DNA, 414 bp, Thermoanaerobacter tengcongensis MB4
  CDS (1)..(414): transl_table=11
atgccgtttgaagttggggatattgtcgaaggaactgtattgaacatcacagactttggagctttcattaagctaccggaggggaaaacggggctggttcacatctctgaagttgcgaacacatacgtgaaaaacatcagggacttcttgaaagaaaacgacagggttaaagtaaaaattttgtccatggaaccaaatggaaaaataagcctgtctataaagaaggcaatgccgcaaaaaactcctaaagaaaaagattttgcatggcaaaacagcagaaacaacaataacagttcttttgaagagaaattattaaaatttttaaaggattctgatgaaagacagcaacagcttagaaagcatttagattcaaaaagaagaaatacaagttacagaagaagcaatggatattaa

SEQ ID NO: 62104 - protein, 137 aa, Thermoanaerobacter tengcongensis MB4
MPFEVGDIVEGTVLNITDFGAFIKLPEGKTGLVHISEVANTYVKNIRDFLKENDRVKVKILSMEPNGKISLSIKKAMPQKTPKEKDFAWQNSRNNNNSSFEEKLLKFLKDSDERQQQLRKHLDSKRRNTSYRRSNGY

SEQ ID NO: 62105 - DNA, 2343 bp, Streptomyces coelicolor A3(2)
  CDS (1)..(2343): transl_table=11
gtgacgacaccggacgtagggtccatcgaaagcaggatcgccgacgagctcggcgtacgggagcggcaggtgaaggccgcggtcgagctgctcgacggcggctcgacggtgcccttcatcgcccgctaccgcaaggaagcgaccgagatgctcgacgacgcgcagctgcgcacgctcgaggagcggctgcgctatctgcgggagctggaggagcggcgcgcggcgatcctcgactcggtccgcgagcagggcaagctcaccgaggagctggcggcgcgcatccgcgcggcggagaccaaggcgcgcctggaggacatctacctgccgttcaagccgaagcggcggacgaaggcgcagatcgcgcgcgaggcgggtctggagccgctggccgagggcctgctcgccgacgcgtcggtggacccgccggccgcggcggccgcgttcgtcgacgccgacaagggcgtgcccgacccgcaggcggccctggacggggcgcgctcgatcctcacggagaagttctcggaggacgccgacctgatcggcgagctgcgcgagcggatgtggacgcgcgggcggctcgcggccaaggtcaaggacggcaaggaggaggccggcgccaagttcgccgactacttcgacttcgccgagccgttcaccgacctgccctcgcaccgcgtgctcgcgatgctgcgcggcgagaaggaggacgtgctcgacctcgtcctggagcccgaggaggccaccgagggcccgtcgtcgtacgaggcgatcgtcgcgagccgcttcgggatcgcggaccgcggccggcccgcggacaagtggctgcgcgacaccgtccgctgggcctggcgcacccgcatcctggtgcacctcggcatcgacctgcggctgcggctgcgcacggccgccgaggacgaggcggtgaacgtcttcgccgccaacctccgcgacctgctgctggccgcaccggcgggcacccgggcgacgctcggcctcgaccccggcttccgcaccggtgtgaaggtcgccgtggtcgacgcgaccggcaaggtcgtggccaccgacgtgatccacccgcacgtcccggccaaccggtgggacgaggcgatcgccaagctcgcgcggctggcgaaggagcacacggtcgacctgatcgccatcggcaacggcacggcctcccgcgagaccgacaagctcgccggtgaactcatcaccaagcaccccgagttgaagctgaccaaggtgatggtgtccgaggcgggcgcctccgtgtactcggcctccgccttcgcctcccaggagctgccggacatggacgtctcgctgcgcggcgcggtgtcgatcgcccggcggctgcaggacccgctggccgagctggtgaagatcgacccgaagtcgatcggcgtcggccagtaccagcacgacctctccgaggtgaagctgtcccgctcgctggacgcggtggtcgaggactgtgtgaacggcgtgggggtggacgtcaacacggcctccgcgccgctgctcgcccgggtctccggcatcacctccgggctcgcggagaacatcgtggcgcaccgcgacgcgaacggaccgttctcctcgcggaccgcgctgaagaaggtgtcccggctcgggcccaaggcgtacgagcagtgtgcgggcttcctgcggatccggggcggcgacgacccgctggacgcgtccagcgtgcacccggaggcgtaccccgtggtgcggcggatggtgaagaccgccgggcaggaggtgagcggcctgatcggcaacacgtcggtgctgcggtcgctgaagccggaccggttcgtggacgagacgttcggtctgccgacggtcacggacattctgcgggagctggagaagccggggcgcgaccctcggcccgccttcaagacggccaccttcaaggagggcgtggagaagatctccgacctgtcgtccgggatggtgctggagggtgtcgtcacgaacgtcgccgcgttcggggcgttcgtggacgtcggtgtgcaccaggacgggctcgtgcacgtgtccgcgatgtcgaggacgttcgtgaaggatccgcgggacgtggtgaagcccggggacatcgtgaaggtgaaggtgatggacgtcgacattccgcggaagcggatctcgttgacgttgcggttggacgacgaagccgctccgcagggggagccgaagaaggagcgtggggcgaggcctccccggcagaggcagcagcggcagggtggttccgggggcggtaaggggcggccttcgtcggcgcctgccgcgtccaacggagcgatggcggacgcgttgcggcgggccgggttggcgtaa

SEQ ID NO: 62106 - protein, 780 aa, Streptomyces coelicolor A3(2)
MTTPDVGSIESRIADELGVRERQVKAAVELLDGGSTVPFIARYRKEATEMLDDAQLRTLEERLRYLRELEERRAAILDSVREQGKLTEELAARIRAAETKARLEDIYLPFKPKRRTKAQIAREAGLEPLAEGLLADASVDPPAAAAAFVDADKGVPDPQAALDGARSILTEKFSEDADLIGELRERMWTRGRLAAKVKDGKEEAGAKFADYFDFAEPFTDLPSHRVLAMLRGEKEDVLDLVLEPEEATEGPSSYEAIVASRFGIADRGRPADKWLRDTVRWAWRTRILVHLGIDLRLRLRTAAEDEAVNVFAANLRDLLLAAPAGTRATLGLDPGFRTGVKVAVVDATGKVVATDVIHPHVPANRWDEAIAKLARLAKEHTVDLIAIGNGTASRETDKLAGELITKHPELKLTKVMVSEAGASVYSASAFASQELPDMDVSLRGAVSIARRLQDPLAELVKIDPKSIGVGQYQHDLSEVKLSRSLDAVVEDCVNGVGVDVNTASAPLLARVSGITSGLAENIVAHRDANGPFSSRTALKKVSRLGPKAYEQCAGFLRIRGGDDPLDASSVHPEAYPVVRRMVKTAGQEVSGLIGNTSVLRSLKPDRFVDETFGLPTVTDILRELEKPGRDPRPAFKTATFKEGVEKISDLSSGMVLEGVVTNVAAFGAFVDVGVHQDGLVHVSAMSRTFVKDPRDVVKPGDIVKVKVMDVDIPRKRISLTLRLDDEAAPQGEPKKERGARPPRQRQQRQGGSGGGKGRPSSAPAASNGAMADALRRAGLA

SEQ ID NO: 62107 - DNA, 384 bp, Oceanobacillus iheyensis HTE831
  CDS (1)..(384): transl_table=11
atgtcaatcgaagtaggcagcaagctgcaagggaaagtaactggaatcactaattttggagcctttgttgagttggaaaaaggaacaacggggttagttcatattagtgaggttgctgacaactatgtaaaagatattaatgaacatttaacggttggtgatgaagtaaaggttaaagtcattaatgtcgaaaaagatggcaagattggtctatctataaaaaaggcgaaggatcgtcctgttcgccaaaagaacaccaaagagcgtacagagaattttgaatcgaaaatgagtcgtttcttaaaagactcagaagatcgtctagcctctttgaagaagcacacggaatctaaacgcgggggtcgaggtgctaaaagaggatag

SEQ ID NO: 62108 - protein, 127 aa, Oceanobacillus iheyensis HTE831
MSIEVGSKLQGKVTGITNFGAFVELEKGTTGLVHISEVADNYVKDINEHLTVGDEVKVKVINVEKDGKIGLSIKKAKDRPVRQKNTKERTENFESKMSRFLKDSEDRLASLKKHTESKRGGRGAKRG

SEQ ID NO: 62109 - DNA, 2742 bp, Bifidobacterium longum NCC2705
  CDS (1)..(2742): transl_table=11
atggagggtcccgaaatcaaggccgttgaggccgtaatcgacaatggatcgtttggtaagcgcacgctgcgcttcgagaccggccgcctcgcccagcaggccgatggcgctgtggccgcctacctcgacgacgattccatgattctgtccaccaccaccgccggttccagcccgaaggagaactacgacttcttcccgctgaccgttgatgttgaagagaagatgtacgctgccggcaagattccgggctcgttcttccgccgtgaaggccgcccgagctccgaggccatcctcgcctgccgcatcatcgaccgcccgctgcgcccgctgttcccgcacaccctgcgcaacgaagtgcaggtcgtcgagaccgtgctcgccgtgaaccctgatgacgcttacgatgtcatcgccctgaacgccgcttccgcctccactatgatctccggcctgccgttcgaaggcccggtctccggtgtgcgtctggcgctgatcgacggccagtgggtcgccttcccgcgttggagtgagcgtgagcgcgccgtgttcgagattgtggtcgctggccgcgtgatcgagaacggtgatgttgccatcgccatgatcgaggcgggtgccggcaagaacgcctggcacctcatctatgacgagggtcagaccaagcccgatgaggaggtcgtggccggtggtcttgaagccgccaagccgttcatcaaggtgatctgcgaggctcaggatgagctcaagaagatcgccgccaaggagaccaaggaattccagctcttcccggagtacaccgacgagctgtatgcccgtatcgacgagatcgctcacaaggatctggacgaggcgctctccatcgccgagaagctgccgcgtcaggatcgcatccacgagatcaaggagcacgtgcgcgaggtgctcgcggacgagttcaccgatatggacgatgccgagaaggacaaggaactcggtaacgccttcaaggaactgcagcgccagattgtgcgtcgccgcatcctgaccgaggactaccgcatcgacggccgtggcctgcgcgacatccgcaccctgtccgccgaggtggacattgtgcctcgcgtgcacggttccgccctgttccagcgtggcgagacccagattctgggcgtcaccacgctgaacatgctcaagatggagcagcagatcgacgcgctgtccggtccgcagtccaagcgttacatgcacaactacgagatgccgccgtactccactggtgagaccggccgcgtcggttccccgaagcgccgcgaaatcggccacggcgccctcgccgagaaggctctcgtgccggtgctgccgagccgcgaagagttcccctacgccatccgacaggtctccgaggccatcggttccaacggttccacttcgatgggttccgtgtgcgcctccacgctgagccttttggctgccggcgtgccgctgaaggctccggttgccggcatcgccatgggcctcgtgtccggcgacgttgatggcaagcacatcttcaagaccctcaccgatattctgggtgccgaggatgccttcggcgacatggacttcaaggtggccggtacttccgagttcatcaccgccctgcagctcgacaccaagctcgacggcatccccgccgacatcctggccgccgctctgcagcaggccaaggaagcccgcgccacgattctcgaggtcatcaacgagtgcatcgacggcccggccgagatgagcgagttcgctccgcgcatcatcaccacctccgtcccggttgagaagatcggcgaagtcatcggcccgaagggcaagatgatcaaccagattcaggaagacaccggcgctgaaattgccatcgaggatgacggtaccgtcttcatctcctccgagggtggcgaggctgctgagaaggccaaggccatcatcgaccagattgccaacccgcacgtgcccgaggccggcgaaacctacaacggcaaggtcgtcaagaccacgtcgttcggcgctttcgtgaacctcacccccggcaccgacggcctgctgcacatctcccagatccgcaacctggccaacggcgagcgtattgacgctgtcgaagacgtgctcaaggaaggcgacaccgttgaggtgatcgttcagggtgtcgatgatcgcggcaagatctccctggccattcctggtttcgaggatcaggagaacaacgcccgcccgagccgtggcgatcgcgatgaccgccgtggcggccgtggccgtggtgaccgtgacgatcgccgtggcggccgtggccgtcgctccgagcgcgatgaccgtgacttcgacgatcgtgacgaccgtccgcgtcgccgtcgctccgatgacttcgaggatgattacgacgaccgtccgcgtcgccgtcgctccgatgaccgtgacttcgatcgcgatgatcgcgatgatgatcgtccgcgtcgccgtcgttctgccgaccgtgacttcgacgatcgcgatgaccgtgatgctcgcgactcccgtgacgatgatcgtccgcgtcgccgtcgctcttccgatcgcgatgaccgtggcgatcgtgatgaccgccgtggcggttcccgtggccgtggccgtggctcggaccgtaacccgcgctacgccaccgacgacaactacgacgactaccgcgccgaccgcgaagagcgtactgagcgcccgcgtcgccgcgtccgtcgcgactttgatccgttcgaggactaa

SEQ ID NO: 62110 - protein, 913 aa, Bifidobacterium longum NCC2705
MEGPEIKAVEAVIDNGSFGKRTLRFETGRLAQQADGAVAAYLDDDSMILSTTTAGSSPKENYDFFPLTVDVEEKMYAAGKIPGSFFRREGRPSSEAILACRIIDRPLRPLFPHTLRNEVQVVETVLAVNPDDAYDVIALNAASASTMISGLPFEGPVSGVRLALIDGQWVAFPRWSERERAVFEIVVAGRVIENGDVAIAMIEAGAGKNAWHLIYDEGQTKPDEEVVAGGLEAAKPFIKVICEAQDELKKIAAKETKEFQLFPEYTDELYARIDEIAHKDLDEALSIAEKLPRQDRIHEIKEHVREVLADEFTDMDDAEKDKELGNAFKELQRQIVRRRILTEDYRIDGRGLRDIRTLSAEVDIVPRVHGSALFQRGETQILGVTTLNMLKMEQQIDALSGPQSKRYMHNYEMPPYSTGETGRVGSPKRREIGHGALAEKALVPVLPSREEFPYAIRQVSEAIGSNGSTSMGSVCASTLSLLAAGVPLKAPVAGIAMGLVSGDVDGKHIFKTLTDILGAEDAFGDMDFKVAGTSEFITALQLDTKLDGIPADILAAALQQAKEARATILEVINECIDGPAEMSEFAPRIITTSVPVEKIGEVIGPKGKMINQIQEDTGAEIAIEDDGTVFISSEGGEAAEKAKAIIDQIANPHVPEAGETYNGKVVKTTSFGAFVNLTPGTDGLLHISQIRNLANGERIDAVEDVLKEGDTVEVIVQGVDDRGKISLAIPGFEDQENNARPSRGDRDDRRGGRGRGDRDDRRGGRGRRSERDDRDFDDRDDRPRRRRSDDFEDDYDDRPRRRRSDDRDFDRDDRDDDRPRRRRSADRDFDDRDDRDARDSRDDDRPRRRRSSDRDDRGDRDDRRGGSRGRGRGSDRNPRYATDDNYDDYRADREERTERPRRRVRRDFDPFED

SEQ ID NO: 62111 - DNA, 1203 bp, Streptococcus agalactiae NEM316
  CDS (1)..(1203): transl_table=11
atgaatgaatttgaagatttgctaaacagtgttagcgaagtgaaccctggtgacgttgtcactgcggaagttttaacagttgataacggtcaagcaaacgttgttatcgatggtactggtgttgaaggtgtcttgacacttcgtgaattgactaacgatcgtgatgctgatatcaatgattttgttaaagctggcgacacagttgaagtacttgttcttcgtcaagttgtaggtaaagatactgatacagtaactttccttgtatctaaaaaacgcttggaagctcgtaaagcatgggacaaacttgttggtcgtgaaggtgaagttgttactgttaaaggtacacgtgctgttaaaggcggactttcagttgaatttgaaggacttcgtggtttcatcccagcttcaatgattgatactcgttttgtacgtaacactgaaaaatttgttggacaagaatttgatgctaaaatcaaagaagttgatgcagcagaaaatcgcttcatcctttcacgtcgtgaagttgttgaagaatctgcagctgcagcacgtaaagaagttttctcaaacattgaagtaggttcagttgtaactggtaaagttgctcgtttaacaagctttggtgctttcattgaccttggtggtgttgatggacttgtacacgtaactgaattatcacatgagcgcaatgtttcacctaaatcagttgtaactgttggtgaagaagttgaagttaaagtactttcaattgatgaagaagctggtcgtgtatcactttcacttaaagcaactacacctggcccatgggatggcgttgaacaaaaacttgctgctggtgatgttattgaaggtaaagtaaaacgcttgactgactttggtgcttttgttgaagtgttacctggcattgatggactcgtacacatttcacaaatttcacacaaacgtgttgaaaatcctaaagacgtattatctgcaggacaagaagttactgttaaagttcttgaagttaattcagatgcagaacgtgtatcactttcaatgaaagctcttgaagagcgtccagcgcaagcagaaggtgaaaaagaagaaaaacgtcaatcacgtccacgtcgtccacgtcgtcaagaaaaacgcgactacgagcttccagaaacacaaactggattctctatggctgacttattcggtgatattgaattataa

SEQ ID NO: 62112 - protein, 400 aa, Streptococcus agalactiae NEM316
MNEFEDLLNSVSEVNPGDVVTAEVLTVDNGQANVVIDGTGVEGVLTLRELTNDRDADINDFVKAGDTVEVLVLRQVVGKDTDTVTFLVSKKRLEARKAWDKLVGREGEVVTVKGTRAVKGGLSVEFEGLRGFIPASMIDTRFVRNTEKFVGQEFDAKIKEVDAAENRFILSRREVVEESAAAARKEVFSNIEVGSVVTGKVARLTSFGAFIDLGGVDGLVHVTELSHERNVSPKSVVTVGEEVEVKVLSIDEEAGRVSLSLKATTPGPWDGVEQKLAAGDVIEGKVKRLTDFGAFVEVLPGIDGLVHISQISHKRVENPKDVLSAGQEVTVKVLEVNSDAERVSLSMKALEERPAQAEGEKEEKRQSRPRRPRRQEKRDYELPETQTGFSMADLFGDIEL

SEQ ID NO: 62113 - DNA, 2106 bp, Pseudomonas putida KT2440
  CDS (1)..(2106): transl_table=11
gtgaacccggtaatcaagactttccagttcggtcaatcgaccgtcactctcgaaacgggccgtattgcccgtcaggcaaccggcgccgtgctggttaccgtcgacaacgacgtcaccgtgctggtgactgtggtaggcgccaaacaggctgatccaggcaagggtttcttcccgctgtcggttcactaccaggaaaagacctacgccgctggcaagatcccaggtggcttcttcaagcgtgaaggccgtccttccgagaaagagacgctgacctcgcgcctgatcgaccgtccgatccgtccgctgttcccggaaggcttcatgaacgaagtgcaggtcgtctgcaccgtggtttccaccagcaagaagaccgacccggacatcgctgcgatgatcggtacctcggctgccctggccatttccggcattccgttcgaaggcccgatcggcgctgcccgcgttgccttccacgaaagcactggctacctgctgaacccgacctatgagcaactggctgcctcgagcctggacatggtcgttgccggtacctccgacgctgtactgatggttgaatcggaagctcaagagctgaccgaagaccagatgctgggtgccgtactgttcgcccacgacgaattccaggctgttatccaggctgtcaaagagctggctgccgaagctggcaagccgacttgggactggaaacctgccgttgccaacaccgagctgttcaatgctatccgcgccgagttcggcgaagcggtttcgcagggttacaccatcaccgtcaaagccgaccgctacgcgcgtctgggtgagctgcgtgaccaggcggttgccaagttctccggtgaagaaggccagccttcggcttccgaagtaaaagagatcttcggcgaaatcgaataccgcaccgttcgcgaaaacatcgtcaacggcaagccacgtatcgacggccgcgacaacaagaccgtacgcccgctgaacatcgaagtgggtgtgctgccaaaaactcacggttcggcactgttcacccgtggcgaaacccaggccctggtcgttgcgaccctgggtactgcccgtgatgcccagctgctggacaccctcgaaggcgagaagaaagaccccttcatgctgcactacaacttcccaccgttctcggtaggtgagtgtggccgcatgggcggtgctggccgtcgcgaaatcggccacggccgtctggcccgccgttcggttcaggccatgctgcctgctgctgacgtgttcccgtacaccatccgcgtggtttcggaaatcaccgaatccaacggttccagctccatggcttcggtctgcggtgcttccctggccctgatggacgccggtgtgccgatgaaggcgccggttgccggtatcgccatgggcctggtcaaggaaggcgacaagttcgcagtcctgactgacatcctgggtgacgaagaccacctgggcgacatggacttcaaggtagccggtaccgccaaaggcgtcaccgcgctgcagatggacatcaagatcaacggcatcaccgaagagatcatggaaatcgccctgggccaagccctggaagcgcgcctgaacatcctcggccagatgaaccaggttattggccagtcgcgtaccgaactgtcggccaacgccccgaccatgatcgcgatgaagatcgacaccgacaagatccgtgacgtcatcggtaaaggcggcgccaccattcgcgccatctgcgaagagaccaaggcttcgatcgacatcgaagacgacggctcgatcaagatcttcggcgaaaccaaggaagcggcagatgctgccaagcagcgcatcctgggcatcaccgctgaggccgagatcggcaagatctacgtcggcaaggttgagcgcattgtcgacttcggcgccttcgtcaacatcctgcctggcaaggacggtttggtgcacatctccatgctgagcgatgctcgcgtcgagaaagtcaccgacatcctcaaggaaggccaggaagttgaagtgcttgtactggacgtggacaaccgcggccgtatcaagctgtcgatcaaagacgtccctgcggccaaggcctcgggcgtctaa

SEQ ID NO: 62114 - protein, 701 aa, Pseudomonas putida KT2440
MNPVIKTFQFGQSTVTLETGRIARQATGAVLVTVDNDVTVLVTVVGAKQADPGKGFFPLSVHYQEKTYAAGKIPGGFFKREGRPSEKETLTSRLIDRPIRPLFPEGFMNEVQVVCTVVSTSKKTDPDIAAMIGTSAALAISGIPFEGPIGAARVAFHESTGYLLNPTYEQLAASSLDMVVAGTSDAVLMVESEAQELTEDQMLGAVLFAHDEFQAVIQAVKELAAEAGKPTWDWKPAVANTELFNAIRAEFGEAVSQGYTITVKADRYARLGELRDQAVAKFSGEEGQPSASEVKEIFGEIEYRTVRENIVNGKPRIDGRDNKTVRPLNIEVGVLPKTHGSALFTRGETQALVVATLGTARDAQLLDTLEGEKKDPFMLHYNFPPFSVGECGRMGGAGRREIGHGRLARRSVQAMLPAADVFPYTIRVVSEITESNGSSSMASVCGASLALMDAGVPMKAPVAGIAMGLVKEGDKFAVLTDILGDEDHLGDMDFKVAGTAKGVTALQMDIKINGITEEIMEIALGQALEARLNILGQMNQVIGQSRTELSANAPTMIAMKIDTDKIRDVIGKGGATIRAICEETKASIDIEDDGSIKIFGETKEAADAAKQRILGITAEAEIGKIYVGKVERIVDFGAFVNILPGKDGLVHISMLSDARVEKVTDILKEGQEVEVLVLDVDNRGRIKLSIKDVPAAKASGV

SEQ ID NO: 62115 - DNA, 423 bp, Clostridium thermocellum ATCC 27405
  CDS (1)..(423): transl_table=11
atgctcgttgaagtaggtaaaattgttgagggcagagtttccggcatcaccagtttcggagctttcgttgagctctcaaatggtcagactggcttggttcacatctctgaagttgctgatgagtatgtaaaagacattaaatctcatctcaaagaaaatcaaacggtaaaagtcaaaattatttctgtggacaaaaacggaaaaataagcctgtctattaagagagcttcagacccgaaaaaatctgtttccaagtccaccaaacctgaggaagtagattggggtagccgcaattcggccaatcttacgtttgaggagcgtcttgccaaattcatgaaagacagcgacgaaagattgcacgacctcaagaaaaattttgaatccaaaaggggcggcggaggatacagaaagtttgtccagtaa

SEQ ID NO: 62116 - protein, 140 aa, Clostridium thermocellum ATCC 27405
MLVEVGKIVEGRVSGITSFGAFVELSNGQTGLVHISEVADEYVKDIKSHLKENQTVKVKIISVDKNGKISLSIKRASDPKKSVSKSTKPEEVDWGSRNSANLTFEERLAKFMKDSDERLHDLKKNFESKRGGGGYRKFVQ

SEQ ID NO: 62117 - DNA, 402 bp, Staphylococcus aureus subsp. aureus MRSA252
  CDS (1)..(402): transl_table=11
atgtcaatcgaagttggaaataagcttaaaggtaaagtcactggtattaaaaagtttggtgcattcgtagaattacctgaaggaaaaagtggtttagttcacattagtgaagtcgcagataattatgttgaaaacgtagaagatcacctttctgttggtgatgaagtagacgtaaaagtattatctattgctgatgatggaaaaattagtctttcaataaagaaagctaaagaccgtccacgtagacaacatacgagtaaaccaagtcatcaaaaaccagtgcaaaaagccgaagattttgaaaagaaattaagcaatttcttaaaagatagtgaagataaattaacttcaatcaaacgtcaaacagaatctagacgcggtggcaaaggttctagacgttaa

SEQ ID NO: 62118 - protein, 133 aa, Staphylococcus aureus subsp. aureus MRSA252
MSIEVGNKLKGKVTGIKKFGAFVELPEGKSGLVHISEVADNYVENVEDHLSVGDEVDVKVLSIADDGKISLSIKKAKDRPRRQHTSKPSHQKPVQKAEDFEKKLSNFLKDSEDKLTSIKRQTESRRGGKGSRR

SEQ ID NO: 62119 - DNA, 2289 bp, Symbiobacterium thermophilum IAM 14863
  CDS (1)..(2289): transl_table=11
gtgccgcccggtgcaccagacggtcctgggcacagaaggaggaccaacgtgaccgcatcgttttcgatggagctcgggggccgcacgatgaccctcgagaccggccgcctggccaaacaggccagcgggtcggtattggtgaactacggggacagcgtggtgctctgcaccgcagtaggcagcgcaaccccaagggaaggtgtggacttctttccgctgaccgtagactacgaggagcgcatgtactccgtgggccggattccgggcaactggttccggcgcgagggccggcccacgagcaaggcgatcctctgggcccggctgacggaccggcccatccggccgctgttcccggagggcttccgcaacgacgtgcaggtggtctgcaccgtgctgtcggtggatccggaccatcccgtggagatcatgggcatgatcggcgcctcggcggcgctgaccatctccgacatccccttcgaggggcccatcggcggcgtcatcgtggggctggtggacggccagttcgtcatcaaccccacggctgagcagcaggagcgcagcgagatgcatctggtcgtggccggcaccgagcacgcggtgctcatggtggaggcgggcgccaaggaggtgcccgagcagaccatgctggacgccatcctgttcggccacgaggtcatcaagaacaccatcatcccgacgatcaagcagatgcaggccgaggtgggcaagcccaagcgggaggtggtgctcttcaacccgccccccgagctggagcaggcggtgcgggaggcggccaccgtccggctgcgggaggcggttcgcaatccggacaagctggcccgggaggaggccgtcgccgcggtgggcgaggccgttcaggccgagctggcggagcagttccccgaatcggagaagcacatcgcctacctgctgaagaaggtgctgaaggaggaggtgcgccgggcgatcatcgaggagggcatccggcccgacgggcgcagcctcaccgagatccggcctatcgagtgcgccgtggacctcctgccccggcctcacggctccggcctcttccagcggggccagacccaggtgctctcgatctgcaccctgggcaccctgggcgacatgcagaagctggatgacctcacgctggaagagaccaagcggttcatgcaccactacaacttcccgccctactccgtcggcgagacgcggccgctgcgcggccccggccgccgcgaaatcggccacggcgcgctggccgagcgggctctggagcccgtcattcctcccgaggaggagttcccgtacaccatccgagtcgtgtcggaggtgctggagtccaacggctcgtcctcgatggcctcggtctgcggctccacgctggcgctgatggcggccggcgtgcccatcaaggcgccggtggccggcgtggccatgggtctggtggaggatcccgagaccggccgctacgccgtgctcaccgacatccagggcatcgaggacgccctgggcgacatggacttcaaggtggccggcactaagaagggcgtcaccgccctgcagatggacatgaagatctccggcaccagccgggagatcctggagaaggccttgatgcaggcgcgcgagggccgcatgttcatcatggagaagatgctggcctgcatctccgagccgcgcaaggagctgtcgccttgggcgccgcgcatcatcacgatgaagatctcgccggagaagatccgggacgtcatcggcaagggcggctccaccatcaacaagatcatcgaggagaccaaggtgggccacaccaaggtggagatcgacatccaggacgacggcacgatctacatcgccgccgtgaacctggaggccggcgagcgggcccgccagatgatcgaggcgctggtgaaggatcccgagcccggcatgatctacaccggccgggtcacgcggctcatgcagttcggcgcgttcgtcgagatcctccccggcaaggaagggcttgtgcacatcagcgagctgtcggacaagcgggtagcccgggtcgaggacgtggtcaacatcggcgacgaggtgaccgtgaaggtcacggagatcgaccggctcggccgcatcaacctctccatcaaggacgccatgccgaagcaggcggcctcccagccgtcagggcggccggaggcccgccagccccagccgaagcccggccagggcaagcccggtccggccaaggccggggccggcaggccgggtcccggcaagccgggtccgggccgacacggtcgatag

SEQ ID NO: 62120 - protein, 762 aa, Symbiobacterium thermophilum IAM 14863
MPPGAPDGPGHRRRTNVTASFSMELGGRTMTLETGRLAKQASGSVLVNYGDSVVLCTAVGSATPREGVDFFPLTVDYEERMYSVGRIPGNWFRREGRPTSKAILWARLTDRPIRPLFPEGFRNDVQVVCTVLSVDPDHPVEIMGMIGASAALTISDIPFEGPIGGVIVGLVDGQFVINPTAEQQERSEMHLVVAGTEHAVLMVEAGAKEVPEQTMLDAILFGHEVIKNTIIPTIKQMQAEVGKPKREVVLFNPPPELEQAVREAATVRLREAVRNPDKLAREEAVAAVGEAVQAELAEQFPESEKHIAYLLKKVLKEEVRRAIIEEGIRPDGRSLTEIRPIECAVDLLPRPHGSGLFQRGQTQVLSICTLGTLGDMQKLDDLTLEETKRFMHHYNFPPYSVGETRPLRGPGRREIGHGALAERALEPVIPPEEEFPYTIRVVSEVLESNGSSSMASVCGSTLALMAAGVPIKAPVAGVAMGLVEDPETGRYAVLTDIQGIEDALGDMDFKVAGTKKGVTALQMDMKISGTSREILEKALMQAREGRMFIMEKMLACISEPRKELSPWAPRIITMKISPEKIRDVIGKGGSTINKIIEETKVGHTKVEIDIQDDGTIYIAAVNLEAGERARQMIEALVKDPEPGMIYTGRVTRLMQFGAFVEILPGKEGLVHISELSDKRVARVEDVVNIGDEVTVKVTEIDRLGRINLSIKDAMPKQAASQPSGRPEARQPQPKPGQGKPGPAKAGAGRPGPGKPGPGRHGR

SEQ ID NO: 62121 - DNA, 399 bp, Bacillus licheniformis ATCC 14580
  CDS (1)..(399): transl_table=11
atgtcgattgaagttggcagcaagttgcaagggaaagtaacaggtattacaaatttcggagcgtttgttgaactgcctggaggatcaacaggtcttgttcatatcagcgaagtagccgataactacgtgaaggacattaatgatcatctgaaggtcggtgatcaagtagaagttaaagttattaatgttgagaaagatgggaaaatcggcttatcgatcaaaaaggctgtagaccgtcctcaatcatcaagacctgcgagacctaaaaatgatttccgctctaaagaaacgtttgaacagaaaatgaataagtttttaaaagacagtgaagatcgcttatcgtctctaaaacgcaacacggaatcaaaacgtggagggcgcggagcaagaagaggttaa

SEQ ID NO: 62122 - protein, 132 aa, Bacillus licheniformis ATCC 14580
MSIEVGSKLQGKVTGITNFGAFVELPGGSTGLVHISEVADNYVKDINDHLKVGDQVEVKVINVEKDGKIGLSIKKAVDRPQSSRPARPKNDFRSKETFEQKMNKFLKDSEDRLSSLKRNTESKRGGRGARRG

SEQ ID NO: 62123 - DNA, 429 bp, Bacillus clausii KSM-K16
  CDS (1)..(429): transl_table=11
atgtccattgaagcaggcagcaagctgcaaggcaaggtgactggcattacacatttcggtgcatttgtggaattgccaggcggatcaacgggtctggttcacattagtgaggttgcggatcattatgtaaaagatataaatgaacttctaaaggttggcgatgaagtgacagtcaaagtcgtcaatgtagaaaaagacggcaaaattggtctttcgatccgtaaagcggttgaccgtcccgaaggagaaagccgccctccgcgccctcatccgcgctccggtaacaatcggggaggcggaaagtcgcgccctgctccgtcttttgaagacaaaatgagccgtttcctaaaagatagcgaagaacgtttgtcgacgattaaaaggcaaacagagtctaaacgcggcggtcggggtgcaaaacgcggatag

SEQ ID NO: 62124 - protein, 142 aa, Bacillus clausii KSM-K16
MSIEAGSKLQGKVTGITHFGAFVELPGGSTGLVHISEVADHYVKDINELLKVGDEVTVKVVNVEKDGKIGLSIRKAVDRPEGESRPPRPHPRSGNNRGGGKSRPAPSFEDKMSRFLKDSEERLSTIKRQTESKRGGRGAKRG

SEQ ID NO: 62125 - DNA, 402 bp, Bacillus clausii KSM-K16
  CDS (1)..(402): transl_table=11
atggcgaattatgaggaaggcagcatcgttgaagggaaagttaccggtataaagccgttcggagcttttgtcgcaattgacgaaaaaaaacaagggcttgtacacatttctgaagtagcgcacggttatgtaaaagacatcgccgatgtattggcagtaggagatgaggtaaaagtaaaaattatgtctgtagacgaggagtctggaaagatttctttgtcaatccgcgcgacccaagaagcgcctgctcgcccgcaagggaaaccacgtgctggcaaagggaaacctcaaggcgctcaacaaaagcaacagggcttcaataccctcgaagacaagcttaaagagtggttaaaacagtccaatgaaattcaagctgatttgaacaagcgcgcgaaaaaataa

SEQ ID NO: 62126 - protein, 133 aa, Bacillus clausii KSM-K16
MANYEEGSIVEGKVTGIKPFGAFVAIDEKKQGLVHISEVAHGYVKDIADVLAVGDEVKVKIMSVDEESGKISLSIRATQEAPARPQGKPRAGKGKPQGAQQKQQGFNTLEDKLKEWLKQSNEIQADLNKRAKK

SEQ ID NO: 62127 - DNA, 402 bp, Staphylococcus epidermidis RP62A
  CDS (1)..(402): transl_table=11
atgtcaatcgaagtaggaaacaagcttaaaggtaaaattacaggtatcaaaaagtttggtgcattcgtagaattacctgaaggaaaaagtggtttagttcatatcagtgaagttgccgacaattatgttgaaaatgttgaagaccacttatcagtaggtgacgaagtagaagttaaagttttatcaatcgcggatgatggtaaaattagtttatcaataaaaaaagctaaagaccgccctcgtaagcctcgtcacagtaaagctaatcacggtaaaccagttcaaaaaactgaagactttgagaaaaaattaagtaacttcttaaaagatagtgaagataaattaacgtcaattaaacgtcaaaccgaatcacgcagaggcggtaaaggttctagacgttaa

SEQ ID NO: 62128 - protein, 133 aa, Staphylococcus epidermidis RP62A
MSIEVGNKLKGKITGIKKFGAFVELPEGKSGLVHISEVADNYVENVEDHLSVGDEVEVKVLSIADDGKISLSIKKAKDRPRKPRHSKANHGKPVQKTEDFEKKLSNFLKDSEDKLTSIKRQTESRRGGKGSRR

SEQ ID NO: 62129 - DNA, 387 bp, Desulfitobacterium hafniense Y51
  CDS (1)..(387): transl_table=11
atggccattgcggttggcactatagttgagggtgtagtaacgggaattaccaatttcggtgcttttgtggaattacccgagaaagtcacaggtctcgtgcatatctcagaagttgcagatgcatatgttaaagatgttagggactacttgaaggaacaagaccgtgttaaggtcaaagtgatccatgtcgatgaaaaagggaaaattggtctatcgattaaacaggctaatccgagcccgaaaaatacgacgcgggaacgtcgccagccaaccgtatcctttgaggataaattagccaagtttattaaggatagcgatgaacggcaactggaatttcgtcgtgccacagaatccaagcgcgggggaagaggatcaagccgatactag

SEQ ID NO: 62130 - protein, 128 aa, Desulfitobacterium hafniense Y51
MAIAVGTIVEGVVTGITNFGAFVELPEKVTGLVHISEVADAYVKDVRDYLKEQDRVKVKVIHVDEKGKIGLSIKQANPSPKNTTRERRQPTVSFEDKLAKFIKDSDERQLEFRRATESKRGGRGSSRY

SEQ ID NO: 62131 - DNA, 411 bp, Bacillus anthracis str. A2012
  CDS (1)..(411): transl_table=11
atgtcaatcgaggtaggcagcaagttacagggtaaagtaacaggtattacaaattttggggcttttgtggagctgccagaaggcttaacgggtcttgttcatattagtgaagttgctgataattatgtgaaagatattaacgatcacttaaaagtgggcgaccaagtagaagtaaaagttattaacgttgaaaaagatggtaagatcggtctatctattaaaaaagcgaaagaacgtgaaaaaacagaaggagatcgtccacgtggtgaataccaacgcggtggtgatcaacaacgttctggacgtccacaacgtaatcgttctttcaacagagataaccgcggtggcggtaacgaccgcgctcctaagaaacatggagcaaaaaatggcacgtttcttaacgatagctag

SEQ ID NO: 62132 - protein, 136 aa, Bacillus anthracis str. A2012
MSIEVGSKLQGKVTGITNFGAFVELPEGLTGLVHISEVADNYVKDINDHLKVGDQVEVKVINVEKDGKIGLSIKKAKEREKTEGDRPRGEYQRGGDQQRSGRPQRNRSFNRDNRGGGNDRAPKKHGAKNGTFLNDS

SEQ ID NO: 62133 - DNA, 531 bp, Exiguobacterium sibiricum 255-15
  CDS (1)..(531): transl_table=11
atgtcgattgaagtaggcagcaaagtacaagggaaagttacaggcatcaccaatttcggcgcgttcgtagaattaccgacgggtaagacaggtcttgttcacatcagtgaagtagcagattcttacgttaaagatatcaatgatgtcttgacagtcggacaagaaatcacggttaaagtgttgagtgtagagaacgacggtaaaatcggtctttcgattaagaaagcagtcgatcgtccagaaggcgaacgtcctcgtcctccagctcgtcaatttgatcgcggaccacgtccggcaggtcaagaccgtggaccacgttcgttcgataacaaaggaccacgtggcggaagtggcggcggtggaaaccgtggtggctttaacaaaggtggccgtggcgcaccagctccacgcaaagagcaaacgttcgatacgttgatgactagtttcctcaaagatagtgaagatcgtcttgcgacattgaaacgacaaaccgattcaaaacgtggcggacgcggtgctaaacgtcaataa

SEQ ID NO: 62134 - protein, 176 aa, Exiguobacterium sibiricum 255-15
MSIEVGSKVQGKVTGITNFGAFVELPTGKTGLVHISEVADSYVKDINDVLTVGQEITVKVLSVENDGKIGLSIKKAVDRPEGERPRPPARQFDRGPRPAGQDRGPRSFDNKGPRGGSGGGGNRGGFNKGGRGAPAPRKEQTFDTLMTSFLKDSEDRLATLKRQTDSKRGGRGAKRQ

SEQ ID NO: 62135 - DNA, 2205 bp, Escherichia coli B
  CDS (1)..(2205): transl_table=11
atgcgcagaagatcgggtattaacaccagtgccgtaaggtactgtctaagaaagagaaaggatattacattgcttaatccgatcgttcgtaaattccagtacggccaacacaccgtgactctggaaaccggcataatggctcgtcaggctactgccgctgttatggttagcatggatgacaccgcggtattcgttaccgttgttggccagaaaaaagccaaaccaggtcaggacttcttcccactgaccgttaactatcaggagcgtacctacgctgctggtcgtatcccgggtagcttcttccgtcgtgaaggccgcccaagcgaaggcgaaaccctgatcgcgcgtctgattgaccgcccgattcgcccgctgttcccggaaggcttcgtcaacgaagttcaggttatcgccaccgtggtttctgttaacccgcaagttaacccggatatcgtcgcgatgattggtgcttccgcagcactgtctctgtctggtattccgttcaatggtccgattggtgctgctcgcgtaggttacatcaatgaccagtacgtactgaacccgactcaggacgagctgaaagagagcaaactggatctggttgttgccggtactgaagccgctgttctgatggttgaatctgaagctgaactgctgagcgaagaccagatgctgggcgcagtagtgttcggtcatgaacaacagcaggttgttattcagaacatcaatgaactggtgaaagaagccggtaaaccacgttgggactggcagccggagccggtaaacgaagcgctgaacgcgcgcgttgctgcactggctgaagctcgcctgagcgatgcttaccgcatcaccgacaaacaagagcgttatgcgcaggttgatgtcatcaaatctgaaaccatcgcgacgctgcttgctgaagacgaaaccctggacgaaaacgaactgggtgaaattctgcacgctatcgagaaaaacgttgttcgtagccgcgtactggcaggcgaaccgcgtatcgacggtcgtgaaaaagatatgatccgtggtctggatgtgcgtactggcgtgctgccgcgtactcacggttctgcgctgttcacccgtggtgaaacgcaggcgctggttaccgcaacgctgggtactgctcgtgacgcgcaggttcttgatgaactgatgggcgaacgtaccgataccttcctgttccactacaacttccctccgtactccgtaggcgaaaccggcatggtcggttctccgaagcgtcgtgaaattggtcacggtcgtctggcgaagcgcggcgtgctggcagtcatgccggatatggacaaattcccgtacaccgtacgtgttgtgtctgaaatcactgaatccaacggttcctcttctatggcttccgtgtgcggcgcgtctctggcgctgatggacgcaggtgtgccgatcaaagctgccgttgcgggtatcgcaatgggtctggtgaaagaaggcgacaactacgttgtactgtctgacattttgggcgacgaagatcacctgggcgatatggacttcaaagttgcgggttcccgcgacggtatctctgcattgcagatggatatcaaaattgaaggtatcaccaaagagatcatgcaggttgcgctgaaccaggctaaaggtgcgcgtctgcatatcctgggcgtaatggaacaggcgatcaacgcgccgcgtggcgatatctctgagttcgcaccgcgtatccataccatcaagatcaacccggacaagatcaaagatgttatcggtaaaggcggttctgtaatccgtgctctgaccgaagaaactggcaccaccatcgaaatcgaagatgacggtactgtgaagattgcagcgaccgacggcgagaaagcgaaacatgctattcgtcgtatcgaagagatcactgcagaaatcgaagtgggccgcgtctacactggtaaagtgacccgtatcgttgactttggcgcatttgttgccatcggcggcggtaaagaaggtctggtacacatctctcaaatcgctgacaaacgcgttgagaaagtgaccgattacctgcagatgggtcaggaagtaccggtgaaagttctggaagttgatcgccagggccgtatccgtctgagcattaaagaagcgactgagcagtctcaacctgctgcagcaccggaagctccggctgctgaacagggcgagtaa

SEQ ID NO: 62136 - protein, 734 aa, Escherichia coli B
MRRRSGINTSAVRYCLRKRKDITLLNPIVRKFQYGQHTVTLETGIMARQATAAVMVSMDDTAVFVTVVGQKKAKPGQDFFPLTVNYQERTYAAGRIPGSFFRREGRPSEGETLIARLIDRPIRPLFPEGFVNEVQVIATVVSVNPQVNPDIVAMIGASAALSLSGIPFNGPIGAARVGYINDQYVLNPTQDELKESKLDLVVAGTEAAVLMVESEAELLSEDQMLGAVVFGHEQQQVVIQNINELVKEAGKPRWDWQPEPVNEALNARVAALAEARLSDAYRITDKQERYAQVDVIKSETIATLLAEDETLDENELGEILHAIEKNVVRSRVLAGEPRIDGREKDMIRGLDVRTGVLPRTHGSALFTRGETQALVTATLGTARDAQVLDELMGERTDTFLFHYNFPPYSVGETGMVGSPKRREIGHGRLAKRGVLAVMPDMDKFPYTVRVVSEITESNGSSSMASVCGASLALMDAGVPIKAAVAGIAMGLVKEGDNYVVLSDILGDEDHLGDMDFKVAGSRDGISALQMDIKIEGITKEIMQVALNQAKGARLHILGVMEQAINAPRGDISEFAPRIHTIKINPDKIKDVIGKGGSVIRALTEETGTTIEIEDDGTVKIAATDGEKAKHAIRRIEEITAEIEVGRVYTGKVTRIVDFGAFVAIGGGKEGLVHISQIADKRVEKVTDYLQMGQEVPVKVLEVDRQGRIRLSIKEATEQSQPAAAPEAPAAEQGE

SEQ ID NO: 62137 - DNA, 2106 bp, Pseudomonas putida GB-1
  CDS (1)..(2106): transl_table=11
gtgaacccggtaatcaagactttccagttcggtcaatcgaccgttactctcgaaacgggccgtatcgcccgtcaggcaaccggcgccgtgctggttaccgtcgacaacgacgtcaccgtgctggtgaccgtggtaggcgccaaacaggctgatccaggcaagggcttcttcccgctgtcggttcactaccaggaaaagacctacgccgccggcaagatcccgggtggcttcttcaagcgtgaaggccgtccttccgagaaagagacgctgacctcgcgcctgatcgaccgtccgatccgtccgctgttcccggaaggcttcatgaacgaagtgcaggttgtctgcaccgtggtttccaccagcaagaagaccgacccggacatcgctgcgatgatcggtacctcggctgccctggccatttccggcatcccgttcgaaggcccgatcggcgccgctcgcgttgctttccacgaaagcaccggctacctgctgaacccgacctacgagcaactggctgcctcgagcctggacatggtcgttgccggtaccgccgacgccgtactgatggttgaatcggaagctcaagagctgaccgaagaccagatgctgggcgctgtactgttcgcccacgacgaattccaggctgtgatccaggctgtcaaagagctggccgccgaagctgccaagccgacctgggactggaaacctgcagttgccaacaccgagctgttcaacgctatccgcgccgagttcggcgaagcggtttcgcagggctacaccatcaccgtcaaggccgaccgctatgcgcgtctgggcgagctgcgcgatcaggcgatcgccaagttctccggtgaagaaggccagccttcggcttccgaagtgaaagaaatcttcggcgaaatcgaataccgcaccgttcgcgaaaacatcgtaaacggcaagccacgtatcgacggtcgcgacaccaagaccgttcgcccgctgaacatcgaagtcggcgtgctgccgaagactcacggttcggcgctgttcacccgtggcgaaacccaggccctggtcgttgcgaccctgggtactgcccgtgacgcccagctgctggacaccctcgaaggcgagaagaaagaccccttcatgctgcactacaacttcccgccgttctcggtaggtgagtgcggccgtatgggcggtgctggccgtcgcgaaatcggccacggccgtctggcccgtcgttcggttcaggccatgctgcctgccgctgacgtgttcccgtacaccattcgcgtggtttcggaaatcaccgaatccaacggctccagctccatggcttcggtctgtggtgcttccctggcgctgatggacgctggtgtgccgatgaaggcaccggttgccggtatcgccatgggcctggtcaaggaaggggagaagttcgcggtcctgaccgacatcctgggtgacgaagaccacctgggcgacatggacttcaaagtagccggtaccgccaagggcgtgaccgcgctgcagatggacatcaagatcaacggcatcactgaagagatcatggaaatcgccctgggccaagccctggaagcgcgcctgaacatcctcggtcagatgaaccagatcattggccagtcgcgtaccgaactgtcggccaacgccccgaccatgatcgcgatgaagatcgataccgacaagattcgtgacgttatcggcaaaggcggcgccaccattcgcgccatctgcgaagagaccaaggcctcgatcgacatcgaagacgacggctcgatcaagatcttcggcgaaaccaaggaagcggcagaggctgccaagcagcgcatcctgggcatcaccgcagaggccgagatcggcaagatctacgtcggcaaggttgagcgcatcgtcgacttcggcgccttcgtcaacatcctgcctggcaaggacggcctggtgcacatctccatgctgagcgatgctcgcgtcgagaaagtcaccgacatcctcaaagaaggccaggaagtcgaagtgctggtactggacgtggacaaccgcggccgtatcaagctgtcgatcaaggacgtagctgcggccaaggcctcgggcgtttaa

SEQ ID NO: 62138 - protein, 701 aa, Pseudomonas putida GB-1
MNPVIKTFQFGQSTVTLETGRIARQATGAVLVTVDNDVTVLVTVVGAKQADPGKGFFPLSVHYQEKTYAAGKIPGGFFKREGRPSEKETLTSRLIDRPIRPLFPEGFMNEVQVVCTVVSTSKKTDPDIAAMIGTSAALAISGIPFEGPIGAARVAFHESTGYLLNPTYEQLAASSLDMVVAGTADAVLMVESEAQELTEDQMLGAVLFAHDEFQAVIQAVKELAAEAAKPTWDWKPAVANTELFNAIRAEFGEAVSQGYTITVKADRYARLGELRDQAIAKFSGEEGQPSASEVKEIFGEIEYRTVRENIVNGKPRIDGRDTKTVRPLNIEVGVLPKTHGSALFTRGETQALVVATLGTARDAQLLDTLEGEKKDPFMLHYNFPPFSVGECGRMGGAGRREIGHGRLARRSVQAMLPAADVFPYTIRVVSEITESNGSSSMASVCGASLALMDAGVPMKAPVAGIAMGLVKEGEKFAVLTDILGDEDHLGDMDFKVAGTAKGVTALQMDIKINGITEEIMEIALGQALEARLNILGQMNQIIGQSRTELSANAPTMIAMKIDTDKIRDVIGKGGATIRAICEETKASIDIEDDGSIKIFGETKEAAEAAKQRILGITAEAEIGKIYVGKVERIVDFGAFVNILPGKDGLVHISMLSDARVEKVTDILKEGQEVEVLVLDVDNRGRIKLSIKDVAAAKASGV

SEQ ID NO: 62139 - DNA, 444 bp, Bacillus sp. SG-1
  CDS (1)..(444): transl_table=11
ttggcaatcgaaataggcagcaaggttaaaggtaaagttactggtatcactaatttcggggcattcgtggaattacccgaaggctcaaccggtctcgtgcatatcagtgaggtggcggacagctacgttaaagatgttaacgaccatcttaaagtaggcgatgaagttgaggtaaaggtaattagtgagaatgcgggcaaaattgccttgtcaatcaaaaaagccgtagataaaccagaagggtcttcttacacgaaacgtcctccacgccaaggaagagacagcagaccaaacaaggatttccgttctaaaggaaacttcaagcctaaggaaacgtttgaagataaaatggctaagttcatgaaatccagtgaagaaaacctatcatctctgaaacgcaacactgaaggtaagcgcggcggccgaggcggaagacgcggttaa

SEQ ID NO: 62140 - protein, 147 aa, Bacillus sp. SG-1
MAIEIGSKVKGKVTGITNFGAFVELPEGSTGLVHISEVADSYVKDVNDHLKVGDEVEVKVISENAGKIALSIKKAVDKPEGSSYTKRPPRQGRDSRPNKDFRSKGNFKPKETFEDKMAKFMKSSEENLSSLKRNTEGKRGGRGGRRG

SEQ ID NO: 62141 - DNA, 3489 bp, Vitis vinifera
  CDS (1)..(3489)
  misc_feature (611)..(611): y is t or c
  misc_feature (988)..(988): k is g or t
  misc_feature (2022)..(2022): r is g or a
  misc_feature (3086)..(3086): k is g or t
atgtccgtggacgcccaaaacgatggtctcaagaagctcgagtacctttctctggtttcgaaggtttgcacggagctggaaactcatctcggggtcggggacaaggttttggcggaattcatcaccgacatgggtcgaaagtgcgaaactgttgatgaattcgattccaaattgaaggagaatggcgcggaaatgccggattactttgtgaggactctgttaactataattcatgccattcttccgccgaagcccaagtcggatgataagggaatgaagaaggatggcggtgatggtaagaaatcgaagtttccggcgttagggatcggggacagtaaggagagaaaagccgggatcggcgccgagaggaggaagaagcgaagcacagggatgaaagaaatagagatagagacggagatagggagagagatgatagaagagagaggcatagggagagaaatgataggagtgagaggcatagggaaagagatgataggaatgagaggcatagggagagagctgataggagtgagaggcatagggagagagatgatgggagtgagaggggtagagggagggaagatgatgattatgatgataagaatgattayagggggtggtgaagatgggggggataggaggggcgatagggataggagaaacggaaggtatcactcagatgagccagaattgtataacgtatataaggggagggtttcaagagtgatggacactggttgctttgtgcagctgaatgatttgaaggggaaagagggtttggtgcatgtttctcagattgcgactcggagggtgggtaatgcaaaagatgtggtgaagagggatcaggaggtttatgttaaggtgatctctgtttcgggtcagaagctgagtctttctatgagggatgttgatcagaatactgggagagatttgattcctttgaaaaagagcttggaggatgatgctttgagaacgaacccttcaggtkcaaaccaggggcctgtgagtaggactggtctttcaggaataaggattgtagaagagaatgatgctgccccatcaaggcgaccattgaaacggatgagttctccagagaaatgggaagcaaaacagttgattgcttcaggggttctggatattagggagtttcctatgtatgatgacgaaggagatggcatgctttatcaagaagagggtgctgaggaggagcttgagattgagatgaatgaagatgaaccggcctttttgcaagggcagagtcgatactctatggacatgtctcctgtgaagatcttcaagaatccagaggggtccttgagtcgagctgctgcccttcagtcagctctcataaaggaacgaagagaagtacgggaacagcagcagagaacaatgcttgattctattcctaaagatctcaatcgtccctgggaagacccaatgcctgagacaggtgagaggcatcttgctcaggagctgaggggtgttggtttatcagcctatgatatgcctgaatggaagaaggatgcttttggaaaagccctgacttttggccaaagatcaaaactctccatccaggagcagagacaaagcttgcctatctacaagttgaagaaggaacttgttcaggctgtgcatgataatcaggttcttgtagtcattggtgagactggttctggcaagacaacacaagtaacacagtatctagctgaagcaggttacactaccaggggtaagattggatgtacccaaccccgtagagtggctgcaatgtctgtggcaaagagggttgctgaagagtttggttgtcgtttaggagaggaagttgggtatgctattcggtttgaggattgtactggaccagatactgtcatcaagtacatgactgatggcatgcttctcagggagattctgattgatgacaatctttctcaatattctgtaattatgcttgacgaagctcatgagaggacgatccacactgatgtcctttttggattgctgaagcaccttgtgaaacggagrcctgatcttcgcttgattgtcacatctgccacattggatgcagagaaattttcagggtatttcttcaactgcaacatctttaccatccctggaagaacttttcctgtggagatactctacaccaaacaacctgaaagcgattacctagatgcatctttgattactgtcctccaaattcatttgacagaaccagaaggagacatcctcctcttcttgactggtcaggaggagattgatcatgcatgccagtctctttacgagaggatgaaagggctaggtaaaaatgttcccgaactcattattttaccagtctatagtgcccttcctagtgaaatgcagtcgaggatttttgaccctgctcctccagggaagaggaaagtggttgtggctaccaacattgctgaggcttctttaaccattgatggcatcttttatgtcattgatcctggttttgcgaagcaaaatgtctacaaccccaaacaagggcttgattccttggtcataacacctatttcacaagcatcagccaaacaacgagctgggcgtgctggacgtacaggacctggaaaatgctatcgcctttacactgagagtgcttatcggaatgagatgtccccaacctcagttccagagatacaaaggataaatcttgggcttactacgcttacgatgaaagcaatggggataaatgatcttctgtcgtttgattttatggacccaccttcacctcaagctcttatttctgccatggaacagctctacagtcttggagctctagatgaggaggggcttctgaccaaattgggcaggaaaatggcagaatttccactggaacctccattatctaagatgctacttgccagtgtggaccttgggtgcagtgatgagattttgacaatcattgcaatgattcagacggggaacatcttctacaggcccagggaaaagcaagctcaggctgatcaaaagagggccaagttttttcagccagaaggagaccatttaactttgcttgctgtttatgaggcttggaaggcaaagaattttccggaccgtggtgtttkgagaactttgtataaattggatgttgttagtgctgggaaaaatttcacgaagataaggaaggcaattacagcgggtttctttttccatgcagcaagaaaggacccacaggagggttatagaaccctagttgagaaccagccagtttatattcacccaagcagtgctcttttccagagacagccagactgggtcatctaccatgaattggtaatgactacaaaggagtacatgcgagaggttacagttatagaccccaaatggcttgtggaattggcaccaagattcttcaaagtggcagatcccacgaaaatgagcaaacggaagcgtcaagagcgtattgaaccactttatgacagatatcatgaacctaactcttggcgtttgagtaaacgtcgtgcttga

SEQ ID NO: 62142 - protein, 1162 aa, Vitis vinifera
  misc_feature (204)..(204): The Xaa at location 204 stands for Ile, or Thr.
  misc_feature (330)..(330): The Xaa at location 330 stands for Ala, or Ser.
  misc_feature (1029)..(1029): The Xaa at location 1029 stands for Leu, or Trp.
MSVDAQNDGLKKLEYLSLVSKVCTELETHLGVGDKVLAEFITDMGRKCETVDEFDSKLKENGAEMPDYFVRTLLTIIHAILPPKPKSDDKGMKKDGGDGKKSKFPALGIGDSKERKAGIGAERRKKRSTGMKEIEIETEIGREMIEERGIGREMIGVRGIGKEMIGMRGIGRELIGVRGIGREMMGVRGVEGGKMMIMMIRMIXGGGEDGGDRRGDRDRRNGRYHSDEPELYNVYKGRVSRVMDTGCFVQLNDLKGKEGLVHVSQIATRRVGNAKDVVKRDQEVYVKVISVSGQKLSLSMRDVDQNTGRDLIPLKKSLEDDALRTNPSGXNQGPVSRTGLSGIRIVEENDAAPSRRPLKRMSSPEKWEAKQLIASGVLDIREFPMYDDEGDGMLYQEEGAEEELEIEMNEDEPAFLQGQSRYSMDMSPVKIFKNPEGSLSRAAALQSALIKERREVREQQQRTMLDSIPKDLNRPWEDPMPETGERHLAQELRGVGLSAYDMPEWKKDAFGKALTFGQRSKLSIQEQRQSLPIYKLKKELVQAVHDNQVLVVIGETGSGKTTQVTQYLAEAGYTTRGKIGCTQPRRVAAMSVAKRVAEEFGCRLGEEVGYAIRFEDCTGPDTVIKYMTDGMLLREILIDDNLSQYSVIMLDEAHERTIHTDVLFGLLKHLVKRRPDLRLIVTSATLDAEKFSGYFFNCNIFTIPGRTFPVEILYTKQPESDYLDASLITVLQIHLTEPEGDILLFLTGQEEIDHACQSLYERMKGLGKNVPELIILPVYSALPSEMQSRIFDPAPPGKRKVVVATNIAEASLTIDGIFYVIDPGFAKQNVYNPKQGLDSLVITPISQASAKQRAGRAGRTGPGKCYRLYTESAYRNEMSPTSVPEIQRINLGLTTLTMKAMGINDLLSFDFMDPPSPQALISAMEQLYSLGALDEEGLLTKLGRKMAEFPLEPPLSKMLLASVDLGCSDEILTIIAMIQTGNIFYRPREKQAQADQKRAKFFQPEGDHLTLLAVYEAWKAKNFPDRGVXRTLYKLDVVSAGKNFTKIRKAITAGFFFHAARKDPQEGYRTLVENQPVYIHPSSALFQRQPDWVIYHELVMTTKEYMREVTVIDPKWLVELAPRFFKVADPTKMSKRKRQERIEPLYDRYHEPNSWRLSKRRA

SEQ ID NO: 62143 - DNA, 381 bp, Ostreococcus tauri
  CDS (1)..(381)
atggtcgcagctttaaccgtcgaagccgaggttgggaagatctaccgtaactgccaagttaagaagattgttgaattcggttgtttcgtcgaatttttgcccggcatggaaggtttggttcacataagtgagcttgacgtctctcgcgtcccaaacgtctctgatgttacggctgaaggagcgttgctggacgtgaaggtcatcgagatcaataaccgaggacagacgagattaagtcgcaaggaggtcttactcgaagaaaacccagatattgccgtcgcggcagctgcgcccagacggaacgatggcggcggcgaggacgacagaggtcgtcggggagcgcgaggtggcaagccaaagcgtgactctggtggattttaa

SEQ ID NO: 62144 - protein, 126 aa, Ostreococcus tauri
MVAALTVEAEVGKIYRNCQVKKIVEFGCFVEFLPGMEGLVHISELDVSRVPNVSDVTAEGALLDVKVIEINNRGQTRLSRKEVLLEENPDIAVAAAAPRRNDGGGEDDRGRRGARGGKPKRDSGGF

SEQ ID NO: 62145 - DNA, 393 bp, Bacillus subtilis
  CDS (1)..(393): transl_table=11
atggcagcaaaatttgaagtgggcagtgtttacactggtaaagttacaggattacaagcgtatggtgcgtttgttgcattagatgaagaaactcaaggtttagtacacatttctgaagtgactcacggtttcgtaaaagatatcaacgagcacctttcagttggcgacgaagtacaagtaaaagtacttgctgttgatgaagaaaaaggcaaaatcagcctttcaattcgtgcgacacaagctgcgcctgagaaaaaagaaagcaaaccaagaaaacctaaagctgctcaagtaagcgaagaagcttctacaccacaaggtttcaacacattaaaagataagcttgaagagtggatcgaaatgtccaaccgcaaagaccttatcaaaaaataa

SEQ ID NO: 62146 - protein, 130 aa, Bacillus subtilis
MAAKFEVGSVYTGKVTGLQAYGAFVALDEETQGLVHISEVTHGFVKDINEHLSVGDEVQVKVLAVDEEKGKISLSIRATQAAPEKKESKPRKPKAAQVSEEASTPQGFNTLKDKLEEWIEMSNRKDLIKK

SEQ ID NO: 62147 - DNA, 2106 bp, Pseudomonas putida
  CDS (1)..(2106): transl_table=11
gtgaacccggtaatcaagactttccagttcggtcaatcgaccgtcactctcgaaacgggccgtattgcccgtcaggcaaccggcgccgtgctggttaccgtcgacaacgacgtcaccgtgctggtgactgtggtaggcgccaaacaggctgatccaggcaagggtttcttcccgctgtcggttcactaccaggaaaagacctacgccgctggcaagatcccaggtggcttcttcaagcgtgaaggccgtccttccgagaaagagacgctgacctcgcgcctgatcgaccgtccgatccgtccgctgttcccggaaggcttcatgaacgaagtgcaggtcgtctgcaccgtggtttccaccagcaagaagaccgacccggacatcgctgcgatgatcggtacctcggctgccctggccatttccggtattccgttcgaaggcccgatcggcgctgcccgcgttgccttccacgaaagcactggctacctgctgaacccgacctatgagcaactggctgcctcgagcctggacatggtcgttgccggtacctccgacgctgtactgatggttgaatcggaagctcaagagctgaccgaagaccagatgctgggtgccgtactgttcgcccacgacgaattccaggctgttatccaggctgtcaaagagctggctgccgaagctggcaagccgacttgggactggaaacctgccgttgccaacaccgagctgttcaatgctatccgcgccgagttcggcgaagcggtttcgcagggttacaccatcaccgtcaaagccgaccgctacgcgcgtctgggtgagctgcgtgaccaggcggttgccaagttctccggtgaagaaggccagccttcggcttccgaagtaaaagagatcttcggcgaaatcgaataccgcaccgttcgcgaaaacatcgtcaacggcaagccacgtatcgacggccgcgacaacaagactgtacgcccgctgaacatcgaagtcggtgtgctgccgaaaactcacggttcggcactgttcacccgtggcgaaacccaggccctggtcgttgcgaccctgggtactgcccgtgatgcccaactgctggacaccctcgaaggcgagaagaaagaccccttcatgctgcactacaacttcccaccgttctcggtaggtgagtgtggccgcatgggcggtgctggccgtcgcgaaatcggccacggccgtctggcccgccgttcggttcaggccatgctgcctgctgctgacgtgttcccgtacaccatccgcgtggtttcggaaatcaccgaatccaacggttccagctccatggcttcggtctgcggtgcatccctggccctgatggacgccggtgtgccgatgaaggcgccggttgccggtatcgccatgggcctggtcaaggaaggcgacaagttcgcagtcctgactgacatcctgggtgacgaagaccacctgggcgacatggacttcaaggtagccggtaccgccaagggcgtcaccgcgctgcagatggacatcaagatcaacggcatcaccgaagagatcatggaaatcgccctgggccaagccctggaagcgcgcctgaacatcctcggccagatgaaccaggtcattggccagtcgcgtaccgaactgtcggccaacgccccgaccatgatcgcgatgaagatcgacaccgacaagatccgcgacgtcatcggtaaaggcggcgccaccattcgcgccatctgcgaagagaccaaggcttcgatcgacatcgaagacgacggctcgatcaagatcttcggcgaaaccaaggaagcggcagatgctgccaagcagcgcatcctgggcatcaccgctgaggccgagatcggcaagatctacgtcggcaaggttgagcgcattgtcgacttcggcgccttcgtcaacatcctgcctggcaaggacggtttggtgcacatctccatgctgagcgatgctcgtgtcgagaaagtcaccgacatcctcaaggaaggccaggaagttgaagtgctggtactggacgtggacaaccgcggccgtatcaagctgtcgatcaaggacgtcgctgcggccaaggcctcgggcgtctaa

SEQ ID NO: 62148 - protein, 701 aa, Pseudomonas putida
MNPVIKTFQFGQSTVTLETGRIARQATGAVLVTVDNDVTVLVTVVGAKQADPGKGFFPLSVHYQEKTYAAGKIPGGFFKREGRPSEKETLTSRLIDRPIRPLFPEGFMNEVQVVCTVVSTSKKTDPDIAAMIGTSAALAISGIPFEGPIGAARVAFHESTGYLLNPTYEQLAASSLDMVVAGTSDAVLMVESEAQELTEDQMLGAVLFAHDEFQAVIQAVKELAAEAGKPTWDWKPAVANTELFNAIRAEFGEAVSQGYTITVKADRYARLGELRDQAVAKFSGEEGQPSASEVKEIFGEIEYRTVRENIVNGKPRIDGRDNKTVRPLNIEVGVLPKTHGSALFTRGETQALVVATLGTARDAQLLDTLEGEKKDPFMLHYNFPPFSVGECGRMGGAGRREIGHGRLARRSVQAMLPAADVFPYTIRVVSEITESNGSSSMASVCGASLALMDAGVPMKAPVAGIAMGLVKEGDKFAVLTDILGDEDHLGDMDFKVAGTAKGVTALQMDIKINGITEEIMEIALGQALEARLNILGQMNQVIGQSRTELSANAPTMIAMKIDTDKIRDVIGKGGATIRAICEETKASIDIEDDGSIKIFGETKEAADAAKQRILGITAEAEIGKIYVGKVERIVDFGAFVNILPGKDGLVHISMLSDARVEKVTDILKEGQEVEVLVLDVDNRGRIKLSIKDVAAAKASGV

SEQ ID NO: 62149 - DNA, 1149 bp, Bacillus subtilis
  CDS (1)..(1149): transl_table=11
atgacagaggaaatgaatcaaattgatgttcaagtgccagaggttggagatgtagttaaagggattgtgacaaaggtagaagacaaacatgtagatgtagaaattatcaatgtcaaacaatccggtattattccaatcagtgaattatcaagtcttcatgtagagaaagcatcggatgttgttaaagtagacgacgagcttgacctgaaagtaacaaaagtggaagacgatgctttgattttatctaaacgtgctgttgatgcagaccgcgcttgggaagaccttgagaaaaaatttgaaacaaaagaagtgtttgaagctgaagtgaaagatgtcgtgaaaggcggccttgtcgttgatatcggcgttcgcggttttattccggcatcacttgttgaagcacatttcgttgaagacttcactgactataaaggaaaaacactgtcactgctcgttgtagagcttgaccgtgataaaaaccgcgtgatcctttcacaccgtgctgttgttgaaagtgaacaagcgaataaaaaacaagaacttcttcagtctcttgaagttggaagtgtacttgatggcaaagtacagcgcctgactgactttggcgcgtttgttgatattggcggcatcgacggacttgtacacatttcacagctttcccactctcatgtagagaagccgtctgacgttgttgaagagggacaagaagtaaaagtgaaagtgttatcggttgaccgtgataatgaacgtatttctttatcgatcaaagatacactgcctggaccttggaaccaaatcggcgaaaaagtgaagcctggcgatgtgcttgaaggaactgtacagcgtcttgtaagcttcggtgcctttgttgaaatccttccaggtgttgaaggtctcgttcatatttctcaaatttccaataaacacatcggcacgccgcatgaagtccttgaagaaggacagactgtaaaagtgaaggttcttgatgtgaatgaaaatgaggagcgcatttcattaagcatgcgtgaacttgaagaaacgcctaaagctgaccaggaagattaccgtcaatatcaagcgaaggaagaaacaagcactggcttccagcttggagatctgatcggagataagctgaataaactaaaataa

SEQ ID NO: 62150 - protein, 382 aa, Bacillus subtilis
MTEEMNQIDVQVPEVGDVVKGIVTKVEDKHVDVEIINVKQSGIIPISELSSLHVEKASDVVKVDDELDLKVTKVEDDALILSKRAVDADRAWEDLEKKFETKEVFEAEVKDVVKGGLVVDIGVRGFIPASLVEAHFVEDFTDYKGKTLSLLVVELDRDKNRVILSHRAVVESEQANKKQELLQSLEVGSVLDGKVQRLTDFGAFVDIGGIDGLVHISQLSHSHVEKPSDVVEEGQEVKVKVLSVDRDNERISLSIKDTLPGPWNQIGEKVKPGDVLEGTVQRLVSFGAFVEILPGVEGLVHISQISNKHIGTPHEVLEEGQTVKVKVLDVNENEERISLSMRELEETPKADQEDYRQYQAKEETSTGFQLGDLIGDKLNKLK

SEQ ID NO: 62151 - DNA, 387 bp, Bacillus subtilis
  CDS (1)..(387): transl_table=11
atgtcgattgaagttggcagcaagttgcaagggaaaattacaggtattacaaattttggagcatttgttgaattgcctggaggctcaaccggtctcgttcacattagtgaggtagctgataattatgtcaaagacattaacgaccacttaaaagtcggcgaccaagttgaagtgaaagtcatcaacgttgaaaaagacgggaaaattggtttatctattaaaaaagctaaagaccgtccgcaagccagacctagaaatgatttccgtccgaaagaatcttttgaacagaaaatgaataagtttttaaaagacagcgaagatcgcttgtcatctttaaaacgcaatacggaatcaaaacgtggagggcgcggagcaagaagaggataa

SEQ ID NO: 62152 - protein, 128 aa, Bacillus subtilis
MSIEVGSKLQGKITGITNFGAFVELPGGSTGLVHISEVADNYVKDINDHLKVGDQVEVKVINVEKDGKIGLSIKKAKDRPQARPRNDFRPKESFEQKMNKFLKDSEDRLSSLKRNTESKRGGRGARRG

SEQ ID NO: 62153 - DNA, 3723 bp, Oryza sativa
  CDS (1)..(3723)
atggcgccgacggcggcggcggcggggcccagcgacgacgggctccggaagctggagtacctctcgctggtctccaaggtgtgctcggagctggagacccacattggcgtcggcgacaaggtgctcgccgagttcatcaccgagctcggccgcgactccgcctccgtcgccgacttcgacaccaagctcaaggccaacggcgccgacctcccggactacttcgtccgcaccctcctcaccatcatccacgccatcctcccgccgccctccgactcccgcaaccctagctccgcgtcgcagcccgccgcggggggctccaagttccccggcctctcccgccccgacgaccccgaccgcgcccgcaacctccgcctcgagctcgagcgggacgccgaagaggccgccgcgacggcagcccccgcccccgccagggacgaccgcggccgccgccgtgatgagcgaggacgggaccggggtcgagatgaccgcggccgcgacgacggtgggcgtgaccgcgactatgaacgcggcggccgtgaccatgaccgcagccatggccgggatcgtgaccatggccgtgacagagaccgagatcgagcctgtgatggggatcgacaacgtggccgtgactatggccgtgatagagaccaagacagagatcacgacagggatcgtgaaggtgaacggcggagggaccgagataaggataggggtagagacattgacagagatatggacagggaccataggcgaggcaggaggtatgatgatgaggaagaaccagaacagtttggtggaaggaaagaaggcgctcttgtgaattccagtggcgagccagagttgtaccaggtgtaccggggtagggtgacacgggtaatggacaccggttgctttgtcaggcttgaggatgttcgtggaggacgtgagggtcttgttcacatctcacaaatggcaaccaggcgagtggccaatgcgaaagagatggtgaagcgtgatcaggaggtgtatgttaaggtggtttccgtgaagggccagaaattgagtttatcaatgagggacgtagatcaggatacagggagagatctcctgccaatacaacgtggtggggatgatgcaccaagggcgaacccatctggtggtagtgctagtggtgttggtgtgggctctggcaagaggctgggtctctctgggattatgattgcagaggaggatgaggttgcacctccttcacgtcggccacttaagcggatgagctctccagagaggtgggaggcgaagcagctgattgcttcaggtgttctggatgtgagggattacccaatgtttgatgaggatggggatggtatgttgtaccaggaggaaggggcagaagaggagcaggagattgagcttaatgaagatgaacctgctttcttgcagggacagagtagattttcgattgacatgtcacctgttaagattttcaagaatccagagggctcattgagccgagcagctgctctccaaactgctctcataaaggagcggcgtgaggttcgggaacaggaacagagagcaatgttggattcaatccccaaggatctgaatcggccatgggaggaccctatgcctgatactggggaacggcaccttgcgcaggagctgaggggtgttggactttcagcttatgacatgcctgaatggaagaaagaagcctatggaaaggctctgacatttgggcaaaggtctaagctttcaatacaagaccagaggcaaagtcttccaatatacaagttgaagaaagagctgatacaagctgtgcatgataaccaagtcttggttgttattggagagactggttctggtaaaacaacacaggtgacacaatatttggccgaagcaggctacacgaccagaggtaagattggttgcactcaacctcgtcgtgtggctgcaatgtctgttgctaagagagtagcagaagaatttggttgtcgacttggagaggaagttggttatgccatccgctttgaggattgcactgggcctgacacggtaatcaaatacatgactgatggcatgcttttgcgtgagattcttgtcgatgagaacctttcccagtattctgtaattatgcttgatgaagcgcatgaaaggaccatacacacagatgttctctttggcttgctgaaacagcttattaagcgcagatctgacatgaggcttattgttacttctgctaccctggacgcagagaagttctcagggtattttttcaattgcaacatcttcacaattcctggaaggacgttcccggtagagatactctacaccaaacaaccagaaagtgactatttggatgcagcattgatcaccgtgcttcaaatacacttgactgagccagaaggtgatatcctcctttttttgactggtcaagaggagattgatcatgcttgtcaatgtctttatgagaggatgaaagggctagggaaggatgttcctgagctcataatattgcctgtttatagtgctcttccgagtgaaatgcagtcgaagatctttgacccagctcctccagggaagaggaaggttgttgtggccaccaatatcgctgaagcttctctaaccattgacggcatatattatgtcgtcgatcctggttttgccaaaattaatgtttataattcaaaacaaggactcgattcattggtcatcactccaatctctcaagcatcagcgaagcagagggcagggcgtgctgggcgtactggccctggcaaatgctatcgtctatacactgaaagtgcataccgcaatgaaatgtctcccacaacaatcccagaaattcaaaggattaacttggggtctacagttctcaacatgaaggcgatgggaatcaatgacctattatcctttgatttcatggaccctcctgcacctcaagcacttatatctgcaatggagcaattgtacagcctaggtgctcttgatgaagaagggctccttaccaaactggggaggaaaatggctgaatttccactggatccaccactttcgaagatgcttctagccagcgttgaccttggatgcagtgatgagatactaactattatagctatgatacaaactgggaacattttctataggccaagagaaaaacaggctcaggctgatcaaaagagggccaagtttttccagccagagggggatcatctaactctgcttgctgtatatgaggcgtggaaggcaaaaaacttttcagggccctggtgttttgagaactttgttcaatcaagatccttaaggagagctcaagatgtgaggaagcagcttctcactatcatggacagatataaattggatgttgtctcagctgggaggaacttcacaaaaataaggaaagcaatcactgccggcttctttttccacgctgccaggaaggatccccaggagggatacagaaccttggtagagaaccagccggtgtacatacacccgagcagcgcattgttccagcggcagccagactgggtcatctaccacgaacttgtaatgacgacgaaggagtacatgcgggaggttaccgtgatcgacccgaagtggcttactgagctagccccgagattctacaagtcagcagacccaaccaagatgagcaagaggaagaggcaggagaggattgaacccctgtacgacaggtaccatgagcccaactcctggcgtctcagcaagcgccgagcttga

SEQ ID NO: 62154 - protein, 1240 aa, Oryza sativa
MAPTAAAAGPSDDGLRKLEYLSLVSKVCSELETHIGVGDKVLAEFITELGRDSASVADFDTKLKANGADLPDYFVRTLLTIIHAILPPPSDSRNPSSASQPAAGGSKFPGLSRPDDPDRARNLRLELERDAEEAAATAAPAPARDDRGRRRDERGRDRGRDDRGRDDGGRDRDYERGGRDHDRSHGRDRDHGRDRDRDRACDGDRQRGRDYGRDRDQDRDHDRDREGERRRDRDKDRGRDIDRDMDRDHRRGRRYDDEEEPEQFGGRKEGALVNSSGEPELYQVYRGRVTRVMDTGCFVRLEDVRGGREGLVHISQMATRRVANAKEMVKRDQEVYVKVVSVKGQKLSLSMRDVDQDTGRDLLPIQRGGDDAPRANPSGGSASGVGVGSGKRLGLSGIMIAEEDEVAPPSRRPLKRMSSPERWEAKQLIASGVLDVRDYPMFDEDGDGMLYQEEGAEEEQEIELNEDEPAFLQGQSRFSIDMSPVKIFKNPEGSLSRAAALQTALIKERREVREQEQRAMLDSIPKDLNRPWEDPMPDTGERHLAQELRGVGLSAYDMPEWKKEAYGKALTFGQRSKLSIQDQRQSLPIYKLKKELIQAVHDNQVLVVIGETGSGKTTQVTQYLAEAGYTTRGKIGCTQPRRVAAMSVAKRVAEEFGCRLGEEVGYAIRFEDCTGPDTVIKYMTDGMLLREILVDENLSQYSVIMLDEAHERTIHTDVLFGLLKQLIKRRSDMRLIVTSATLDAEKFSGYFFNCNIFTIPGRTFPVEILYTKQPESDYLDAALITVLQIHLTEPEGDILLFLTGQEEIDHACQCLYERMKGLGKDVPELIILPVYSALPSEMQSKIFDPAPPGKRKVVVATNIAEASLTIDGIYYVVDPGFAKINVYNSKQGLDSLVITPISQASAKQRAGRAGRTGPGKCYRLYTESAYRNEMSPTTIPEIQRINLGSTVLNMKAMGINDLLSFDFMDPPAPQALISAMEQLYSLGALDEEGLLTKLGRKMAEFPLDPPLSKMLLASVDLGCSDEILTIIAMIQTGNIFYRPREKQAQADQKRAKFFQPEGDHLTLLAVYEAWKAKNFSGPWCFENFVQSRSLRRAQDVRKQLLTIMDRYKLDVVSAGRNFTKIRKAITAGFFFHAARKDPQEGYRTLVENQPVYIHPSSALFQRQPDWVIYHELVMTTKEYMREVTVIDPKWLTELAPRFYKSADPTKMSKRKRQERIEPLYDRYHEPNSWRLSKRRA

SEQ ID NO: 62155 - DNA, 20 bp, Artificial sequence
  primer
atgtggtatagtgggggcac

SEQ ID NO: 62156 - DNA, 28 bp, Artificial sequence
  primer
ttagcgcttcttccggccgccctttttg

SEQ ID NO: 62157 - protein, 78 aa, Artificial sequence
  consensus sequence
  Variant (2)..(2): Xaa in position 2 is any amino acid
  Variant (4)..(7): Xaa in position 4 to 7 is any amino acid
  Variant (9)..(9): Xaa in position 9 is any amino acid
  Variant (10)..(10): Xaa in position 10 is any or no amino acid
  Variant (12)..(16): Xaa in position 12 to 16 is any amino acid
  Variant (22)..(24): Xaa in position 22 to 24 is any amino acid
  Variant (25)..(28): Xaa in position 25 to 28 is any or no amino acid
  Variant (30)..(31): Xaa in position 30 to 31 is any amino acid
  Variant (38)..(43): Xaa in position 38 to 43 is any amino acid
  Variant (44)..(47): Xaa in position 44 to 47 is any or no amino acid
  Variant (49)..(57): Xaa in position 49 to 57 is any amino acid
  Variant (59)..(60): Xaa in position 59 to 60 is any amino acid
  Variant (62)..(62): Xaa in position 62 is any amino acid
  Variant (65)..(70): Xaa in position 65 to 70 is any amino acid
  Variant (71)..(72): Xaa in position 71 to 72 is any or no amino acid
  Variant (74)..(76): Xaa in position 74 to 76 is any amino acid
EXGXXXXGXXVXXXXXFGAFVXXXXXXXGXXGLVHISXXXXXXXXXXVXXXXXXXXXGXXVXVKXXXXXXXXGXXXLS

SEQ ID NO: 62158 - protein, 13 aa, Artificial sequence
  protein pattern
  Variant (7)..(7): Xaa in position 7 is any amino acid
  Variant (8)..(12): Xaa in position 8 to 12 is any or no amino acid
GLVHISXXXXXXV

SEQ ID NO: 62159 - protein, 15 aa, Artificial sequence
  protein pattern
  Variant (2)..(2): Xaa in position 2 is any amino acid
  Variant (3)..(3): Xaa in position 3 is Ile or Val
  Variant (4)..(5): Xaa in position 4 to 5 is any amino acid
  Variant (6)..(6): Xaa in position 6 is Ile, Leu or Val
  Variant (7)..(8): Xaa in position 7 to 8 is any amino acid
  Variant (13)..(13): Xaa in position 13 is Ile or Val
  Variant (14)..(14): Xaa in position 14 is any amino acid
  Variant (15)..(15): Xaa in position 15 is Phe, Ile, Leu or Val
GXXXXXXXFGAFXXX

SEQ ID NO: 62160 - DNA, 624 bp, Thermus thermophilus
  CDS (1)..(624): transl_table=11
atgcggcttgagcgcgtcctggaagaggcccgggccaagggctaccccatagaggacaacggcctcggcaacctctgggtggtcctgcccagggagcgcttcaaggaggagatggcccactacaaggccatggggttcaacttcctggccgacatcgtgggcctggactacctgacctacccggacccccgccccgagcgcttcgccgtggtctacgagctcgtctccctcccgggctggaaggacggggacgggagccgcttcttcgtgcgggtctacgtgcccgaagaggaccccaggctccccacggtcaccgacctctgggggagcgccaatttcctggaaagggaggtctacgacctcttcggcatcgtctttgaaggccaccccgacctccgcaagatcctcaccccggaggacctcgagggccaccccctgcgcaaggactaccccttgggcgagacccccaccctcttccgcgaggggcggtacatcatcccggcggagttccgcgccgccctcaccggcaaggaccccggcctcaccttctacaagggcgggagccgcaagggctacaggtccctttgggccgacctgaagaaggcccgggaggttaaaggataa

SEQ ID NO: 62161 - protein, 207 aa, Thermus thermophilus
MRLERVLEEARAKGYPIEDNGLGNLWVVLPRERFKEEMAHYKAMGFNFLADIVGLDYLTYPDPRPERFAVVYELVSLPGWKDGDGSRFFVRVYVPEEDPRLPTVTDLWGSANFLEREVYDLFGIVFEGHPDLRKILTPEDLEGHPLRKDYPLGETPTLFREGRYIIPAEFRAALTGKDPGLTFYKGGSRKGYRSLWADLKKAREVKG

SEQ ID NO: 62162 - DNA, 606 bp, Mesorhizobium loti MAFF303099
  CDS (1)..(606): transl_table=11
atggccgcatcccttagcgaactgtcgacctatctcggcgaaaggctgattggtcgcgtcaacgacgctgatatcgcctatggcgagctcaccatgcatgtcgagccgcgcaacctcatcgaagtcgtgaccttcctgcgcgacgatcagcgctgccagttcatctcgatcatcgatgtctgcggtgctgactatccgtcgcggcccaagcgcttcgacgtcgtctatcacctgctttcgccgaagcagaatgtgcgcatccggctcaaggtgcaggccgacgaggagacgatggtgccgtcgatcaccggtgtattcccgggggccgactggttcgagcgcgagacctacgatctctatggcgtgctgttctccggccatcccgatctgcgccgccttttgaccgactacggtttcgaaggccatccgctgcgcaaggatttcccgctgaccggttttgtcgaagtgcgttacgacgacgaagccaagcgcgtcatctacgagccggtcgagctcaagcaggaattccgcaatttcgattttctctcgccatgggaagggacggattacgttctgcctggcgatgaaaaagccaagacgaattga

SEQ ID NO: 62163 - protein, 201 aa, Mesorhizobium loti MAFF303099
MAASLSELSTYLGERLIGRVNDADIAYGELTMHVEPRNLIEVVTFLRDDQRCQFISIIDVCGADYPSRPKRFDVVYHLLSPKQNVRIRLKVQADEETMVPSITGVFPGADWFERETYDLYGVLFSGHPDLRRLLTDYGFEGHPLRKDFPLTGFVEVRYDDEAKRVIYEPVELKQEFRNFDFLSPWEGTDYVLPGDEKAKTN

SEQ ID NO: 62164 - DNA, 456 bp, Thermoplasma volcanium GSS1
  CDS (1)..(456): transl_table=11
atggtagatatactcggcgaagaaaaaggaaaggacggaaggaggataatcaaagtcgcaaaagaaaatctcctcgctttgatgagggatcttaaggcacaaggatataatctatcccttactacgggggtagattacgtagaccatatagaagttgtttatcatctatataatctcgagaagaacgagtatataatagtaaaaaccgagacaacggataaccacgtacctagcttaactccattgtggaatgccgcgaactgggatgaaagagaagaatacgatctggtagggatagtattcgatggtcatccctatcttaagaggctctttcttcccgagggttgggttggccatccactcaggaaaaattatgaccttagcaaagcgcagtatgtgaacatggacgaagaaggaaacgattacgttacatttgacccggagggcggttggtaa

SEQ ID NO: 62165 - protein, 151 aa, Thermoplasma volcanium GSS1
MVDILGEEKGKDGRRIIKVAKENLLALMRDLKAQGYNLSLTTGVDYVDHIEVVYHLYNLEKNEYIIVKTETTDNHVPSLTPLWNAANWDEREEYDLVGIVFDGHPYLKRLFLPEGWVGHPLRKNYDLSKAQYVNMDEEGNDYVTFDPEGGW

SEQ ID NO: 62166 - DNA, 675 bp, Deinococcus radiodurans R1
  CDS (1)..(675): transl_table=11
atgacagcgccggatgctggtctgccggaaaccaatctcagggacactgccgcccgctcgactcgccgcctcgccgaaagccgcgacgtggcgccgctgctcgccgaactcggtttgagtgccgaagagggcctgcaaccgaccgccgccgtggaggccggggagctcctgcacaccgcgcagcaactgcgggcacgcgggttcatgctgcttgacgtcatcggggtggattactcgcgctatacggcgccccggccccagccgttcgcggtgctctacagcgtggcgcacccccgcgaccaccgccggctgtttctgcgggtgtggctctcggagggcgaggcagtggacagcctttttcccatctggaaggccgccaactatctggagcgcgaggtgtacgacctgctcggcatcgaatttaccggacaccccgacctccgcaaggtactgacgcccgacgacctcgaaggccatccactgcgcaaggactttccgctgggggaaacgccgacgctgttccgcgagggccgctttcttgaccccgctgccttccgcgcgggcctgagcgggcagcagcgcgggctgaccggctaccggggcgaaatgcgccggggcgaacggcgccgggaggacatcgtgccgccgctgttgccggaagggggaccgaaatga

SEQ ID NO: 62167 - protein, 224 aa, Deinococcus radiodurans R1
MTAPDAGLPETNLRDTAARSTRRLAESRDVAPLLAELGLSAEEGLQPTAAVEAGELLHTAQQLRARGFMLLDVIGVDYSRYTAPRPQPFAVLYSVAHPRDHRRLFLRVWLSEGEAVDSLFPIWKAANYLEREVYDLLGIEFTGHPDLRKVLTPDDLEGHPLRKDFPLGETPTLFREGRFLDPAAFRAGLSGQQRGLTGYRGEMRRGERRREDIVPPLLPEGGPK

SEQ ID NO: 62168 - DNA, 594 bp, Caulobacter crescentus CB15
  CDS (1)..(594): transl_table=11
atgagcgaagccctggaactgcttggtcaggacatcgtcgcccgtgcgccgggcgtcctgggacattctgtcgcattcggtgagctgaccatcgtcgcgcgcgcggcttcggtcatcgacaccctgaccttcctgcgtgacgacgcggcctgccgcttccaccagttgatcgacctcacgggcgtcgactatcccgaacgcgccgcgcgttttgacgtggtctatcacctgctgtcgctggtgaagaaccatcggatccgcctcaaggtctcgaccgatgaggatacgccggttcccagcgtcacgccggtgttcccggtggcggactggttcgagcgcgaagcgttcgacatgtacggcattttcttcgacggtcacccggacctgcgtcgaatcctgaccgactatggcttccacggtcacccgcttcggaaagacttcccgatgacgggctatgtggaagtgcgctacgacgatgagctcaagcgtgtcgtctatgaacctgtgaagattaccgagttccgtgcgttcgatttcctctcgccctgggaaggcgccaagtatgcgctccccggtgacgagaaggcgcaatag

SEQ ID NO: 62169 - protein, 197 aa, Caulobacter crescentus CB15
MSEALELLGQDIVARAPGVLGHSVAFGELTIVARAASVIDTLTFLRDDAACRFHQLIDLTGVDYPERAARFDVVYHLLSLVKNHRIRLKVSTDEDTPVPSVTPVFPVADWFEREAFDMYGIFFDGHPDLRRILTDYGFHGHPLRKDFPMTGYVEVRYDDELKRVVYEPVKITEFRAFDFLSPWEGAKYALPGDEKAQ

SEQ ID NO: 62170 - DNA, 603 bp, Ralstonia solanacearum GMI1000
  CDS (1)..(603): transl_table=11
atgaccgacaagcttgccaccctgcagtccgcgctcgaaaaggcgctgggcaatcgcatccagagcctgaccgaggcggtcggtgaaatcacgctcgtggtgaaggcggccgattacctggaaaccatgcgcacgctgcgcgacgatgccacgctcaagttcgagcagctgatcgatctgtgcggcgtggactattccgcctacggcgacggtgcctggaacggcccgcgctttgccgccgtgtcgcacctgctgtcggtcacgcacaactggcgcgtgcgcgtgcgcgtgttcgcgccggacgatgatcttcccgtcgtggcgtccgtggtcgatgtctggaacgccgccgactggttcgagcgcgaggcgttcgacctgtatgggctggtcttcgaaggccacccggacctgcgccgcatcctgaccgactacggcttcatcggccacccgttccgcaaggattttccggtgtcgggctatgtggaaatgcgttacgaccccgtgcagcgccgcgtgatctaccagccggtgaccatcgagccgcgcgagattacgccgcgtgtgatccgcgaggatcaatacggtggcctgaagcactga

SEQ ID NO: 62171 - protein, 200 aa, Ralstonia solanacearum GMI1000
MTDKLATLQSALEKALGNRIQSLTEAVGEITLVVKAADYLETMRTLRDDATLKFEQLIDLCGVDYSAYGDGAWNGPRFAAVSHLLSVTHNWRVRVRVFAPDDDLPVVASVVDVWNAADWFEREAFDLYGLVFEGHPDLRRILTDYGFIGHPFRKDFPVSGYVEMRYDPVQRRVIYQPVTIEPREITPRVIREDQYGGLKH

SEQ ID NO: 62172 - DNA, 609 bp, Brucella melitensis 16M
  CDS (1)..(609): transl_table=11
atgagcgaagaagctctcggtgaactttccggctatatcagggaacgtctcggcgacgcgatcgaagaggcgaatctggcttatggcgaactgacgctttgcgtgccggtggcgagcctcatcggcgttctgactttcctgcgtgacgatgtgcagtgccagttcgtcaatctgaccgatatttcaggcgtcgattatccgcagcgcgaaaagcgcttcgatgtcgtctaccagcttctgtctccgcgccagaaccagcgcatccgcgtcaaggttcaggcggacgaagatacgctggtgccgtctgccgttccggtcttcttcggcgcggaatggtatgagcgcgaggcctacgatatgtacggcattctgttctctggccatccggacttgcgccgcatcctgacggactatggctttgagggccatccgctgcgcaaggacttcccgctcaccggtttcgtcgaggttcgttataacgacgaactgaagcgcgttgtttacgagcctgtgcagttgcgccaggaattccgcaatttcgattttctctcgccgtgggaaggaacggattacgttctgcccggtgatgagaaagcaaagacgaactga

SEQ ID NO: 62173 - protein, 202 aa, Brucella melitensis 16M
MSEEALGELSGYIRERLGDAIEEANLAYGELTLCVPVASLIGVLTFLRDDVQCQFVNLTDISGVDYPQREKRFDVVYQLLSPRQNQRIRVKVQADEDTLVPSAVPVFFGAEWYEREAYDMYGILFSGHPDLRRILTDYGFEGHPLRKDFPLTGFVEVRYNDELKRVVYEPVQLRQEFRNFDFLSPWEGTDYVLPGDEKAKTN

SEQ ID NO: 62174 - DNA, 624 bp, Bordetella pertussis Tohama I
  CDS (1)..(624): transl_table=11
atgatgatgaccaggctcgaaaccctgaaaaacaacttgcaggccgcttttggccaggacctcgcgctcaccgagtcgcttggcgaattgacgctggaagtcgccgccgagcagtggttttcggcgtgcaccaagctgcgcaccgacccggcgctgcgcttcgagtcctgtatcgacctttgcggcgtggactacctgacctggggcaatggcacgcagcccgaggaaaagaccggcccggtcacgcgcggccgctatgccgtcgtcgtgcacctgctgtcgatcgagcacaactggcgcctgcgcgtgcgcacctgggccccggacgacgagttcccgatggtgtcgtccctgctggaatgctggcccggcgtgaactggttcgagcgcgaagccttcgacctgtacggcatcgtcttcgaaggccacccggacctgcgtcgcatccttaccgactacggcttcatcggccacccgttccgcaaggatttcccgctctccggcacggtcgaaatgcgttacgaccccgagcagaagcgggtcatttaccagccggtcacgatcgacccgcgcgaaatcacgccgcgcgtcgttcgtgaagactcttacggcatggggcgttaa

SEQ ID NO: 62175 - protein, 207 aa, Bordetella pertussis Tohama I
MMMTRLETLKNNLQAAFGQDLALTESLGELTLEVAAEQWFSACTKLRTDPALRFESCIDLCGVDYLTWGNGTQPEEKTGPVTRGRYAVVVHLLSIEHNWRLRVRTWAPDDEFPMVSSLLECWPGVNWFEREAFDLYGIVFEGHPDLRRILTDYGFIGHPFRKDFPLSGTVEMRYDPEQKRVIYQPVTIDPREITPRVVREDSYGMGR

SEQ ID NO: 62176 - DNA, 648 bp, Bordetella parapertussis 12822
  CDS (1)..(648): transl_table=11
gtgtcccggtttacctatgcgtacatgatgatgaccaggctcgaaaccctgaaaaacaacttgcaggccgcttttggccaggacctcgcgctcaccgagtcgcttggcgaattgacgctggaagtcgccgccgagcagtggttttcggcgtgcaccaagctgcgcaccgaccccgcgctgcgcttcgagtcctgtatcgacctttgcggcgttgactacctgacctggggcaatggcacgcagcccgaggaaaagaccggcccggtcacgcacggccgctatgccgtcgtcgtgcacctgctgtcgatcgagcacaactggcgcctgcgcgtgcgtacctgggccccggacgacgagttcccgatggtgtcgtccctgctggaatgctggcccggcgtgaattggttcgagcgcgaagccttcgacctgtacggcatcgtcttcgaaggccacccggacctgcgccgcatccttaccgactacggcttcatcggccatccgttccgcaaggatttcccgctctccggcacggtcgaaatgcgttacgaccccgagcagaagcgggtcatttaccagccggtcacgatcgacccgcgcgaaatcacgccgcgcgtcgttcgtgaaggctcttacggcatggggcgttaa

SEQ ID NO: 62177 - protein, 215 aa, Bordetella parapertussis 12822
MSRFTYAYMMMTRLETLKNNLQAAFGQDLALTESLGELTLEVAAEQWFSACTKLRTDPALRFESCIDLCGVDYLTWGNGTQPEEKTGPVTHGRYAVVVHLLSIEHNWRLRVRTWAPDDEFPMVSSLLECWPGVNWFEREAFDLYGIVFEGHPDLRRILTDYGFIGHPFRKDFPLSGTVEMRYDPEQKRVIYQPVTIDPREITPRVVREGSYGMGR

SEQ ID NO: 62178 - DNA, 648 bp, Bordetella bronchiseptica RB50
  CDS (1)..(648): transl_table=11
gtgtcccggtttacctatgcgtacatgatgatgaccaggctcgaaaccctgaaaaacaacttgcaggccgcttttggccaggacctcgcgctcaccgagtcgcttggcgaattgacgctggaagtcgccgccgagcagtggttttcggcgtgcaccaagctgcgcaccgacccggcgctgcgcttcgagtcctgtatcgacctttgcggcgtggactacctgacctggggcaatggcacgcagcccgaggaaaagaccggcccggtcacgcgcggccgctatgccgtcgtcgtgcacctgctgtcgatcgagcacaactggcgcctgcgcgtgcgcacctgggccccggacgacgagttcccgatggtgtcgtccctgctggaatgctggcccggcgtgaactggttcgagcgcgaagccttcgacctgtacggcatcgtcttcgaaggccacccggacctgcgccgcatccttaccgactacggcttcatcggccacccgttccgcaaggatttcccgctctccggcacggtcgaaatgcgttacgaccccgagcagaagcgggtcatttaccagccggtcacgatcgacccgcgcgaaatcacgccgcgcgtcgttcgtgaagactcttacggcatggggcgttaa

SEQ ID NO: 62179 - protein, 215 aa, Bordetella bronchiseptica RB50
MSRFTYAYMMMTRLETLKNNLQAAFGQDLALTESLGELTLEVAAEQWFSACTKLRTDPALRFESCIDLCGVDYLTWGNGTQPEEKTGPVTRGRYAVVVHLLSIEHNWRLRVRTWAPDDEFPMVSSLLECWPGVNWFEREAFDLYGIVFEGHPDLRRILTDYGFIGHPFRKDFPLSGTVEMRYDPEQKRVIYQPVTIDPREITPRVVREDSYGMGR

SEQ ID NO: 62180 - DNA, 801 bp, Wolinella succinogenes DSM 1740
  CDS (1)..(801): transl_table=11
atgagacagtataagccgcaggccaatgcgcaaaaaaaggtctattacagcgatcgattccatgagaagccctctctccccaaagaatcactagaggcttttcctgagtttgccaaggagttggagcttctaagccaagaggtgaaagtgctagagagctatgtagagcgaggggattgggtcgcttatgttgagcccaaggagaacaaaaaagccctagccgctctaaagaggatgggttatgagattctctcagagatgagcgcgattgactatctagagacgcgacatggctttgaggttttctatcagctcctctctatggaaaaacaccaccgtatgcgcttgaagctctttttgcccgaagggatggagttagaatcagcaaatgacctcttccgatcggcggattggagtgagcgagagatgtatgatatgtttggaatcaggctccttcaccacccctatctcaagcgaatcttgatgcccgatgattggagcggctatcccttgcgcaagagctatcctttgcacggagatgaagcggcgcagtggtatgaggtggataagatttttggcaaagagtatcgagaggtggtcggcccagagaatcgagatgctgcgagaatcgatcgctacgacaccacccgattcgctcgaatgggtcatgaggtgccctatggtgaagatattagcctaggcgaaaaggagaccccgattcgctatcaggaggagggtggtgtcgtgattgttgagaagctcacgcctgaaaactccaaacagctccaagagaggaagtga

SEQ ID NO: 62181 - protein, 266 aa, Wolinella succinogenes DSM 1740
MRQYKPQANAQKKVYYSDRFHEKPSLPKESLEAFPEFAKELELLSQEVKVLESYVERGDWVAYVEPKENKKALAALKRMGYEILSEMSAIDYLETRHGFEVFYQLLSMEKHHRMRLKLFLPEGMELESANDLFRSADWSEREMYDMFGIRLLHHPYLKRILMPDDWSGYPLRKSYPLHGDEAAQWYEVDKIFGKEYREVVGPENRDAARIDRYDTTRFARMGHEVPYGEDISLGEKETPIRYQEEGGVVIVEKLTPENSKQLQERK

SEQ ID NO: 62182 - DNA, 489 bp, Geobacter sulfurreducens PCA
  CDS (1)..(489): transl_table=11
atggctgagaacaatcgtgcagttataaaacttaaggaaaaatttgccgcgtcaatccttgatgtaagggaattccgcggcgaggttacggttacggtggcacgtgagaaggtcgtggatatctgccgtttcctgaaagagtcgttacagtacaacctctgcacagacgtgacggctgttgactatcttgggaagcaggagccgcgcttcatggtggtgtataacctgtattcgattcccaataaggatcggctcagactcaaggctggcgtgcctgatgccgactgttcgatcgatacggtgtcatgtgtctggaactcagctaattggctggagcgtgaagtgtacgacctcatgggtgtgcaattcaacaaccaccctgacctgcgtcgtatcctgatgaccgacgactgggtcggccacccgctccgcaaggattatcccctgcaggggcctgatcgtgagccctacaagggccggctttcctga

SEQ ID NO: 62183 - protein, 162 aa, Geobacter sulfurreducens PCA
MAENNRAVIKLKEKFAASILDVREFRGEVTVTVAREKVVDICRFLKESLQYNLCTDVTAVDYLGKQEPRFMVVYNLYSIPNKDRLRLKAGVPDADCSIDTVSCVWNSANWLEREVYDLMGVQFNNHPDLRRILMTDDWVGHPLRKDYPLQGPDREPYKGRLS

SEQ ID NO: 62184 - DNA, 2511 bp, Aspergillus nidulans FGSC A4
  CDS (1)..(2511)
atggccgctcctcgctctctgatgcggctgggctctggccgctccctggcgtcggccgcccggtcatcccgcaattgccgtgccttttcttcgacccctctgcagcaggtagccaaggcgacaacggctggcactgatacccccaacatgcgtcacgcagcgcggcctccccccggtcctctccgcgctcccgtcgtcaacccggccgacaagtaccaggacaaggccgatagcctgcaccagtacggtcaatacataatggcctgtctgcccaagcacgttcagcaattctccgtttggaaggatgagctctgcatttacgtccctccctccggcattatcccaacgttcaccttcctcaaatatcacacctcggctgaattcacgactgtctccgatattaccgctgttgattacccaactaaggatcagcgctttgaggttgtctacaatcttctcagtgttcgatacaactcacgcattcgtgtcaagacctacgccgacgaggccagccctgtgcccagtatcactggattgtatgaaggagctttgtggtacgagcgtgaggtgtacgatttgttcggcgttttcttcactggtcatccggatctgcgccgtatcatgacggactatggtttcgacggccaccctctgcgcaaggacttccctatgactggatacactgagctccgatacgacgaggagaagaagcgcattgtcattgagccccttgaacttactcaagcgttccgaaacttcgagggaggtaccacggcctgggagcctgttggtgctggtcgggataggactcccgagtcgttctatggaactatcggtgtttcaatgcttgctattactgccataaactgtacagaagcctgtcaaaatctcttggcatgcgcaaaaccgaaaaagcctcccaattccgcaaactttcaaccaccgtcacgaattgctaacaccaccaacgttcctgaagacccggacaatatccctggacaagacaggaaagcaatatttggcaaaatgcccaaacgcaaactctccgacctgaccgacacgaacgacacggcgcaaccgcagaaaccaaagttatctgaaaaggaataccaacacctgaaacttcaaacggcccggctaaagcagaagtttgagttcggggttacgtcgctatcgcgcgcactcaagaccgctcggggctttgaaaggcagaagctcgggaggaggcagaaagtcgcaaagggaggaccaggaacggagatcgcagttgcgcatgcgaaaaaggcgaagtcgaaaccaaagtcgaatgttagtcctgaggagactctcaggaggatcgaaggggagattcaggtcttgaagagcctcgacccaactacgactgcggaaaaatatctcttcaagcagctagccaaaacgaaacggattgccgagtcacctgttttctaccgtttcaaacaatctaaagaaaagaagatcaagcttgagggaccaaagagtacggaggaagcgaatgttacagcgagactttttaagtcgaatcccgtgcagaatgtcttgccgggtattatggagggattaaggggattgtttggattggaaggagccggggcgaaggggaaaaaggacgagagggacggtgggaagaggaaggctggagaacaggctgggggtagaaaggatgtttccggggatgagtccgtgtctgggtctgaagatgaggatgaggccgatgcgcgagacgcgcgaggtctggagcgggatatagacatgaaggatgcagagagtggtgacgacgaagaggactactcgcacttcgacgcacgactagcctcagactcggaagactccaacgacgacctcttaagtgaagacaacgataataccggatcaagacatgctcgccgctcctccatgtccatctcgctctccccatcacgctcgccctccccatcgcaatcgccaccaccaaagaaacccaagtctacatccgcttccaagacccccgcgacaagcacaaccttcctcccgtccctcatgatgggtgggtactggtctggttctgagtccgagcctgaggagctcgaagaagccccgaagcggaaaaaccggatgggccagcaggcgcgtcgggcactctgggagaagaagtacggtgctgcggcgaaccatataaaggcggagcagcagaaggggcagaaaggtaaaggaaaagggggcagagatgccgggtgggatttgagaaagggtgctacgggcgatggggatagggatcgagatcgtggaaggaagaagttcgggactgggtcgaatgctatggctatgagtgggaaggataggtttgggagtggtactagcaccgctaaagagagaacgactcagggtgcgaagagcaagaagacaaagccgcaggatgataagccattgcatccttcttgggaggcggcgaggaaggcgaaggagcagaaggcgacggcatcgtttcagggcaagaaggttgttttcgattga

SEQ ID NO: 62185 - protein, 836 aa, Aspergillus nidulans FGSC A4
MAAPRSLMRLGSGRSLASAARSSRNCRAFSSTPLQQVAKATTAGTDTPNMRHAARPPPGPLRAPVVNPADKYQDKADSLHQYGQYIMACLPKHVQQFSVWKDELCIYVPPSGIIPTFTFLKYHTSAEFTTVSDITAVDYPTKDQRFEVVYNLLSVRYNSRIRVKTYADEASPVPSITGLYEGALWYEREVYDLFGVFFTGHPDLRRIMTDYGFDGHPLRKDFPMTGYTELRYDEEKKRIVIEPLELTQAFRNFEGGTTAWEPVGAGRDRTPESFYGTIGVSMLAITAINCTEACQNLLACAKPKKPPNSANFQPPSRIANTTNVPEDPDNIPGQDRKAIFGKMPKRKLSDLTDTNDTAQPQKPKLSEKEYQHLKLQTARLKQKFEFGVTSLSRALKTARGFERQKLGRRQKVAKGGPGTEIAVAHAKKAKSKPKSNVSPEETLRRIEGEIQVLKSLDPTTTAEKYLFKQLAKTKRIAESPVFYRFKQSKEKKIKLEGPKSTEEANVTARLFKSNPVQNVLPGIMEGLRGLFGLEGAGAKGKKDERDGGKRKAGEQAGGRKDVSGDESVSGSEDEDEADARDARGLERDIDMKDAESGDDEEDYSHFDARLASDSEDSNDDLLSEDNDNTGSRHARRSSMSISLSPSRSPSPSQSPPPKKPKSTSASKTPATSTTFLPSLMMGGYWSGSESEPEELEEAPKRKNRMGQQARRALWEKKYGAAANHIKAEQQKGQKGKGKGGRDAGWDLRKGATGDGDRDRDRGRKKFGTGSNAMAMSGKDRFGSGTSTAKERTTQGAKSKKTKPQDDKPLHPSWEAARKAKEQKATASFQGKKVVFD

SEQ ID NO: 62186 - DNA, 840 bp, Candida albicans SC5314
  CDS (1)..(840): transl_table=12
atgatatcaagagcattacttaaaagatcattaccaacagttcaattcttgagaccattcactggatcatctattagaagatcagctcatgaagaagatttagtaaatttgaatgaattaccaagacaaaaatcattagaagaaaattatgtaccattaattaatcctactgaaaaatataaagttcaaattgaagaattacataaatttggtacttatattatggcatgtttacctaaatatgttcaccaattttctgtttggaaagatgaattgactatttatgttgctccatcagcaattttaccaacaatgttatttttaaaaaataatactgcatgtcaatttaaacaagttctggatgttactgctgctgattatccttcaagaactaatagatttgatgttgtatataatttattatccgtaagacataattcaagaattagagttaaaacttatgccaatgaaactaccccagttccatcaattactcctttatttaatggtgctaattggtttgaaagagaaacttatgatttatttggagtttttttcgaaggtcatcctgatttaagaagaattttaactgattatggatttgaaggtcatccattaaggaaagatttcccaactactggttatactgaagttagatatgatgaagaaaagaaaagaattatttatgaaccattagaattgactcaagcttggagaaatttcaccgttggtagttctgtttgggaaccagttggtgaaggtaaagatttcactcctgaatcatttaaattacctactcctgaaccagaacctgaaaaagaatctgatgaaaagaagtaa

SEQ ID NO: 62187 - protein, 279 aa, Candida albicans SC5314
MISRALLKRSLPTVQFLRPFTGSSIRRSAHEEDLVNLNELPRQKSLEENYVPLINPTEKYKVQIEELHKFGTYIMACLPKYVHQFSVWKDELTIYVAPSAILPTMLFLKNNTACQFKQVSDVTAADYPSRTNRFDVVYNLLSVRHNSRIRVKTYANETTPVPSITPLFNGANWFERETYDLFGVFFEGHPDLRRILTDYGFEGHPLRKDFPTTGYTEVRYDEEKKRIIYEPLELTQAWRNFTVGSSVWEPVGEGKDFTPESFKLPTPEPEPEKESDEKK

SEQ ID NO: 62188 - DNA, 597 bp, Herminiimonas arsenicoxydans
  CDS (1)..(597): transl_table=11
atgacgatcaaacttgaactcctggaatcggccctgcgcaatgcactcggcgatcaactccaaagtctgacgcttgcgttgggtgaaatcaccatcgtagtaaattcgagagattatgcatccgccatgcgcgtgctgcgtgatcatgccgatttgcgcttcgaagaattgattgatttgtgtggtgttgattactcgacttatggcgatggcgcctgggatggacagcgttttgctgtggtgtcgcatctgctgtcgattacgcataactggcgtgtgcgtgtgcgcgtgttcgcttcggacgatgagatgccggtggtggcgtctatgacggaaatctggccggctgccaactggtacgaacgtgaggctttcgactttttcggcatcctgtttgaaggccacaacgatttgcgtcgcattttgaccgactatggttttatcggtcatccgttccgcaaggatttcccagtctccggttacgttgaaatgcgttacgaccctgagcaaaaacgcgtaatttaccaacccgtcacgatcgatccgcgcgaaaacgtgccgcgtgtgatccgtgaagaacaatacgggatgaaataa

SEQ ID NO: 62189 - protein, 198 aa, Herminiimonas arsenicoxydans
MTIKLELLESALRNALGDQLQSLTLALGEITIVVNSRDYASAMRVLRDHADLRFEELIDLCGVDYSTYGDGAWDGQRFAVVSHLLSITHNWRVRVRVFASDDEMPVVASMTEIWPAANWYEREAFDFFGILFEGHNDLRRILTDYGFIGHPFRKDFPVSGYVEMRYDPEQKRVIYQPVTIDPRENVPRVIREEQYGMK

SEQ ID NO: 62190 - DNA, 606 bp, Bradyrhizobium sp. ORS278
  CDS (1)..(606): transl_table=11
atggacgacggcaggctcgacgcccttgggcagacgatcgtgagcgcgcttccgggcgcggcgctcggccactcggtcgccttcaatcagctcaccgtgaccgtggatcctgcccggatcgtcgaggtcgtcaaacatcttcgtgacgatcccggctgccggttcatcaacttcaccgacattacagcggtcgactacccggagcgcgcgaagcgcttcgaggtggtctatcacttcctgtcgccgacgctgaatacccgcatccgtctcaaagccgaagccgacgagatgacgcaggtgccgtcgatcatcgatgtctttccgggcgccgactggttcgagcgcgaggcctacgatctctatggtgtgatctttgtcggtcaccccgacatgcgccggatcctcaccgattacggcttcgacggccatccgctgcgcaaggacttcccgacgaccggcttcgtcgaggtgcgctacgacgaccaggagaagcgggtgatctacgagccggtgcggctcaaccaggaattccgcaggttcgatttcctctcgccctgggaaggcgcggactatccgctgccgggcgatgagaaggcgacgaagtga

SEQ ID NO: 62191 - protein, 201 aa, Bradyrhizobium sp. ORS278
MDDGRLDALGQTIVSALPGAALGHSVAFNQLTVTVDPARIVEVVKHLRDDPGCRFINFTDITAVDYPERAKRFEVVYHFLSPTLNTRIRLKAEADEMTQVPSIIDVFPGADWFEREAYDLYGVIFVGHPDMRRILTDYGFDGHPLRKDFPTTGFVEVRYDDQEKRVIYEPVRLNQEFRRFDFLSPWEGADYPLPGDEKATK

SEQ ID NO: 62192 - DNA, 456 bp, Picrophilus torridus DSM 9790
  CDS (1)..(456): transl_table=11
atggttgatattattgaggaatcccaggataaattcggaaggaagatatataaaataaaaaaggaggatttaatagaattcatggagcaaaagaagagggatgggtattacctttccgctataacaggcgttgacatgaaatcatacatagaggttgtctaccatatatacaattacgataaaaatgagtaccttgagataaaggtcgatacagaggattcccatgttccatcacttacagggttatggaaggctgctgactgggatgagcgtgagcagtacgatcttatgggaataatctttgacggtcatgagaatcttaggcgcatactacttcctgatgaatgggttggccatccattaagaaaggattatgatctaaaaaaggtacagtacgtctcaatggatagggaaggcaatgagcatgttagctttgatcctaatgagggatggtaa

SEQ ID NO: 62193 - protein, 151 aa, Picrophilus torridus DSM 9790
MVDIIEESQDKFGRKIYKIKKEDLIEFMEQKKRDGYYLSAITGVDMKSYIEVVYHIYNYDKNEYLEIKVDTEDSHVPSLTGLWKAADWDEREQYDLMGIIFDGHENLRRILLPDEWVGHPLRKDYDLKKVQYVSMDREGNEHVSFDPNEGW

SEQ ID NO: 62194 - DNA, 603 bp, Symbiobacterium thermophilum IAM 14863
  CDS (1)..(603): transl_table=11
gtggctagtgcgatgcatgagcgggtggccgccgcccgcgagcgtgtcaatcacgaggtcatccccgccctgatcgaggcgttccccggcaaggtggagcagattcccccgaccaacgacctgatcccccaggtctacgtggccagcgacgtgcacgagccggtggcccgctggctgaaagagcggggattccacatgctggtggacatcaccgcggcggactactggcccaagcgggagccgcgcttcgagctggtctaccacctgcgggagatgcccgagaaggaccccaagggcgacaaggggctcgggatgatccgggtgcgggtgaagctgacggaaaaggaacccgtccagagcctgagccacatctgggagatggccaacccggcggagcgggagatctgggaccagttcggtctgaacatcgtgggccaccccaacctgacccgcatcctgaaccccgacgactgggaggggcacccgctgcgccgcgactacccgctgcggggcccgcgcgccctcatcaacctcgagctgcccgccgacgagaaccggtaccaccccttcgtcgagacggagcccgccaaggaaggagagtag

SEQ ID NO: 62195 - protein, 200 aa, Symbiobacterium thermophilum IAM 14863
MASAMHERVAAARERVNHEVIPALIEAFPGKVEQIPPTNDLIPQVYVASDVHEPVARWLKERGFHMLVDITAADYWPKREPRFELVYHLREMPEKDPKGDKGLGMIRVRVKLTEKEPVQSLSHIWEMANPAEREIWDQFGLNIVGHPNLTRILNPDDWEGHPLRRDYPLRGPRALINLELPADENRYHPFVETEPAKEGE

SEQ ID NO: 62196 - DNA, 684 bp, Legionella pneumophila subsp. pneumophila str. Philadelphia 1
  CDS (1)..(684): transl_table=11
atgacaaaaaatgagtatttgattgaaaagctacaagctgatttagcaaatcatattaccgagttaacctccgcatatggtgaggtaactattgagtgtgaggtgcaaaatttattgcctgttatgattgagttgagagacagagaggaattttctttcgatcagttaattgatctctgtggcgtagattatttgcattatggtgattatgattgggaaacagagtctgcgacagaacatggattttcacgaggtgtcgagcgtcaggaagccaaggcttatgctgtaaataaaccacgattcgccgtagtctatcatttattatcaaccaaaaaaaatcatcgtttacgagtcaaattatttgtagaagaatcccatttaattgttccatcagtacatcatttatggaagtctgctaactggtttgagcgggaagcttatgatttatatggaattttattcgatggccatcctgatttaagacggctactgacggattatggttttataggccaccctttccgcaaggattttccactcagtggagaggtagaaatgagatatgatgcaaaactgcaaaaggtaatatatgcccctgtagacattgtgccaagaattgtagttccaaaggttattcgtaacgataaccgctacataggtaatgaaggtagcaaaaatgattga

SEQ ID NO: 62197 - protein, 227 aa, Legionella pneumophila subsp. pneumophila str. Philadelphia 1
MTKNEYLIEKLQADLANHITELTSAYGEVTIECEVQNLLPVMIELRDREEFSFDQLIDLCGVDYLHYGDYDWETESATEHGFSRGVERQEAKAYAVNKPRFAVVYHLLSTKKNHRLRVKLFVEESHLIVPSVHHLWKSANWFEREAYDLYGILFDGHPDLRRLLTDYGFIGHPFRKDFPLSGEVEMRYDAKLQKVIYAPVDIVPRIVVPKVIRNDNRYIGNEGSKND

SEQ ID NO: 62198 - DNA, 603 bp, Silicibacter pomeroyi DSS-3
  CDS (1)..(603): transl_table=11
atgagcgacgcactcagagaactgggcacccatctggagctgaaacgcgccgattgcatcctgtcctgggatgtgacctttggcgagttgaacgtggatgtggcgccgtcgaacctggtcgatttcgtggatttcctgcgctcggacagcagctgccgcttttcgacgctggtcgatatcaccgccgttgactatcccgaacgggccaagcggttcgacgtggtctatcacttcctcagcatgtatcagaaccagcgcatccgcctgcgggtctcgatccgcgaggatgacatggtgccgtcgatcaccgatgtgcacccctcggccaactggttcgagcgcgaggtgttcgacatgttcggcatcctgttcaccggccaccccgacctgcgccgcatcctgacggattacgggttccggggctatccgctgcgcaaggatttcccgaccaccggctataccgaggtccgctatgacgaggcggaaaagcgggtggtctacgaacccgtcagcctggttcaggaataccggcagttcgatttcatgtccccctgggaaggcgccgattacatccttccgggagacgagaagaaagaggggtaa

SEQ ID NO: 62199 - protein, 200 aa, Silicibacter pomeroyi DSS-3
MSDALRELGTHLELKRADCILSWDVTFGELNVDVAPSNLVDFVDFLRSDSSCRFSTLVDITAVDYPERAKRFDVVYHFLSMYQNQRIRLRVSIREDDMVPSITDVHPSANWFEREVFDMFGILFTGHPDLRRILTDYGFRGYPLRKDFPTTGYTEVRYDEAEKRVVYEPVSLVQEYRQFDFMSPWEGADYILPGDEKKEG

SEQ ID NO: 62200 - DNA, 600 bp, Ralstonia eutropha JMP134
  CDS (1)..(600): transl_table=11
atggcgaagcttgagaccctgaaggccgcgctcgagaaagttctcggcaagcgcgtgcagaaactgatcgaggcgaccggcgaactgacgctgatcgtcaaggcagatgactacctcgaagttgcccgcacgctgcgcgacgatccgtcgctgcgtttcgagcagctgatcgacctgtgcggcgtcgattattccgacttcggcgatggcgcctgggatggtctgcgttttgccgcggtatcgcacctgttgtccgtgactcacaactggcgtctgcgtctgcgtgtgtttgcgccggacgacgacttcccggtcgtgccgtcgctgatcgacgtgtggaactcggtgaactggttcgagcgcgaagcgttcgacttctacggcatcgtcttcgaaggccatccggacctgcgccgcctgctgaccgactacggttttgtcggccacccgttccgcaaggacttcccggtatcgggctacgtggaaatgcgctacgaccccgagcagaaacgggtcatctaccagccggtcacgatcgaacctcgcgaaatcacgccgcgcgtgatccgcgaggaaaactacggcggcacgcagcactga

SEQ ID NO: 62201 - protein, 199 aa, Ralstonia eutropha JMP134
MAKLETLKAALEKVLGKRVQKLIEATGELTLIVKADDYLEVARTLRDDPSLRFEQLIDLCGVDYSDFGDGAWDGLRFAAVSHLLSVTHNWRLRLRVFAPDDDFPVVPSLIDVWNSVNWFEREAFDFYGIVFEGHPDLRRLLTDYGFVGHPFRKDFPVSGYVEMRYDPEQKRVIYQPVTIEPREITPRVIREENYGGTQH

SEQ ID NO: 62202 - DNA, 603 bp, Thiobacillus denitrificans ATCC 25259
  CDS (1)..(603): transl_table=11
atgtcgatcacgctggagtccttgtccgcctgcctgaaaaatgccctcggtgacgcgctcgttcagacgatcgagcgcctcggcgaactgacgctcgtggtcaagccccaggcctacgcgccggcgatgctggccttgcgcgaccacccggactgccgcttcgagcagttgatcgacctgtgcggtgtcgactattccgggtatggcgagggcgcctgggagggtccgcgctttgccgtcgtcgcgcacctgctttcggtgtcgaagaacgcccgcgtgcgtgtgcgcgtgttttgccccgacgacgatttgcccgcggtcgcgtccgtcgtggatatctggcccgccgcgagttggttcgagcgcgaggctttcgatctctacggcatcgttttcgagggtcacccggacttgcgtcgcatcctcaccgactacggcttcatcggtcatcctttccgcaaggacttcccgctttcgggcaacgtcgagatgcgttacgacccgacccagcagcgcgtgatctaccagccggtgtcgatcgagccgcgcgacaacgtgccgcgcgtcgtgcgcgacgaaagctacggcgacgggcgggcatga

SEQ ID NO: 62203 - protein, 200 aa, Thiobacillus denitrificans ATCC 25259
MSITLESLSACLKNALGDALVQTIERLGELTLVVKPQAYAPAMLALRDHPDCRFEQLIDLCGVDYSGYGEGAWEGPRFAVVAHLLSVSKNARVRVRVFCPDDDLPAVASVVDIWPAASWFEREAFDLYGIVFEGHPDLRRILTDYGFIGHPFRKDFPLSGNVEMRYDPTQQRVIYQPVSIEPRDNVPRVVRDESYGDGRA

SEQ ID NO: 62204 - DNA, 489 bp, Geobacter metallireducens GS-15
  CDS (1)..(489): transl_table=11
atggctgaaactaatcgcgcagtaataaagctcagggaaaaattttccgcttccgtgcttgatgtgaaagagttccgcggagaggtgacggttacggtgaagcgtgaggacattgttgaaatttgcaatttcctcaagtcgtcgcttgcctataatctctgtaccgacgtaaccgcggtggactatctggggaagcaagagccacgctttatggtagtttacaatctttattcgattccgaataaagaccgcctcagggttaaggcgggggttccggaggctggctgctccattgatacggtttcctgcgtctggagcgcggccaattggttggagcgtgaagtttacgatttgatgggtgtggtcttcaataatcacccagatcttcgtcggatactgatgactgatgactgggtcggccatccgcttcggaaggattatccgctgcaggggcctggtcgtgagccttacaaagggcggttgtcgtag

SEQ ID NO: 62205 - protein, 162 aa, Geobacter metallireducens GS-15
MAETNRAVIKLREKFSASVLDVKEFRGEVTVTVKREDIVEICNFLKSSLAYNLCTDVTAVDYLGKQEPRFMVVYNLYSIPNKDRLRVKAGVPEAGCSIDTVSCVWSAANWLEREVYDLMGVVFNNHPDLRRILMTDDWVGHPLRKDYPLQGPGREPYKGRLS

SEQ ID NO: 62206 - DNA, 447 bp, Moorella thermoacetica ATCC 39073
  CDS (1)..(447): transl_table=11
atggacaactttatccaggaattacagcgcctttttcccgacctagaggtcagagaaggggttgacgtgccggccctggttgtaccggctgaccagttgctggcgcttatgacggagttaaaggagaaacgcggttttaatttcctggcggacttgacggctgttgattatccggaagacgagcggatagaaatggtataccatttgttatccgtgccggggatggccgaaatccgggtaaaggtaaatcttgaccgccagcatccggaggttccttccttaactgccctctggccggcggccaatgtccaggaaagggaggcctttgatctaatgggggtaaaattccctgggcatcccgatttaaagcgcatcctgtgtccggatgactttgttggccatccccttcgtaaagattttcgactccaaacagaagggggggaataa

SEQ ID NO: 62207 - protein, 148 aa, Moorella thermoacetica ATCC 39073
MDNFIQELQRLFPDLEVREGVDVPALVVPADQLLALMTELKEKRGFNFLADLTAVDYPEDERIEMVYHLLSVPGMAEIRVKVNLDRQHPEVPSLTALWPAANVQEREAFDLMGVKFPGHPDLKRILCPDDFVGHPLRKDFRLQTEGGE

SEQ ID NO: 62208 - DNA, 603 bp, Burkholderia thailandensis E264
  CDS (1)..(603): transl_table=11
atggcaagcaaaatcgagaccctcaaggcgaacctcgaagccgcgctcggcgcgcgcgcggtgagcctcgtcgaagcggttggcgagctcacgctcgtcgtgaaggcgagcgattacctcgaagtcgcgaagcaactgcgtgacgatcgctcgctcggcttcgagcaactgatcgacctctgcggcatcgactatcagacctatggcgacggcgcctatgacggcccgcgtttcgccgccgtcctgcacctgctgtcggtcgcgaacaactggcgcctgcgcgtgcgcgtgttcgcccccgacgacgatctgccgatcgtaccgtcggtcgtcgacatctggaattcggcgaactggtacgagcgcgaagcgttcgacctctacggcatcgtgttcgaaggccaccccgacctgcgccgcatccttaccgactacggcttcatcggtcatccgttccgcaaggatttcccggtttccggctacgtcgaaatgcgttacgacccggaagagaagcgcgtcgtgtaccagccggtgacgatcgagccgcgcgaaatcacgccgcgcgtgatccgcgaggatcgctatggcggtctgaaacattaa

SEQ ID NO: 62209 - protein, 200 aa, Burkholderia thailandensis E264
MASKIETLKANLEAALGARAVSLVEAVGELTLVVKASDYLEVAKQLRDDRSLGFEQLIDLCGIDYQTYGDGAYDGPRFAAVLHLLSVANNWRLRVRVFAPDDDLPIVPSVVDIWNSANWYEREAFDLYGIVFEGHPDLRRILTDYGFIGHPFRKDFPVSGYVEMRYDPEEKRVVYQPVTIEPREITPRVIREDRYGGLKH

SEQ ID NO: 62210 - DNA, 711 bp, Frankia sp. CcI3
  CDS (1)..(711): transl_table=11
gtgagcgacgagagcacagcctccgccgacctgataccgggcgccgccggcgtgcccggcggtccgggtgggcagcgccgggacgcgttcggcgccggtgacagcggtgacacctccgggttcggcgggctcgtcacgcccgttccgatcctgagctccaccgcccgcccgttcggtgacgccgacgccgacgccgtctacgacgcgctcgaacgtgccttcccccagctcggcgacgccgtcgaacgggtggtggtggaccgcggggagctgaccgtccacgtgcgccgggagagcctcgtcgccgtcgggcaaaccctgcgcgacgaccccgacctgcggttcgagctgctgtcctcgctgtccggcgtggactacccggacgacgtcaccggccgtcgcctgcactcggtggcccacctgacctcgatgacgcaccgtcgccgggtccgggtcgaggtgtccgtcaccgacgccgatcccaccgtgccgagcctgacctcggtgtggcccaccgcggactggcacgagcgcgagacctacgacatgttcggcatcgtctacacgggtcatccgggcctgacccggatcatgatgccggacgactggatcgggcacccgcagcgcaaggactacccgctggggggcatccccgtcgactacaagggtgccacgatcccgccgccagacgagcgccggagctactcgtga

SEQ ID NO: 62211 - protein, 236 aa, Frankia sp. CcI3
MSDESTASADLIPGAAGVPGGPGGQRRDAFGAGDSGDTSGFGGLVTPVPILSSTARPFGDADADAVYDALERAFPQLGDAVERVVVDRGELTVHVRRESLVAVGQTLRDDPDLRFELLSSLSGVDYPDDVTGRRLHSVAHLTSMTHRRRVRVEVSVTDADPTVPSLTSVWPTADWHERETYDMFGIVYTGHPGLTRIMMPDDWIGHPQRKDYPLGGIPVDYKGATIPPPDERRSYS

SEQ ID NO: 62212 - DNA, 561 bp, Neorickettsia sennetsu str. Miyayama
  CDS (1)..(561): transl_table=11
atgactattgacacaactgaagttgatgctctaattaatgcgcctgggcggtgtgttgttaattcttcgctggagtctttggttgagcttatctcccatctgtcttcctgtggttttgagcagctaactgatatttttgggatagactacctagaacgagagaaaagaattgaagttgtataccttttgctagatttgaaacgtaatagaaggtgttgtgtgaaggtgtctgtagatccggcttctgagaaagtccctacgtgttgtggtgttttttcggttgcaaattggtttgaaagggaggtatatgatatgtatggtgtggtttttgaaggccatcctgacctccgtaggatacttaccgattacgagtttgaaggtttcccaatgctgaaagactttcctcttactggttataaagaggtaaggtacgatcttgagtcgaaggaggttgtttatgagaaagttgatctttctcaggattataggtcgtttgattctctcactccgtggaaaggagtaggtcgtccaagtgatcccttcgatggaaggaaggagtag

SEQ ID NO: 62213 - protein, 186 aa, Neorickettsia sennetsu str. Miyayama
MTIDTTEVDALINAPGRCVVNSSLESLVELISHLSSCGFEQLTDIFGIDYLEREKRIEVVYLLLDLKRNRRCCVKVSVDPASEKVPTCCGVFSVANWFEREVYDMYGVVFEGHPDLRRILTDYEFEGFPMLKDFPLTGYKEVRYDLESKEVVYEKVDLSQDYRSFDSLTPWKGVGRPSDPFDGRKE

SEQ ID NO: 62214 - DNA, 603 bp, Burkholderia xenovorans LB400
  CDS (1)..(603): transl_table=11
atggcaagcaaactcgagaccctgaaagcgaacctcgaggcggcctttggcggcctcctgcagagcactaccgaggcaatcggtgagttgacgatcgtcgtgaaggctggcgactacctcaacgttgcaacccgtctgcgtgacgaccgctcgctcggtttcgagcaatgcgtggatctgtgcggcgtcgactatcagacctacgccgacggcgcttacgacggtccgcgtttcgcggccgttctgcatttgctgtcggtgcagaacaactggcgtctgcgtctgcgcgtgttcgcaccggacgacgaagtgccgattctgccatctgtcgtcgaaatctggaactcggtcaactggtacgagcgtgaagcgttcgacctgtatggcatcgtgttcgaaggccacccggacctgcgccgcatcctgaccgactacggtttcattggtcacccgttccgcaaagatttccctgtctccggctacgtcgaaatgcgttacgacccggaagagaagcgcgtcgtctatcagcccgtgacgatcgagccgcgggaaatcacaccgcgcgtgatccgcgaagatcgctatggcggtctgaaacactaa

SEQ ID NO: 62215 - protein, 200 aa, Burkholderia xenovorans LB400
MASKLETLKANLEAAFGGLLQSTTEAIGELTIVVKAGDYLNVATRLRDDRSLGFEQCVDLCGVDYQTYADGAYDGPRFAAVLHLLSVQNNWRLRLRVFAPDDEVPILPSVVEIWNSVNWYEREAFDLYGIVFEGHPDLRRILTDYGFIGHPFRKDFPVSGYVEMRYDPEEKRVVYQPVTIEPREITPRVIREDRYGGLKH

SEQ ID NO: 62216 - DNA, 606 bp, Silicibacter sp. TM1040
  CDS (1)..(606): transl_table=11
atgatcgaagcattgcaagaccttggccaccagattgaagccaagcgccccgagtgcgtattgtcctgggatattgcccatggcgaactgaacatcgacgtaaagcccgccaacatcgcgggcctcgttgaattcctgcgcgtcgacagcgcctgccggttctccacgctggtggacattaccgcagtggactatcccgagcgcaccaagcgttttgacgtggtgtatcacctcctttcgatgtaccagaaccagcgcatccgtctgcgcgcagccgtgcgcgaagaggacatggtgccctccatcgtggatgtgcacccctccgccaactggttcgagcgcgaagtctttgacatgttcggcatcctgttcacggggcacccggacctgcgccgcctgctgacggactatggcttccgcggccacccgctgcgcaaggatttcccgaccaccggttacaccgaagtgcgctatgacgaggcgcaaaagcgcgtggtctacgagccggtgaagctggttcaggaataccgccagtttgacttcatgagcccttgggaaggtgcggaatatatcctgccgggtgacgagaaagagatcgcgaaatga

SEQ ID NO: 62217 - protein, 201 aa, Silicibacter sp. TM1040
MIEALQDLGHQIEAKRPECVLSWDIAHGELNIDVKPANIAGLVEFLRVDSACRFSTLVDITAVDYPERTKRFDVVYHLLSMYQNQRIRLRAAVREEDMVPSIVDVHPSANWFEREVFDMFGILFTGHPDLRRLLTDYGFRGHPLRKDFPTTGYTEVRYDEAQKRVVYEPVKLVQEYRQFDFMSPWEGAEYILPGDEKEIAK

SEQ ID NO: 62218 - DNA, 570 bp, Nephroselmis olivacea
  CDS (1)..(570)
atgaatgaacaatttgaacaatctattatttctatattaccgaaatgggttaaatccagtgttcgtgtagaaaatgaactgattctttcagtgtctccagaacatttagttcctcttttgttttttttacggaatcatacaaacactcaatttgagcttttagtagatgcttgtggtgttgactatccttctcgacctttacgttttgaaatggtatatcaattgttaagtgtacaatataattcacgattaagaattaaagtagctgttgatgaattcacacctattccttctgctacagaagtttatccttctgcaggatggcttgaaagagaagcttgggatatgtatggaatttttttctcgaatcatccagatttacgtcgtattttaactgattacggatttgagggacatcctcttcgaaaagattttcctttaacaggatatactgaagtacgttatgatgattcagaaaaacgagttgttatagaaccgattcaaatgactcaagagtatagatattttaacttcttaagtccgtgggataatcatactcgcaaatcataa

SEQ ID NO: 62219 - protein, 189 aa, Nephroselmis olivacea
MNEQFEQSIISILPKWVKSSVRVENELILSVSPEHLVPLLFFLRNHTNTQFELLVDACGVDYPSRPLRFEMVYQLLSVQYNSRLRIKVAVDEFTPIPSATEVYPSAGWLEREAWDMYGIFFSNHPDLRRILTDYGFEGHPLRKDFPLTGYTEVRYDDSEKRVVIEPIQMTQEYRYFNFLSPWDNHTRKS

SEQ ID NO: 62220 - DNA, 507 bp, Solibacter usitatus Ellin6076
  CDS (1)..(507): transl_table=11
atggctgccacaccctgggatagcgacctcgcccgtgagctcaaggagaggtttggcgaaggaatcagcgagacttccacctatctcggacagaatttcctggtcgcccgcccggattcggtgattccgatcctggaatacctgaagctcgaagccgacttcgattatctggtggacgtgacggcggtcgattggcccaaacgcgccgagcgcttcgacctcgtctacatcttgtatagtttctcgcgcaacgagcgcgtgcgggtcaaggcattcatcgccgacggctacaagccggagaccgccgtgggggttcacctgaccgccaactggctggagcgcgaagtcttcgacatgtttggaatcgaattcgccggtcatccggacatgcgccggattctgatgcccgaggaatggcagggctatcccctgcgcaaggattacggaatactccagcaggatgcgcgctgggtgcaggaaaacctggaaattgaaagcggccagtga

SEQ ID NO: 62221 - protein, 168 aa, Solibacter usitatus Ellin6076
MAATPWDSDLARELKERFGEGISETSTYLGQNFLVARPDSVIPILEYLKLEADFDYLVDVTAVDWPKRAERFDLVYILYSFSRNERVRVKAFIADGYKPETAVGVHLTANWLEREVFDMFGIEFAGHPDMRRILMPEEWQGYPLRKDYGILQQDARWVQENLEIESGQ

SEQ ID NO: 62222 - DNA, 609 bp, Acidovorax sp. JS42
  CDS (1)..(609): transl_table=11
atgactgctattgccattcaccccgagagcctgcgggacgtggttgcctccgctctgggtgaccgcgtgcgccagatctcggtggcgctggatgaggtgaccgtggtggtgtccgctgcgcgctatctcgaagccatgcaaatcctgcgcgatgcgcccgattgcaagttcgagcaattgattgatctgtgcggcgtcgactattctgcctatggcgccacgggctcggaaggaccgcgctacgccgtggtttcccatttgctctccgtttccctcaaccagcggttgcgcgtgaaggtgttctgctccgacgacgacttccccatcgtcgcctcggttaccgacatctggaactcggccaactggtttgagcgcgaggcattcgatctgttcggcatcgtgtttgatgggcacaacgatctgcgccgcatcctgaccgattacggattcatcggccacccgttccgcaaggacttccccttgtccggccatgtcgagatgcgctatgacgccgaccagcgtcgcgtgatctatgagcccgtgaccatcgagccgcgcgaagtgacgccgcgcgtcatccgcgaagacaagtacggaggcctgcactga

SEQ ID NO: 62223 - protein, 202 aa, Acidovorax sp. JS42
MTAIAIHPESLRDVVASALGDRVRQISVALDEVTVVVSAARYLEAMQILRDAPDCKFEQLIDLCGVDYSAYGATGSEGPRYAVVSHLLSVSLNQRLRVKVFCSDDDFPIVASVTDIWNSANWFEREAFDLFGIVFDGHNDLRRILTDYGFIGHPFRKDFPLSGHVEMRYDADQRRVIYEPVTIEPREVTPRVIREDKYGGLH

SEQ ID NO: 62224 - DNA, 609 bp, Roseovarius nubinhibens ISM
  CDS (1)..(609): transl_table=11
atgagcgaagccctgaaggaactgggcgcctatatcgaggccaaacgcagcgattgcgtgctgtcctgggaggtggtgcatggtgagctgaccgttgatgtggccctggccaatatcaccgggctggtggaattcctgcgcaacgatcagacctgccggttctcgaccctggtcgatatcacggcggtggattacccggcgcggcccaagcggttcgacgtggtctatcacttcctgagcatgtaccagaaccaccgcatccgcctgcgcgccgccgtgcgcgaagaggatatggtgccctcgatcaccgatgtgcacccctcggccaactggttcgagcgcgaagttttcgacatgttcggcatcctgttttcgggccatcccgatctgcgccgcatcctgaccgactatgggttccggggctatccgctgcgcaaggatttcccgaccacgggctataccgaagtgcgctatgacgaggcgctcaagcgcgtggtctatgagccggtgagccttgtgcaggaataccggcagttcgatttcatgtcgccctgggagggtgcggaatacatcctgcccggcgacgaaaagcaggaggaggcgaaatga

SEQ ID NO: 62225 - protein, 202 aa, Roseovarius nubinhibens ISM
MSEALKELGAYIEAKRSDCVLSWEVVHGELTVDVALANITGLVEFLRNDQTCRFSTLVDITAVDYPARPKRFDVVYHFLSMYQNHRIRLRAAVREEDMVPSITDVHPSANWFEREVFDMFGILFSGHPDLRRILTDYGFRGYPLRKDFPTTGYTEVRYDEALKRVVYEPVSLVQEYRQFDFMSPWEGAEYILPGDEKQEEAK

SEQ ID NO: 62226 - DNA, 780 bp, Erythrobacter sp. NAP1
  CDS (1)..(780): transl_table=11
atgaccgttctccattccgcccccaaattcgcctcgaacgaaggcgttcttgatgctctgagcgaaagcgtcagcgtgtggcttgaccgtgccgaggaacagcacggcgagatcattctgaccgccaagcgcgaaagcatcgccgaagtgctgcgcatccttcgcgacgatcacgcctatcagcagatgatggagatcgctggggccgattatcccgaccgcgatgagcgtttcgaagtcgtctacatgcttctgagccttaccaagaaccaccggatcatggtgaaatgctcgactgacgagacgacgcccgtccccagtgtgacttcgctgtggcccaatgcgggttggctcgagcgtgaggttttcgacctttacggtgtcgtgttcgagggcaattcggacctgcgccgcattctcaccgactacggtttcgaaggacatcctttccgcaaagacttcccgatgaccggctacactgagctgcgctattcggaagatgaaaagcgcgttgtctacgagccggtagaactgccgcaggacatgcgcaccttcgacttcctctcgccttgggaaggctcggattacgtgctccctggcgatgaaaaggctgatggtccgccgcaggtcgacaagcccaaggtaaccgaaaaacccgccgacaccggcgctggccccaaagccacggaagctgccgctgaaggcaccgacgccgttccgcccgacatgatcgaggtcgagatcggcgatgacgacgaattgaaggagggcgacgaatga

SEQ ID NO: 62227 - protein, 259 aa, Erythrobacter sp. NAP1
MTVLHSAPKFASNEGVLDALSESVSVWLDRAEEQHGEIILTAKRESIAEVLRILRDDHAYQQMMEIAGADYPDRDERFEVVYMLLSLTKNHRIMVKCSTDETTPVPSVTSLWPNAGWLEREVFDLYGVVFEGNSDLRRILTDYGFEGHPFRKDFPMTGYTELRYSEDEKRVVYEPVELPQDMRTFDFLSPWEGSDYVLPGDEKADGPPQVDKPKVTEKPADTGAGPKATEAAAEGTDAVPPDMIEVEIGDDDELKEGDE

SEQ ID NO: 62228 - DNA, 543 bp, Moritella sp. PE36
  CDS (1)..(543): transl_table=11
atgatcatgtcggggcagtttccacttaaccagctcatcgatagtttcaacggccgcatcagcatcgatccaaacgtcatcgatatgccctgtgtcgtggtcagcccgaaagacctggttgaactgtgtttgtttttgcgcgatgacgacgcgtttaaatttaattttatggctgatattggcggtattgattttcacccgaataccccgcgctatcagctggtctatcacctttactccatttcactgggctggcgattgcgcatcaaatgcccgctaaaagatccaccaaaagcaccgaccatcactcacctgtggaccaccgccaactggcatgaacgggaagcatatgacatgtttggtatcgtcttcgaaggtcaccctgacttgcgccggatctatatgtggcaagaatttgaaggctggccgatgcgcaaggattttccgctgcggggttacaaagataaatataatccgtttggcgaagaaaaaccgggcgcaacgccccccataaccaagaaccccgtcggagacatcctatga

SEQ ID NO: 62229 - protein, 180 aa, Moritella sp. PE36
MIMSGQFPLNQLIDSFNGRISIDPNVIDMPCVVVSPKDLVELCLFLRDDDAFKFNFMADIGGIDFHPNTPRYQLVYHLYSISLGWRLRIKCPLKDPPKAPTITHLWTTANWHEREAYDMFGIVFEGHPDLRRIYMWQEFEGWPMRKDFPLRGYKDKYNPFGEEKPGATPPITKNPVGDIL

SEQ ID NO: 62230 - DNA, 465 bp, Heliobacillus mobilis
  CDS (1)..(465): transl_table=11
atggcaattaatctgttagaccggtataatccggaagaattgaacgccaagctggggacaactgtggaggtcgtcggcgaaggcgtgagccgagccctagtcgtcaccaaggaaaacctcattcccgtcatggaaaagttgtgtaagagccccgaatgggcttttgatatgttatccgatatctcgtcggtcgaccgcaaggaggccggcttggaagtggtttatcaactcttttccataaagcacaagtatgacctgcgcgtaaaatcgattatccctagggatgaggcgcaggttcccacggtgacgagcatctggccgggcgctaactttatggaacgagaagtctacgacctgatgggtgtcgcttttccaggacacccgaacatgactcgattgctgctaccggaggagttcgaagggcacccgctgcgtaaagacttcaagctccaacccagagcttag

SEQ ID NO: 62231 - protein, 154 aa, Heliobacillus mobilis
MAINLLDRYNPEELNAKLGTTVEVVGEGVSRALVVTKENLIPVMEKLCKSPEWAFDMLSDISSVDRKEAGLEVVYQLFSIKHKYDLRVKSIIPRDEAQVPTVTSIWPGANFMEREVYDLMGVAFPGHPNMTRLLLPEEFEGHPLRKDFKLQPRA

SEQ ID NO: 62232 - DNA, 693 bp, Rhodothermus marinus
  CDS (1)..(693): transl_table=11
atggcggaaaacgaacgtccgaaaacgcacgaagcgctgaagttctacttcacgcccgtcgatccgccccgtggggatgagctgaacccccacgccaaggcgaccacctacgtgcccgaggtggtggaagccctgaaggagcgcttcggcgacgtgatcgaggaggtggagctgtacgcgggcgagcatacggtgcgcgtccgcgccgacaaaatcgtcgaggtatgtcgctttctgaaggaagaacagggcttcaactacctggccgacctgggcggcatcgaccgcttcaccgacgaggggcgctttgaggtgttctataacctggtttccatcgagcggcgcaagcgcatccgcctgaaggtgcgcgtcgaagaagacaacccggtggtgccttcggtgacgtccgtctaccgggcggccaactggaacgaacgtgaatgctacgacatgttcggcattcgcttcgaagggcacccggacctgcggcggatgtacatgccggaggacttcgaataccatccgctccgcaaggaatttccgctgctgggcattccgggctcattgcccctgccgccccagacgccgggcggcccgctgacctacgacccgtttgcccgggcgcacggctatgtgccgccaccgggcttcgaggagcctccggccgaagacgaggaagtctccgagcactga

SEQ ID NO: 62233 - protein, 230 aa, Rhodothermus marinus
MAENERPKTHEALKFYFTPVDPPRGDELNPHAKATTYVPEVVEALKERFGDVIEEVELYAGEHTVRVRADKIVEVCRFLKEEQGFNYLADLGGIDRFTDEGRFEVFYNLVSIERRKRIRLKVRVEEDNPVVPSVTSVYRAANWNERECYDMFGIRFEGHPDLRRMYMPEDFEYHPLRKEFPLLGIPGSLPLPPQTPGGPLTYDPFARAHGYVPPPGFEEPPAEDEEVSEH

SEQ ID NO: 62234 - DNA, 831 bp, Candida maltosa
  CDS (1)..(831)
atgatttcaagaacattactcaagagaacagttccagccagcagattattgagaagtttcaccacttccaatgtccgtttgagtgcacatgaagaagatttagtgaacgtaaacaacttaccaagaccaaaaccaaccgaaaactacgttccattaatcaacccaactgaaaaatacaaagttcaaattgaagaattgcataaattcggtacttatatcatgtcctgtttacctaaatacatccagcaattcagtgtctggaaggatgaattgaccatttacgttgccccatccgccatcagaccagtcatgtcgtacttgaaaaaccacacctcttgtcaattcaaagccgtcatggatatcactgctgccgattatccttcaagaactaatagattcgacgttgtatataacttgttgagtgacagacataactcgagaattagagtcaagacttatgccaatgaaaccagtcctgttccttcagttacaccattgtttaatggggctaattggtatgaaagggaaacttatgatttgtttggggttttctttgttggacatccggatttgagaagaatcatgactgattatgggtttgaaggtcatcctttgagaaaagatttcccaactactgggtacactgaagttagatacgatgaagaaaagaagagagtcatttatgaacctttggaattgacccaagcttggagaaatttcactgttggttcttctgtttgggaaccagttggtgaaggtaaagatttcactcctgaatcattcaaattgccaactcctcaacctgaaccagaacaagaagaaaagaaataa

SEQ ID NO: 62235 - protein, 276 aa, Candida maltosa
MISRTLLKRTVPASRLLRSFTTSNVRLSAHEEDLVNVNNLPRPKPTENYVPLINPTEKYKVQIEELHKFGTYIMSCLPKYIQQFSVWKDELTIYVAPSAIRPVMSYLKNHTSCQFKAVMDITAADYPSRTNRFDVVYNLLSDRHNSRIRVKTYANETSPVPSVTPLFNGANWYERETYDLFGVFFVGHPDLRRIMTDYGFEGHPLRKDFPTTGYTEVRYDEEKKRVIYEPLELTQAWRNFTVGSSVWEPVGEGKDFTPESFKLPTPQPEPEQEEKK

SEQ ID NO: 62236 - DNA, 606 bp, Rhizobium meliloti
  CDS (1)..(606): transl_table=11
atgagtgaagccctgaacgagcttgcctcctatctccgcgaggcgcgtggcgcgctgatcgccgatgcggaggtcaaatacggcgaactgacggtgacggcgaaagccgagaacctcatcgcgctcctgactttcctgcgcgacgacgtccagtgtggtttcgtcagcttcatcgatgtctgcggggtcgattatccgcagcgcccggaccgcttcgatgtcgtctatcatcttctctcgccgcgccagaaccagcgcgtccgcgtgaaggttgcgaccggcgagaacgaccccgtcccgtcggcgacgtcagtcttccccggcgccgattggttcgagcgcgaagcctacgacatgtatggcatcctcttcaccggtcacccggatctgaggcgcatcctaacggactacggcttcgaaggctatccgctgcgcaaggacttcccgctgaccggtttcgtcgaggtgcgttacgacaacgaagccaagcgcgtcgtctacgaacccgtcgagctgaagcaggaattccgcaatttcgactttctttcgccctgggaaggcacggaatacgtgctgcccggcgacgaaaaggcgagaccacgctga

SEQ ID NO: 62237 - protein, 201 aa, Rhizobium meliloti
MSEALNELASYLREARGALIADAEVKYGELTVTAKAENLIALLTFLRDDVQCGFVSFIDVCGVDYPQRPDRFDVVYHLLSPRQNQRVRVKVATGENDPVPSATSVFPGADWFEREAYDMYGILFTGHPDLRRILTDYGFEGYPLRKDFPLTGFVEVRYDNEAKRVVYEPVELKQEFRNFDFLSPWEGTEYVLPGDEKARPR

SEQ ID NO: 62238 - DNA, 624 bp, Rickettsia felis
  CDS (1)..(624): transl_table=11
atgacgctagacaaactcattgaaaaacttgctgctaaatctagcattttaataacacctattatagttaaggattatttagcttatcaagttgaaccaaactttctattaccgtttttaaaagctttaaaagaatcggaagaattacgctttactgtacttactgatttatttggaactgattttcctgaaagagataaaagatttgaagtaatttacaacttactaagcctaaaattaaataagcgtcttataataaaagtatatatatctgaaaaagaaactataccttcggcaatgaacatatttaatgcctcttgctggtatgagcgtgaagtttacgatatgtacggtgtaaattttgacggcaatgacgataaaagacggatacttaccgattatgaatttgaggggcatcctttgcgtaaagatttcccgttaaccggttatacacaggttaaatatgatgagaaactaaagaaagtggcttatgagccagtcgatttagacatagaatatcgtgagtttgattttagctctcactggcatagcccgagttatgtattacccggggatgaaaaggcaactgatgtcattcctgcgaaagcaggaatccagaaatag

SEQ ID NO: 62239 - protein, 207 aa, Rickettsia felis
MTLDKLIEKLAAKSSILITPIIVKDYLAYQVEPNFLLPFLKALKESEELRFTVLTDLFGTDFPERDKRFEVIYNLLSLKLNKRLIIKVYISEKETIPSAMNIFNASCWYEREVYDMYGVNFDGNDDKRRILTDYEFEGHPLRKDFPLTGYTQVKYDEKLKKVAYEPVDLDIEYREFDFSSHWHSPSYVLPGDEKATDVIPAKAGIQK

SEQ ID NO: 62240 - DNA, 21 bp, Artificial sequence
  primer
atgcggcttgagcgcgtcctg

SEQ ID NO: 62241 - DNA, 25 bp, Artificial sequence
  primer
ttatcctttaacctcccgggccttc

SEQ ID NO: 62242 - protein, 147 aa, Artificial sequence
  consensus sequence
  Variant (2)..(2): Xaa in position 2 is any amino acid
  Variant (3)..(8): Xaa in position 3 to 8 is any or no amino acid
  Variant (10)..(12): Xaa in position 10 to 12 is any amino acid
  Variant (13)..(13): Xaa in position 13 is any or no amino acid
  Variant (15)..(18): Xaa in position 15 to 18 is any amino acid
  Variant (21)..(23): Xaa in position 21 to 23 is any amino acid
  Variant (24)..(55): Xaa in position 24 to 55 is any or no amino acid
  Variant (57)..(59): Xaa in position 57 to 59 is any amino acid
  Variant (61)..(62): Xaa in position 61 to 62 is any amino acid
  Variant (64)..(64): Xaa in position 64 is any amino acid
  Variant (66)..(68): Xaa in position 66 to 68 is any amino acid
  Variant (69)..(78): Xaa in position 69 to 78 is any or no amino acid
  Variant (80)..(80): Xaa in position 80 is any amino acid
  Variant (82)..(93): Xaa in position 82 to 93 is any amino acid
  Variant (94)..(95): Xaa in position 94 to 95 is any or no amino acid
  Variant (97)..(103): Xaa in position 97 to 103 is any amino acid
  Variant (105)..(105): Xaa in position 105 is any amino acid
  Variant (107)..(107): Xaa in position 107 is any amino acid
  Variant (111)..(112): Xaa in position 111 to 112 is any amino acid
  Variant (114)..(115): Xaa in position 114 to 115 is any amino acid
  Variant (117)..(118): Xaa in position 117 to 118 is any amino acid
  Variant (120)..(120): Xaa in position 120 is any amino acid
  Variant (130)..(135): Xaa in position 130 to 135 is any amino acid
  Variant (139)..(139): Xaa in position 139 is any amino acid
  Variant (143)..(143): Xaa in position 143 is any amino acid
  Variant (145)..(146): Xaa in position 145 to 146 is any amino acid
LXXXXXXXFXXXXDXXXXDYXXXXXXXXXXXXXXXXXXXXXXXXXXXXXXXXXXXRXXXVXXLXSXXXXXXXXXXXXXRXRXXXXXXXXXXXXXXSXXXXXXXAXWXEREXXDXXGXXFXGHPDLRRILXXXXXXGHPXRKDXPXXG

SEQ ID NO: 62243 - protein, 69 aa, Artificial sequence
  protein pattern
  Variant (2)..(27): Xaa in position 2 to 27 is any amino acid
  Variant (28)..(29): Xaa in position 28 to 29 is any or no amino acid
  Variant (33)..(33): Xaa in position 33 is Ala, Thr or Val
  Variant (34)..(34): Xaa in position 34 is Phe, Trp or Tyr
  Variant (36)..(36): Xaa in position 36 is Phe, Leu or Met
  Variant (37)..(37): Xaa in position 37 is any amino acid
  Variant (39)..(39): Xaa in position 39 is Ile, Leu or Val
  Variant (40)..(40): Xaa in position 40 is any amino acid
  Variant (42)..(42): Xaa in position 42 is any amino acid
  Variant (43)..(43): Xaa in position 43 is Gly or Asn
  Variant (44)..(44): Xaa in position 44 is any amino acid
  Variant (45)..(45): Xaa in position 45 is Asp, Asn, Pro or Ser
  Variant (47)..(47): Xaa in position 47 is any amino acid
  Variant (49)..(49): Xaa in position 49 is Lys or Arg
  Variant (50)..(50): Xaa in position 50 is Ile, Leu or Val
  Variant (51)..(54): Xaa in position 51 to 54 is any amino acid
  Variant (55)..(55): Xaa in position 55 is Asp, Glu or Gly
  Variant (56)..(57): Xaa in position 56 to 57 is any amino acid
  Variant (59)..(59): Xaa in position 59 is Phe, His, Trp or Tyr
  Variant (61)..(61): Xaa in position 61 is Phe, Leu or Met
  Variant (62)..(62): Xaa in position 62 is any amino acid
  Variant (65)..(65): Xaa in position 65 is Phe or Tyr
  Variant (66)..(66): Xaa in position 66 is Gly or Pro
  Variant (67)..(68): Xaa in position 67 to 68 is any amino acid
  Variant (69)..(69): Xaa in position 69 is Glu, Gly or Gln
RXXXXXXXXXXXXXXXXXXXXXXXXXXXXEREXXDXXGXXFXXXXDXRXXXXXXXXXGXPXXKDXXXXX

SEQ ID NO: 62244 - DNA, 696 bp, Oryza sativa; identical to SEQ ID NO: 251
  CDS (1)..(696)

SEQ ID NO: 62245 - protein, 231 aa, Oryza sativa; identical to SEQ ID NO: 252

SEQ ID NO: 62246 - DNA, 1482 bp, Zea mays subsp. mays
  CDS (262)..(1041)
aagctcaggcaagcggcagcaaggcgttggcaatcccagtccagtcgtcggagcactcgcaatttcccgtcacagctggccaccgccccaccctcacggcctcacctcctcccgctacacgcacgcgcccacctacccaaaacgaccgcgcgcggcgccctcctcccgcggtgccaccaccaccaccacctcgtcggaccatcaccacaccgatcggcagctaagcagctcccgcctccagcaccgcgagcggcgatggcaatggacgcggccgtggccgtgaagagcggcggtggcggcgccggatcgaccggggtcaccgcggcggcctcgcagtccccgcaggcggcgactaacggcggcgagcggcggtcccggttccagcgcatctgcgtgtactgcggcagcgccaagggccggaagcctagctaccaggacgccgccgtcgagctgggcaaggagctggtggagaggggcatagacctggtctacgggggcggttccatcggcctcatggggctggtctcgcatgcagttcatgacggagggcgccatgtgattggggtcatcccgagatccttgatgcccagagaggtcactggtgagcctgttggggaagtaagggccgtctccggcatgcacgagaggaaggccgagatggcccgcttcgccgatgccttcatagcgttacctggtggctacgggactctggaagagctgctggaggtcatcacctgggcgcaactaggaatccataagaagccggtcgggcttctgaacgtggacgggttctacgacccgctgctgtccttcatcgacatggccgtcaacgaagggttcatcaaggaggacgcccgccgcatcgtcatctcggctcccacggccaaggagctggtcctcaagcttgaggagtacgttccggagtacgaggtcggcctggtgtgggaggaccagatgccgccgtccgccgtcgccgtcgccgccgccgcgcacgggttcgccccggagctggtggagcccgggatcacctcctcgtcctgatctggacggggacgtcggccgggcctgcctacctacgctaaccccagattctgaccgacggccggcccggcggcaccaagtagaaaggctatctatactagtaccacctaattaataccgtaatctactactactactactaacaaagaagattgttgggatggaggatgacagctagctagcgtctgctcagttagcagcatatcgtcgttagccgcgcagtgtgcagctgcgtcagctctgccattgctgctcctagcttttgggcttttgtgttgtgctctcctagaagtagggaggaaggaaggaaggcatgctatgtatattccccgggtatgtggttgtggtctagcgattggatttgtctcgctcgcagcctcgcacgtgtgatggatggatcgtggaacaaaagctagttgcaatgcaaaagcgattcattcc

SEQ ID NO: 62247 - protein, 259 aa, Zea mays subsp. mays
MDAAVAVKSGGGGAGSTGVTAAASQSPQAATNGGERRSRFQRICVYCGSAKGRKPSYQDAAVELGKELVERGIDLVYGGGSIGLMGLVSHAVHDGGRHVIGVIPRSLMPREVTGEPVGEVRAVSGMHERKAEMARFADAFIALPGGYGTLEELLEVITWAQLGIHKKPVGLLNVDGFYDPLLSFIDMAVNEGFIKEDARRIVISAPTAKELVLKLEEYVPEYEVGLVWEDQMPPSAVAVAAAAHGFAPELVEPGITSSS

SEQ ID NO: 62248 - DNA, 1006 bp, Oryza sativa; identical to SEQ ID NO: 71
  CDS (84)..(719)

SEQ ID NO: 62249 - protein, 211 aa, Oryza sativa; identical to SEQ ID NO: 72

SEQ ID NO: 62250 - DNA, 1043 bp, Glycine max; identical to SEQ ID NO: 15193
  CDS (150)..(797)

SEQ ID NO: 62251 - protein, 215 aa, Glycine max; identical to SEQ ID NO: 15194

SEQ ID NO: 62252 - DNA, 1234 bp, Glycine max; identical to SEQ ID NO: 15197
  CDS (283)..(942)

SEQ ID NO: 62253 - protein, 219 aa, Glycine max; identical to SEQ ID NO: 15198

SEQ ID NO: 62254 - DNA, 1170 bp, Oryza sativa
  CDS (1)..(729)
atggcaatggaggctgcggcggagaggagcgccggagcaggggcggcggcgacggcggcgccggagagcggtggcggtggtgcaggggagaggcggtcgcggttcaggcggatctgcgtgtactgcggcagcgccaaggggaggaaggccagctaccaggacgccgccgtcgagctcggcaaggaactggtcgagaggggcatagacctggtctacggcggtggctccatcggcctcatgggcctcgtctcccacgctgttcacgacggtggtcgggatctcggcggggtcatcccgaaatccttgatgcccagagaggtcactggtgagcctgttggtgaagttagagcggtctctggcatgcacgagaggaaggctgaaatggcccggtttgctgatgcgttcattgcactgcctggcggctacgggactcttgaggagttgcttgaggtcatcacctgggcccaactaggaatccacaagaagccggttggccttctgaatgtcgacgggttttatgatccttttctatccttcattgacatggctgtcagcgaaggattcatagcggaggatgcgcggcgcattatcatctcggctccaactgccagggagctagttctgaagcttgaggagtatgttcccgagtacgaggtcggcttggtttgggacgatcagatgccgcacagcttcgcgcctgacctcgagaccaggatcacctcatcctgatctctcggctctggccctattcttacccaagcttctaaccggcggacgacgataccttcttctcgtgccgaagccgaatatgatcctggaggaagtttgtttttctcagccaggggaaagtaacatccactaaccgaaaagatttagccaaaggcggcccctagctcgggtctgccgatttgttgttttggcaaaatatgtcaattgggacagtatttagcattagcagtgcctcctcaatgctgttcttttggcccccctccctcctcactagctagaagaaggaatatatgtatatgcaagtaatattagtagcatctgtctatcttgatcttctccatatgcctgtgcaatctgtgtccccttgtttgatccgattctgcactgaaattgatcatgcacgtgtggatggatggattcgcattcagaactgattcctgg

SEQ ID NO: 62255 - protein, 242 aa, Oryza sativa
MAMEAAAERSAGAGAAATAAPESGGGGAGERRSRFRRICVYCGSAKGRKASYQDAAVELGKELVERGIDLVYGGGSIGLMGLVSHAVHDGGRDLGGVIPKSLMPREVTGEPVGEVRAVSGMHERKAEMARFADAFIALPGGYGTLEELLEVITWAQLGIHKKPVGLLNVDGFYDPFLSFIDMAVSEGFIAEDARRIIISAPTARELVLKLEEYVPEYEVGLVWDDQMPHSFAPDLETRITSS

SEQ ID NO: 62256 - DNA, 1128 bp, Sorghum bicolor; identical to SEQ ID NO: 34309
  CDS (215)..(910)

SEQ ID NO: 62257 - protein, 231 aa, Sorghum bicolor; identical to SEQ ID NO: 34310

SEQ ID NO: 62258 - DNA, 1385 bp, Sorghum bicolor; identical to SEQ ID NO: 75
  CDS (250)..(957)

SEQ ID NO: 62259 - protein, 235 aa, Sorghum bicolor; identical to SEQ ID NO: 76

SEQ ID NO: 62260 - DNA, 1172 bp, Zea mays; identical to SEQ ID NO: 77
  CDS (221)..(847)

SEQ ID NO: 62261 - protein, 208 aa, Zea mays; identical to SEQ ID NO: 78

SEQ ID NO: 62262 - DNA, 1482 bp, Zea mays; identical to SEQ ID NO: 62246
  CDS (256)..(1041)

SEQ ID NO: 62263 - protein, 261 aa, Zea mays
MAMDAAVAVKSGGGGAGSTGVTAAASQSPQAATNGGERRSRFQRICVYCGSAKGRKPSYQDAAVELGKELVERGIDLVYGGGSIGLMGLVSHAVHDGGRHVIGVIPRSLMPREVTGEPVGEVRAVSGMHERKAEMARFADAFIALPGGYGTLEELLEVITWAQLGIHKKPVGLLNVDGFYDPLLSFIDMAVNEGFIKEDARRIVISAPTAKELVLKLEEYVPEYEVGLVWEDQMPPSAVAVAAAAHGFAPELVEPGITSSS

SEQ ID NO: 62264 - DNA, 1333 bp, Zea mays; identical to SEQ ID NO: 79
  CDS (131)..(829)

SEQ ID NO: 62265 - protein, 232 aa, Zea mays; identical to SEQ ID NO: 80

SEQ ID NO: 62266 - DNA, 957 bp, Brassica napus; identical to SEQ ID NO: 81
  CDS (68)..(742)

SEQ ID NO: 62267 - protein, 224 aa, Brassica napus; identical to SEQ ID NO: 82

SEQ ID NO: 62268 - DNA, 969 bp, Brassica napus; identical to SEQ ID NO: 83
  CDS (49)..(696)

SEQ ID NO: 62269 - protein, 215 aa, Brassica napus; identical to SEQ ID NO: 84

SEQ ID NO: 62270 - DNA, 891 bp, Brassica napus; identical to SEQ ID NO: 85
  CDS (78)..(728)

SEQ ID NO: 62271 - protein, 216 aa, Brassica napus; identical to SEQ ID NO: 86

SEQ ID NO: 62272 - DNA, 1042 bp, Glycine max; identical to SEQ ID NO: 87
  CDS (60)..(725)

SEQ ID NO: 62273 - protein, 221 aa, Glycine max; identical to SEQ ID NO: 88

SEQ ID NO: 62274 - DNA, 941 bp, Glycine max; identical to SEQ ID NO: 15209
  CDS (29)..(730)

SEQ ID NO: 62275 - protein, 233 aa, Glycine max; identical to SEQ ID NO: 70

SEQ ID NO: 62276 - DNA, 849 bp, Brassica napus; identical to SEQ ID NO: 89
  CDS (64)..(705)

SEQ ID NO: 62277 - protein, 213 aa, Brassica napus; identical to SEQ ID NO: 90

SEQ ID NO: 62278 - DNA, 1176 bp, Glycine max; identical to SEQ ID NO: 91
  CDS (106)..(747)

SEQ ID NO: 62279 - protein, 213 aa, Glycine max; identical to SEQ ID NO: 92

SEQ ID NO: 62280 - DNA, 799 bp, Triticum aestivum; identical to SEQ ID NO: 93
  CDS (31)..(735)

SEQ ID NO: 62281 - protein, 234 aa, Triticum aestivum; identical to SEQ ID NO: 94

SEQ ID NO: 62282 - DNA, 873 bp, Triticum aestivum; identical to SEQ ID NO: 95
  CDS (25)..(645)

SEQ ID NO: 62283 - protein, 206 aa, Triticum aestivum; identical to SEQ ID NO: 96

SEQ ID NO: 62284 - DNA, 930 bp, Hordeum vulgare; identical to SEQ ID NO: 97
  CDS (34)..(708)

SEQ ID NO: 62285 - protein, 224 aa, Hordeum vulgare; identical to SEQ ID NO: 98

SEQ ID NO: 62286 - DNA, 675 bp, Hordeum vulgare; identical to SEQ ID NO: 101
  CDS (1)..(675)

SEQ ID NO: 62287 - protein, 224 aa, Hordeum vulgare; identical to SEQ ID NO: 102

SEQ ID NO: 62288 - DNA, 717 bp, Zea mays; identical to SEQ ID NO: 103
  CDS (1)..(717)

SEQ ID NO: 62289 - protein, 238 aa, Zea mays; identical to SEQ ID NO: 104

SEQ ID NO: 62290 - DNA, 723 bp, Oryza sativa (japonica cultivar-group)
  CDS (1)..(723)
ttggttggtcccgtgcaggtgagggaggagatagcgaggtgcttcgatctcgtgcgccgcctcggccgtggcgccgtctacctcggctcctccagggtgccgcccacccatccccattacctccatgccgccgagctctcaagggagatagctaggctgctggactgcaccacatggtccggagctggtccaggtttcatggatgctgccacccaaggcgctcttgaggcgggcaaaccggtcggtggcttcaagattggcaaggaggcgggtgaatggacaacctccaattttcatccttacctgccatcagagtcatatctcacctgcaggttcttctctgcaaggaagcatgggttagttgatgccgcggtgcggaactgccctaccgatagaactgccatcattgcattacctggtgggatagggacgctggatgagcttttcgagatgatggcgctaattcaactggagcggatcggttccacgcttccagtcccattcttgctcctcaattatgattcttactactccaaactattggactttctgaatgactgcgaggagtggggaaccgttgctccgggagaagtagcatctctttggaaggtttgcaatgggaatcatgaagctttggagtacctggcacagttctacaatgtacctcttgctgaaagaaattactgcatatcaccacagttgaagcagcaggcaacttcatag

SEQ ID NO: 62291 - protein, 240 aa, Oryza sativa (japonica cultivar-group)
LVGPVQVREEIARCFDLVRRLGRGAVYLGSSRVPPTHPHYLHAAELSREIARLLDCTTWSGAGPGFMDAATQGALEAGKPVGGFKIGKEAGEWTTSNFHPYLPSESYLTCRFFSARKHGLVDAAVRNCPTDRTAIIALPGGIGTLDELFEMMALIQLERIGSTLPVPFLLLNYDSYYSKLLDFLNDCEEWGTVAPGEVASLWKVCNGNHEALEYLAQFYNVPLAERNYCISPQLKQQATS

SEQ ID NO: 62292 - DNA, 693 bp, Oryza sativa (japonica cultivar-group); identical to SEQ ID NO: 107
  CDS (1)..(693)

SEQ ID NO: 62293 - protein, 230 aa, Oryza sativa (japonica cultivar-group); identical to SEQ ID NO: 108

SEQ ID NO: 62294 - DNA, 1062 bp, Oryza sativa (japonica cultivar-group); identical to SEQ ID NO: 109
  CDS (1)..(1062)

SEQ ID NO: 62295 - protein, 353 aa, Oryza sativa (japonica cultivar-group); identical to SEQ ID NO: 110

SEQ ID NO: 62296 - DNA, 642 bp, Arabidopsis thaliana; identical to SEQ ID NO: 111
  CDS (1)..(642)

SEQ ID NO: 62297 - protein, 213 aa, Arabidopsis thaliana; identical to SEQ ID NO: 112

SEQ ID NO: 62298 - DNA, 648 bp, Arabidopsis thaliana; identical to SEQ ID NO: 113
  CDS (1)..(648)

SEQ ID NO: 62299 - protein, 215 aa, Arabidopsis thaliana; identical to SEQ ID NO: 114

SEQ ID NO: 62300 - DNA, 648 bp, Arabidopsis thaliana; identical to SEQ ID NO: 115
  CDS (1)..(648)

SEQ ID NO: 62301 - protein, 215 aa, Arabidopsis thaliana; identical to SEQ ID NO: 116

SEQ ID NO: 62302 - DNA, 690 bp, Arabidopsis thaliana
  CDS (1)..(690)
atggagaatgaagagggaaaaagagagatgacgaagaaacaaagttcaaggtttaagagcatttgcgtcttttgtgggagtagcaatgggaacaaagctagttatcaagatgcagccattgatttggccaaggaactggtgatgaggaagattgatcttgtttatggtggaggaagcataggtttaatgggtttggtgtctcaagctgttcatgatggtggtcgtcataataataacaataatggtaatgatgatgctcttttttgtcactctgtcaatgtctcgcaaacaaactcaaagttaactggagaaacagtaggagaagtgaaggaagttgcagacatgcatcagagaaaagctgtgatggctaagcattctgatgctttcattactttgcctggtggctatggtacactagaggagctacttgaagtgataacttgggcacaacttggtatccatgataaaccggtcggtttattaaacgttgatggatattacgatgcattgctgttattcatcgacaaagccgtcgaagagggatttattcttccaaccgctcgacatattatcgtatctgcaccaaccgcaagagagttgtttataaaattggagttgaatatggtatcactagatcgaatatctaaacatgcattatctttgtttcaagttatgtctaaagctggttag

SEQ ID NO: 62303 - protein, 229 aa, Arabidopsis thaliana
MENEEGKREMTKKQSSRFKSICVFCGSSNGNKASYQDAAIDLAKELVMRKIDLVYGGGSIGLMGLVSQAVHDGGRHNNNNNGNDDALFCHSVNVSQTNSKLTGETVGEVKEVADMHQRKAVMAKHSDAFITLPGGYGTLEELLEVITWAQLGIHDKPVGLLNVDGYYDALLLFIDKAVEEGFILPTARHIIVSAPTARELFIKLELNMVSLDRISKHALSLFQVMSKAG

SEQ ID NO: 62304 - DNA, 654 bp, Arabidopsis thaliana; identical to SEQ ID NO: 117
  CDS (1)..(654)

SEQ ID NO: 62305 - protein, 217 aa, Arabidopsis thaliana; identical to SEQ ID NO: 118

SEQ ID NO: 62306 - DNA, 651 bp, Agrobacterium tumefaciens str. C58; identical to SEQ ID NO: 121
  CDS (1)..(651): transl_table=11

SEQ ID NO: 62307 - protein, 216 aa, Agrobacterium tumefaciens str. C58; identical to SEQ ID NO: 122

SEQ ID NO: 62308 - DNA, 585 bp, Ralstonia solanacearum GMI1000; identical to SEQ ID NO: 123
  CDS (1)..(585): transl_table=11

SEQ ID NO: 62309 - protein, 194 aa, Ralstonia solanacearum GMI1000; identical to SEQ ID NO: 124

SEQ ID NO: 62310 - DNA, 600 bp, Agrobacterium tumefaciens str. C58; identical to SEQ ID NO: 125
  CDS (1)..(600): transl_table=11

SEQ ID NO: 62311 - protein, 199 aa, Agrobacterium tumefaciens str. C58; identical to SEQ ID NO: 126

SEQ ID NO: 62312 - DNA, 642 bp, Arabidopsis thaliana; identical to SEQ ID NO: 127
  CDS (1)..(642)

SEQ ID NO: 62313 - protein, 213 aa, Arabidopsis thaliana; identical to SEQ ID NO: 128

SEQ ID NO: 62314 - DNA, 687 bp, Arabidopsis thaliana; identical to SEQ ID NO: 129
  CDS (1)..(687)

SEQ ID NO: 62315 - protein, 228 aa, Arabidopsis thaliana; identical to SEQ ID NO: 130

SEQ ID NO: 62316 - DNA, 588 bp, Corynebacterium glutamicum ATCC 13032; identical to SEQ ID NO: 131
  CDS (1)..(588): transl_table=11

SEQ ID NO: 62317 - protein, 195 aa, Corynebacterium glutamicum ATCC 13032; identical to SEQ ID NO: 132

SEQ ID NO: 62318 - DNA, 570 bp, Oceanobacillus iheyensis HTE831; identical to SEQ ID NO: 137
  CDS (1)..(570): transl_table=11

SEQ ID NO: 62319 - protein, 189 aa, Oceanobacillus iheyensis HTE831; identical to SEQ ID NO: 138

SEQ ID NO: 62320 - DNA, 1119 bp, Pseudomonas putida KT2440
  CDS (1)..(1119): transl_table=11
atgccttaccattcgaatgaactgctgttcagccacttccgcgacaacaatatcgacctgagcaatatcgaagcacaactgcaactggttgcccccaacagccccaacctgccgctctaccgcgacatgatgctgaccatcctgcgcatggcccatgacgacagcgaccgctggagcgccaagatcaccctgcaggccctgcgcgaactggaccagtcgttccggaccctgcagcgctacaaggaccgacgcaaagtgaccgtgttcggctcggcacgcaccccgctggagcatccgatgtacgccctggcccgcgagctgggcgccactctggcgcgctccgacctgatggttatcaccggcgccggcggcggcatcatggcggccgcccacgaaggcgccggcagcgagcacagcctgggcttcaacatcaccttacccttcgaacaacatgccaacccgacggtgaacggtaccgacaaattactgccgttccactttttcttcatccgcaagctgttcttcgtcaaggaggccgacggcctggtgctgtgccctggcggcttcggcaccctggatgaagcgctggaggtactgaccctgatccagaccggcaagagcccactggtgccggtggtgctactggattcgccgggcgggagcttctggcacgactgcctggacttcatcagccgccagttggaagaaaaccgctacatcctgcccagcgacctgaagctggtgcgcctggtgcacagcgctgacgaggcggttgaggaaatcaaccagttctacagcaactaccactccagccgctggctgaagagccagttcgtgatccgcatgcaccatgcgctcagcgaggcggcgttgtatgacattcaggaagggtttgccgatttgcgcctgagtggcaaatatcatcagcaagcggatagcagtgccgagcacgaagttggcaattacagccacctgacccgcctctcattcgccttcaacggccgggatcagggccgcttgcgtgagctggtggatttcatcaacctgccggagaactgggccaagccacaacccatgcataccacgcagagggccaggcaggcgctgaaagtgagttga

SEQ ID NO: 62321 - protein, 372 aa, Pseudomonas putida KT2440
MPYHSNELLFSHFRDNNIDLSNIEAQLQLVAPNSPNLPLYRDMMLTILRMAHDDSDRWSAKITLQALRELDQSFRTLQRYKDRRKVTVFGSARTPLEHPMYALARELGATLARSDLMVITGAGGGIMAAAHEGAGSEHSLGFNITLPFEQHANPTVNGTDKLLPFHFFFIRKLFFVKEADGLVLCPGGFGTLDEALEVLTLIQTGKSPLVPVVLLDSPGGSFWHDCLDFISRQLEENRYILPSDLKLVRLVHSADEAVEEINQFYSNYHSSRWLKSQFVIRMHHALSEAALYDIQEGFADLRLSGKYHQQADSSAEHEVGNYSHLTRLSFAFNGRDQGRLRELVDFINLPENWAKPQPMHTTQRARQALKVS

SEQ ID NO: 62322 - DNA, 588 bp, Pseudomonas putida KT2440; identical to SEQ ID NO: 139
  CDS (1)..(588): transl_table=11

SEQ ID NO: 62323 - protein, 195 aa, Pseudomonas putida KT2440; identical to SEQ ID NO: 140

SEQ ID NO: 62324 - DNA, 579 bp, Bacillus cereus ATCC 14579; identical to SEQ ID NO: 143
  CDS (1)..(579): transl_table=11

SEQ ID NO: 62325 - protein, 192 aa, Bacillus cereus ATCC 14579; identical to SEQ ID NO: 144

SEQ ID NO: 62326 - DNA, 588 bp, Bordetella pertussis Tohama I; identical to SEQ ID NO: 15269
  CDS (1)..(588): transl_table=11

SEQ ID NO: 62327 - protein, 195 aa, Bordetella pertussis Tohama I; identical to SEQ ID NO: 15270

SEQ ID NO: 62328 - DNA, 627 bp, Bordetella parapertussis 12822; identical to SEQ ID NO: 15271
  CDS (1)..(627): transl_table=11

SEQ ID NO: 62329 - protein, 208 aa, Bordetella parapertussis 12822; identical to SEQ ID NO: 15272

SEQ ID NO: 62330 - DNA, 591 bp, Geobacter sulfurreducens PCA; identical to SEQ ID NO: 151
  CDS (1)..(591): transl_table=11

SEQ ID NO: 62331 - protein, 196 aa, Geobacter sulfurreducens PCA; identical to SEQ ID NO: 152

SEQ ID NO: 62332 - DNA, 579 bp, Bacillus cereus ATCC 10987; identical to SEQ ID NO: 153
  CDS (1)..(579): transl_table=11

SEQ ID NO: 62333 - protein, 192 aa, Bacillus cereus ATCC 10987; identical to SEQ ID NO: 154

SEQ ID NO: 62334 - DNA, 798 bp, Magnaporthe grisea 70-15; identical to SEQ ID NO: 155
  CDS (1)..(798)

SEQ ID NO: 62335 - protein, 265 aa, Magnaporthe grisea 70-15; identical to SEQ ID NO: 156

SEQ ID NO: 62336 - DNA, 723 bp, Gibberella zeae PH-1; identical to SEQ ID NO: 157
  CDS (1)..(723)

SEQ ID NO: 62337 - protein, 240 aa, Gibberella zeae PH-1; identical to SEQ ID NO: 158

SEQ ID NO: 62338 - DNA, 669 bp, Candida glabrata CBS 138; identical to SEQ ID NO: 159
  CDS (1)..(669)

SEQ ID NO: 62339 - protein, 222 aa, Candida glabrata CBS 138; identical to SEQ ID NO: 160

SEQ ID NO: 62340 - DNA, 696 bp, Debaryomyces hansenii CBS767; identical to SEQ ID NO: 161
  CDS (1)..(696)

SEQ ID NO: 62341 - protein, 231 aa, Debaryomyces hansenii CBS767; identical to SEQ ID NO: 162

SEQ ID NO: 62342 - DNA, 636 bp, Yarrowia lipolytica CLIB122; identical to SEQ ID NO: 163
  CDS (1)..(636)

SEQ ID NO: 62343 - protein, 211 aa, Yarrowia lipolytica CLIB122; identical to SEQ ID NO: 164

SEQ ID NO: 62344 - DNA, 744 bp, Aspergillus nidulans FGSC A4; identical to SEQ ID NO: 165
  CDS (1)..(744)

SEQ ID NO: 62345 - protein, 247 aa, Aspergillus nidulans FGSC A4; identical to SEQ ID NO: 166

SEQ ID NO: 62346 - DNA, 711 bp, Aspergillus nidulans FGSC A4; identical to SEQ ID NO: 167
  CDS (1)..(711)

SEQ ID NO: 62347 - protein, 236 aa, Aspergillus nidulans FGSC A4; identical to SEQ ID NO: 168

SEQ ID NO: 62348 - DNA, 669 bp, Candida albicans SC5314; identical to SEQ ID NO: 169
  CDS (1)..(669): transl_table=12

SEQ ID NO: 62349 - protein, 222 aa, Candida albicans SC5314; identical to SEQ ID NO: 170

SEQ ID NO: 62350 - DNA, 1668 bp, Ustilago maydis 521; identical to SEQ ID NO: 15301
  CDS (1)..(1668)

SEQ ID NO: 62351 - protein, 555 aa, Ustilago maydis 521; identical to SEQ ID NO: 15302

SEQ ID NO: 62352 - DNA, 597 bp, Herminiimonas arsenicoxydans; identical to SEQ ID NO: 171
  CDS (1)..(597): transl_table=11

SEQ ID NO: 62353 - protein, 198 aa, Herminiimonas arsenicoxydans; identical to SEQ ID NO: 172

SEQ ID NO: 62354 - DNA, 582 bp, Burkholderia vietnamiensis G4; identical to SEQ ID NO: 173
  CDS (1)..(582): transl_table=11

SEQ ID NO: 62355 - protein, 193 aa, Burkholderia vietnamiensis G4; identical to SEQ ID NO: 174

SEQ ID NO: 62356 - DNA, 603 bp, Bradyrhizobium sp. ORS278; identical to SEQ ID NO: 34700
  CDS (1)..(603): transl_table=11

SEQ ID NO: 62357 - protein, 200 aa, Bradyrhizobium sp. ORS278; identical to SEQ ID NO: 34701

SEQ ID NO: 62358 - DNA, 579 bp, Bacillus thuringiensis serovar konkukian str. 97-27; identical to SEQ ID NO: 177
  CDS (1)..(579): transl_table=11

SEQ ID NO: 62359 - protein, 192 aa, Bacillus thuringiensis serovar konkukian str. 97-27; identical to SEQ ID NO: 178

SEQ ID NO: 62360 - DNA, 600 bp, Acinetobacter sp. ADP1; identical to SEQ ID NO: 181
  CDS (1)..(600): transl_table=11

SEQ ID NO: 62361 - protein, 199 aa, Acinetobacter sp. ADP1; identical to SEQ ID NO: 182

SEQ ID NO: 62362 - DNA, 588 bp, Methylococcus capsulatus str. Bath; identical to SEQ ID NO: 185
  CDS (1)..(588): transl_table=11

SEQ ID NO: 62363 - protein, 195 aa, Methylococcus capsulatus str. Bath; identical to SEQ ID NO: 186

SEQ ID NO: 62364 - DNA, 582 bp, Bacillus clausii KSM-K16; identical to SEQ ID NO: 187
  CDS (1)..(582): transl_table=11

SEQ ID NO: 62365 - protein, 193 aa, Bacillus clausii KSM-K16; identical to SEQ ID NO: 188

SEQ ID NO: 62366 - DNA, 588 bp, Pseudomonas fluorescens Pf-5; identical to SEQ ID NO: 15337
  CDS (1)..(588): transl_table=11

SEQ ID NO: 62367 - protein, 195 aa, Pseudomonas fluorescens Pf-5; identical to SEQ ID NO: 15338

SEQ ID NO: 62368 - DNA, 600 bp, Dechloromonas aromatica RCB; identical to SEQ ID NO: 189
  CDS (1)..(600): transl_table=11

SEQ ID NO: 62369 - protein, 199 aa, Dechloromonas aromatica RCB; identical to SEQ ID NO: 190

SEQ ID NO: 62370 - DNA, 585 bp, Ralstonia eutropha JMP134; identical to SEQ ID NO: 191
  CDS (1)..(585): transl_table=11

SEQ ID NO: 62371 - protein, 194 aa, Ralstonia eutropha JMP134; identical to SEQ ID NO: 192

SEQ ID NO: 62372 - DNA, 588 bp, Pseudomonas fluorescens PfO-1; identical to SEQ ID NO: 193
  CDS (1)..(588): transl_table=11

SEQ ID NO: 62373 - protein, 195 aa, Pseudomonas fluorescens PfO-1; identical to SEQ ID NO: 194

SEQ ID NO: 62374 - DNA, 582 bp, Burkholderia sp. 383; identical to SEQ ID NO: 195
  CDS (1)..(582): transl_table=11

SEQ ID NO: 62375 - protein, 193 aa, Burkholderia sp. 383; identical to SEQ ID NO: 196

SEQ ID NO: 62376 - DNA, 582 bp, Geobacter metallireducens GS-15; identical to SEQ ID NO: 199
  CDS (1)..(582): transl_table=11

SEQ ID NO: 62377 - protein, 193 aa, Geobacter metallireducens GS-15; identical to SEQ ID NO: 200

SEQ ID NO: 62378 - DNA, 594 bp, Desulfovibrio desulfuricans G20; identical to SEQ ID NO: 201
  CDS (1)..(594): transl_table=11

SEQ ID NO: 62379 - protein, 197 aa, Desulfovibrio desulfuricans G20; identical to SEQ ID NO: 202

SEQ ID NO: 62380 - DNA, 585 bp, Burkholderia xenovorans LB400; identical to SEQ ID NO: 205
  CDS (1)..(585): transl_table=11

SEQ ID NO: 62381 - protein, 194 aa, Burkholderia xenovorans LB400; identical to SEQ ID NO: 206

SEQ ID NO: 62382 - DNA, 585 bp, Ralstonia metallidurans CH34; identical to SEQ ID NO: 207
  CDS (1)..(585): transl_table=11

SEQ ID NO: 62383 - protein, 194 aa, Ralstonia metallidurans CH34; identical to SEQ ID NO: 208

SEQ ID NO: 62384 - DNA, 594 bp, Myxococcus xanthus DK 1622; identical to SEQ ID NO: 209
  CDS (1)..(594): transl_table=11

SEQ ID NO: 62385 - protein, 197 aa, Myxococcus xanthus DK 1622; identical to SEQ ID NO: 210

SEQ ID NO: 62386 - DNA, 588 bp, Pseudomonas aeruginosa UCBPP-PA14; identical to SEQ ID NO: 211
  CDS (1)..(588): transl_table=11

SEQ ID NO: 62387 - protein, 195 aa, Pseudomonas aeruginosa UCBPP-PA14; identical to SEQ ID NO: 212

SEQ ID NO: 62388 - DNA, 1122 bp, Pseudomonas putida GB-1
  CDS (1)..(1122): transl_table=11
atgccttaccaatcgaatgaactgctgttcagccacttccgtgacaacaacatcgacttgaaccacatcgacgcacaactgcaactggttgcacccgacagccccaacctgccgctgtaccgcgacatgatgctgaccatcctgcgcatggcccacgacgacagcgaccgctggaacgccaagattaccctgcaggccctgcgcgagctggaccactcgttccgcaccctgcagcgctacaaaggccgacgcaaggtgaccgtgttcggttcggcgcgcaccccgctggaacaccccatgtacgccctggcccgcgagctgggtgccaccctggcgcgctccgacttgatggtcatcaccggcgccggcggcggtatcatggccgccgctcacgagggtgccggcagtgcccacagcctgggcttcaatatcaccctgcccttcgaacaacatgccaaccccacggtggatggcaccgacaaactgctgccgttccatttcttcttcatccgcaaactgttcttcgtcaaggaagccgacgctttggtattgtgccccggcggcttcggcacccttgatgaagcgctggaggtcctgaccctgatccagactggcaagagcccgctggtaccggtggtactgctggactcgccaggcggtagcttctggcgcgactgcctggacttcatcagccgccagttggaagaaaaccgctacatcctgcccagcgatctgaagctggtgcgcctggtgcacagtgccgacgaggcagtggaggaaatcaaccagttctacagcaactaccattccagccgctggctcaagagccagttcgttatccgcatgcatcacccgctcagcgaggccgcgctgtatgacatccaagaaggctttgccgacttgcgcctgagtggcaaatatcaccagcaagctgatagcagtgccgagcatgaagtaggcaatttcaatcacctgacccgcctgtcattcgccttcaatggccgcgaccagggcaggctgcgcgagttggtggatttcatcaacttgcccgagaactgggccaagccgcaacccatgcataccacgcagcgggccagggaggcgttgaaggtcagttcatag

SEQ ID NO: 62389 - protein, 373 aa, Pseudomonas putida GB-1
MPYQSNELLFSHFRDNNIDLNHIDAQLQLVAPDSPNLPLYRDMMLTILRMAHDDSDRWNAKITLQALRELDHSFRTLQRYKGRRKVTVFGSARTPLEHPMYALARELGATLARSDLMVITGAGGGIMAAAHEGAGSAHSLGFNITLPFEQHANPTVDGTDKLLPFHFFFIRKLFFVKEADALVLCPGGFGTLDEALEVLTLIQTGKSPLVPVVLLDSPGGSFWRDCLDFISRQLEENRYILPSDLKLVRLVHSADEAVEEINQFYSNYHSSRWLKSQFVIRMHHPLSEAALYDIQEGFADLRLSGKYHQQADSSAEHEVGNFNHLTRLSFAFNGRDQGRLRELVDFINLPENWAKPQPMHTTQRAREALKVSS

SEQ ID NO: 62390 - DNA, 588 bp, Pseudomonas putida GB-1; identical to SEQ ID NO: 213
  CDS (1)..(588): transl_table=11

SEQ ID NO: 62391 - protein, 195 aa, Pseudomonas putida GB-1; identical to SEQ ID NO: 214

SEQ ID NO: 62392 - DNA, 606 bp, Vitis vinifera; identical to SEQ ID NO: 219
  CDS (1)..(606)
  misc_feature (21)..(21): r is g or a

SEQ ID NO: 62393 - protein, 201 aa, Vitis vinifera; identical to SEQ ID NO: 220

SEQ ID NO: 62394 - DNA, 651 bp, Vitis vinifera; identical to SEQ ID NO: 221
  CDS (1)..(651)

SEQ ID NO: 62395 - protein, 216 aa, Vitis vinifera; identical to SEQ ID NO: 222

SEQ ID NO: 62396 - DNA, 645 bp, Vitis vinifera; identical to SEQ ID NO: 223
  CDS (1)..(645)

SEQ ID NO: 62397 - protein, 214 aa, Vitis vinifera; identical to SEQ ID NO: 224

SEQ ID NO: 62398 - DNA, 792 bp, Vitis vinifera; identical to SEQ ID NO: 34756
  CDS (1)..(792)
  misc_feature (126)..(126): y is t or c

SEQ ID NO: 62399 - protein, 263 aa, Vitis vinifera; identical to SEQ ID NO: 34757

SEQ ID NO: 62400 - DNA, 801 bp, Vitis vinifera; identical to SEQ ID NO: 225
  CDS (1)..(801)

SEQ ID NO: 62401 - protein, 266 aa, Vitis vinifera; identical to SEQ ID NO: 226

SEQ ID NO: 62402 - DNA, 654 bp, Vitis vinifera; identical to SEQ ID NO: 227
  CDS (1)..(654)

SEQ ID NO: 62403 - protein, 217 aa, Vitis vinifera; identical to SEQ ID NO: 228

SEQ ID NO: 62404 - DNA, 591 bp, Ostreococcus tauri; identical to SEQ ID NO: 231
  CDS (1)..(591)

SEQ ID NO: 62405 - protein, 196 aa, Ostreococcus tauri; identical to SEQ ID NO: 232

SEQ ID NO: 62406 - DNA, 645 bp, Medicago truncatula; identical to SEQ ID NO: 235
  CDS (1)..(645)

SEQ ID NO: 62407 - protein, 214 aa, Medicago truncatula; identical to SEQ ID NO: 236

SEQ ID NO: 62408 - DNA, 660 bp, Medicago truncatula; identical to SEQ ID NO: 237
  CDS (1)..(660)

SEQ ID NO: 62409 - protein, 219 aa, Medicago truncatula; identical to SEQ ID NO: 238

SEQ ID NO: 62410 - DNA, 783 bp, Medicago truncatula; identical to SEQ ID NO: 239
  CDS (1)..(783)

SEQ ID NO: 62411 - protein, 260 aa, Medicago truncatula; identical to SEQ ID NO: 240

SEQ ID NO: 62412 - DNA, 732 bp, Aspergillus oryzae; identical to SEQ ID NO: 241
  CDS (1)..(732)

SEQ ID NO: 62413 - protein, 243 aa, Aspergillus oryzae; identical to SEQ ID NO: 242

SEQ ID NO: 62414 - DNA, 711 bp, Aspergillus oryzae; identical to SEQ ID NO: 243
  CDS (1)..(711)

SEQ ID NO: 62415 - protein, 236 aa, Aspergillus oryzae; identical to SEQ ID NO: 244

SEQ ID NO: 62416 - DNA, 576 bp, Streptomyces turgidiscabies; identical to SEQ ID NO: 245
  CDS (1)..(576): transl_table=11

SEQ ID NO: 62417 - protein, 191 aa, Streptomyces turgidiscabies; identical to SEQ ID NO: 246

SEQ ID NO: 62418 - DNA, 603 bp, Oryza sativa subsp; identical to SEQ ID NO: 247
  CDS (1)..(603)

SEQ ID NO: 62419 - protein, 200 aa, Oryza sativa subsp; identical to SEQ ID NO: 248

SEQ ID NO: 62420 - DNA, 642 bp, Arabidopsis thaliana; identical to SEQ ID NO: 249
  CDS (1)..(642)
  misc_feature (467)..(467): y is t or c

SEQ ID NO: 62421 - protein, 213 aa, Arabidopsis thaliana; identical to SEQ ID NO: 250
  misc_feature (156)..(156): The Xaa at location 156 stands for Ala, or Val.

SEQ ID NO: 62422 - DNA, 642 bp, Arabidopsis thaliana; identical to SEQ ID NO: 253
  CDS (1)..(642)

SEQ ID NO: 62423 - protein, 213 aa, Arabidopsis thaliana; identical to SEQ ID NO: 254

SEQ ID NO: 62424 - DNA, 663 bp, Arabidopsis thaliana
  CDS (1)..(663)
atgacgaagaaacaaagttcaaggtttaagagcatttgcgtcttttgtgggagtagcaatgggaacaaagctagttatcaagatgcagccattgatttggccaaggaactggtgatgaggaagattgatcttgtttatggtggaggaagcataggtttaatgggtttggtgtctcaagctgttcatgatggtggtcgtcataataataacaataatggtaatgatgatgctcttttttgtcactctgtcaatgtctcgcaaacaaactcaaagttaactggagaaacagtaggagaagtgaaggaagttgcagacatgcatcagagaaaagctgtgatggctaagcattctgatgctttcattactttgcctggtggctatggtacactagaggagctacttgaagtgataacttgggcacaacttggtatccatgataaaccggtcggtttattaaacgttgatggatattacgatgcattgctgttattcatcgacaaagccgtcgaagagggatttattcttccaaccgctcgacatattatcgtatctgcaccaaccgcaagagagttgtttataaaattggagttgaatatggtatcactagatcgaatatctaaacatgcattatctttgtttcaagttatgtctaaagctggttag

SEQ ID NO: 62425 - protein, 220 aa, Arabidopsis thaliana
MTKKQSSRFKSICVFCGSSNGNKASYQDAAIDLAKELVMRKIDLVYGGGSIGLMGLVSQAVHDGGRHNNNNNGNDDALFCHSVNVSQTNSKLTGETVGEVKEVADMHQRKAVMAKHSDAFITLPGGYGTLEELLEVITWAQLGIHDKPVGLLNVDGYYDALLLFIDKAVEEGFILPTARHIIVSAPTARELFIKLELNMVSLDRISKHALSLFQVMSKAG

SEQ ID NO: 62426 - DNA, 546 bp, Arabidopsis thaliana; identical to SEQ ID NO: 15431
  CDS (1)..(546)

SEQ ID NO: 62427 - protein, 181 aa, Arabidopsis thaliana; identical to SEQ ID NO: 15432

SEQ ID NO: 62428 - DNA, 609 bp, Arabidopsis thaliana; identical to SEQ ID NO: 257
  CDS (1)..(609)

SEQ ID NO: 62429 - protein, 202 aa, Arabidopsis thaliana; identical to SEQ ID NO: 258

SEQ ID NO: 62430 - DNA, 588 bp, Pseudomonas aeruginosa; identical to SEQ ID NO: 259
  CDS (1)..(588): transl_table=11

SEQ ID NO: 62431 - protein, 195 aa, Pseudomonas aeruginosa; identical to SEQ ID NO: 260

SEQ ID NO: 62432 - DNA, 651 bp, Arabidopsis thaliana; identical to SEQ ID NO: 261
  CDS (1)..(651)

SEQ ID NO: 62433 - protein, 216 aa, Arabidopsis thaliana; identical to SEQ ID NO: 262

SEQ ID NO: 62434 - DNA, 738 bp, Saccharomyces cerevisiae; identical to SEQ ID NO: 263
  CDS (1)..(738)

SEQ ID NO: 62435 - protein, 245 aa, Saccharomyces cerevisiae; identical to SEQ ID NO: 264

SEQ ID NO: 62436 - DNA, 729 bp, Oryza sativa; identical to SEQ ID NO: 265
  CDS (1)..(729)

SEQ ID NO: 62437 - protein, 242 aa, Oryza sativa; identical to SEQ ID NO: 266

SEQ ID NO: 62438 - DNA, 672 bp, Oryza sativa; identical to SEQ ID NO: 267
  CDS (1)..(672)

SEQ ID NO: 62439 - protein, 223 aa, Oryza sativa; identical to SEQ ID NO: 268

SEQ ID NO: 62440 - DNA, 870 bp, Oryza sativa; identical to SEQ ID NO: 269
  CDS (1)..(870)

SEQ ID NO: 62441 - protein, 289 aa, Oryza sativa; identical to SEQ ID NO: 270

SEQ ID NO: 62442 - DNA, 636 bp, Oryza sativa; identical to SEQ ID NO: 271
  CDS (1)..(636)

SEQ ID NO: 62443 - protein, 211 aa, Oryza sativa; identical to SEQ ID NO: 272

SEQ ID NO: 62444 - DNA, 1008 bp, Oryza sativa
  CDS (1)..(1008)
atggcggctgcggcgccgagttcggtggtagccggactcgtgtccgggctagggctggcgcgctcctcgttaacgcccagcgacggccgctctccttccctctcgcccctgcatccgccatggcccgcggccccgcggctcgtctgtaggagcagcggagcccggccccccagggagagagccgtggccgccgccgccgccgccgcaaattctccgcggcagcagcagcagctaggagagcatgagcatgaggaggctgtggcagcggcggccatggagccggagaggagcagtccccatgaggtgagggaggagatagcgaggtgcttcgatctcgtgcgccgcctcggccgtggcgccgtctacctcggctcctccagggtgccgcccacccatccccattacctccatgccgccgagctctcaagggagatagctaggctgctggactgcaccacatggtccggagctggtccaggtttcatggatgctgccacccaaggcgctcttgaggcgggcaaaccggtcggtggcttcaagattggcaaggaggcgggtgaatggacaacctccaattttcatccttacctgccatcagagtcatatctcacctgcaggttcttctctgcaaggaagcatgggttagttgatgccgcggtgcggaactgccctaccgatagaactgccatcattgcattacctggtgggatagggacgctggatgagcttttcgagatgatggcgctaattcaactggagcggatcggttccacgcttccagtcccattcttgctcctcaattatgattcttactactccaaactattggactttctgaatgactgcgaggagtggggaaccgttgctccgggagaagtagcatctctttggaaggtttgcaatgggaatcatgaagctttggagtacctggcacagttctacaatgtacctcttgctgaaagaaattactgcatatcaccacagttgaagcagcaggcaacttcatag

SEQ ID NO: 62445 - protein, 335 aa, Oryza sativa
MAAAAPSSVVAGLVSGLGLARSSLTPSDGRSPSLSPLHPPWPAAPRLVCRSSGARPPRERAVAAAAAAANSPRQQQQLGEHEHEEAVAAAAMEPERSSPHEVREEIARCFDLVRRLGRGAVYLGSSRVPPTHPHYLHAAELSREIARLLDCTTWSGAGPGFMDAATQGALEAGKPVGGFKIGKEAGEWTTSNFHPYLPSESYLTCRFFSARKHGLVDAAVRNCPTDRTAIIALPGGIGTLDELFEMMALIQLERIGSTLPVPFLLLNYDSYYSKLLDFLNDCEEWGTVAPGEVASLWKVCNGNHEALEYLAQFYNVPLAERNYCISPQLKQQATS

SEQ ID NO: 62446 - DNA, 1032 bp, Oryza sativa; identical to SEQ ID NO: 273
  CDS (1)..(1032)

SEQ ID NO: 62447 - protein, 343 aa, Oryza sativa; identical to SEQ ID NO: 274

SEQ ID NO: 62448 - DNA, 741 bp, Oryza sativa; identical to SEQ ID NO: 275
  CDS (1)..(741)

SEQ ID NO: 62449 - protein, 246 aa, Oryza sativa; identical to SEQ ID NO: 276

SEQ ID NO: 62450 - DNA, 753 bp, Oryza sativa; identical to SEQ ID NO: 277
  CDS (1)..(753)

SEQ ID NO: 62451 - protein, 250 aa, Oryza sativa; identical to SEQ ID NO: 278

SEQ ID NO: 62452 - DNA, 672 bp, Oryza sativa; identical to SEQ ID NO: 279
  CDS (1)..(672)

SEQ ID NO: 62453 - protein, 223 aa, Oryza sativa; identical to SEQ ID NO: 280

SEQ ID NO: 62454 - DNA, 651 bp, Oryza sativa; identical to SEQ ID NO: 281
  CDS (1)..(651)

SEQ ID NO: 62455 - protein, 216 aa, Oryza sativa; identical to SEQ ID NO: 282

SEQ ID NO: 62456 - DNA, 567 bp, Oryza sativa; identical to SEQ ID NO: 283
  CDS (1)..(567)

SEQ ID NO: 62457 - protein, 188 aa, Oryza sativa; identical to SEQ ID NO: 284

SEQ ID NO: 62458 - DNA, 684 bp, Oryza sativa; identical to SEQ ID NO: 285
  CDS (1)..(684)

SEQ ID NO: 62459 - protein, 227 aa, Oryza sativa; identical to SEQ ID NO: 286

SEQ ID NO: 62460 - DNA, 615 bp, Oryza sativa; identical to SEQ ID NO: 287
  CDS (1)..(615)

SEQ ID NO: 62461 - protein, 204 aa, Oryza sativa; identical to SEQ ID NO: 288

SEQ ID NO: 62462 - DNA, 735 bp, Oryza sativa; identical to SEQ ID NO: 289
  CDS (1)..(735)

SEQ ID NO: 62463 - protein, 244 aa, Oryza sativa; identical to SEQ ID NO: 290

SEQ ID NO: 62464 - DNA, 678 bp, Glycine max; identical to SEQ ID NO: 291
  CDS (1)..(678)

SEQ ID NO: 62465 - protein, 225 aa, Glycine max; identical to SEQ ID NO: 292

SEQ ID NO: 62466 - DNA, 630 bp, Glycine max; identical to SEQ ID NO: 293
  CDS (1)..(630)

SEQ ID NO: 62467 - protein, 209 aa, Glycine max; identical to SEQ ID NO: 294

SEQ ID NO: 62468 - DNA, 627 bp, Triticum aestivum; identical to SEQ ID NO: 295
  CDS (1)..(627)

SEQ ID NO: 62469 - protein, 208 aa, Triticum aestivum; identical to SEQ ID NO: 296

SEQ ID NO: 62470 - DNA, 627 bp, Triticum aestivum; identical to SEQ ID NO: 297
  CDS (1)..(627)

SEQ ID NO: 62471 - protein, 208 aa, Triticum aestivum; identical to SEQ ID NO: 298

SEQ ID NO: 62472 - DNA, 720 bp, Triticum aestivum; identical to SEQ ID NO: 299
  CDS (1)..(720)

SEQ ID NO: 62473 - protein, 239 aa, Triticum aestivum; identical to SEQ ID NO: 300

SEQ ID NO: 62474 - DNA, 651 bp, Linum usitatissimum; identical to SEQ ID NO: 301
  CDS (1)..(651)

SEQ ID NO: 62475 - protein, 216 aa, Linum usitatissimum; identical to SEQ ID NO: 302

SEQ ID NO: 62476 - DNA, 786 bp, Zea mays; identical to SEQ ID NO: 303
  CDS (1)..(786)

SEQ ID NO: 62477 - protein, 261 aa, Zea mays; identical to SEQ ID NO: 304

SEQ ID NO: 62478 - DNA, 627 bp, Zea mays; identical to SEQ ID NO: 305
  CDS (1)..(627)

SEQ ID NO: 62479 - protein, 208 aa, Zea mays; identical to SEQ ID NO: 306

SEQ ID NO: 62480 - DNA, 660 bp, Brassica napus; identical to SEQ ID NO: 307
  CDS (1)..(660)

SEQ ID NO: 62481 - protein, 219 aa, Brassica napus; identical to SEQ ID NO: 308

SEQ ID NO: 62482 - DNA, 711 bp, Brassica napus; identical to SEQ ID NO: 309
  CDS (1)..(711)

SEQ ID NO: 62483 - protein, 236 aa, Brassica napus; identical to SEQ ID NO: 310

SEQ ID NO: 62484 - DNA, 642 bp, Brassica napus; identical to SEQ ID NO: 311
  CDS (1)..(642)

SEQ ID NO: 62485 - protein, 213 aa, Brassica napus; identical to SEQ ID NO: 312

SEQ ID NO: 62486 - DNA, 642 bp, Brassica napus; identical to SEQ ID NO: 313
  CDS (1)..(642)

SEQ ID NO: 62487 - protein, 213 aa, Brassica napus; identical to SEQ ID NO: 314

SEQ ID NO: 62488 - DNA, 651 bp, Brassica napus; identical to SEQ ID NO: 315
  CDS (1)..(651)

SEQ ID NO: 62489 - protein, 216 aa, Brassica napus; identical to SEQ ID NO: 316

SEQ ID NO: 62490 - DNA, 630 bp, Glycine max; identical to SEQ ID NO: 317
  CDS (1)..(630)

SEQ ID NO: 62491 - protein, 209 aa, Glycine max; identical to SEQ ID NO: 318

SEQ ID NO: 62492 - DNA, 660 bp, Glycine max; identical to SEQ ID NO: 319
  CDS (1)..(660)

SEQ ID NO: 62493 - protein, 219 aa, Glycine max; identical to SEQ ID NO: 320

SEQ ID NO: 62494 - DNA, 648 bp, Glycine max; identical to SEQ ID NO: 321
  CDS (1)..(648)

SEQ ID NO: 62495 - protein, 215 aa, Glycine max; identical to SEQ ID NO: 322

SEQ ID NO: 62496 - DNA, 645 bp, Glycine max; identical to SEQ ID NO: 323
  CDS (1)..(645)

SEQ ID NO: 62497 - protein, 214 aa, Glycine max; identical to SEQ ID NO: 324

SEQ ID NO: 62498 - DNA, 678 bp, Glycine max; identical to SEQ ID NO: 325
  CDS (1)..(678)

SEQ ID NO: 62499 - protein, 225 aa, Glycine max; identical to SEQ ID NO: 326

SEQ ID NO: 62500 - DNA, 648 bp, Brassica napus; identical to SEQ ID NO: 327
  CDS (1)..(648)

SEQ ID NO: 62501 - protein, 215 aa, Brassica napus; identical to SEQ ID NO: 328

SEQ ID NO: 62502 - DNA, 657 bp, Zea mays; identical to SEQ ID NO: 329
  CDS (1)..(657)

SEQ ID NO: 62503 - protein, 218 aa, Zea mays; identical to SEQ ID NO: 330

SEQ ID NO: 62504 - DNA, 711 bp, Zea mays; identical to SEQ ID NO: 331
  CDS (1)..(711)

SEQ ID NO: 62505 - protein, 236 aa, Zea mays; identical to SEQ ID NO: 332

SEQ ID NO: 62506 - DNA, 798 bp, Zea mays; identical to SEQ ID NO: 333
  CDS (1)..(798)

SEQ ID NO: 62507 - protein, 265 aa, Zea mays; identical to SEQ ID NO: 334

SEQ ID NO: 62508 - DNA, 672 bp, Zea mays; identical to SEQ ID NO: 335
  CDS (1)..(672)

SEQ ID NO: 62509 - protein, 223 aa, Zea mays; identical to SEQ ID NO: 336

SEQ ID NO: 62510 - DNA, 768 bp, Zea mays; identical to SEQ ID NO: 337
  CDS (1)..(768)

SEQ ID NO: 62511 - protein, 255 aa, Zea mays; identical to SEQ ID NO: 338

SEQ ID NO: 62512 - DNA, 627 bp, Zea mays; identical to SEQ ID NO: 339
  CDS (1)..(627)

SEQ ID NO: 62513 - protein, 208 aa, Zea mays; identical to SEQ ID NO: 340

SEQ ID NO: 62514 - DNA, 774 bp, Zea mays; identical to SEQ ID NO: 341
  CDS (1)..(774)

SEQ ID NO: 62515 - protein, 257 aa, Zea mays; identical to SEQ ID NO: 342

SEQ ID NO: 62516 - DNA, 20 bp, Artificial sequence
  primer
atggctctactccagtctcg

SEQ ID NO: 62517 - DNA, 21 bp, Artificial sequence
  primer
tcagagcatgcttcctcgctg

SEQ ID NO: 62518 - protein, 258 aa, Artificial sequence
  consensus sequence
  Variant (3)..(3): Xaa in position 3 is any amino acid
  Variant (7)..(8): Xaa in position 7 to 8 is any amino acid
  Variant (10)..(12): Xaa in position 10 to 12 is any amino acid
  Variant (13)..(16): Xaa in position 13 to 16 is any or no amino acid
  Variant (19)..(20): Xaa in position 19 to 20 is any amino acid
  Variant (22)..(27): Xaa in position 22 to 27 is any amino acid
  Variant (28)..(31): Xaa in position 28 to 31 is any or no amino acid
  Variant (38)..(39): Xaa in position 38 to 39 is any amino acid
  Variant (44)..(52): Xaa in position 44 to 52 is any amino acid
  Variant (54)..(54): Xaa in position 54 is any amino acid
  Variant (55)..(66): Xaa in position 55 to 66 is any or no amino acid
  Variant (68)..(68): Xaa in position 68 is any amino acid
  Variant (70)..(70): Xaa in position 70 is any amino acid
  Variant (73)..(74): Xaa in position 73 to 74 is any amino acid
  Variant (75)..(87): Xaa in position 75 to 87 is any or no amino acid
  Variant (89)..(90): Xaa in position 89 to 90 is any amino acid
  Variant (91)..(91): Xaa in position 91 is any or no amino acid
  Variant (93)..(97): Xaa in position 93 to 97 is any amino acid
  Variant (98)..(138): Xaa in position 98 to 138 is any or no amino acid
  Variant (140)..(142): Xaa in position 140 to 142 is any amino acid
  Variant (144)..(145): Xaa in position 144 to 145 is any amino acid
  Variant (148)..(148): Xaa in position 148 is any amino acid
  Variant (151)..(152): Xaa in position 151 to 152 is any amino acid
  Variant (155)..(159): Xaa in position 155 to 159 is any amino acid
  Variant (160)..(167): Xaa in position 160 to 167 is any or no amino acid
  Variant (169)..(169): Xaa in position 169 is any amino acid
  Variant (175)..(175): Xaa in position 175 is any amino acid
  Variant (178)..(178): Xaa in position 178 is any amino acid
  Variant (182)..(182): Xaa in position 182 is any amino acid
  Variant (184)..(185): Xaa in position 184 to 185 is any amino acid
  Variant (188)..(188): Xaa in position 188 is any amino acid
  Variant (192)..(192): Xaa in position 192 is any amino acid
  Variant (194)..(194): Xaa in position 194 is any amino acid
  Variant (195)..(196): Xaa in position 195 to 196 is any or no amino acid
  Variant (199)..(199): Xaa in position 199 is any amino acid
  Variant (204)..(205): Xaa in position 204 to 205 is any amino acid
  Variant (207)..(207): Xaa in position 207 is any amino acid
  Variant (208)..(209): Xaa in position 208 to 209 is any or no amino acid
  Variant (211)..(212): Xaa in position 211 to 212 is any amino acid
  Variant (215)..(222): Xaa in position 215 to 222 is any amino acid
  Variant (226)..(242): Xaa in position 226 to 242 is any amino acid
  Variant (243)..(257): Xaa in position 243 to 257 is any or no amino acid
CVXCGSXXGXXXXXXXAAXXLXXXXXXXXXXLVYGGGXXGLMGXXXXXXXXXGXXXXXXXXXXXXXVXGXIPXXXXXXXXXXXXXXXLXXXEXXXXXXXXXXXXXXXXXXXXXXXXXXXXXXXXXXXXXXXXXXXXXXEXXXVXXMHXRKXXMAXXXXXXXXXXXXXFXALPGGXGTXEELXEXXTWXQLGXHXXXKPXGLLNXXGXXXYXXLLXXXXXXXXEGFXXXXXXXXXXXXXXXXXXXXXXXXXXXXXXXXL

SEQ ID NO: 62519 - protein, 17 aa, Artificial sequence
  protein pattern
  Variant (2)..(2): Xaa in position 2 is Phe, Ile, Leu or Val
  Variant (3)..(3): Xaa in position 3 is Phe, Leu, Met or Val
  Variant (5)..(6): Xaa in position 5 to 6 is any amino acid
  Variant (7)..(7): Xaa in position 7 is Ala or Thr
  Variant (9)..(9): Xaa in position 9 is any amino acid
  Variant (13)..(13): Xaa in position 13 is any amino acid
  Variant (15)..(15): Xaa in position 15 is any amino acid
EXXEXXXWXQLGXHXKP

SEQ ID NO: 62520 - protein, 11 aa, Artificial sequence
  protein pattern
  Variant (3)..(3): Xaa in position 3 is Ile or Val
  Variant (4)..(4): Xaa in position 4 is Ala or Thr
  Variant (5)..(5): Xaa in position 5 is Leu or Met
  Variant (9)..(9): Xaa in position 9 is any amino acid
  Variant (11)..(11): Xaa in position 11 is Ser or Thr
AFXXXPGGXGX

SEQ ID NO: 62521 - protein, 18 aa, Artificial sequence
  protein pattern
  Variant (3)..(3): Xaa in position 3 is Phe or Tyr
  Variant (7)..(8): Xaa in position 7 to 8 is any amino acid
  Variant (10)..(16): Xaa in position 10 to 16 is any amino acid
  Variant (17)..(17): Xaa in position 17 is any or no amino acid
CVXCGSXXGXXXXXXXXA

SEQ ID NO: 62522 - protein, 19 aa, Artificial sequence
  protein pattern
  Variant (2)..(2): Xaa in position 2 is any amino acid
  Variant (3)..(4): Xaa in position 3 to 4 is any or no amino acid
  Variant (6)..(6): Xaa in position 6 is any amino acid
  Variant (7)..(7): Xaa in position 7 is Asp, Gly, Asn, Ser or Thr
  Variant (10)..(10): Xaa in position 10 is any amino acid
  Variant (13)..(14): Xaa in position 13 to 14 is any amino acid
  Variant (16)..(16): Xaa in position 16 is Ala or Gly
  Variant (17)..(18): Xaa in position 17 to 18 is any amino acid
  Variant (19)..(19): Xaa in position 19 is Ala, Gly or Ser
EXXXVXXMHXRKXXMXXXX

SEQ ID NO: 62523 - protein, 15 aa, Artificial sequence
  protein pattern
  Variant (7)..(8): Xaa in position 7 to 8 is any amino acid
  Variant (13)..(13): Xaa in position 13 is any amino acid
  Variant (14)..(14): Xaa in position 14 is Ile, Leu or Val
  Variant (15)..(15): Xaa in position 15 is Ala or Ser
LVYGGGXXGLMGXXX

SEQ ID NO: 62524 - DNA, 435 bp, Saccharomyces cerevisiae
  CDS (1)..(435)
atgaataccaacgagtccgaacatgttagcacaagcccagaggatactcaggagaacggtggaaacgctagctccagcggcagtttgcagcaaatttccacgctaagagagcaggacagatggctacccatcaacaatgtagcgcgactcatgaagaatactctcccaccgagtgctaaggtatcgaaagatgcgaaagagtgcatgcaggagtgtgtcagtgagctcatttcttttgtgactagcgaggccagcgatcgatgcgctgctgacaaaagaaagacgataaacggggaagacattctcatatcattgcacgccttaggattcgagaactatgcagaggtgttgaaaatctacttggctaaatacaggcaacaacaggcgctgaagaatcaactaatgtatgagcaggacgacgaagaggtgccttga

SEQ ID NO: 62525 - protein, 144 aa, Saccharomyces cerevisiae [sequence omitted]

SEQ ID NO: 62526 - DNA, 1347 bp, Physcomitrella patens
  CDS (266)..(922)
ggcaccagcgaatccgtctccgcctccgccttctgcacgcgtggttgtggtcgacctctcgccggagcaacaggaaactaatcccttttccagcactaaacgattgaagcaattttttttttcttgtgaactgctcactctctctctgttatgaggggattcgaagcttgaaagttatgagctgaaggttgaggacacgtaagagcgaaggacgatcatactacaattaacccttgcggggaaaagcccaggcaaaataggacggatggccgacagttacggccacaacgcaggttcacccgagagcagcccgcattctgataacgagtccggcggccattaccgtgatcaggacgcttctgtacgggagcaagaccggtttttgcccatcgcaaatgtgagccgaatcatgaagaaagcattgccatctaatgcgaagatatcgaaagacgccaaagagactgtgcaggagtgcgtatccgagttcatcagtttcattactggtgaggcgtccgacaagtgtcagagggaaaagaggaagacgatcaacggggatgacttgctgtgggccatgagtactcttggttttgaagattatgtggaacctctgaaggtgtacctacacaagtatcgtgaactggagggggagaaggcctctatggccaagggtggtgatcagcagggaggaaaagagagcaaccaaggaggtatggggtcgatgggcatggcaggcggaatcaacggcatgaacggaacgatgaacgggaacatgcatgggcatggaattcccgtatcgatgcagatgatgcaacagccgtacgcgcagcaggcacctccggggatgatatattctcctcatcaaatgatgccgcaataccagatgccgatgcagtctggtggaaaccaaccccgcggagtgtaagagttttcactggcaggaggctttggaagtggggatattgtcgacagcgtgatggggtgttttggagcatgggcagggcattatggtgctgttgaaacagtgatgggtgggtcatgtgaagtgttggcgactgttgaatgatgaaaacatagaagtgatgtcgttgaagctcggggagtttcaagtgaaaggaggagcactttttgtttggaaaggagcgtaccgggtctggcagtgtacattctgaatgatagttatctgtgctgatttttcttggccttggcaatacgagggggttgaatattttgctttgaattcgttgacatttcaaccttttctatgtgaaaaggctctgtaggatgcaagataaggaaagacatgcagattgataaaaaaaaaaaaaaaaaaaaaaaaaaaaaaaaaaa

SEQ ID NO: 62527 - protein, 218 aa, Physcomitrella patens
MADSYGHNAGSPESSPHSDNESGGHYRDQDASVREQDRFLPIANVSRIMKKALPSNAKISKDAKETVQECVSEFISFITGEASDKCQREKRKTINGDDLLWAMSTLGFEDYVEPLKVYLHKYRELEGEKASMAKGGDQQGGKESNQGGMGSMGMAGGINGMNGTMNGNMHGHGIPVSMQMMQQPYAQQAPPGMIYSPHQMMPQYQMPMQSGGNQPRGV

SEQ ID NO: 62528 - DNA, 787 bp, Physcomitrella patens
  CDS (65)..(721)
atcccgggcagcgagcacacagctagcaactctttcggagaatactccaggcgaaattggtcggatggccgatagctacggtcacaacgcaggttcaccagagagcagcccgcattctgataacgagtccgggggtcattaccgagaccaggatgcttctgtacgggaacaggatcggttcctgcccatcgcgaacgtgagccgaatcatgaagaaggcgttgccgtctaatgcaaaaatttcgaaggacgcgaaagagactgtgcaggagtgtgtgtccgagttcatcagcttcatcactggtgaggcgtcagataagtgccagagggagaagagaaagacgatcaacggtgacgacttgctgtgggccatgagtacacttggtttcgaagattacgtggagcctctgaaggtttacctacacaaataccgggagctagagggagagaaggcttccacggccaagggtggtgaccagcaaggagggaaagaagggagtcaaggtgttatggggtccatgggtatgtcgggcggaatgaacggtatgaacggtacgatgaacgggaatatgcatggacatggaatcccggtgtcgatgcagatgctgcagcagtcgtacggacagcaggcacctccagggatgatgtattcccctcatcagatgatgccgcaataccagatgccaatgcagtctggtggaaaccagcctcgtggagtgtaggaggttccacggcgaggagaatttgaaattggggagattgtcaaccgcgtgagggagtgagctcgc

SEQ ID NO: 62529 - protein, 218 aa, Physcomitrella patens
MADSYGHNAGSPESSPHSDNESGGHYRDQDASVREQDRFLPIANVSRIMKKALPSNAKISKDAKETVQECVSEFISFITGEASDKCQREKRKTINGDDLLWAMSTLGFEDYVEPLKVYLHKYRELEGEKASTAKGGDQQGGKEGSQGVMGSMGMSGGMNGMNGTMNGNMHGHGIPVSMQMLQQSYGQQAPPGMMYSPHQMMPQYQMPMQSGGNQPRGV

SEQ ID NO: 62530 - DNA, 771 bp, Glycine max
  CDS (28)..(573)
gcacgagagtctttagaaaagatatccatggctgagtccgacaacgagtcaggaggtcacacggggaacgcgagcgggagcaacgagttgtccggttgcagggagcaagacaggttcctcccaatagcaaacgtgagcaggatcatgaagaaggcgttgccggcgaacgcgaagatatcgaaggaggcgaaggagacggtgcaggagtgcgtgtcggagttcatcagcttcataacaggagaggcttccgataagtgccagaaggagaagaggaagacgatcaacggcgacgatcttctctgggccatgactaccctgggcttcgaggactacgtggatcctctcaagatttacctgcacaagtatagggagatggagggggagaaaaccgctatgatgggaaggccacatgagagggatgagggttatggccatggccatggtcatgcaactcctatgatgacgatgatgatggggcatcagccccagcaccagcaccagcaccagcaccagcaccagcaccagggacacgtgtatggatctggatcagcatcttctgcaagaactagatagcatgtgtcatctgtttaagcttaattgattttattatgaggatgatatgatataagatttatattcgtatatgtttggttttagaaatacaccagctccagcttgtaattgcttgaaacttccttgttgagagaatatagacattattgtggatggtgatgtggcaaaaaaaaaaaaaaaaaaaaaaaaaaaaaaaaa

SEQ ID NO: 62531 - protein, 181 aa, Glycine max
MAESDNESGGHTGNASGSNELSGCREQDRFLPIANVSRIMKKALPANAKISKEAKETVQECVSEFISFITGEASDKCQKEKRKTINGDDLLWAMTTLGFEDYVDPLKIYLHKYREMEGEKTAMMGRPHERDEGYGHGHGHATPMMTMMMGHQPQHQHQHQHQHQHQGHVYGSGSASSARTR

SEQ ID NO: 62532 - DNA, 1000 bp, Glycine max
  CDS (28)..(603)
taataaggttgtatatggtttggtgggatggctcgagagtctttagaaaagatatccatggctgagtccgacaacgagtcaggaggtcacacggggaacgcgagcgggagcaacgagttgtccggttgcagggagcaagacaggttcctcccaatagcaaacgtgagcaggatcatgaagaaggcgttgccggcgaacgcgaagatatcgaaggaggcgaaggagacggtgcaggagtgcgtgtcggagttcatcagcttcataacaggagaggcttccgataagtgccagaaggagaagaggaagacgatcaacggcgacgatcttctctgggccatgactaccctgggcttcgaggactacgtggatcctctcaagatttacctgcacaagtatagggagatggagggggagaaaaccgctatgatgggaaggccacatgagagggatgagggttatggccatggccatggtcatgcaactcctatgatgacgatgatgatggggcatcagccccagcaccagcaccagcaccagcaccagcaccagcaccagggacacgtgtatggatctggatcagcatcttctgcaagaactagataacatgtgtcatctgtttaagcttaattgattttattatgaggatgatatgatataagatttatattcgtatatgtttggttttagaaatacaccagctccagcttgtaattgcttgaaacttccttgttgagagaatatagacattattgtggatggtgatgtggcatatgtggcatacacagaatttttgtattcttctttctctctatggatttttgtgtaagggcaggactatggctttgtttgctgatcgtatagctagtatggtgctatctaggttcggatttttttctttttcatgtataatgaaaaattaacggaggaaattactcttacgttactttgaaattaattaactaaatcccgcttctgcctttttttttttctcctttctgag

SEQ ID NO: 62533 - protein, 191 aa, Glycine max
MARESLEKISMAESDNESGGHTGNASGSNELSGCREQDRFLPIANVSRIMKKALPANAKISKEAKETVQECVSEFISFITGEASDKCQKEKRKTINGDDLLWAMTTLGFEDYVDPLKIYLHKYREMEGEKTAMMGRPHERDEGYGHGHGHATPMMTMMMGHQPQHQHQHQHQHQHQGHVYGSGSASSARTR

SEQ ID NO: 62534 - DNA, 547 bp, Glycine max
  CDS (20)..(535)
taaggctagctagctagccatggctgagtcggacaacgagtccggaggtcacacggggaacgcaagcggaagcaacgaattctccggttgcagggagcaagacaggttccttccgatagcgaacgtgagcaggatcatgaagaaggcgttgccggcgaacgcgaagatctcgaaggaggcgaaggagacggtgcaggagtgcgtgtcggagttcatcagcttcataacaggagaagcgtccgataagtgccagaaggagaagaggaagacgatcaacggcgatgatctgctgtgggccatgaccacgctgggattcgaggagtacgtggagcctctcaaggtttatctgcataagtatagggagctggaaggggagaaaactgctatgatgggaaggccacatgagagggatgagggttatggtcatgcaactcctatgatgatcatgatggggcatcaacagcagcagcatcagggacacgtgtatggatctggaactactactggatcagcatcttctgcaagaactagataacaggtttatgca

SEQ ID NO: 62535 - protein, 171 aa, Glycine max
MAESDNESGGHTGNASGSNEFSGCREQDRFLPIANVSRIMKKALPANAKISKEAKETVQECVSEFISFITGEASDKCQKEKRKTINGDDLLWAMTTLGFEEYVEPLKVYLHKYRELEGEKTAMMGRPHERDEGYGHATPMMIMMGHQQQQHQGHVYGSGTTTGSASSARTR

SEQ ID NO: 62536 - DNA, 537 bp, Arabidopsis thaliana
  CDS (1)..(537)
atggcggagtcgcaggccaagagtcccggaggctgtggaagccatgagagtggtggagatcaaagtcccaggtcgttacatgttcgtgagcaagataggtttcttccgattgctaacataagccgtatcatgaaaagaggtcttcctgctaatgggaaaatcgctaaagatgctaaggagattgtgcaggaatgtgtctctgaattcatcagtttcgtcaccagcgaagcgagtgataaatgtcaaagagagaaaaggaagactattaatggagatgatttgctttgggcaatggctactttaggatttgaagactacatggaacctctcaaggtttacctgatgagatatagagagggtgacacaaagggatcagcaaaaggtggggatccaaatgcaaagaaagatgggcaatcaagccaaaatggccagttctcgcagcttgctcaccaaggtccttatgggaactctcaagtaacttttcctctcttctcttcacactcaagcaatacgcatcattctcttctaatttgttaa

SEQ ID NO: 62537 - protein, 178 aa, Arabidopsis thaliana
MAESQAKSPGGCGSHESGGDQSPRSLHVREQDRFLPIANISRIMKRGLPANGKIAKDAKEIVQECVSEFISFVTSEASDKCQREKRKTINGDDLLWAMATLGFEDYMEPLKVYLMRYREGDTKGSAKGGDPNAKKDGQSSQNGQFSQLAHQGPYGNSQVTFPLFSSHSSNTHHSLLIC

SEQ ID NO: 62538 - DNA, 553 bp, Glycine max
  CDS (8)..(541)
gatatccatggctgagtccgacaacgagtcaggaggtcacacggggaacgcgagcgggagcaacgagttgtccggttgcagggagcaagacaggttcctcccaatagcaaacgtgagcaggatcatgaagaaggcgttgccggcgaacgcgaagatatcgaaggaggcgaaggagacggtgcaggagtgcgtgtcggagttcatcagcttcataacaggagaggcttccgataagtgccagaaggagaagaggaagacgatcaacggcgacgatcttctctgggccatgactaccctgggcttcgaggactacgtggatcctctcaagatttacctgcacaagtatagggagatggagggggagaaaaccgctatgatgggaaggccacatgagagggatgagggttatggccatggccatggtcatgcaactcctatgatgacgatgatgatggggcatcagccccagcaccagcaccagcaccagcaccagggacacgtgtatggatctggatcagcatcttctgcaagaactagatagcatgtgtcatct

SEQ ID NO: 62539 - protein, 177 aa, Glycine max
MAESDNESGGHTGNASGSNELSGCREQDRFLPIANVSRIMKKALPANAKISKEAKETVQECVSEFISFITGEASDKCQKEKRKTINGDDLLWAMTTLGFEDYVDPLKIYLHKYREMEGEKTAMMGRPHERDEGYGHGHGHATPMMTMMMGHQPQHQHQHQHQGHVYGSGSASSARTR

SEQ ID NO: 62540 - DNA, 1057 bp, Pinus radiata
  CDS (47)..(622)
gttgtattgtattgcaagtgaggaaatttaggaggtgtggcgtaaaatgggagaccacagtggtggagagagcagtcctcattctgacatagagtctaccggcatccacaataatggatcttcttcttcctcacaatccatcatacgagagcaagaccggctgcttcccatagccaatgtggggcgcatcatgaagaaaaccctcccaaccaacgccaagatctccaaggaggccaaggaaatcatgcaagaatgcgtctccgagttcattagctttgttactggagaagcatccgacaagtgtcacaaggaaaagcgcaagaccatcaacggcgatgacatactatgggccatgaccactctcggattcgaagtctacgctgagcccctcaaggtttatctggacaagtatagagaactggagggcgagaaactttccatgagcaagcagcttcaagtagatcaacctcagccggacctgcaatatcaggcctgtaatcctagtgcccacaaccgcccactggtaatgacttacaagatgcccttgcctatgcctatgcatggcaagggaccttcgggggcagacccagcagcaacaggacatggtcgccgtcccttctaggtattataaagtgatctgatcaatctaataataatcaaagcctgctgatttttcttttagtctttccttctgttttaatcttctaaacatacctagaattcataagatgatcatcaaaaatcttattgttggtggcccttgtatattgaagcagcagctttaaggtcagttttgtcctaagttagtgagtaactttgttggataggttaagtcaatatgtaatgatatatggatgtaagtatttttattgctagcctctattctcatgctgtaatcatcctagataaggatgactgataacgtttgcctacatgctatttgctgtattagggttttggtattcatttcctttctctctctttgttacatgaatagatcactgatctatagtctcagtccagcactcagtggttggttctgttttagatcggcctc

SEQ ID NO: 62541 - protein, 191 aa, Pinus radiata
MGDHSGGESSPHSDIESTGIHNNGSSSSSQSIIREQDRLLPIANVGRIMKKTLPTNAKISKEAKEIMQECVSEFISFVTGEASDKCHKEKRKTINGDDILWAMTTLGFEVYAEPLKVYLDKYRELEGEKLSMSKQLQVDQPQPDLQYQACNPSAHNRPLVMTYKMPLPMPMHGKGPSGADPAATGHGRRPF

SEQ ID NO: 62542 - DNA, 663 bp, Pinus radiata
  CDS (1)..(663)
atggcgaccactcggcatcagcgcagtcccgatagcagcccgcgctcggaggatgaatcaggagcgcacacgtacagcaaccaggatggttccgtgaaggaacaggatcgatttctgcccattgctaatgtgagcagaatcatgaagaaagcccttccagctaatgccaagatatcgaaagatgccaaggagacggtgcaggaatgcgtttcagagttcatcagtttcatcactggggaagcctctgacaagtgtcagagggagaagaggaagaccatcaatggggacgacctgctgtgggcaatgggaactctagggtttgaaaactatgtggagcccctcaaggtctacctgcagaagtacagagaattggaaggtgaaaagacatcgatggccaaacagagtggcgatcagtctccttccaaggatgcatctagtggcagtactgttaatgggtctactgcaggcaatcccagtattagccctggcagcactgttaaatatagcggtggctactatccacagccctatgggagccaagctgcacagatgtatggacagcatcagatggtagctccttatcagatgcatatcaatactggcaaagctggtggtgcgggggctgctaacagtggagatcatcatcctagagggcagtggtag

SEQ ID NO: 62543 - protein, 220 aa, Pinus radiata
MATTRHQRSPDSSPRSEDESGAHTYSNQDGSVKEQDRFLPIANVSRIMKKALPANAKISKDAKETVQECVSEFISFITGEASDKCQREKRKTINGDDLLWAMGTLGFENYVEPLKVYLQKYRELEGEKTSMAKQSGDQSPSKDASSGSTVNGSTAGNPSISPGSTVKYSGGYYPQPYGSQAAQMYGQHQMVAPYQMHINTGKAGGAGAANSGDHHPRGQW

SEQ ID NO: 62544 - DNA, 375 bp, Oryza sativa (japonica cultivar-group)
  CDS (1)..(375)
atgatgatgatggatctagggtttttggagggcggcgcggggatggcggacgcggggcacgacgagagcgggagcccgccgaggagcggcggggtgagggagcaggacaggttcctgcccatcgccaacatcagccgcatcatgaagaaggccgtcccggcgaacggcaagatcgccaaggacgccaaggagaccctgcaggagtgcgtctcggagttcatctccttcgtcaccagcgaggcgagcgacaaatgtcagaaggagaagcgcaagaccatcaacggggaagatctcctctttgcgatgggtacgcttggctttgaggagtacgttgatccgttgaagatctatttacacaagtacagagaggtgtag

SEQ ID NO: 62545 - protein, 124 aa, Oryza sativa (japonica cultivar-group)
MMMMDLGFLEGGAGMADAGHDESGSPPRSGGVREQDRFLPIANISRIMKKAVPANGKIAKDAKETLQECVSEFISFVTSEASDKCQKEKRKTINGEDLLFAMGTLGFEEYVDPLKIYLHKYREV

SEQ ID NO: 62546 - DNA, 765 bp, Oryza sativa (japonica cultivar-group)
  CDS (1)..(765)
atggaggccggctacccgggcacggcggcgaacggcgctgccgccgacgggaacggtggcgcgcagcaggcggcggccgcgccggctatacgtgagcaggaccggctgatgccgatcgcgaacgtgatccgcatcatgcgccgcgtgctcccggcgcacgccaagatctcggacgacgccaaggagacgatccaggagtgcgtgtcggagtacatcagcttcatcaccggggaggccaacgagcggtgccagcgcgagcagcgcaagaccatcaccgccgaggacgtgctctgggccatgagccgcctcggcttcgacgactacgtcgagcccctcggcgtctacctccaccgctaccgcgagttcgagggggagtcccgcggcgtcggcgtcggcgtcggcgccgcgcgcggcgaccaccaccatggtcacgtcggtgggatgctcaagtcccgcgcgcagggctccatggtgacgcaccacgacatgcagatgcacgccgccatgtacggtggcggcgcggtgccgccgccgccgcatcctcctccgcaccaccacgcgttccaccagctcatgccgccgcaccacggccagtacgcgccgccgtacgacatgtacggcggcgagcacgggatggcggcgtactacggcgggatgtacgcgcccggcagcggcggcgacgggagcggcagcagcggcagcggtggcgccggcacgccgcagaccgtcaacttcgagcaccagcatccgttcggatacaagtag

SEQ ID NO: 62547 - protein, 254 aa, Oryza sativa (japonica cultivar-group)
MEAGYPGTAANGAAADGNGGAQQAAAAPAIREQDRLMPIANVIRIMRRVLPAHAKISDDAKETIQECVSEYISFITGEANERCQREQRKTITAEDVLWAMSRLGFDDYVEPLGVYLHRYREFEGESRGVGVGVGAARGDHHHGHVGGMLKSRAQGSMVTHHDMQMHAAMYGGGAVPPPPHPPPHHHAFHQLMPPHHGQYAPPYDMYGGEHGMAAYYGGMYAPGSGGDGSGSSGSGGAGTPQTVNFEHQHPFGYK

SEQ ID NO: 62548 - DNA, 660 bp, Oryza sativa (japonica cultivar-group)
  CDS (1)..(660)
atgccggactcggacaacgactccggcgggccgagcaactacgcgggaggggagctgtcgtcgccgcgggagcaggacaggttcctgccgatcgcgaacgtgagcaggatcatgaagaaggcgctgccggcgaacgccaagatcagcaaggacgccaaggagacggtgcaggagtgcgtctccgagttcatctccttcatcaccggcgaggcctccgacaagtgccagcgcgagaagcgcaagaccatcaacggcgacgacctgctctgggccatgaccaccctcggcttcgaggactacgtcgaccccctcaagcactacctccacaagttccgcgagatcgagggcgagcgcgccgccgcctccaccaccggcgccggcaccagcgccgcctccaccacgccgccgcagcagcagcacaccgccaatgccgccggcggctacgccgggtacgccgccccgggagccggccccggcggcatgatgatgatgatggggcagcccatgtacggctcgccgccaccgccgccacagcagcagcagcagcaacaccaccacatggcaatgggaggaagaggcggcttcggtcatcatcccggcggcggcggcggcgggtcgtcgtcgtcgtcggggcacggtcggcaaaacaggggcgcttga

SEQ ID NO: 62549 - protein, 219 aa, Oryza sativa (japonica cultivar-group)
MPDSDNDSGGPSNYAGGELSSPREQDRFLPIANVSRIMKKALPANAKISKDAKETVQECVSEFISFITGEASDKCQREKRKTINGDDLLWAMTTLGFEDYVDPLKHYLHKFREIEGERAAASTTGAGTSAASTTPPQQQHTANAAGGYAGYAAPGAGPGGMMMMMGQPMYGSPPPPPQQQQQQHHHMAMGGRGGFGHHPGGGGGGSSSSSGHGRQNRGA

SEQ ID NO: 62550 - DNA, 390 bp, Oryza sativa (japonica cultivar-group)
  CDS (1)..(390)
atggcggatgggccggggagcccggggggaggaggggggagccacgagagcgggagcccgagggggggagggggaggagggggaggtgggggtgggggtgggggggtgagggagcaggacaggttcctccccatcgccaacatcagccgcatcatgaagaaggccatcccggccaacgggaagatcgccaaggacgccaaggagaccgtgcaggagtgcgtctccgagttcatctccttcatcaccagcgaggcgagcgataaatgccagagggagaagcgcaagaccatcaacggcgacgacttgctgtgggcgatggccacgctgggcttcgaggactacatcgagcccctcaaggtctacctgcagaagtacagagaggtgcggtga

SEQ ID NO: 62551 - protein, 129 aa, Oryza sativa (japonica cultivar-group)
MADGPGSPGGGGGSHESGSPRGGGGGGGGGGGGGGVREQDRFLPIANISRIMKKAIPANGKIAKDAKETVQECVSEFISFITSEASDKCQREKRKTINGDDLLWAMATLGFEDYIEPLKVYLQKYREVR

SEQ ID NO: 62552 - DNA, 753 bp, Oryza sativa (japonica cultivar-group)
  CDS (1)..(753)
atggagcccgcatttcccaacggaggtgcggctgctccaccaccgcccatggcggcggagcagctgccgccggcggcggcggtggtccgggagcaggaccgcctgatgccgatcgcgaacgtgatccgcatcatgcggcgcgtgctcccgccgcacgccaagatctccgacgacgccaaggaggtgatccaggagtgcgtgtcggagttcatcagcttcgtcaccggcgaggccaacgaccggtgccaccgcgagcaccgcaagacggtcaccgccgaggacctcgtctgggccatggaccgcctcggcttcgacgactacgtcccgccgctcaccgcctacctccgccgcatgcgcgagtacgagggcggcggatcaggtggtggtggtggtggtggccgtggcgccgccgccgcccccgccgtcgtgccgccgccgccgccgccgcctcccgaggacgcgttccgctacgtgcaggtccatcatcccgtgtacgcggcgccaggtgagccggtgcaggggtacggttaccccgtggccatgtcgtctgctctgccggcgccgcacgtgcacgtcggcgtccgcggcggcgggcagcacgaggtgttcggtggcgggccggcgcccctggctgtctactacggaggagcgccgtacggcgaggccagcagccgcggcggctgctctgccgccgacgaggggagctcgtcgtcgagcgcctcgccggcgccggtcggccccaactatgagtaa

SEQ ID NO: 62553 - protein, 250 aa, Oryza sativa (japonica cultivar-group)
MEPAFPNGGAAAPPPPMAAEQLPPAAAVVREQDRLMPIANVIRIMRRVLPPHAKISDDAKEVIQECVSEFISFVTGEANDRCHREHRKTVTAEDLVWAMDRLGFDDYVPPLTAYLRRMREYEGGGSGGGGGGGRGAAAAPAVVPPPPPPPPEDAFRYVQVHHPVYAAPGEPVQGYGYPVAMSSALPAPHVHVGVRGGGQHEVFGGGPAPLAVYYGGAPYGEASSRGGCSAADEGSSSSSASPAPVGPNYE

SEQ ID NO: 62554 - DNA, 675 bp, Oryza sativa (japonica cultivar-group)
  CDS (1)..(675)
atgccggattcggacaacgagtcaggggggccgagcaacgcgggggagtacgcgtcggcgagggagcaggacaggttcctgccgatcgcgaacgtgagcaggatcatgaagagggcgctcccggcgaacgccaagatcagcaaggacgccaaggagacggtgcaggagtgcgtctcggagttcatctccttcatcaccggcgaggcctccgacaagtgccagcgggagaagcgcaagaccatcaacggcgacgacctcctctgggcgatgaccacgctcggcttcgaggactacatcgacccgctcaagctctacctccacaagttccgcgagctcgagggcgagaaggccatcggcgccgccggcagcggcggcggtggcgccgcctcctccggcggctccggctccggctccggctcgcaccaccaccaggatgcttcccggaacaatggcggatacggcatgtacggcggcggcggcggcatgatcatgatgatgggacagcctatgtacggctcgccgccggcgtcgtcagctgggtacgcgcagccgccgccgccccaccaccaccaccaccagatggtgatgggagggaaaggtgcgtatggccatggcggcggcggcggcggcgggccctccccgtcgtcgggatacggccggcaagacaggctatga

SEQ ID NO: 62555 - protein, 224 aa, Oryza sativa (japonica cultivar-group)
MPDSDNESGGPSNAGEYASAREQDRFLPIANVSRIMKRALPANAKISKDAKETVQECVSEFISFITGEASDKCQREKRKTINGDDLLWAMTTLGFEDYIDPLKLYLHKFRELEGEKAIGAAGSGGGGAASSGGSGSGSGSHHHQDASRNNGGYGMYGGGGGMIMMMGQPMYGSPPASSAGYAQPPPPHHHHHQMVMGGKGAYGHGGGGGGGPSPSSGYGRQDRL

SEQ ID NO: 62556 - DNA, 618 bp, Arabidopsis thaliana
  CDS (1)..(618)
atggcagagggcagtatgcgtcctccagaattcaaccagcctaacaaaaccagtaatggtggtgaggaggagtgcacggtgagggagcaagacaggttcatgcctattgccaacgtgatacggatcatgcggaggatcttacctgctcacgccaagatctcagatgactccaaggagacgatccaagagtgtgtttcggagtacatcagcttcataacaggggaggctaatgagcggtgccagcgggaacagcgcaagaccatcactgctgaggacgtcttgtgggcaatgagcaagctcggttttgatgactacatcgaacccctcacgttgtacctccaccgctacagagagttggaaggtgaaagaggggttagctgcagtgctgggtccgttagtatgaccaacggcttggtggtcaagaggcctaatgggaccatgaccgagtatggagcctacgggcctgtgccagggattcacatggcgcagtaccattatcgtcatcagaacgggtttgttttcagtggtaacgaacctaattctaagatgagtggttcatcttcaggagcaagtggcgccagagttgaagtatttccgactcaacaacataagtactga

SEQ ID NO: 62557 - protein, 205 aa, Arabidopsis thaliana
MAEGSMRPPEFNQPNKTSNGGEEECTVREQDRFMPIANVIRIMRRILPAHAKISDDSKETIQECVSEYISFITGEANERCQREQRKTITAEDVLWAMSKLGFDDYIEPLTLYLHRYRELEGERGVSCSAGSVSMTNGLVVKRPNGTMTEYGAYGPVPGIHMAQYHYRHQNGFVFSGNEPNSKMSGSSSGASGARVEVFPTQQHKY

SEQ ID NO: 62558 - DNA, 555 bp, Ciona intestinalis
  CDS (1)..(555)
atggacaacgcttctttcgcagctgatttcttgcaacttgaagatcaagaagaagaagtggcggaacaaaggccaagcaatgaacaaaaaggacaatttcgtgaacaagatatttatttaccaatagctaacgtggctcgtattatgaagaatgctgtgccaagcaatggcaagatagcaaaggacgcgaaggaatgcgtgcaagaatgtgtttctgaattcatcagcttcataacatcggaggcttctgaaagatgcgctcaggaaaaacgtaaaacaatcaatggagaggatttgttgtttgccatggcaacactgggatttgatccttacctggaaccactgaaagttttccttcaaaagtacagagattcagtgaaagtagagaaatcagcggccgaaatgagtttcattgaagctcatgacccaacagatggtgatttagacgaccattttggacaagaacattttgctgagatgttggctgctggaacgactacaactgtcttctctggcgaggcttccagtctcgaagaatctcttcagttttcctaa

SEQ ID NO: 62559 - protein, 184 aa, Ciona intestinalis
MDNASFAADFLQLEDQEEEVAEQRPSNEQKGQFREQDIYLPIANVARIMKNAVPSNGKIAKDAKECVQECVSEFISFITSEASERCAQEKRKTINGEDLLFAMATLGFDPYLEPLKVFLQKYRDSVKVEKSAAEMSFIEAHDPTDGDLDDHFGQEHFAEMLAAGTTTTVFSGEASSLEESLQFS

SEQ ID NO: 62560 - DNA, 687 bp, Arabidopsis thaliana
  CDS (1)..(687)
atggccgaatcgcaaaccggtggtggtggtggtggaagccatgagagtggcggtgatcagagcccgaggtctttgaatgttcgtgagcaggacaggtttcttccgattgctaacataagccgtatcatgaagagaggtttacctctaaatggcaaaatcgctaaagatgctaaagagactatgcaggaatgtgtctctgaattcatcagcttcgtcaccagcgaggctagtgataagtgccaaagagagaaaaggaagaccatcaatggagatgatttgctttgggctatggccactttaggattcgaagattacatcgatcccctcaaggtttacctgatgcgatatagagagatggagggtgacactaaaggatcaggaaaaggcggggaatcgagtgcaaagagagatggtcaaccaagccaagtgtctcagttctcgcaggttcctcaacaaggctcattctcacagggtccttatggaaactctcaatctctgaggttcggcaatagcatcgagcatcttgaagtgttaatgagtagtactaggacactattcatcacaatcttccgagactcgactatgcctgttgtgtctgagaatctgagtgatccactttccatagatatggattgtgaagctatttatcaccacttcattggcctgttgattctttcatgcaagtga

SEQ ID NO: 62561 - protein, 228 aa, Arabidopsis thaliana
MAESQTGGGGGGSHESGGDQSPRSLNVREQDRFLPIANISRIMKRGLPLNGKIAKDAKETMQECVSEFISFVTSEASDKCQREKRKTINGDDLLWAMATLGFEDYIDPLKVYLMRYREMEGDTKGSGKGGESSAKRDGQPSQVSQFSQVPQQGSFSQGPYGNSQSLRFGNSIEHLEVLMSSTRTLFITIFRDSTMPVVSENLSDPLSIDMDCEAIYHHFIGLLILSCK

SEQ ID NO: 62562 - DNA, 471 bp, Drosophila melanogaster
  CDS (1)..(471)
atgagcaatagcgaggactcgcagcagtatctgaacgacatgctggtcaaggaggaggacgaggcgtccggcgacgattcggacaaacaggatggagggataatgctacgcgaacaggaccgatttctgcccatctgcaacatcattaagatcatgaaggttccggtgccccagaacggcaagatagccaaggatgcacgagagtgcatccaggagtgtgtctccgagttcatatccttcattagcagtgaggccatcgaacgtagcgtcgcggagaatcgcaagacagtcaacggggacgacctgctggtggcgttcagcaatctgggattcgacaattacgtggaaccactgtccatttacctgcaaaagtaccgagagtcgaacaaatcggatcgtaatctctttctggacgccagttatccgcacaacgaagatgggtcctccgcaaacgatgcggggaaacagtaa

SEQ ID NO: 62563 - protein, 156 aa, Drosophila melanogaster
MSNSEDSQQYLNDMLVKEEDEASGDDSDKQDGGIMLREQDRFLPICNIIKIMKVPVPQNGKIAKDARECIQECVSEFISFISSEAIERSVAENRKTVNGDDLLVAFSNLGFDNYVEPLSIYLQKYRESNKSDRNLFLDASYPHNEDGSSANDAGKQ

SEQ ID NO: 62564 - DNA, 339 bp, Arabidopsis thaliana
  CDS (1)..(339)
atggcggatacgccttcgagcccagctggagatggcggagaaagcggcggttccgttagggagcaggatcgataccttcctatagctaatatcagcaggatcatgaagaaagcgttgcctcctaatggtaagattggaaaagatgctaaggatacagttcaggaatgcgtctctgagttcatcagcttcatcactagcgaggccagtgataagtgtcaaaaagagaaaaggaaaactgtgaatggtgatgatttgttgtgggcaatggcaacattaggatttgaggattacctggaacctctaaagatatacctagcgaggtacagggaggtatggtga

SEQ ID NO: 62565 - protein, 112 aa, Arabidopsis thaliana
MADTPSSPAGDGGESGGSVREQDRYLPIANISRIMKKALPPNGKIGKDAKDTVQECVSEFISFITSEASDKCQKEKRKTVNGDDLLWAMATLGFEDYLEPLKIYLARYREVW

SEQ ID NO: 62566 - DNA, 594 bp, Strongylocentrotus purpuratus
  CDS (1)..(594)
  misc_feature (133)..(133): n is a, g, c or t
  misc_feature (458)..(458): n is a, g, c or t
  misc_feature (523)..(523): n is a, g, c or t
atggagacaacagaacaaggagatggacaggtgctgagtatgtccagtgatcaatttcttactagcggcttatatgggcaaacttctgcagatgatagcttgcctggagtagcagatgacgaagggcctttanaagagaaaggagcttgttcacctctgagagaacaggacaggtttctacccatcgctaatgttgctcgtatcatgaaagatggcatccctaaatcaggaaagatatccaaggaagctaaagaatgtgttcaagaatgtgtatcagagttcatcagctttatcacaagcgaagccagtgaaaggtgtcatcaggagaagagaaagacaatcaacggagaagacatcctgtatgccatgtcaaatctgggatttgacaattacgtagacccactgaaatcctacctccaaaaatacagagagtcaatgaaaggagacaaagtcatccntcaagctaggcaagatgaacttggtgatatgtctgctgatacatttgcaactgaattgatgtcangagaccaggcgggtacacaagtctaccagcagtatccatcccaagtacagataccaatgacctttacgtga

SEQ ID NO: 62567 - protein, 197 aa, Strongylocentrotus purpuratus
  misc_feature (45)..(45): The Xaa at location 45 stands for Stop, Gln, Glu, or Lys.
  misc_feature (153)..(153): The Xaa at location 153 stands for Arg, His, Leu, or Pro.
  misc_feature (175)..(175): The Xaa at location 175 stands for Stop, Arg, or Gly.
METTEQGDGQVLSMSSDQFLTSGLYGQTSADDSLPGVADDEGPLXEKGACSPLREQDRFLPIANVARIMKDGIPKSGKISKEAKECVQECVSEFISFITSEASERCHQEKRKTINGEDILYAMSNLGFDNYVDPLKSYLQKYRESMKGDKVIXQARQDELGDMSADTFATELMSXDQAGTQVYQQYPSQVQIPMTFT

SEQ ID NO: 62568 - DNA, 540 bp, Anopheles gambiae str. PEST
  CDS (1)..(540)
atgcaggacgatatggacggtacccattcggaagactccagctgcgagcagctgctaaaggcaggaacgccactacgggagcaggaccggttcctcccgattgccaacataacgaaaataatgaaaaagtccgtaccgaataatggcaaaattgcgaaagaagcgcgtgaatgcattcaggagtgcgtgtccgagtttatctccttcatcacatccgaggcgagcgatcggtgccacatggagaagcgcaaaaccatcaacggagaggacattctgtgtgccatgtatgcgctaggtttcgacaactacatcgaaccgctcaagctctacctgagcaagtacaaggaacagaacataatgtcggagcgtcaagcatcggaggagcgcggtgagccagtgcagacgggagaatcgagccggcagggtaatgattctgtaaccgctcaagtccttcccacagttattggcaatgccgagatcatttaccagtcggaggacggcacgctgtacttcaagaacgaaccgtacgagcagatgtga

SEQ ID NO: 62569 - protein, 179 aa, Anopheles gambiae str. PEST
MQDDMDGTHSEDSSCEQLLKAGTPLREQDRFLPIANITKIMKKSVPNNGKIAKEARECIQECVSEFISFITSEASDRCHMEKRKTINGEDILCAMYALGFDNYIEPLKLYLSKYKEQNIMSERQASEERGEPVQTGESSRQGNDSVTAQVLPTVIGNAEIIYQSEDGTLYFKNEPYEQM

SEQ ID NO: 62570 - DNA, 585 bp, Magnaporthe grisea 70-15
  CDS (1)..(585)
atgtcggactcaccccaatccaatcccaaggagatcgaaggagcacacactcccgacgaggaagcacagatgaacgatcctcaggacccacagtctgccggcctcggctacgagtttgaggtcaaggagcaagatcgttggctgccaattgcaaatgtggcccgtattatgaaaaatgcactgcctgacaatgcaaagattgcaaaagaggccaaggaatgcatgcaagaatgtgtcagcgagtttatctcgtttattacaagtgaagcctccgagaaatgtcaccaagagaagcgaaagacggtgaatggagaggatatcttgttcgcaatgacgtctctcggctttgagaactacagtgaggctttgaagatctatcttgccaagtaccgtgagggccagcaaaacagacctagtagtcaaggctatggcgcgccgcctggcgccgcacctgggaccaacgctacagcaggttttcccggcggagagctcgggcaacagggaaccgaagctcctggagatgcctccggatatctctacagcacacaacctggacacaatggtgccaccgcgggtgaatactga

SEQ ID NO: 62571 - protein, 194 aa, Magnaporthe grisea 70-15
MSDSPQSNPKEIEGAHTPDEEAQMNDPQDPQSAGLGYEFEVKEQDRWLPIANVARIMKNALPDNAKIAKEAKECMQECVSEFISFITSEASEKCHQEKRKTVNGEDILFAMTSLGFENYSEALKIYLAKYREGQQNRPSSQGYGAPPGAAPGTNATAGFPGGELGQQGTEAPGDASGYLYSTQPGHNGATAGEY

SEQ ID NO: 62572 - DNA, 660 bp, Apis mellifera
  CDS (1)..(660)
atggaaaatagtggtgaaagtggtgacgatggaggacctttaggtccgactgcgtttcttggaggaggtggtgtttctgcatcatatatcagtgttcagtctgacgatatggaagatgatcctgaaaatacagatgattcaaatcatggagcaagtgatcctttgcaaggagctggaagtggcagtgttggagggcctcttcgtgaacaagatcgattccttccaatagcaaatgtagcaaaaattatgaaaagagcaataccagaagcgggaaaaatagcaaaagatgcacgtgaatgtgttcaagaatgtgtatccgaatttatatcttttatcacatcagaagcaagtgatcgatgtcatatggaaaaacgaaaaactattaatggtgaagatattctatttgctatgacaactcttggttttgacaattatgtagaaccactaaaagtatatctacaaaaatatagagaagcaacaaaaggagacaatccaggtaatgttccaacaacaggcaatggaaaaactgaaccacaaggaactatatacgaagatcaattatttgctattgctgcaactgcatctagtgctaccacttctgatacacctgttatatatagttatacttccactgatcaaatgcaatttcaactttcttga

SEQ ID NO: 62573 - protein, 219 aa, Apis mellifera
MENSGESGDDGGPLGPTAFLGGGGVSASYISVQSDDMEDDPENTDDSNHGASDPLQGAGSGSVGGPLREQDRFLPIANVAKIMKRAIPEAGKIAKDARECVQECVSEFISFITSEASDRCHMEKRKTINGEDILFAMTTLGFDNYVEPLKVYLQKYREATKGDNPGNVPTTGNGKTEPQGTIYEDQLFAIAATASSATTSDTPVIYSYTSTDQMQFQLS

SEQ ID NO: 62574 - DNA, 357 bp, Candida glabrata CBS 138
  CDS (1)..(357)
atggggaacactacagaggacgatatcgacaagcagatagaattgagggagcaagacaggtggttacccatcaataatgttgcgcgtttgatgaagaacacactaccagagactgcgaaagtttccaagagtgcgaaggagtgtatgcaagaatgtgtgagcgagttcatttcatttgtaacaagtgaggccagtgataggtgtgcgcaggatcgcaggaagaccatcaatggtgaggatattcttatatccttgcatgcattaggatttgaaaactatgctgaagtgcttaagatatacttggctaaatacaggcagcagcaagctctaaagaacaactacgaagaggactcataa

SEQ ID NO: 62575 - protein, 118 aa, Candida glabrata CBS 138
MGNTTEDDIDKQIELREQDRWLPINNVARLMKNTLPETAKVSKSAKECMQECVSEFISFVTSEASDRCAQDRRKTINGEDILISLHALGFENYAEVLKIYLAKYRQQQALKNNYEEDS

SEQ ID NO: 62576 - DNA, 660 bp, Aspergillus nidulans FGSC A4
  CDS (1)..(660)
atgtcgtcgacctctccctccaaggagcccgaggtggaacaggaacctcaatcgggtgaagaacacgagcaaatggacaaggaacaagataaccaaacgcaaggtcagggagagttcgaggtgaaggaacaagacagatggctaccaatcgcaaatgttgcgcgcatcatgaaattagcattgccagagaatgcaaagattgcaaaagaagctaaagaatgcatgcaagaatgcgtgagcgaattcatctcttttattactagcgaggcttccgaaaaatgtcaacaggaaaaacgcaagacagtcaatggagaggacatcctgtttgctatgacctcgcttggctttgaaaactatgctgaggccctcaaaatctatttgtcgaaatatcgagagactcagtctgccaggggagagcatcagaatcggccgccaagtagtgggtatgccgggggcggacccgtcggcggagctgccagcggcccttcagtcgtgcgtgccgggggtgctgcagctggaggcgccttccccgaagcctctgataatgcaggcagcattatgaatcagggcttggacccatctgagcaggacgcctcagcttatggataccctcccatggttggccaaggtcataacggagctggtggcgaatcttattag

SEQ ID NO: 62577 - protein, 219 aa, Aspergillus nidulans FGSC A4
MSSTSPSKEPEVEQEPQSGEEHEQMDKEQDNQTQGQGEFEVKEQDRWLPIANVARIMKLALPENAKIAKEAKECMQECVSEFISFITSEASEKCQQEKRKTVNGEDILFAMTSLGFENYAEALKIYLSKYRETQSARGEHQNRPPSSGYAGGGPVGGAASGPSVVRAGGAAAGGAFPEASDNAGSIMNQGLDPSEQDASAYGYPPMVGQGHNGAGGESY

SEQ ID NO: 62578 - DNA, 576 bp, Cryptococcus neoformans var. neoformans B-3501A
  CDS (1)..(576)
atgtcagaacatacaaacctcaaaagccttgccccgctaggcaaccaacccgagccctccgctaattcggcaggagtaggcccctcgaagccatttacagaggctcaggttgaggagtttcgagaacaagatcgttggctgccgattgcgaacgtggcgcgaatcatgaagtcttcattaccaacttcagccaaagtgtcgaaggaagccaaggaatgtgtccaagaatgtgtgtcggaatttatctcttttatcacatcagaagcggctgaaaaatgtctgaatgaaaagaggaagacgttaaacggggaggatatacttacatccatgcgcgcgttggggttcgacaattatgagggtgttttgagagtgtacctggcgaaatatcgcgattcacatcattccataccaaaacgcaacgcgcaacacgaagacgacgacgaggaagttcaagatgggcgaaaaaagcgcggacgggggaggcaaccagctggcggcaccatttcgaccaacggccatgcagaggggacaaagtctaaacgaaaaagaagtgatgacgggaaaggtgtacgatag

SEQ ID NO: 62579 - protein, 191 aa, Cryptococcus neoformans var. neoformans B-3501A
MSEHTNLKSLAPLGNQPEPSANSAGVGPSKPFTEAQVEEFREQDRWLPIANVARIMKSSLPTSAKVSKEAKECVQECVSEFISFITSEAAEKCLNEKRKTLNGEDILTSMRALGFDNYEGVLRVYLAKYRDSHHSIPKRNAQHEDDDEEVQDGRKKRGRGRQPAGGTISTNGHAEGTKSKRKRSDDGKGVR

SEQ ID NO: 62580 - DNA, 612 bp, Tribolium castaneum
  CDS (1)..(612)
atggaaaagacagaactgtcagatgacatcacacacacatttgcgctctcagaccagcactacatggtccaagtggaagaaatggatgacgaaacggagcagctcacggccgaaaacacggacgactcaaaccacgaccccattgacaaagtcggggcgccgctccgcgagcaagacaggtttttgccgatcgcaaacgtcgcaaagatcatgaagaaagcaattccagaaacgggaaagatcgcgaaggacgcccgcgagtgtgtgcaggaatgcgtgtctgagttcatcagttttatcaccagcgaggccagtgatcggtgttatatggagaaacggaagactatcaacggggaggatattttatacgcaatgagttcgttagggtttgacaattatgtcgagcctttgaagctgtacctcctcaaataccgagaggccgctaagagcgataagaatctccaaccgagcgaaatggcctttgacgaaacctctgacgagagttacaactcaacagtcacacgaaacgttatagctgcggaaccagggggcactgaaacggttatttacacatatcaggacactaacattcaccaattccaaattaactaa

SEQ ID NO: 62581 - protein, 203 aa, Tribolium castaneum
MEKTELSDDITHTFALSDQHYMVQVEEMDDETEQLTAENTDDSNHDPIDKVGAPLREQDRFLPIANVAKIMKKAIPETGKIAKDARECVQECVSEFISFITSEASDRCYMEKRKTINGEDILYAMSSLGFDNYVEPLKLYLLKYREAAKSDKNLQPSEMAFDETSDESYNSTVTRNVIAAEPGGTETVIYTYQDTNIHQFQIN

SEQ ID NO: 62582 - DNA, 642 bp, Theobroma cacao
  CDS (1)..(642)
atggaacgtggaggcttccatggctaccgcaagctccccaacaacactacttccggactgaaggtaccagagatgaacatgagaatggctgaagtcaaccatacaaacaaccactcaaactctgatgacaatgagtgcactgtgagagaacaagaccgcttcatgccaattgcaaacgttatcaggatcatgcgcaagatcctccccccacacgccaaaatctctgacgacgccaaggaaacaatccaagaatgtgtgtccgagtacatcagcttcatcactggcgaagccaatgagcgctgccaacgtgagcagcgcaagactaccactgctgaggatgtgctttgggcgatgagcaagctaggcttcgatgactacatcgaacctctgacagtataccttcaccgctaccgcgagctggagggtgaacgtggttcgatcagaggtgagccactggggaagagagcagttgattatggagctttgagtgttgctgcttttgcaccggcgttccacatggggcatcaccatgggttctttgggggtggaggagccatgggaggatatctcaaggatgcatccaatgcagggtcatcacaggctgcagtggcaaacggcgaaccattcgggcaccataaatga

SEQ ID NO: 62583 - protein, 213 aa, Theobroma cacao
MERGGFHGYRKLPNNTTSGLKVPEMNMRMAEVNHTNNHSNSDDNECTVREQDRFMPIANVIRIMRKILPPHAKISDDAKETIQECVSEYISFITGEANERCQREQRKTTTAEDVLWAMSKLGFDDYIEPLTVYLHRYRELEGERGSIRGEPLGKRAVDYGALSVAAFAPAFHMGHHHGFFGGGGAMGGYLKDASNAGSSQAAVANGEPFGHHK

SEQ ID NO: 62584 - DNA, 555 bp, Medicago truncatula
  CDS (1)..(555)
atggctgattcagacaatgaatccggaggagcaccgaacgccggcaacagcgagttatcaccacgagaacaagaccgatttttaccaatagcaaacgtgagcagaataatgaagaaggcgttaccagcaaacgcgaagatctcgaaagatgctaaggaaacggtgcaggaatgtgtatcggagttcatcagcttcatcaccggtgaagcttccgataagtgtcagagagagaaacgaaagacgatcaacggcgacgatctactttgggcgatgactacgttaggatttgaagagtacgttgaaccgttgaagatttatcttcaacgattcagagagatcgaaggtgagaaaaccgttgctgcacgtgataaagatggtgttgctccatcttcttcttcgtcttcagtttttgattatggtgctcctcctcctcaagttggattgatcatgcatcatcagcatcagggacacgtgtacggttctggtggttttcatcaagtgcctggtgggcctgtttatcctaatgctggatctaatgcgggtagacccaggtag

SEQ ID NO: 62585 - protein, 184 aa, Medicago truncatula
MADSDNESGGAPNAGNSELSPREQDRFLPIANVSRIMKKALPANAKISKDAKETVQECVSEFISFITGEASDKCQREKRKTINGDDLLWAMTTLGFEEYVEPLKIYLQRFREIEGEKTVAARDKDGVAPSSSSSSVFDYGAPPPQVGLIMHHQHQGHVYGSGGFHQVPGGPVYPNAGSNAGRPR

SEQ ID NO: 62586 - DNA, 648 bp, Aspergillus oryzae
  CDS (1)..(648)
atgtcgtcgacctctccttcgaaagaacctgaagtggaacctgaagttcaatcgggtgaagagcaggaacaaatggacaaggaacaacaagaccaggcacagaaccagggagagtttgaagtgaaggagcaggataggtggttacccattgccaatgttgcccgcatcatgaaattggccctgccggacaatgccaagattgcaaaagaagccaaggaatgtatgcaagaatgtgtgagcgagttcatctcattcattaccagtgaagcgtccgagaagtgccaacaggaaaagcgcaaaaccgtcaatggagaggacatcctgtttgccatgacctcgctgggttttgaaaactatgcggaagcccttaaaatctatttgtcgaagtaccgtgagacccaatctgcgaggggtgagcatcagaacaggccaaccagcagcggatacgcctctggcggaccggtcggaggcgtaagctctgctccaggaggacgtccggcaaccgcgggaggattccccgatgctgctgataacaccaacagcatcatgaatccaagcttagatcccactgaacaagatccctctgcctatgggtacccgcccatggtgggccagccgcacaatggaacggctggcgattcctattaa

SEQ ID NO: 62587 - protein, 215 aa, Aspergillus oryzae
MSSTSPSKEPEVEPEVQSGEEQEQMDKEQQDQAQNQGEFEVKEQDRWLPIANVARIMKLALPDNAKIAKEAKECMQECVSEFISFITSEASEKCQQEKRKTVNGEDILFAMTSLGFENYAEALKIYLSKYRETQSARGEHQNRPTSSGYASGGPVGGVSSAPGGRPATAGGFPDAADNTNSIMNPSLDPTEQDPSAYGYPPMVGQPHNGTAGDSY

SEQ ID NO: 62588 - DNA, 817 bp, Salvia miltiorrhiza
  CDS (135)..(737)
cacgaggtctctctctcctctctcagatttctccctcttcgcccaatcattcttctccctttttctccccttcccagcgcgccaaatacaaatcctccagggtttttttttcatcatctcttttttgaggaagaatggcggacagtcccggtggccatggcagccacgacaacggcggtggcggagatcacagcccgcagtctagcgttcgggagcaggaccgttttcttccgattgcgaacatcgggcgcataatgaagaaagggctaccgcagaatggaaagattgctaaggatgctaaagacaccgttcaggaatgtgtttcggagtttattagcttcgttaccagcgaagctagcgataaatgccagaaagagaaaagaaagacaataaacggggatgatttgttgtgggctatggcgacattaggttttgaggattacattgctccactgaaggtctacttggctaggtacagagagttagagggtgacaccaagggatctgctaggggtgcagatggagctcctaagagagatacagtcggaactcagctaggttccgatgcaagtttgctcatcaaggctcttttgctcaaggcttcggctactctaactcccaaatcgaatattaagaagcataatgttgtttggctctctacagctcatttttggctgagtctgtctcaggatacaatgttcagttgctatagcttcaaatggctgggatttctataggaaatatatacgtaatccaagtatagtttgtgcaattatccttagctatttctgatattgtatatctctgaatgctactg

SEQ ID NO: 62589 - protein, 200 aa, Salvia miltiorrhiza
MADSPGGHGSHDNGGGGDHSPQSSVREQDRFLPIANIGRIMKKGLPQNGKIAKDAKDTVQECVSEFISFVTSEASDKCQKEKRKTINGDDLLWAMATLGFEDYIAPLKVYLARYRELEGDTKGSARGADGAPKRDTVGTQLGSDASLLIKALLLKASATLTPKSNIKKHNVVWLSTAHFWLSLSQDTMFSCYSFKWLGFL

SEQ ID NO: 62590 - DNA, 558 bp, Brassica oleracea
  CDS (1)..(558)
atgggggattccgacaaggactccggtggagggcaaaacggacagtctccgttgtctcccagagagcaagacaggttcctaccgatcgctaacgtgagcaggatcatgaagaaggccttgccagcgaacgccaagatatccaaagatgctaaagagacgatgcaggagtgcgtctctgagtttataagcttcgtcacgggagaggcgtcggataagtgccagaaggagaagaggaagacgatcaacggcgatgatttgctatgggctatgaccactctagggtttgaggattacgttgagccgctgaaggtttacttgcagaggtttagggagatcgaaggggagagggctggagtggggaggccacagacaggtggtgaaggtggagagcatcagagagatgcaggtgtgggcgatggcggtggattctacggtggtgggatgcagtatcaccagcatcatcagtttcttcaccaacagaaccatatgtatggttccacaggcggtggtgggggtgacggtggaggaggagctggctccggtaggactagaacttaa

SEQ ID NO: 62591 - protein, 185 aa, Brassica oleracea
MGDSDKDSGGGQNGQSPLSPREQDRFLPIANVSRIMKKALPANAKISKDAKETMQECVSEFISFVTGEASDKCQKEKRKTINGDDLLWAMTTLGFEDYVEPLKVYLQRFREIEGERAGVGRPQTGGEGGEHQRDAGVGDGGGFYGGGMQYHQHHQFLHQQNHMYGSTGGGGGDGGGGAGSGRTRT

SEQ ID NO: 62592 - DNA, 645 bp, Helianthus annuus
  CDS (1)..(645)
atggaacgtggaggaggtttccatggctaccacaggctccccatccaccctacatctgggatgcaacagccggatatgaagcagaagcaaccagacacaaccaacaccacatttacagaagacaatgagtgcattgttagagagcaagaccgctttatgccgatagcaaacgtgatcaggatcatgcgaaagatcttgccacctcacgcgaagatctctgacgacgcaaaagaaacgatccaagaatgtgtttccgagtacattagttttgtgacaggtgaagcgaatgaccgttgccaacgcgagcagagaaagactatcacagctgaagatgtgttgtgggctatgagcaaactcgggtttgatgactatatcgaaccgttgactgtgtatcttcatcgctacagggagtttgatgggggtgagcgtgggtcgataaggggtgagccgcttgtcaagagggctgcggctactgctgaccctggtccgtttggtatgggtccgtttgtgcctggttttcacatgggtcatcataatgggttctttggtcctgctagcattgctggtttctttaaggacccgtcgagtgcggctggccagtctgggcctgctggtttcgagccgtatgctcagtgtaaagactaa

SEQ ID NO: 62593 - protein, 214 aa, Helianthus annuus
MERGGGFHGYHRLPIHPTSGMQQPDMKQKQPDTTNTTFTEDNECIVREQDRFMPIANVIRIMRKILPPHAKISDDAKETIQECVSEYISFVTGEANDRCQREQRKTITAEDVLWAMSKLGFDDYIEPLTVYLHRYREFDGGERGSIRGEPLVKRAAATADPGPFGMGPFVPGFHMGHHNGFFGPASIAGFFKDPSSAAGQSGPAGFEPYAQCKD

SEQ ID NO: 62594 - DNA, 609 bp, Neurospora crassa
  CDS (1)..(609)
atgtccgactccccccaatccaattcaaaggatgtcgaacaaggtgcaccgtcacccggcgaggaaccacaaatgaacgaccctcaggacccacactcgagcgggctcaaccagtatgagttcgaagtcaaggaacaggaccggtggttgcccatagccaatgtcgcccgcattatgaagaatgcgcttcccgaaaatgcaaagatagccaaggaggcaaaggagtgcatgcaagagtgcgtgagcgagttcatctcgtttatcactagcgaagcttcggaaaaatgccagcaagaaaagcgcaagaccgtaaacggcgaggacatcttgttcgcaatgacgtccctgggattcgagaattatgccgaagctctcaagatttatctttccaagtatagagaacagcagaatcagacaaatcgtagcgagaaccagcaaaatcgacccagcagccaaggctacggcgcgcctcagggccagaaccaacctggacaaggcgggttttccagcaacgatctcggtggccagcaagaaagtggcgatgcttcaggctacaacctctatggcgctcagacaggacacaacggtggcggcgctgaagggtactag

SEQ ID NO: 62595 - protein, 202 aa, Neurospora crassa
MSDSPQSNSKDVEQGAPSPGEEPQMNDPQDPHSSGLNQYEFEVKEQDRWLPIANVARIMKNALPENAKIAKEAKECMQECVSEFISFITSEASEKCQQEKRKTVNGEDILFAMTSLGFENYAEALKIYLSKYREQQNQTNRSENQQNRPSSQGYGAPQGQNQPGQGGFSSNDLGGQQESGDASGYNLYGAQTGHNGGGAEGY

SEQ ID NO: 62596 - DNA, 765 bp, Oryza sativa subsp
  CDS (1)..(765)
atggaggcggctacccgggcgcggcggcggaacggcgctgccgccgacgggaacggtggcgcgcaacaggcggcggccgcgccggctatacgtgagcaggaccggctgatgccgatcgcgaacgtgatccgcatcatgcgccgcgtgctcccggcgcacgccaagatctcggacgacgccaaggagacgatccaggagtgcgtgtcggagtacatcagcttcatcaccggggaggccaacgagcggtgccagcgcgagcagcgcaagaccatcaccgccgaggacgtgctctgggccatgagccgcctcggcttcgacgactacgtcgagcccctcggcgtctacctccaccgctaccgcgagttcgagggggagtcccgcggcgtcggcgtcggcgtcggcgccgcgcgcggcgaccaccaccatggtcacgtcggtgggatgctcaagtcccgcgcgcagggctccatggtgacgcaccacgacatgcagatgcacgcggccatgtacggtggcggcgcggtgccgccgccgccgcatcctcctccgcaccaccacgcgttccaccagctcatgccgccgcaccacggccagtacgcgccgccgtacgacatgtacggcggcgagcacgggatggcggcgtactacggcgggatgtacgcgcccggcagcggcggcgacgggagcggcagcagcggcagcggtggcgccggcacgccgcagaccgtcaacttcgagcaccagcatccgttcggatacaagtag

SEQ ID NO: 62597 - protein, 254 aa, Oryza sativa subsp
MEAATRARRRNGAAADGNGGAQQAAAAPAIREQDRLMPIANVIRIMRRVLPAHAKISDDAKETIQECVSEYISFITGEANERCQREQRKTITAEDVLWAMSRLGFDDYVEPLGVYLHRYREFEGESRGVGVGVGAARGDHHHGHVGGMLKSRAQGSMVTHHDMQMHAAMYGGGAVPPPPHPPPHHHAFHQLMPPHHGQYAPPYDMYGGEHGMAAYYGGMYAPGSGGDGSGSSGSGGAGTPQTVNFEHQHPFGYK

SEQ ID NO: 62598 - DNA, 624 bp, Daucus carota
  CDS (1)..(624)
atggagagagcagatcaacaggcaagaggctttcaggggtaccgaaagattcatcagcagcaacagttgcctgcttctgggacggcaagtacagggactgacaataatccagcggctggtgatcaagattgccttgtgagagaacaagataggttcatgccgattgccaatgtgatacgccttatgcggaaaagcatcccttcccatgcaaagatctctgatgatgccaaagaactggtgcaagaaagtgtgtctgagttcatcagctttgtaacaagtgaagcaaactacaggtgccagaaggagcagcggaagaccatcactgcagaagatgtgctctgggcaatgagcagtctggggtttgatgactacgtcgagccactcaccttctacctggaccgctttcgtgaggctgatgggggtgagcgcagcgcactgaggggtgagccactggtgaggaggtcaggggagcacggggcaccggggattcctccaacatttgcaccagggtactatatggggccgcataatgcgcttctaggggctgtgacaatggggagctttgtgaatgatgttcacaatgctggaccgtctggtgctggagttaatacccttgatccataa

SEQ ID NO: 62599 - protein, 207 aa, Daucus carota
MERADQQARGFQGYRKIHQQQQLPASGTASTGTDNNPAAGDQDCLVREQDRFMPIANVIRLMRKSIPSHAKISDDAKELVQESVSEFISFVTSEANYRCQKEQRKTITAEDVLWAMSSLGFDDYVEPLTFYLDRFREADGGERSALRGEPLVRRSGEHGAPGIPPTFAPGYYMGPHNALLGAVTMGSFVNDVHNAGPSGAGVNTLDP

SEQ ID NO: 62600 - DNA, 657 bp, Aspergillus niger
  CDS (1)..(657)
atgtcgtcgacctctccctcgaaggaaccggaggtggaacccgaagttcaatcgggtgaagaccaggaacaaatggataaggaacaacaagacactcaggcgcagggtcagggagagttcgaggtgaaggagcaggatagatggctaccaattgcaaatgtggcccgcatcatgaagctggctttgcctgaaaatgccaaaatcgcaaaggaggccaaggagtgtatgcaagagtgtgtgagcgagtttatctcattcatcactagcgaagcctccgagaaatgccagcaagaaaagcgcaagaccgttaacggggaggacattctattcgccatgacctccctcggctttgaaaactatgcagaggcccttaagatttacctgtccaagtatcgcgagacccaatccgccagaggcgagcaccagaaccgtccaacaagcagtggatatggtgctggcgcgcccgtaggggccccgggacctgccggtcctggtggccgtccaatggcaccaggtgcagggtttcctgatactgctgacagcgccaacaatatcatgaaccaaagcttggacccgtctgagcaggacacttccacttatggctaccccccgatggtcggccagccgcacaacggcaccgctggtgaatcttattag

SEQ ID NO: 62601 - protein, 218 aa, Aspergillus niger
MSSTSPSKEPEVEPEVQSGEDQEQMDKEQQDTQAQGQGEFEVKEQDRWLPIANVARIMKLALPENAKIAKEAKECMQECVSEFISFITSEASEKCQQEKRKTVNGEDILFAMTSLGFENYAEALKIYLSKYRETQSARGEHQNRPTSSGYGAGAPVGAPGPAGPGGRPMAPGAGFPDTADSANNIMNQSLDPSEQDTSTYGYPPMVGQPHNGTAGESY

SEQ ID NO: 62602 - DNA, 651 bp, Phaseolus coccineus
  CDS (1)..(651)
atggaaagtggaggctttcatggctaccgcaagctccccaacaccacctctcctgggttgaagctgtcagtgtcagacatgaacaacgtgaacacgagtaggcaggtagcaggagacaacaaccacacagcggatgagagcaacgaatgcactgtgagggagcaagaccgtttcatgccaattgcaaatgtgatcaggatcatgcgaaagattcttcctccacatgccaagatctcaggtgatgccaaagaaacaattcaagagtgtgtgtctgagtacatcagctttatcaccggagaggcaaacgagcgttgccagagggaacaacgcaagaccataactgctgaggacgtgctttgggccatgagcaagcttggatttgatgattacatggagccactgaccatgtaccttcacaggtatcgtgagcttgagggtgaccgaacctccatgagaggtgaatcattggggaagaggactattgaatacgcccctatgggtgttggcgttgctactgcttttgtgccaccacagtttcacccaaatggatactatggtcctgccatgggagcttacgttgcgccaccaaatgctgcgtcctctcatcaccatggaatgccaaatactgaaccgaatgctcgctccatgtga

SEQ ID NO: 62603 - protein, 216 aa, Phaseolus coccineus
MESGGFHGYRKLPNTTSPGLKLSVSDMNNVNTSRQVAGDNNHTADESNECTVREQDRFMPIANVIRIMRKILPPHAKISGDAKETIQECVSEYISFITGEANERCQREQRKTITAEDVLWAMSKLGFDDYMEPLTMYLHRYRELEGDRTSMRGESLGKRTIEYAPMGVGVATAFVPPQFHPNGYYGPAMGAYVAPPNAASSHHHGMPNTEPNARSM

SEQ ID NO: 62604 - DNA, 837 bp, Zea mays
  CDS (1)..(837)
atggactccagcagcttcctccctgccgccggcgcggagaatggctcggcggcgggcggcgccaacaatggcggcgctgctcagcagcatgcggcgccggcgatccgcgagcaggaccggctgatgccgatcgcgaacgtgatccgcatcatgcggcgcgtgctgccggcgcacgccaagatctcggacgacgccaaggagacgatccaggagtgcgtgtcggagtacatcagcttcatcacgggggaggccaacgagcggtgccagcgggagcagcgcaagaccatcaccgccgaggacgtgctgtgggccatgagccgcctcggcttcgacgactacgtcgagccgctcggcgcctacctccaccgctaccgcgagttcgagggcgacgcgcgcggcgtcgggctcgtcccgggggccgccccatcgcgcggcggcgaccaccacccgcactccatgtcgccagcggcgatgctcaagtcccgcgggccagtctccggagccgccatgctaccgcaccaccaccaccaccacgacatgcagatgcacgccgccatgtacgggggaacggccgtgcccccgccggccgggcctcctcaccacggcgggttcctcatgccacacccacagggtagtagccactacctgccttacgcgtacgagcccacgtacggcggtgagcacgccatggctgcatactatggaggcgccgcgtacgcgcccggcaacggcgggagcggcgacggcagtggcagtggcggcggtggcgggagcgcgtcgcacacaccgcagggcagcggcggcttggagcacccgcacccgttcgcgtacaagtag

SEQ ID NO: 62605 - protein, 278 aa, Zea mays
MDSSSFLPAAGAENGSAAGGANNGGAAQQHAAPAIREQDRLMPIANVIRIMRRVLPAHAKISDDAKETIQECVSEYISFITGEANERCQREQRKTITAEDVLWAMSRLGFDDYVEPLGAYLHRYREFEGDARGVGLVPGAAPSRGGDHHPHSMSPAAMLKSRGPVSGAAMLPHHHHHHDMQMHAAMYGGTAVPPPAGPPHHGGFLMPHPQGSSHYLPYAYEPTYGGEHAMAAYYGGAAYAPGNGGSGDGSGSGGGGGSASHTPQGSGGLEHPHPFAYK

SEQ ID NO: 62606 - DNA, 615 bp, Trichoderma reesei
  CDS (1)..(615)
atgtccgactcccctcaatctcctccaaaggatgtcgaccaaggtgcacagtcacccgacgaggaaggacaaatgaatgacaaccaggaaccccactcggccggagggactggctacgagtttgaaggtgtcaaggagcaagaccggtggttgcctatagccaatgtggctcgaatcatgaagaatgccctgccggacaatgccaaaatagccaaggaagccaaagaatgcatgcaggagtgtgtgagcgagttcatctcgttcatcacgagcgaagcctctgagaaatgtcaacaggaaaagcgcaagacggtcaatggagaagatattctcttcgccatgacgtccctgggctttgagaactacgcggaggctctcaaggtgtacctgtcaaagtaccgcgagcaacaaaaccagtcgaaccgtgatcgcgtcctagagaacaacacttgggggaacgccatgatccctggcgagaagactgagcctggcacaaccaatcccgaatatgcaccacccgaaggagcgaacccccccgaaagcggtgccgagccaaattacatgtacacttctcatgccggtcacaacggcgctggtgctggggagaactattag

SEQ ID NO: 62607 - protein, 204 aa, Trichoderma reesei
MSDSPQSPPKDVDQGAQSPDEEGQMNDNQEPHSAGGTGYEFEGVKEQDRWLPIANVARIMKNALPDNAKIAKEAKECMQECVSEFISFITSEASEKCQQEKRKTVNGEDILFAMTSLGFENYAEALKVYLSKYREQQNQSNRDRVLENNTWGNAMIPGEKTEPGTTNPEYAPPEGANPPESGAEPNYMYTSHAGHNGAGAGENY

SEQ ID NO: 62608 - DNA, 618 bp, Kluyveromyces lactis
  CDS (1)..(618)
atggatacagagacagaagctgagaagcaagagaggcataataactatcttaacgaactagcggagcaagatcgatggcttccgattaacaacgtcgcaagactaatgaaaaacacgttgccagcgaccacaaaggtatctaaagatgcgaaggaatgtatgcaagagtgcgtaagcgaattcatatcgtttgtcactagcgaggcctgtgatagatgtaccagtgggaagcgtaagactattaacggtgaagatattcttctatcgctacatgcattgggattcgagaactatgccgaagtgctcaagatttacctagcaaaatacagacaacaacaggcaataaagaatcagatgatgtaccctaaggaggatgtggaaggttcatacacagaagaagaatcaagggcagaagacgcagatcacgtgacacaggaaaggcagcaacctcttcatcctgtgccttcttcagcttccacgacgacaagcacagaggtatcggcatcagaacatgtacagtcgtcttcaaaaagcactcataatccagcacaagctcaaccacggattgtcgtccaacagccactgggatcgcgccattctactgcggatcacttgtaa

SEQ ID NO: 62609 - protein, 205 aa, Kluyveromyces lactis
MDTETEAEKQERHNNYLNELAEQDRWLPINNVARLMKNTLPATTKVSKDAKECMQECVSEFISFVTSEACDRCTSGKRKTINGEDILLSLHALGFENYAEVLKIYLAKYRQQQAIKNQMMYPKEDVEGSYTEEESRAEDADHVTQERQQPLHPVPSSASTTTSTEVSASEHVQSSSKSTHNPAQAQPRIVVQQPLGSRHSTADHL

SEQ ID NO: 62610 - DNA, 457 bp, Arabidopsis thaliana
  CDS (1)..(426)
atggcggatacgccttcgagcccagctggagatggcggagaaagcggcggttccgttagggagcaggatcgataccttcctatagctaatatcagcaggatcatgaagaaagcgttgcctcctaatggtaagattggaaaagatgctaaggatacagttcaggaatgcgtctctgagttcatcagcttcatcactagcgaggccagtgataagtgtcaaaaagagaaaaggaaaactgtgaatggtgatgatttgttgtgggcaatggcaacattaggatttgaggattacctggaacctctaaagatatacctagcgaggtacagggagttggagggtgataataagggatcaggaaagagtggagatggatcaaatagagatgctggtggcggtgtttctggtgaagaaatgccgagctggtaaaagaagttgcaagtagtgattaagaacaatc

SEQ ID NO: 62611 - protein, 141 aa, Arabidopsis thaliana
MADTPSSPAGDGGESGGSVREQDRYLPIANISRIMKKALPPNGKIGKDAKDTVQECVSEFISFITSEASDKCQKEKRKTVNGDDLLWAMATLGFEDYLEPLKIYLARYRELEGDNKGSGKSGDGSNRDAGGGVSGEEMPSW

SEQ ID NO: 62612 - DNA, 573 bp, Arabidopsis thaliana
  CDS (1)..(573)
atgggggattccgacagggattccggtggagggcaaaacgggaacaaccagaacggacagtcctccttgtctccaagagagcaagacaggttcttgccgatcgctaacgtcagccggatcatgaagaaggccttgcccgccaacgccaagatctctaaagatgccaaagagacgatgcaggagtgtgtctccgagttcatcagcttcgtcaccggagaagcatctgataagtgtcagaaggagaagaggaagacgatcaacggagacgatttgctctgggctatgactactctaggttttgaggattatgttgagccattgaaagtttacttgcagaggtttagggagatcgaaggggagaggactggactagggaggccacagactggtggtgaggtcggagagcatcagagagatgctgtcggagatggcggtgggttctacggtggtggtggtgggatgcagtatcaccaacatcatcagtttcttcaccagcagaaccatatgtatggagccacaggtggcggtagcgacagtggaggtggagctgcctccggtaggacaaggacttaa

SEQ ID NO: 62613 - protein, 190 aa, Arabidopsis thaliana
MGDSDRDSGGGQNGNNQNGQSSLSPREQDRFLPIANVSRIMKKALPANAKISKDAKETMQECVSEFISFVTGEASDKCQKEKRKTINGDDLLWAMTTLGFEDYVEPLKVYLQRFREIEGERTGLGRPQTGGEVGEHQRDAVGDGGGFYGGGGGMQYHQHHQFLHQQNHMYGATGGGSDSGGGAASGRTRT

SEQ ID NO: 62614 - DNA, 486 bp, Arabidopsis thaliana
  CDS (1)..(486)
atggcggattcggacaacgattcaggaggacacaaagacggtggaaatgcttcgacacgtgagcaagataggtttctaccgatcgctaacgttagcaggatcatgaagaaagcacttcctgcgaacgcaaaaatctctaaggatgctaaagaaacggttcaagagtgtgtatcggaattcataagtttcatcaccggtgaggcttctgacaagtgtcagagagagaagaggaagacaatcaacggtgacgatcttctttgggcgatgactacgctagggtttgaggactacgtggagcctctcaaggtttatctgcaaaagtatagggaggtggaaggagagaagactactacggcagggagacaaggcgataaggaaggtggaggaggaggcggtggagctggaagtggaagtggaggagctccgatgtacggtggtggcatggtgactacgatgggacatcaattttcccatcatttttcttaa

SEQ ID NO: 62615 - protein, 161 aa, Arabidopsis thaliana
MADSDNDSGGHKDGGNASTREQDRFLPIANVSRIMKKALPANAKISKDAKETVQECVSEFISFITGEASDKCQREKRKTINGDDLLWAMTTLGFEDYVEPLKVYLQKYREVEGEKTTTAGRQGDKEGGGGGGGAGSGSGGAPMYGGGMVTTMGHQFSHHFS

SEQ ID NO: 62616 - DNA, 432 bp, Oryza sativa subsp
  CDS (1)..(432)
atgtcggaggggttcgacgggacggagaacggcggcggcggcggcggaggcggagtagggaaggagcaggaccggttcctgccgatcgccaacatcggccgcatcatgcgccgggccgtgccggagaacggcaagatcgccaaggactccaaggagtccgtccaggagtgcgtctccgagttcatcagcttcatcaccagcgaagcaagcgacaagtgcctcaaggagaagcgcaagaccatcaatggggacgacctgatctggtcaatgggcacgctcggattcgaggactatgtcgagcctctcaagctctacctcaggctctaccgggagacggagggtgacacaaagggttcaagagcttctgaactgccagtaaagaaagatgttgtacttaatggagatcctggatcatcgtttgaaggcatgtag

SEQ ID NO: 62617 - protein, 143 aa, Oryza sativa subsp
MSEGFDGTENGGGGGGGGVGKEQDRFLPIANIGRIMRRAVPENGKIAKDSKESVQECVSEFISFITSEASDKCLKEKRKTINGDDLIWSMGTLGFEDYVEPLKLYLRLYRETEGDTKGSRASELPVKKDVVLNGDPGSSFEGM

SEQ ID NO: 62618 - DNA, 483 bp, Arabidopsis thaliana
  CDS (1)..(483)
atggcggggaattatcattcgttccaaaatccaatccctcgataccagaattacaacttcgggagcagctcatctaatcatcaacatgaacatgatgggttagtggtggtggtggaggatcaacagcaagaagaaagcatgatggtaaaagaacaagacaggctacttccgatagcaaacgtaggaaggatcatgaagaacatcctcccagcaaacgcaaaggtctctaaagaagccaaagagactatgcaagaatgtgtgtccgagttcattagcttcgtcacgggagaagcatccgataaatgccacaaggagaagcgaaagaccgttaatggagacgatatctgttgggctatggctaatctagggtttgatgattacgccgcccagctcaagaagtacttacatcgttaccgagttctcgaaggtgagaaacctaatcatcacggcaaaggaggacctaaatcctcgccagataattaa

SEQ ID NO: 62619 - protein, 160 aa, Arabidopsis thaliana
MAGNYHSFQNPIPRYQNYNFGSSSSNHQHEHDGLVVVVEDQQQEESMMVKEQDRLLPIANVGRIMKNILPANAKVSKEAKETMQECVSEFISFVTGEASDKCHKEKRKTVNGDDICWAMANLGFDDYAAQLKKYLHRYRVLEGEKPNHHGKGGPKSSPDN

SEQ ID NO: 62620 - DNA, 522 bp, Arabidopsis thaliana
  CDS (1)..(522)
atggcggagtcgcaggccaagagtcccggaggctgtggaagccatgagagtggtggagatcaaagtcccaggtcgttacatgttcgtgagcaagataggtttcttccgattgctaacataagccgtatcatgaaaagaggtcttcctgctaatgggaaaatcgctaaagatgctaaggagattgtgcaggaatgtgtctctgaattcatcagtttcgtcaccagcgaagcgagtgataaatgtcaaagagagaaaaggaagactattaatggagatgatttgctttgggcaatggctactttaggatttgaagactacatggaacctctcaaggtttacctgatgagatatagagagatggagggtgacacaaagggatcagcaaaaggtggggatccaaatgcaaagaaagatgggcaatcaagccaaaatggccagttctcgcagcttgctcaccaaggtccttatgggaactctcaagctcagcagcatatgatggttccaatgccgggaacagactag

SEQ ID NO: 62621 - protein, 173 aa, Arabidopsis thaliana
MAESQAKSPGGCGSHESGGDQSPRSLHVREQDRFLPIANISRIMKRGLPANGKIAKDAKEIVQECVSEFISFVTSEASDKCQREKRKTINGDDLLWAMATLGFEDYMEPLKVYLMRYREMEGDTKGSAKGGDPNAKKDGQSSQNGQFSQLAHQGPYGNSQAQQHMMVPMPGTD

SEQ ID NO: 62622 - DNA, 531 bp, Arabidopsis thaliana
  CDS (1)..(531)
atggccgaatcgcaaaccggtggtggtggtggtggaagccatgagagtggcggtgatcagagcccgaggtctttgaatgttcgtgagcaggacaggtttcttccgattgctaacataagccgtatcatgaagagaggtttacctctaaatggcaaaatcgctaaagatgctaaagagactatgcaggaatgtgtctctgaattcatcagcttcgtcaccagcgaggctagtgataagtgccaaagagagaaaaggaagaccatcaatggagatgatttgctttgggctatggccactttaggattcgaagattacatcgatcccctcaaggtttacctgatgcgatatagagagatggagggtgacactaaaggatcaggaaaaggcggggaatcgagtgcaaagagagatggtcaaccaagccaagtgtctcagttctcgcaggttcctcaacaaggctcattctcacagggtccttatggaaactctcaaggttcgaatatgatggttcaaatgccgggcacagagtag

SEQ ID NO: 62623 - protein, 176 aa, Arabidopsis thaliana
MAESQTGGGGGGSHESGGDQSPRSLNVREQDRFLPIANISRIMKRGLPLNGKIAKDAKETMQECVSEFISFVTSEASDKCQREKRKTINGDDLLWAMATLGFEDYIDPLKVYLMRYREMEGDTKGSGKGGESSAKRDGQPSQVSQFSQVPQQGSFSQGPYGNSQGSNMMVQMPGTE

SEQ ID NO: 62624 - DNA, 612 bp, Oryza sativa
  CDS (1)..(612)
atgatgatgatggatctagggtttttggagggcggcgcggggatggcggacgcggggcacgacgagagcgggagcccgccgaggagcggcggggtgagggagcaggacaggttcctgcccatcgccaacatcagccgcatcatgaagaaggccgtcccggcgaacggcaagatcgccaaggacgccaaggagaccctgcaggagtgcgtctcggagttcatctccttcgtcaccagcgaggcgagcgacaaatgtcagaaggagaagcgcaagaccatcaacggggaagatctcctctttgcgatgggtacgcttggctttgaggagtacgttgatccgttgaagatctatttacacaagtacagagaggtaattggtgatagtaagctgtcctcaaaggctggtgatggttcagtaaagaaggatacaattggtccgcacagtggcgctagtagctcaagtgcgcaagggatggttggggcttacacccaagggatgggttatatgcaacctcagagcaattttcacatattggtagttctgcaatcttttgcattcccatacatgtatcaggtggcacaaatctattgcaagtaccctagcattgaataa

SEQ ID NO: 62625 - protein, 203 aa, Oryza sativa
MMMMDLGFLEGGAGMADAGHDESGSPPRSGGVREQDRFLPIANISRIMKKAVPANGKIAKDAKETLQECVSEFISFVTSEASDKCQKEKRKTINGEDLLFAMGTLGFEEYVDPLKIYLHKYREVIGDSKLSSKAGDGSVKKDTIGPHSGASSSSAQGMVGAYTQGMGYMQPQSNFHILVVLQSFAFPYMYQVAQIYCKYPSIE

SEQ ID NO: 62626 - DNA, 537 bp, Oryza sativa
  CDS (1)..(537)
atgatgatgatggatctagggtttttggagggcggcgcggggatggcggacgcggggcacgacgagagcgggagcccgccgaggagcggcggggtgagggagcaggacaggttcctgcccatcgccaacatcagccgcatcatgaagaaggccgtcccggcgaacggcaagatcgccaaggacgccaaggagaccctgcaggagtgcgtctcggagttcatctccttcgtcaccagcgaggcgagcgacaaatgtcagaaggagaagcgcaagaccatcaacggggaagatctcctctttgcgatgggtacgcttggctttgaggagtacgttgatccgttgaagatctatttacacaagtacagagaggtaattggtgatagtaagctgtcctcaaaggctggtgatggttcagtaaagaaggatacaattggtccgcacagtggcgctagtagctcaagtgcgcaagggatggttggggcttacacccaagggatgggttatatgcaacctcagtatcataatggggacacctaa

SEQ ID NO: 62627 - protein, 178 aa, Oryza sativa
MMMMDLGFLEGGAGMADAGHDESGSPPRSGGVREQDRFLPIANISRIMKKAVPANGKIAKDAKETLQECVSEFISFVTSEASDKCQKEKRKTINGEDLLFAMGTLGFEEYVDPLKIYLHKYREVIGDSKLSSKAGDGSVKKDTIGPHSGASSSSAQGMVGAYTQGMGYMQPQYHNGDT

SEQ ID NO: 62628 - DNA, 495 bp, Oryza sativa
  CDS (1)..(495)
atggcggacgcggggcacgacgagagcgggagcccgccgaggagcggcggggtgagggagcaggacaggttcctgcccatcgccaacatcagccgcatcatgaagaaggccgtcccggcgaacggcaagatcgccaaggacgccaaggagaccctgcaggagtgcgtctcggagttcatctccttcgtcaccagcgaggcgagcgacaaatgtcagaaggagaagcgcaagaccatcaacggggaagatctcctctttgcgatgggtacgcttggctttgaggagtacgttgatccgttgaagatctatttacacaagtacagagaggtaattggtgatagtaagctgtcctcaaaggctggtgatggttcagtaaagaaggatacaattggtccgcacagtggcgctagtagctcaagtgcgcaagggatggttggggcttacacccaagggatgggttatatgcaacctcagtatcataatggggacacctaa

SEQ ID NO: 62629 - protein, 164 aa, Oryza sativa
MADAGHDESGSPPRSGGVREQDRFLPIANISRIMKKAVPANGKIAKDAKETLQECVSEFISFVTSEASDKCQKEKRKTINGEDLLFAMGTLGFEEYVDPLKIYLHKYREVIGDSKLSSKAGDGSVKKDTIGPHSGASSSSAQGMVGAYTQGMGYMQPQYHNGDT

SEQ ID NO: 62630 - DNA, 435 bp, Oryza sativa
  CDS (1)..(435)
atgacgaacgggcaggacaacctgctgccgatcgccaacgtgggccggatcatgaaggacgggctgccgccgcaggcgaagatatcgaagcgggccaaggagacgatccaggagtgcgcgacggagttcatcagcttcgtcaccggcgaggcgtcggagcggtgccggcgggagcggcggaagacggtgaacggcgacgacgtctgccacgccatgaggagcctcggcctcgaccactacgccgacgccatgcacaggtacctgcagaggtaccgcgagggcgaggagctcgccgcgtcgctcaacagcagcagcagcgccgccgccgccgccgccgccgccggcagcaggggcggtggcgccatacagatcgacgtgagagctgagctctccatcttcagatcaggcaacaaccaaggtcgtccaaacaattaa

SEQ ID NO: 62631 - protein, 144 aa, Oryza sativa
MTNGQDNLLPIANVGRIMKDGLPPQAKISKRAKETIQECATEFISFVTGEASERCRRERRKTVNGDDVCHAMRSLGLDHYADAMHRYLQRYREGEELAASLNSSSSAAAAAAAAGSRGGGAIQIDVRAELSIFRSGNNQGRPNN

SEQ ID NO: 62632 - DNA, 432 bp, Oryza sativa
  CDS (1)..(432)
atggcggatgggccggggagcccggggggaggaggggggagccacgagagcgggagcccgagggggggagggggaggagggggaggtgggggtgggggtgggggggtgagggagcaggacaggttcctccccatcgccaacatcagccgcatcatgaagaaggccatcccggccaacgggaagatcgccaaggacgccaaggagaccgtgcaggagtgcgtctccgagttcatctccttcatcaccagcgaggcgagcgataaatgccagagggagaagcgcaagaccatcaacggcgacgacttgctgtgggcgatggccacgctgggcttcgaggactacatcgagcccctcaaggtctacctgcagaagtacagagaggtgcgtactgatgtggatgtttggaattggggtgattctctgttgatttaa

SEQ ID NO: 62633 - protein, 143 aa, Oryza sativa
MADGPGSPGGGGGSHESGSPRGGGGGGGGGGGGGGVREQDRFLPIANISRIMKKAIPANGKIAKDAKETVQECVSEFISFITSEASDKCQREKRKTINGDDLLWAMATLGFEDYIEPLKVYLQKYREVRTDVDVWNWGDSLLI

SEQ ID NO: 62634 - DNA, 378 bp, Oryza sativa
  CDS (1)..(378)
atgtcggaggggttcgacgggacggagaacggcggcggcggcggcggaggcggagtagggaaggagcaggaccggttcctgccgatcgccaacatcggccgcatcatgcgccgggccgtgccggagaacggcaagatcgccaaggactccaaggagtccgtccaggagtgcgtctccgagttcatcagcttcatcaccagcgaagcaagcgacaagtgcctcaaggagaagcgcaagaccatcaatggggacgacctgatctggtcaatgggcacgctcggattcgaggactatgtcgagcctctcaagctctacctcaggctctaccgggaggtattggtgacacaaagggttcaagagcttctgaactgccagtaa

SEQ ID NO: 62635 - protein, 125 aa, Oryza sativa
MSEGFDGTENGGGGGGGGVGKEQDRFLPIANIGRIMRRAVPENGKIAKDSKESVQECVSEFISFITSEASDKCLKEKRKTINGDDLIWSMGTLGFEDYVEPLKLYLRLYREVLVTQRVQELLNCQ

SEQ ID NO: 62636 - DNA, 894 bp, Oryza sativa
  CDS (1)..(894)
atgaagagtaggaagagctatgggcacttgctgagcccggtgggcagcccgccgttggacaacgagtccggcgaggcggcggcggcggctgcggctggcggcggcggctgcgggagcagcgccgggtatgtcgtctacggcggcggcggcggtggggactcgccggcgaaggagcaggacaggttcctgccgatcgcgaacgtgagccgcatcatgaagcggtcgctgccggcgaacgccaagatctccaaggagtcgaaggagacggtgcaggagtgcgtgtcggagttcatcagcttcgttacaggcgaggcctccgacaagtgccagcgcgagaagcggaagaccatcaacggcgacgacctcctctgggccatgaccacgctggggttcgaggcctacgtcggcccgctcaagtcctacctcaaccgctaccgcgaggccgagggcgagaaggccgacgtgctcggcggcgccggcggcgccgccgcggcgcgccacggcgagggcggttgctgcggcggcggcggcggcggcgccgatggcgtcgtcatcgacgggcattacccgctcgccggcggcctgtcacactcacaccatggtcatcagcagcaggacggcggcggcgacgtcgggctcatgatgggcggcggcgacgccggcgtcgggtacaacgccggggccgggtcgacgacgacggcgttctacgcgccggcggcgacggcggcgtcagggaacaaggcgtactgcggcggcgacgggtcgagggtgatggagttcgagggcatcggcggcgaggaggagagcggaggcggcggcggcggcggcgagagggggttcgccggccacctccatggcgtgcaatggtttagactaaagaggaatactaattag

SEQ ID NO: 62637 - protein, 297 aa, Oryza sativa
MKSRKSYGHLLSPVGSPPLDNESGEAAAAAAAGGGGCGSSAGYVVYGGGGGGDSPAKEQDRFLPIANVSRIMKRSLPANAKISKESKETVQECVSEFISFVTGEASDKCQREKRKTINGDDLLWAMTTLGFEAYVGPLKSYLNRYREAEGEKADVLGGAGGAAAARHGEGGCCGGGGGGADGVVIDGHYPLAGGLSHSHHGHQQQDGGGDVGLMMGGGDAGVGYNAGAGSTTTAFYAPAATAASGNKAYCGGDGSRVMEFEGIGGEEESGGGGGGGERGFAGHLHGVQWFRLKRNTN

SEQ ID NO: 62638 - DNA, 513 bp, Brassica napus
  CDS (1)..(513)
atggcggactccgacaacgattctggcggccacaaggacggaggcggcgcgtcgtcgcgtgagcaggataggtttctgccgatcgcgaacgtgagccggatcatgaagaaagcattgcctgggaacgcgaagatctccaaggacgcgaaggagaccgtgcaggagtgcgtatcggagttcatcagtttcgtcaccggcgaggcgtcggacaagtgtcagagagagaagaggaagacgatcaacggcgacgatcttctctgggcgatgacgacgctggggttcgaggattacgtggagccgttgaaggtgtacctgcagaagtacagggaggtggaaggggagaggatgacgacggggagacagggggataaggaaggtggcggcggaggaggaaatggaagctccgggggatccggtggaggatacaatggaggaggagggatgtacggtgggattgtgacgatggggcatcctcatcaaggacacgtgtacggtggaagtgggataaattag

SEQ ID NO: 62639 - protein, 170 aa, Brassica napus
MADSDNDSGGHKDGGGASSREQDRFLPIANVSRIMKKALPGNAKISKDAKETVQECVSEFISFVTGEASDKCQREKRKTINGDDLLWAMTTLGFEDYVEPLKVYLQKYREVEGERMTTGRQGDKEGGGGGGNGSSGGSGGGYNGGGGMYGGIVTMGHPHQGHVYGGSGIN

SEQ ID NO: 62640 - DNA, 471 bp, Brassica napus
  CDS (1)..(471)
atggctgggaactatcattcgttcgaaaacccaatccatagattcaaaaattacaactttgggagcagctcatctcatcatcaaaatcatgatggtttattggtggaggatcaacaacaagaggaaaacatgatgataaaagaacaagacagactacttccgatagcaaacgtaggaaggatcatgaagaacattctcccaccaaacgcaaagatctctaaagaagcaaaagagactatgcaagaatgtgtgtccgagttcataagcttcgtcaccggagaagcctccgataaatgccacaaggagaagagaaagaccgtcaatggagacgatatctgttgggctatggcaaatctagggtttgatgattacgccgagcaactcaggaagtacttaaatcgttaccgagttattgaaggtgagagagccaatcatggcagaggagctaagttatcctcaccggataattaa

SEQ ID NO: 62641 - protein, 156 aa, Brassica napus
MAGNYHSFENPIHRFKNYNFGSSSSHHQNHDGLLVEDQQQEENMMIKEQDRLLPIANVGRIMKNILPPNAKISKEAKETMQECVSEFISFVTGEASDKCHKEKRKTVNGDDICWAMANLGFDDYAEQLRKYLNRYRVIEGERANHGRGAKLSSPDN

SEQ ID NO: 62642 - DNA, 693 bp, Brassica napus
  CDS (1)..(693)
atggaacgtggagctcctctctctcactatcagctacccaaatctaactctggactgaacttggaccagcacaacaactcaatcccgacaatgaccggctccatcggtgcatgcgacgacaagaacaagactatcttgccgcagcaacaaccaagcatgcctcgtgagcaagaccaatacatgccaatcgcaaacgtgataaggatcatgcgtaaaatcttaccgccacacgccaaaatctctgacgacgcaaaagaaacgattcaagaatgcgtctccgagtacatcagcttcgtgaccggtgaagctaacgagcgttgccaacgtgagcaacgtaagacaataactgctgaagatatcctttgggcaatgagcaaacttgggttcgatgattacgttggaccactcaacgtgttcattaaccggtaccgtgagttcgagaccgatcgtgggtgttcacttagaggtgagtcatcatttaaaccggtctacggaggaagtggtatggggtttcacggcccacctccaccgggttcttatggttatggtatgttggatcagtctatggtcatgggtggtggtcggtactaccataacggatcgggtccggatggatcagtaggtggtggcggtggatcttcctcttctatgaatggaatgccggtttatgaccagtatggtcagtataagtga

SEQ ID NO: 62643 - protein, 230 aa, Brassica napus
MERGAPLSHYQLPKSNSGLNLDQHNNSIPTMTGSIGACDDKNKTILPQQQPSMPREQDQYMPIANVIRIMRKILPPHAKISDDAKETIQECVSEYISFVTGEANERCQREQRKTITAEDILWAMSKLGFDDYVGPLNVFINRYREFETDRGCSLRGESSFKPVYGGSGMGFHGPPPPGSYGYGMLDQSMVMGGGRYYHNGSGPDGSVGGGGGSSSSMNGMPVYDQYGQYK

SEQ ID NO: 62644 - DNA, 516 bp, Glycine max
  CDS (1)..(516)
atggccgacggtccggctagcccaggcggcggcagccacgagagcggcgaccacagccctcgctctaacgtgcgcgagcaggacaggtacctccctatcgctaacataagccgcatcatgaagaaggcacttcctgccaacggtaaaatcgcaaaggacgccaaagagaccgttcaggaatgcgtctccgagttcatcagcttcatcaccagcgaggcctctgataagtgtcagagagaaaagagaaagactattaacggcgatgatttgctctgggcgatggccactctcggtttcgaggattatatggatcctcttaaaatttacctcactagataccgagagatggagggtgatacgaagggctctgccaagggtggagactcatctgctaagagagatgttcagccaagtcctaatgctcagcttgctcatcaaggttctttctcacaaaatgttacttacccgaattctcagggtcaacatatgatggttccaatgcaaggcccggagtag

SEQ ID NO: 62645 - protein, 171 aa, Glycine max
MADGPASPGGGSHESGDHSPRSNVREQDRYLPIANISRIMKKALPANGKIAKDAKETVQECVSEFISFITSEASDKCQREKRKTINGDDLLWAMATLGFEDYMDPLKIYLTRYREMEGDTKGSAKGGDSSAKRDVQPSPNAQLAHQGSFSQNVTYPNSQGQHMMVPMQGPE

SEQ ID NO: 62646 - DNA, 498 bp, Glycine max
  CDS (1)..(498)
atggctgagtcggacaacgactcgggaggggcgcagaacgcgggaaacagtggaaacttgagcgagttgtcgcctcgggaacaggaccggtttctccccatagcgaacgtgagcaggatcatgaagaaggccttgccggcgaacgcgaagatctcgaaggacgcgaaggagacggtgcaggaatgcgtgtcggagttcatcagcttcataacgggtgaggcgtcggacaagtgccagagggagaagcgcaagaccatcaacggcgacgatcttctctgggccatgacaaccctgggattcgaagagtacgtggagcctctgaagatttacctccagcgcttccgcgagatggagggagagaagaccgtggccgcccgcgactcttctaaggactcggcctccgcctcctcctatcatcagggacacgtgtacggctcccctgcctaccatcatcaagtgcctgggcccacttatcctgcccctggtagacccagatga

SEQ ID NO: 62647 - protein, 165 aa, Glycine max
MAESDNDSGGAQNAGNSGNLSELSPREQDRFLPIANVSRIMKKALPANAKISKDAKETVQECVSEFISFITGEASDKCQREKRKTINGDDLLWAMTTLGFEEYVEPLKIYLQRFREMEGEKTVAARDSSKDSASASSYHQGHVYGSPAYHHQVPGPTYPAPGRPR

SEQ ID NO: 62648 - DNA, 444 bp, Glycine max
  CDS (1)..(444)
atgggtgacaacaacataggcaaagtcttagagagagaaggctttaagtacaacttcacggcagctgcaagtgacacctctgcacaagatgaggtgattaaagagcaagatcggttgcttccaatagcaaatgtggggcgcatcatgaagcaaatccttcctcctaacgccaagatctcaaaggaagctaaagaaaccatgcaagaatgtgtgtccgagttcattagctttgtcactggggaagcttctgacaagtgtcacaaggagaagcgcaagaccgtgaatggcgacgatatttgctgggcccttgctaccctagggtttgatgactactctgagccacttaaaaggtacttgcataagtatagggagttcgaaggggagagagcaaatcaaaataagggtaacaacaacacttatgaaaacaacattgcaaacatataa

SEQ ID NO: 62649 - protein, 147 aa, Glycine max
MGDNNIGKVLEREGFKYNFTAAASDTSAQDEVIKEQDRLLPIANVGRIMKQILPPNAKISKEAKETMQECVSEFISFVTGEASDKCHKEKRKTVNGDDICWALATLGFDDYSEPLKRYLHKYREFEGERANQNKGNNNTYENNIANI

SEQ ID NO: 62650 - DNA, 741 bp, Linum usitatissimum
  CDS (1)..(741)
atggcggaacatgcagcaacagtcgctggtggctttcatggctatcggagcagcagcactaggcccaggccttcctccccaactgcaacagctacagggaagttgccggcagggagggtgcaagcggaggccaacaacaacactaacatgaatatgagcaagtcaattgaggcggaggagtgcacggtgagggagcaagatcggttcatgcccatcgcgaatgtgataaggataatgaggaagatactgcctccgcacgctaagatatccgacgacgccaaggagacgatacaggaatgcgtgtcagagtacataagctttataaccagtgaggccaatgagcgttgtcagcgtgagcagcgcaaaaccattaccgcagaggatattctctttgccatgagcaagcttggttttgacgactacatcgagccactcaccctttacctccaccgttttcgtgatcttgaaggagcagctgcatcctcctccagtagtactgtgcgcgtggctgatcagcacctgcgctctctcaagaggaacaccattaatggtggtctcatgctcgactatttggcctctaattcctccggctcatttcatcaccaccaccaccatggtgttggtgggctttatggagctagtgagtcccatatttccaaccgtatgccacgcggtaatggcaccagtagtaacgggaaccatgaccatccaaattttggtcaccagcagcagcataagtga

SEQ ID NO: 62651 - protein, 246 aa, Linum usitatissimum
MAEHAATVAGGFHGYRSSSTRPRPSSPTATATGKLPAGRVQAEANNNTNMNMSKSIEAEECTVREQDRFMPIANVIRIMRKILPPHAKISDDAKETIQECVSEYISFITSEANERCQREQRKTITAEDILFAMSKLGFDDYIEPLTLYLHRFRDLEGAAASSSSSTVRVADQHLRSLKRNTINGGLMLDYLASNSSGSFHHHHHHGVGGLYGASESHISNRMPRGNGTSSNGNHDHPNFGHQQQHK

SEQ ID NO: 62652 - DNA, 522 bp, Hordeum vulgare
  CDS (1)..(522)
atgccggactcggacaacgactccagtgggccgagcaacgcgggcggggagctgtcgtcgccgcgggagcaggaccgcttcctgcccatcgccaacgtcagccggatcatgaagaaggcgctcccggccaacgccaagatcagcaaggacgccaaggagacggtgcaggagtgcgtctccgagttcatctccttcatcaccggcgaggcctccgacaagtgccagcgcgagaagcgcaagaccatcaacggcgacgacctgctctgggcaatgaccaccctcggcttcgaggactacgtcgagccgcttaagtactacctccacaagttccgcgagatcgagggcgagagggcggctccctccaccaccaccaccaccgcatcaaccacgccgccgcacctgcccgagatgccaaggagcaacaatgccggcggttacgccgagtacggcagcggagccaccgtccccgccccgggaggcatgatgatgatgggccttcccacggcacgccgccagctgtaa

SEQ ID NO: 62653 - protein, 173 aa, Hordeum vulgare
MPDSDNDSSGPSNAGGELSSPREQDRFLPIANVSRIMKKALPANAKISKDAKETVQECVSEFISFITGEASDKCQREKRKTINGDDLLWAMTTLGFEDYVEPLKYYLHKFREIEGERAAPSTTTTTASTTPPHLPEMPRSNNAGGYAEYGSGATVPAPGGMMMMGLPTARRQL

SEQ ID NO: 62654 - DNA, 528 bp, Brassica napus
  CDS (1)..(528)
atggccgagtcgcagaccaagagtcccggagaccacgtgagcggcggagaccagagcccgaggtcgtcgtcgcacgtccgcgagcaagacaggtttctcccgatagcgaacataagccgaataatgaaaagagggctccctgctaatggtaagatcgctaaagacgccaaggagattctccaggagtgcgtctccgagttcatcagcttcatcaccagcgaagcgagtgataagtgccaaagagagaaacggaagaccattaatggagatgatttgctttgggctatggccactttaggatttgaagactacattgatcccctcaaggtttacctcactcgatatagagagatggagggtgacacaaagggatcagcaaagggcggggatgcgaatgcaaagaaagatgggcaatcaagccaaaatggccagttctcgcagcttgctcaccaaggctctttctcacaaggtccttacggcagctctcaaggtcagcatatgatggttccaatgccgggcacagactag

SEQ ID NO: 62655 - protein, 175 aa, Brassica napus
MAESQTKSPGDHVSGGDQSPRSSSHVREQDRFLPIANISRIMKRGLPANGKIAKDAKEILQECVSEFISFITSEASDKCQREKRKTINGDDLLWAMATLGFEDYIDPLKVYLTRYREMEGDTKGSAKGGDANAKKDGQSSQNGQFSQLAHQGSFSQGPYGSSQGQHMMVPMPGTD

SEQ ID NO: 62656 - DNA, 585 bp, Brassica napus
  CDS (1)..(585)
atgggagattccgacagagattccggcggaggacaaaccgggaacaaccaaaacggacagtcttccctgtctccgcgagagcaagacaggttcctcccgatcgctaacgtgagccggatcatgaagaaagctttgccagcaaacgccaagatctccaaagacgctaaagagacgatgcaggagtgcgtctccgagtttataagcttcgtcaccggagaggcctcggataagtgtcagaaggagaagaggaagacgatcaacggcgacgatctgctctgggcgatgaccacgctagggttcgaggattacgtggagccgctgaaggtttaccttcagaagtacagggaggtggaaggcgagaggatgactccaggagggagacagggcgataaagagggcggcggcggaagtggaggagggatgtacggtgggattgtgacgatggggacatcatcatcaaggacacgtgtacggtggaagtgggatgaattagagaatgagaaacgtctctgctctctccttgcggcagctctgacttggttaactcgaaatggctctcacaggagaatactatatgcaatgtaa

SEQ ID NO: 62657 - protein, 194 aa, Brassica napus
MGDSDRDSGGGQTGNNQNGQSSLSPREQDRFLPIANVSRIMKKALPANAKISKDAKETMQECVSEFISFVTGEASDKCQKEKRKTINGDDLLWAMTTLGFEDYVEPLKVYLQKYREVEGERMTPGGRQGDKEGGGGSGGGMYGGIVTMGTSSSRTRVRWKWDELENEKRLCSLLAAALTWLTRNGSHRRILYAM

SEQ ID NO: 62658 - DNA, 528 bp, Brassica napus
  CDS (1)..(528)
atggcggagtcgcaggccaagagtcccggaggcggtgagagcggcggagaccagagccccaggtcgtcgtcgcacgtccgcgagcaagacaggtttcttccgattgcgaacataagccgaatcatgaaaagaggtctccctgctaatgggaagatcgctaaggacgccaaggagattgtccaggagtgcgtctccgagttcatcagcttcatcaccagcgaagcgagtgataagtgccaaagagagaagcggaagaccattaatggagatgatttgctttgggctatggccactttaggttttgaagactacattgatcccctcaaggtttacctcactcgatatagagagatggagggtgacacaaagggatcagcaaagggcggggatgcgaatgcaaagaaagatgggcaatcaagccaaaatggccagttctcgcagcttgctcaccaaggctctttctcacaaggtccttacggcagctctcaaggtcagcatatgatggttccaatgccgggcacagactag

SEQ ID NO: 62659 - protein, 175 aa, Brassica napus
MAESQAKSPGGGESGGDQSPRSSSHVREQDRFLPIANISRIMKRGLPANGKIAKDAKEIVQECVSEFISFITSEASDKCQREKRKTINGDDLLWAMATLGFEDYIDPLKVYLTRYREMEGDTKGSAKGGDANAKKDGQSSQNGQFSQLAHQGSFSQGPYGSSQGQHMMVPMPGTD

SEQ ID NO: 62660 - DNA, 567 bp, Brassica napus
  CDS (1)..(567)
atggcggattccgataacgattcaggcggtcacaaggacggaggcggcgcgtcgtctcgcgagcaggacaggttcctcccgatcgcgaacgtgagccggatcatgaagaaggcgctcccggcgaacgcgaagatctcaaaggacgcgaaggagacggtgcaggagtgcgtgtcggagttcataagcttcgtcacgggggaggcgtcggacaagtgccagagagagaagaggaagacgatcaacggcgacgatcttctctgggcgatgacgacgctggggttcgaggattacgtggagccgttgaaggtttaccttcagaagtacagggaggtggaaggcgagaggatgactccaggagggagacagggcgataaagagggcggcggcggaagtggaggagggatgtacggtgggattgtgacgatggggacatcatcatcaaggacacgtgtacggtggaagtgggatgaattagagaatgagaaacgtctctgctctctccttgcggcagctctgacttggttaactcgaaatggctctcacaggagaatactatatgcaatgtaa

SEQ ID NO: 62661 - protein, 188 aa, Brassica napus
MADSDNDSGGHKDGGGASSREQDRFLPIANVSRIMKKALPANAKISKDAKETVQECVSEFISFVTGEASDKCQREKRKTINGDDLLWAMTTLGFEDYVEPLKVYLQKYREVEGERMTPGGRQGDKEGGGGSGGGMYGGIVTMGTSSSRTRVRWKWDELENEKRLCSLLAAALTWLTRNGSHRRILYAM

SEQ ID NO: 62662 - DNA, 432 bp, Brassica napus
  CDS (1)..(432)
atggcggatacgccttcgagtccagccggagacggcggagaaagcggcggcggatcggttagggagcaggaccggtacctacctatagctaatataagcaggatcatgaagaaggcgttgcctccaaacggcaagatcgggaaagatgctaaagacactgttcaggaatgcgtctctgagttcatcagcttcatcaccagcgaggcaagtgataagtgccagaaagagaagaggaaaactgtgaatggtgaggatttgctgtgggcaatggcaacgttggggtttgaggattaccttgaacccttgaaggtataccttgcgaggtacagggagttggagggagataacaaggggtcaggaaagagcggagatggatctaatagagatgcagctgctgggggtgttccgaatgaagatatgccgagctggtga

SEQ ID NO: 62663 - protein, 143 aa, Brassica napus
MADTPSSPAGDGGESGGGSVREQDRYLPIANISRIMKKALPPNGKIGKDAKDTVQECVSEFISFITSEASDKCQKEKRKTVNGEDLLWAMATLGFEDYLEPLKVYLARYRELEGDNKGSGKSGDGSNRDAAAGGVPNEDMPSW

SEQ ID NO: 62664 - DNA, 498 bp, Brassica napus
  CDS (1)..(498)
atggcggattccgacaacgattcaggcggccacaaggacggaggcggcgcgtcgtcgcgtgagcaggataggtttctgccgatcgcgaacgtgagccggatcatgaagaaagcattgccggggaacgcgaagatctccaaggacgcgaaggagaccgtgcaggagtgcgtatcggagttcatcagcttcgtcaccggcgaggcgtcggacaagtgtcagagagagaagaggaagacgatcaacggcgacgatcttctctgggcgatgacgacgctagggttcgaggattacgtggagccgttgaaggtgtacctgcagaagtacagggaggtggaaggggagaggatgacgacggggagacagggggataaggaaggtggcggcggaggaggaaatggaagctccgggggatccggaggaggagggatgtacggtgggattgtgacgatggggcatcctcatcaaggacacgtgtacggtggaagtgggataaattag

SEQ ID NO: 62665 - protein, 165 aa, Brassica napus
MADSDNDSGGHKDGGGASSREQDRFLPIANVSRIMKKALPGNAKISKDAKETVQECVSEFISFVTGEASDKCQREKRKTINGDDLLWAMTTLGFEDYVEPLKVYLQKYREVEGERMTTGRQGDKEGGGGGGNGSSGGSGGGGMYGGIVTMGHPHQGHVYGGSGIN

SEQ ID NO: 62666 - DNA, 498 bp, Brassica napus
  CDS (1)..(498)
atggcggattccgacaacgattcaggcggccacaaggacggaggcggcgcgtcgtcgcgtgagcaggataggtttctgccgatcgcgaacgtgagccggatcatgaagaaagcattgccgggaaacgcgaagatctccaaggacgcgaaggagaccgtgcaggagtgcgtatcggagttcatcagcttcgtcaccggcgaggcgtccgacaagtgtcagagagagaagaggaagacgatcaacggcgacgatcttctctgggcgatgacgacgctagggttcgaggattacgtggagccgttgaaggtctacctgcagaagtacagggagttggaaggggagaggatgacgacggggagacagggggataaggaaggtggcggcggcggaggaaatggaagctccgggggatccggaggaggagggatgtacggtgggattgtgacgatggggcatcatcatcaaggacacgtgtacggtggaagtgggataaattag

SEQ ID NO: 62667 - protein, 165 aa, Brassica napus
MADSDNDSGGHKDGGGASSREQDRFLPIANVSRIMKKALPGNAKISKDAKETVQECVSEFISFVTGEASDKCQREKRKTINGDDLLWAMTTLGFEDYVEPLKVYLQKYRELEGERMTTGRQGDKEGGGGGGNGSSGGSGGGGMYGGIVTMGHHHQGHVYGGSGIN

SEQ ID NO: 62668 - DNA, 561 bp, Brassica napus
  CDS (1)..(561)
atggcggattccgacaacgattcaggcggccacaaggacggaggcagcgcatcgtcgcgtgagcaggataggtttctcccgatcgcgaacgtgagtcggatcatgaagaaagcgttgccggcgaacgccaaaatctccaaggacgcgaaggagacggtgcaggagtgcgtatccgagttcataagcttcgtcaccggagaggcatccgacaagtgtcagagagagaagaggaagacgatcaacggcgacgatcttctatgggcgatgacgacgctagggttcgaggattacgtggagccgttgaaggtttacctgcagaagtacagggaggtggaaggggagaggacgaccacggggaaacaggtggataaggaaggtggagctggaggaaatgggaactctagtggcggcggaggaggaggatacaatggtggaggacgtgcgacggcgggaggagggatgtacggtgggattgtgacgatggggaatcatcatcaaggacacgtgtacggtggagggatgcatcccacgcagcaaagcgggtccgcacgtgctgattag

SEQ ID NO: 62669 - protein, 186 aa, Brassica napus
MADSDNDSGGHKDGGSASSREQDRFLPIANVSRIMKKALPANAKISKDAKETVQECVSEFISFVTGEASDKCQREKRKTINGDDLLWAMTTLGFEDYVEPLKVYLQKYREVEGERTTTGKQVDKEGGAGGNGNSSGGGGGGYNGGGRATAGGGMYGGIVTMGNHHQGHVYGGGMHPTQQSGSARAD

SEQ ID NO: 62670 - DNA, 543 bp, Brassica napus
  CDS (1)..(543)
atggcggactcgcaggctaagtcgtcggggatgagtcccggagtaggaggcggtggaagccacgagagcggcggagatcagagcccgaggtcgatgaatgttcgtgagcaggataggtttctcccgatcgctaacataagccgaatcatgaagaggggtttgcctgctaacggcaagattgctaaagacgctaaagagactatgcaggagtgcgtctctgagttcatcagcttcgtcaccagcgaagcgagtgataagtgccagagagagaagaggaagactatcaatggagatgatttgctttgggctatgaccactttaggatttgaagagtacgttgagcctctcaagttttacctgacgagatacagagagatggagggtgacaacaagggatcaggaaaaggcggggaatcaagtgctaagagagatggtcaaccaggccaatttctgcagcagggccagcaaggctctttctcacaaggtccttatggaaacgctcaaggttcgcatatgatggttcagatgccgaacgcagagtag

SEQ ID NO: 62671 - protein, 180 aa, Brassica napus
MADSQAKSSGMSPGVGGGGSHESGGDQSPRSMNVREQDRFLPIANISRIMKRGLPANGKIAKDAKETMQECVSEFISFVTSEASDKCQREKRKTINGDDLLWAMTTLGFEEYVEPLKFYLTRYREMEGDNKGSGKGGESSAKRDGQPGQFLQQGQQGSFSQGPYGNAQGSHMMVQMPNAE

SEQ ID NO: 62672 - DNA, 567 bp, Glycine max
  CDS (1)..(567)
atggcggactcggacaacgactccggcggcgcgcacaacgccgggaaggggagcgagatgtcgccgcgggagcaggaccggttcctgccgatcgcgaacgtgagccgcatcatgaagaaggcgctgccggcgaacgcgaagatctcgaaggacgcgaaggagacggtgcaggagtgcgtgtcggagttcatcagcttcatcaccggcgaggcctccgacaagtgccagcgggagaagcgcaagacgatcaacggcgacgacctgctctgggcgatgaccactctcggcttcgaggactacgtcgagcctctcaagggctacctccagcgcttccgagaaatggaaggagagaagacagtggcggcgcgtgacaaggacgcgcctcctcctaccaatgctaccaacagtgcctacgagagtcctagttatgctgctgctcctggtggaatcatgatgcatcagggacacgtgtacggttctgccggcttccatcaagtggctggtggtgctataaagggtgggcctgtttatcccgggcctggatccaatgccggtaggcccagataa

SEQ ID NO: 62673 - protein, 188 aa, Glycine max
MADSDNDSGGAHNAGKGSEMSPREQDRFLPIANVSRIMKKALPANAKISKDAKETVQECVSEFISFITGEASDKCQREKRKTINGDDLLWAMTTLGFEDYVEPLKGYLQRFREMEGEKTVAARDKDAPPPTNATNSAYESPSYAAAPGGIMMHQGHVYGSAGFHQVAGGAIKGGPVYPGPGSNAGRPR

SEQ ID NO: 62674 - DNA, 522 bp, Glycine max
  CDS (1)..(522)
atgtcggatgcgccaccgagcccgactcatgagagtgggggcgagcagagcccgcgcggttcgtcgtccggcgcgagggagcaggaccggtacctcccgattgccaacatcagccgcattatgaagaaggctctgcctcccaacggcaagattgcaaaggatgccaaagacaccatgcaggaatgcgtttctgagttcatcagcttcattaccagcgaggcgagtgagaaatgccagaaggagaagagaaagacaatcaatggagacgatttgctatgggccatggccactttaggatttgaagactacatagagccgcttaaggtgtacctggctaggtacagagaggcggagggtgacactaaaggatctgctagaagtggtgatggatctgctacaccagatcaagttggccttgcaggtcaaaattctcagcttgttcatcagggttcgctgaactatattggtttgcaggtgcaaccacaacatctggttatgccttcaatgcaaagccatgaatag

SEQ ID NO: 62675 - protein, 173 aa, Glycine max
MSDAPPSPTHESGGEQSPRGSSSGAREQDRYLPIANISRIMKKALPPNGKIAKDAKDTMQECVSEFISFITSEASEKCQKEKRKTINGDDLLWAMATLGFEDYIEPLKVYLARYREAEGDTKGSARSGDGSATPDQVGLAGQNSQLVHQGSLNYIGLQVQPQHLVMPSMQSHE

SEQ ID NO: 62676 - DNA, 681 bp, Glycine max
  CDS (1)..(681)
atggaaactggaggctttcacggctaccgcaagctccccaacaccaccgctgggttgaagctgtcagtgtcagacatgaacatgaggcagcaggtagcatcatcagatcacagtgcagccacaggagaggagaacgaatgcacggtgagggagcaagacaggttcatgccaatcgccaacgtgattaggatcatgcgcaagattctccctccacacgcaaaaatctcggacgatgcaaaagaaacaatccaagagtgcgtgtctgagtacatcagcttcatcacaggtgaggcgaacgagcgttgccagagggagcagcggaagaccataaccgcagaggacgtgctttgggccatgagcaagcttggattcgacgactacatcgaaccgttgaccatgtaccttcaccgctaccgtgaacttgagggtgaccgcacctctatgaggggtgaaccactcgggaagaggactgtggaatacgccacgcttggtgttgctactgcttttgtccctccaccctatcatcaccacaatgggtactttggtgctgccatgcccatggggacttacgttagggaagcgccaccaaatacagcctcctcccatcaccaccaccaccaccaccaccaccatgctcgtggaatctccaatgctcatgaaccaaatgctcgctccatataa

SEQ ID NO: 62677 - protein, 226 aa, Glycine max
METGGFHGYRKLPNTTAGLKLSVSDMNMRQQVASSDHSAATGEENECTVREQDRFMPIANVIRIMRKILPPHAKISDDAKETIQECVSEYISFITGEANERCQREQRKTITAEDVLWAMSKLGFDDYIEPLTMYLHRYRELEGDRTSMRGEPLGKRTVEYATLGVATAFVPPPYHHHNGYFGAAMPMGTYVREAPPNTASSHHHHHHHHHHARGISNAHEPNARSI

SEQ ID NO: 62678 - DNA, 525 bp, Glycine max
  CDS (1)..(525)
atgtcggatgcaccggcgagtccgagtcacgagagtggtggcgagcagagccctcgcggctcgttgtccggcgcggctagagagcaggaccggtaccttcccattgccaacatcagccgcatcatgaagaaggctctgcctcccaatggcaagattgcgaaggatgcaaaagacacaatgcaagaatgcgtttctgaattcatcagcttcattaccagcgaggcgagtgagaaatgccagaaggagaagagaaagacaatcaatggagacgatttactatgggccatggcaactttagggtttgaagactacattgagccgcttaaggtgtacctggctaggtacagagaggcggagggtgacactaaaggatctgctagaagtggtgatggatctgctagaccagatcaagttggccttgcaggtcaaaatgctcagcttgttcatcagggttcgctgaactatattggtttgcaggtgcaaccacaacatctggttatgccttcaatgcaaggccatgaatag

SEQ ID NO: 62679 - protein, 174 aa, Glycine max
MSDAPASPSHESGGEQSPRGSLSGAAREQDRYLPIANISRIMKKALPPNGKIAKDAKDTMQECVSEFISFITSEASEKCQKEKRKTINGDDLLWAMATLGFEDYIEPLKVYLARYREAEGDTKGSARSGDGSARPDQVGLAGQNAQLVHQGSLNYIGLQVQPQHLVMPSMQGHE

SEQ ID NO: 62680 - DNA, 522 bp, Glycine max
  CDS (1)..(522)
atgtcggatgcgccaccgagcccgactcatgagagtgggggcgagcagagcccgcgcggttcgtcgtccggcgcgagggagcaggaccggtacctcccgattgccaacatcagccgcattatgaagaaggctctgcctcccaacggcaagattgcaaaggatgccaaagacaccatgcaggaatgcgtttctgagttcatcagcttcattaccagcgaggcgagtgagaaatgccagaaggagaagagaaagacaatcaatggagacgatttgctatgggccatggccactttaggatttgaagactacatagagccgcttaaggtgtacctggctaggtacagagaggcggagggtgacactaaacgatctgctagaagcggtgatggatctgctacaccagatcaagttggccttgcaggtcaaaattctcagcttgttcatcagggttcgctgaactatattggtttgcaggtgcaaccacaacatctggttatgccttcaatgcaaagccatgaatag

SEQ ID NO: 62681 - protein, 173 aa, Glycine max
MSDAPPSPTHESGGEQSPRGSSSGAREQDRYLPIANISRIMKKALPPNGKIAKDAKDTMQECVSEFISFITSEASEKCQKEKRKTINGDDLLWAMATLGFEDYIEPLKVYLARYREAEGDTKRSARSGDGSATPDQVGLAGQNSQLVHQGSLNYIGLQVQPQHLVMPSMQSHE

SEQ ID NO: 62682 - DNA, 516 bp, Glycine max
  CDS (1)..(516)
atggccgacggtccggcgagtccaggcggcggtagccacgagagcggcgagcacagccctcgctctaacgtgcgcgagcaggacaggtacctccctatcgctaacataagccgcatcatgaagaaggcacttcctgcgaacggtaaaatcgcaaaggacgccaaagagaccgttcaggaatgcgtatccgagttcatcagcttcatcaccagcgaggcctctgataagtgtcagagagaaaagagaaagactattaacggcgatgatttgctctgggcgatggccactctcggtttcgaggattatatggatcctcttaaaatttacctcactagataccgagagatggagggtgatacgaagggctctgccaagggtggagactcatctgctaagagagatgttcagccaagtcctaatgctcagcttgctcatcaaggttctttctcacaaaatgttacttacccgaattctcagggtcaacatatgatggttccaatgcaaggcccggagtag

SEQ ID NO: 62683 - protein, 171 aa, Glycine max
MADGPASPGGGSHESGEHSPRSNVREQDRYLPIANISRIMKKALPANGKIAKDAKETVQECVSEFISFITSEASDKCQREKRKTINGDDLLWAMATLGFEDYMDPLKIYLTRYREMEGDTKGSAKGGDSSAKRDVQPSPNAQLAHQGSFSQNVTYPNSQGQHMMVPMQGPE

SEQ ID NO: 62684 - DNA, 657 bp, Glycine max
  CDS (1)..(657)
atggaaactggaggctttcacggctaccgcaagctccccaacaccaccgctgggttgaagctgtcagtgtcagacatgaacatgaggcagcaggtagcatcatcagatcacagtgcagccacaggagaggagaacgaatgcacggtgagggagcaagacaggttcatgccaatcgccaacgtgattaggatcatgcgcaagattctccctccacacgcaaaaatctcggacgatgcaaaagaaacaatccaagagtgcgtgtctgagtacatcagcttcatcacaggtgaggcgaacgagcgttgccagagggagcagcggaagaccataaccgcagaggacgtgctttgggccatgagcaagcttggattcgacgactacatcgaaccgttgaccatgtaccttcaccgctaccgtgaacttgagggtgaccgcacctctatgaggggtgaaccactcgggaagaggactgtggaatacgccacgcttggtgttgctactgcttttgtgcctccaccctatcatcaccacaatgggtactttggtgctgccatgcccatggggacttacgttagggaagcgccaccaaatgctgcgtcatctcatcaccatcatggaatctccaatgctcatgaaccaaatgctcgctccatataa

SEQ ID NO: 62685 - protein, 218 aa, Glycine max
METGGFHGYRKLPNTTAGLKLSVSDMNMRQQVASSDHSAATGEENECTVREQDRFMPIANVIRIMRKILPPHAKISDDAKETIQECVSEYISFITGEANERCQREQRKTITAEDVLWAMSKLGFDDYIEPLTMYLHRYRELEGDRTSMRGEPLGKRTVEYATLGVATAFVPPPYHHHNGYFGAAMPMGTYVREAPPNAASSHHHHGISNAHEPNARSI

SEQ ID NO: 62686 - DNA, 525 bp, Glycine max
  CDS (1)..(525)
atgtcggatgcaccggcgagtccgagtcacgagagtggtggcgagcagagccctcgcggctcgttgtccggcgcggctagagagcaggaccggtaccttcccattgccaacatcagccgcatcatgaagaaggctctgcctcccaatggcaagattgcgaaggatgcaaaagacacaatgcaagaatgcgtttctgaattcatcagcttcattaccagcgaggcgagtgagaaatgccagaaggagaagagaaagacaatcaatggagacgatttactatgggccatggcaactttagggtttgaagactacattgagccgcttaaggtgtacctggctaggtacagagaggcggagggtgacactaaaggatctgctagaagtggtgatggatctgctagaccagatcaagttggccttgcaggtcaaaattctcagcttgttcatcagggttcgctgaactatattggtttgcaggtgcaaccacaacatctggttatgccttcaatgcaaagccatgaatag

SEQ ID NO: 62687 - protein, 174 aa, Glycine max
MSDAPASPSHESGGEQSPRGSLSGAAREQDRYLPIANISRIMKKALPPNGKIAKDAKDTMQECVSEFISFITSEASEKCQKEKRKTINGDDLLWAMATLGFEDYIEPLKVYLARYREAEGDTKGSARSGDGSARPDQVGLAGQNSQLVHQGSLNYIGLQVQPQHLVMPSMQSHE

SEQ ID NO: 62688 - DNA, 483 bp, Helianthus annuus
  CDS (1)..(483)
atggcggagggtccagctagtccaggtggcggtggaagccacgagagtgggggcgacctgagcccgaggtcgtcaaatgttcgagaacaggatcggtttttgccgattgcgaatatcagtcggattatgaagaaagggttgccggctaatggcaaaatgtcaaaggatgcaaaggagactgttcaggagtgtgtttctgagtttatcagctttgtcactagtgaggcgagtgataagtgtcaaagggaaaagaggaaaactatcaacggtgatgatcttctatgggcaatggctactttagggtttgaagattatatcgaaccactcaagttatacttgactagatacagagagatggagggtgacaccaagggatctgggaagggtcatgaagggtcttccaagaaagatggagtgcatcccaatcatagtgcacaggcccaacctcaacatatgatggtccccatgcaacgcacagagtag

SEQ ID NO: 62689 - protein, 160 aa, Helianthus annuus
MAEGPASPGGGGSHESGGDLSPRSSNVREQDRFLPIANISRIMKKGLPANGKMSKDAKETVQECVSEFISFVTSEASDKCQREKRKTINGDDLLWAMATLGFEDYIEPLKLYLTRYREMEGDTKGSGKGHEGSSKKDGVHPNHSAQAQPQHMMVPMQRTE

SEQ ID NO: 62690 - DNA, 645 bp, Helianthus annuus
  CDS (1)..(645)
atggaacgtggaggaggtttccatggctaccacaggctccccatccaccctacatctgggatgcaacagccggatatgaagcagaagcaaccagacacaaccaacaccacatctacagaagacaatgagtgcattgttagagagcaagaccgctttatgccgatagcaaacgtgatcaggatcatgcgaaagatcttgccacctcacgcgaagatctctgacgacgcaaaagaaacgatccaagaatgtgtttccgagtacattagttttgtgacaggtgaagcgaatgaccgttgccaacgcgagcagagaaagactatcacagctgaagatgtgttgtgggctatgagcaaactcgggtttgatgactatatcgaaccgttgactgtgtatcttcatcgctacagggagtttgatgggggtgagcgtgggtcgataaggggtgagccgcttgtcaagagggctgcggctactgctgaccctggtccgtttggtatgggtccgtttgtgcctggttttcacatgggtcatcataatgggttctttggtcctgctagcattgctggtttctttaaggacccgtcgagtgcggctggccagtctgggcctgctggtttcgagccgtatgctcagtgtaaagactaa

SEQ ID NO: 62691 - protein, 214 aa, Helianthus annuus
MERGGGFHGYHRLPIHPTSGMQQPDMKQKQPDTTNTTSTEDNECIVREQDRFMPIANVIRIMRKILPPHAKISDDAKETIQECVSEYISFVTGEANDRCQREQRKTITAEDVLWAMSKLGFDDYIEPLTVYLHRYREFDGGERGSIRGEPLVKRAAATADPGPFGMGPFVPGFHMGHHNGFFGPASIAGFFKDPSSAAGQSGPAGFEPYAQCKD

SEQ ID NO: 62692 - DNA, 672 bp, Zea mays
  CDS (1)..(672)
atgccggactccgacaacgactccggcgggccgagcaacgccgggggcgagctgtcgtcgccgcgggagcaggaccggttcctgcccatcgccaacgtgagccggatcatgaagaaggcgctcccggccaacgccaagatcagcaaggacgccaaggagacggtgcaggagtgcgtgtccgagttcatctccttcatcaccggcgaggcctccgacaagtgccagcgcgagaagcgcaagaccatcaacggcgacgacctgctgtgggccatgaccacgctcggcttcgaggactacgtcgagccgctcaagcactacctgcacaagttccgcgagatcgagggcgagagggccgccgcgtccgccggcgcctcgggctcgcagcagcagcagcagcagggcgagctgcccagaggcgccgccaatgccgccgggtacgccgggtacggcgcgcctggctccggcggcatgatgatgatgatgatggggcagcccatgtacggcggctcgcagccgcagcaacagccgccgcagcctcagccgccacagcagcagcagcagcaacatcaacagcatcacatggcaatgggaggcagaggaggattcggccaacaaggcggcggcggtggctcctcgtcgtcgtcagggcttggccggcaagacagggcgtga

SEQ ID NO: 62693 - protein, 223 aa, Zea mays
MPDSDNDSGGPSNAGGELSSPREQDRFLPIANVSRIMKKALPANAKISKDAKETVQECVSEFISFITGEASDKCQREKRKTINGDDLLWAMTTLGFEDYVEPLKHYLHKFREIEGERAAASAGASGSQQQQQQGELPRGAANAAGYAGYGAPGSGGMMMMMMGQPMYGGSQPQQQPPQPQPPQQQQQQHQQHHMAMGGRGGFGQQGGGGGSSSSSGLGRQDRA

SEQ ID NO: 62694 - DNA, 789 bp, Zea mays
  CDS (1)..(789)
atgaataatccccaaaaccctaaagccagtgctccttgcaccttgccatcggagcttcccaaagaagcagtggcgaccgacgaagcaccgccgccaatgggcaacaacaacaacacggaatcggcgacggcgacgatggtccgggagcaggaccggctgatgcccgtggccaacgtgtcccgcatcatgcgccaagtgctgcctccgtacgccaagatctccgacgacgccaaggaggtgatccaggagtgcgtgtcggagttcatcagcttcgtcactggcgaggcgaacgagcggtgccacaccgagcgccgcaagaccgtcacctccgaggacatcgtgtgggccatgagccgcctcggcttcgacgactacgtcgcgcccctcggcgccttcctccagcgcatgcgcgacgacagcgaccacggcggtgaagagcgcggcggccctgcagggcgtggtggctcgcgccgcggctcgtcgtccttgccgctccactgcccgcagcagatgcaccacctgcacccagccgtctgccggcgtccgcaccagagcgtgtcgcctgctgcaggatacgccgtccggcccgttccccgcccgatgccagccagtgggtaccgcatgcagggcggagaccaccgcagcgtgggcggcgtggctccctgcagctacggaggggcgctcgtccaggccggtggaacccaacacgttgttggattccacgacgacgaggcaagctcttcgagtgaaaatccgccgccggaggggcgtgccgctggctcgaactag

SEQ ID NO: 62695 - protein, 262 aa, Zea mays
MNNPQNPKASAPCTLPSELPKEAVATDEAPPPMGNNNNTESATATMVREQDRLMPVANVSRIMRQVLPPYAKISDDAKEVIQECVSEFISFVTGEANERCHTERRKTVTSEDIVWAMSRLGFDDYVAPLGAFLQRMRDDSDHGGEERGGPAGRGGSRRGSSSLPLHCPQQMHHLHPAVCRRPHQSVSPAAGYAVRPVPRPMPASGYRMQGGDHRSVGGVAPCSYGGALVQAGGTQHVVGFHDDEASSSSENPPPEGRAAGSN

SEQ ID NO: 62696 - DNA, 492 bp, Triticum aestivum
  CDS (1)..(492)
atggccgacgacgacagcgggagcccccggggcggcggcggggtcagggagcaggaccgcttcctccccatcgccaacatcagccgcatcatgaagaaggccgtgccggccaacggcaagatcgccaaggacgccaaggagaccctccaggagtgcgtctccgagttcatctccttcgtcaccagcgaggccagcgacaagtgccagaaggagaagcgcaagaccatcaacggggacgatctgctctgggccatggccacgctcggattcgaggagtacgtagaccccctcaagatctacctgcaaaagtacagagatatggagggtgatagtaaattgacctcaaaatctggtgaaggatccgtgaagaaagatataattggtgctcatagtggtgcgactagctcaaacgcccaagcgatggttcagcatggagcttacgcccaagggatgggttatatgcaaccccagtaccataatggggacacctga

SEQ ID NO: 62697 - protein, 163 aa, Triticum aestivum
MADDDSGSPRGGGGVREQDRFLPIANISRIMKKAVPANGKIAKDAKETLQECVSEFISFVTSEASDKCQKEKRKTINGDDLLWAMATLGFEEYVDPLKIYLQKYRDMEGDSKLTSKSGEGSVKKDIIGAHSGATSSNAQAMVQHGAYAQGMGYMQPQYHNGDT

SEQ ID NO: 62698 - DNA, 495 bp, Zea mays
  CDS (1)..(495)
atggcggacgacggcgggagccacaaggccaacggcggcggcgaaggcgtccgggagcaggaccggttcttgcccatcgccaacatcagccggatcatgaagaaggccgtcccggccaacggcaagatcgccaaggacgctaaggagaccctgcaggagtgcgtctccgagttcatatcattcgtgaccagcgaggccagcgacaaatgccagaagaagaaacgaaagacaatcaacggggacgatttgctctgggcgatggccactttaggattcgaggagtacgtcgagcctctcaagatttacctacaaaagtacaaagagatggagggtgatagcaagctgtctacaaaggctggcgagggctctgtaaagaaggatgcaattagcccccatggtggcaccagtagctcaagtaatcagttggttcagcatggagtctacaaccaagggatgggctatatgcagccacagtaccacaatggggaaacctaa

SEQ ID NO: 62699 - protein, 164 aa, Zea mays
MADDGGSHKANGGGEGVREQDRFLPIANISRIMKKAVPANGKIAKDAKETLQECVSEFISFVTSEASDKCQKKKRKTINGDDLLWAMATLGFEEYVEPLKIYLQKYKEMEGDSKLSTKAGEGSVKKDAISPHGGTSSSSNQLVQHGVYNQGMGYMQPQYHNGET

SEQ ID NO: 62700 - DNA, 495 bp, Zea mays
  CDS (1)..(495)
atggccgacgacggcgggagccacgagggcagcggcggcggcggaggcgtccgggagcaggaccggttcctgcccatcgccaacatcagccggatcatgaagaaggccgtcccggccaacggcaagatcgccaaggacgctaaggagaccctgcaggagtgcgtctccgagttcatatcattcgtgaccagcgaggccagcgacaaatgccagaaggagaaacgaaagacaatcaacggggacgatttgctctgggcgatggccactttaggattcgaggagtacgtcgagcctctcaagatttacctacaaaagtacaaagagatggagggtgatagcaagctgtctacaaaggctggcgagggctctgtaaagaaggatgcaattagtccccatggtggcaccagtagctcaagtaatcagttggttcagcatggagtctacaaccaagggatgggctatatgcagccacagtaccacaatggggaaacctaa

SEQ ID NO: 62701 - protein, 164 aa, Zea mays
MADDGGSHEGSGGGGGVREQDRFLPIANISRIMKKAVPANGKIAKDAKETLQECVSEFISFVTSEASDKCQKEKRKTINGDDLLWAMATLGFEEYVEPLKIYLQKYKEMEGDSKLSTKAGEGSVKKDAISPHGGTSSSSNQLVQHGVYNQGMGYMQPQYHNGET

SEQ ID NO: 62702 - DNA, 789 bp, Zea mays
  CDS (1)..(789)
atgaataatccccaaaaccctaaagccagtgctccttgcaccttgccaccggagcttcccaaagaagcagtggcgaccgacgaagcaccgccgccaatgggcaacaacaacaacacggaatcggcgacggcgacgatggtccgggagcaggaccggctgatgcccgtggccaacgtgtcccgcatcatgcgccaagtgctgcctccgtacgccaagatctccgacgacgccaaggaggtgatccaggagtgcgtgtcggagttcatcagcttcgtcactggcgaggcgaacgagcggtgccacaccgagcgccgcaagaccgtcacctccgaggacatcgtgtgggccatgagccgcctcggcttcgacgactacgtcgcgcccctcggcgccttcctccagcgcatgcgcgacgacagcgaccacggcggtgaagagcgcggcggccctgcagggcgtggtggctcgcgccgcggctcgtcgtccttgccgctccactgcccgcagcagatgcaccacctgcacccagccgtctgccggcgtccgcaccagagcgtgtcgcctgctgcaggatacgccgtccggcccgttccccgcccgatgccagccagtgggtaccgcatgcagggcggagaccaccgcagcgtgggcggcgtggctccctgcagctacggaggggcgctcgtccaggccggtggaacccaacacgttgttggattccacgacgacgaggcaagctcttcgagtgaaaatccgccgccggaggggcgtgccgctggctcgaactag

SEQ ID NO: 62703 - protein, 262 aa, Zea mays
MNNPQNPKASAPCTLPPELPKEAVATDEAPPPMGNNNNTESATATMVREQDRLMPVANVSRIMRQVLPPYAKISDDAKEVIQECVSEFISFVTGEANERCHTERRKTVTSEDIVWAMSRLGFDDYVAPLGAFLQRMRDDSDHGGEERGGPAGRGGSRRGSSSLPLHCPQQMHHLHPAVCRRPHQSVSPAAGYAVRPVPRPMPASGYRMQGGDHRSVGGVAPCSYGGALVQAGGTQHVVGFHDDEASSSSENPPPEGRAAGSN

SEQ ID NO: 62704 - DNA, 543 bp, Zea mays
  CDS (1)..(543)
atggcggacgctccggcgagccctgggggcggaggcgggagccacgagagcgggagccccaggggcggcggaggtggaggcggtggcagcgtcagggagcaggacaggttcctgcccatcgccaacatcagtcgcatcatgaagaaggccatcccggctaacgggaagatcgccaaggacgctaaggagaccgtgcaggagtgcgtctcggagttcatctccttcatcactagcgaggcgagtgacaagtgccagagggagaagcggaagaccatcaatggcgacgacctgctgtgggccatggccacgctggggtttgaggactatattgaacccctcaaggtgtacctgcagaagtacagagagatggagggtgatagtaagttaacttcaaaatccagcgatggctccattaaaaaggatgcccttggtcatgtgggagcaagtagctcagctgtacaagggatgggtcagcaaggaacatacaaccaaggaatgggttatatgcaacctcagtaccataacggagatatctcgaactaa

SEQ ID NO: 62705 - protein, 180 aa, Zea mays
MADAPASPGGGGGSHESGSPRGGGGGGGGSVREQDRFLPIANISRIMKKAIPANGKIAKDAKETVQECVSEFISFITSEASDKCQREKRKTINGDDLLWAMATLGFEDYIEPLKVYLQKYREMEGDSKLTSKSSDGSIKKDALGHVGASSSAVQGMGQQGTYNQGMGYMQPQYHNGDISN

SEQ ID NO: 62706 - DNA, 786 bp, Zea mays
  CDS (1)..(786)
atgaataatccccaaaaccctaaagccagtgctccttgcaccttgccaccggagcttcccaaagaagcagtggcgaccgacgaagcaccgccgccaatgggcaacaacaacaacacggaatcggcgacggcgacgatggtccgggagcaggaccggctgatgcccgtggccaacgtgtcccgcatcatgcgccaagtgctgcctccgtacgccaagatctccgacgacgccaaggaggtgatccaggagtgcgtgtcggagttcatcagcttcgtcactggcgaggcgaacgagcggtgccacaccgagcgccgcaagaccgtcacctccgaggacatcgtgtgggccatgagccgcctcggcttcgacgactacgtcgcgcccctcggcgccttcctccagcgcatgcgcgacagcgaccacggcggtgaagagcgcggcggccctgcagggcgtggtggctcgcgccgcggctcgtcgtccttgccgctccactgcccgcagcagatgcaccacctgcacccagccgtctgccggcgtccgcaccagagcgtgtcgcctgctgcaggatacgccgtccggcccgttccccgcccgatgccagccagtgggtaccgcatgcagggcggagaccaccgcagcgtgggcggcgtggctccctgcagctacggaggggcgctcgtccaggccggtggaacccaacacgttgttggattccacgacgacgaggcaagctcttcgagtgaaaatccgccgccggaggggcgtgccgctggctcgaactag

SEQ ID NO: 62707 - protein, 261 aa, Zea mays
MNNPQNPKASAPCTLPPELPKEAVATDEAPPPMGNNNNTESATATMVREQDRLMPVANVSRIMRQVLPPYAKISDDAKEVIQECVSEFISFVTGEANERCHTERRKTVTSEDIVWAMSRLGFDDYVAPLGAFLQRMRDSDHGGEERGGPAGRGGSRRGSSSLPLHCPQQMHHLHPAVCRRPHQSVSPAAGYAVRPVPRPMPASGYRMQGGDHRSVGGVAPCSYGGALVQAGGTQHVVGFHDDEASSSSENPPPEGRAAGSN

SEQ ID NO: 62708 - DNA, 537 bp, Zea mays
  CDS (1)..(537)
atggcggaagctccggcgagccctggcggcggcggcgggagccacgagagcgggagccccaggggaggcggaggcggtggcagcgtcagggagcaggacaggttcctgcccatcgccaacatcagtcgcatcatgaagaaggccatcccggctaacgggaagatcgccaaggacgctaaggagaccgtgcaggagtgcgtctccgagttcatctccttcatcactagcgaagcgagtgacaagtgccagagggagaagcggaagaccatcaatggcgacgatctgctgtgggccatggccacgctggggtttgaagactacattgaacccctcaaggtgtacctgcagaagtacagagagatggagggtgatagcaagttaactgcaaaatctagcgatggctcaattaaaaaggatgcccttggtcatgtgggagcaagtagctcagctgcacaagggatgggccaacagggagcatacaaccaaggaatgggttatatgcaaccccagtaccataacggggatatctcaaactaa

SEQ ID NO: 62709 - protein, 178 aa, Zea mays
MAEAPASPGGGGGSHESGSPRGGGGGGSVREQDRFLPIANISRIMKKAIPANGKIAKDAKETVQECVSEFISFITSEASDKCQREKRKTINGDDLLWAMATLGFEDYIEPLKVYLQKYREMEGDSKLTAKSSDGSIKKDALGHVGASSSAAQGMGQQGAYNQGMGYMQPQYHNGDISN

SEQ ID NO: 62710 - DNA, 669 bp, Zea mays
  CDS (1)..(669)
atgccggactcggacaacgactccggcgggccgagcaacgccgggggcgagctgtcgtcgccgcgggagcaggaccggttcctgcccatcgccaacgtgagccggatcatgaagaaggcgctcccggccaacgccaagatcagcaaggacgccaaggagacggtgcaggagtgcgtgtccgagttcatctccttcatcaccggcgaggcctccgacaagtgccagcgcgagaagcgcaagaccatcaacggcgacgacctgctgtgggccatgaccacgctcggcttcgaggactacgtcgagccgctcaagcactacctgcacaagttccgcgagatcgagggcgagagggccgccgcgtccgccggcgcctcgggctcgcagcagcagcagcagcagggcgagctgcccagaggcgccgccaatgccgccgggtacgccgggtacggcgcgcctggctccggcggcatgatgatgatgatgatggggcagcccatgtacggcggctcgcagccgcagcaacagccgccgccgcctcagccgccacagcagcagcagcaacatcaacagcatcacatggcaataggaggcagaggaggattcggccaacaaggcggcggcggcggctcctcgtcgtcgtcagggcttggccggcaagacagggcgtga

SEQ ID NO: 62711 - protein, 222 aa, Zea mays
MPDSDNDSGGPSNAGGELSSPREQDRFLPIANVSRIMKKALPANAKISKDAKETVQECVSEFISFITGEASDKCQREKRKTINGDDLLWAMTTLGFEDYVEPLKHYLHKFREIEGERAAASAGASGSQQQQQQGELPRGAANAAGYAGYGAPGSGGMMMMMMGQPMYGGSQPQQQPPPPQPPQQQQQHQQHHMAIGGRGGFGQQGGGGGSSSSSGLGRQDRA

SEQ ID NO: 62712 - DNA, 24 bp, Artificial sequence
  primer
atgaataccaacgagtccgaacat

SEQ ID NO: 62713 - DNA, 22 bp, Artificial sequence
  primer
tcaaggcacctcttcgtcgtcc

SEQ ID NO: 62714 - protein, 154 aa, Artificial sequence
  consensus sequence
  Variant (2)..(15): Xaa in position 2 to 15 is any amino acid
  Variant (16)..(63): Xaa in position 16 to 63 is any or no amino acid
  Variant (69)..(69): Xaa in position 69 is any amino acid
  Variant (75)..(76): Xaa in position 75 to 76 is any amino acid
  Variant (80)..(83): Xaa in position 80 to 83 is any amino acid
  Variant (85)..(87): Xaa in position 85 to 87 is any amino acid
  Variant (90)..(90): Xaa in position 90 is any amino acid
  Variant (92)..(92): Xaa in position 92 is any amino acid
  Variant (96)..(97): Xaa in position 96 to 97 is any amino acid
  Variant (108)..(108): Xaa in position 108 is any amino acid
  Variant (110)..(110): Xaa in position 110 is any amino acid
  Variant (113)..(115): Xaa in position 113 to 115 is any amino acid
  Variant (117)..(118): Xaa in position 117 to 118 is any amino acid
  Variant (120)..(120): Xaa in position 120 is any amino acid
  Variant (124)..(124): Xaa in position 124 is any amino acid
  Variant (127)..(127): Xaa in position 127 is any amino acid
  Variant (129)..(129): Xaa in position 129 is any amino acid
  Variant (131)..(131): Xaa in position 131 is any amino acid
  Variant (134)..(135): Xaa in position 134 to 135 is any amino acid
  Variant (139)..(140): Xaa in position 139 to 140 is any amino acid
  Variant (142)..(143): Xaa in position 142 to 143 is any amino acid
  Variant (146)..(147): Xaa in position 146 to 147 is any amino acid
  Variant (150)..(151): Xaa in position 150 to 151 is any amino acid
MXXXXXXXXXXXXXXXXXXXXXXXXXXXXXXXXXXXXXXXXXXXXXXXXXXXXXXXXXXXXXXREQDRXLPIANXXRIMXXXXPXXXKIXKXAKEXXQECVSEFISFXTXEAXXXCXXEXRKTXNGXDXLXAMXXLGFXXYXXPLXXYLXXYRE

SEQ ID NO: 62715 - protein, 60 aa, Artificial sequence
  protein pattern
  Variant (4)..(4): Xaa in position 4 is any amino acid
  Variant (5)..(5): Xaa in position 5 is Leu or Met
  Variant (10)..(10): Xaa in position 10 is Ile or Val
  Variant (11)..(11): Xaa in position 11 is any amino acid
  Variant (15)..(15): Xaa in position 15 is Lys or Arg
  Variant (16)..(17): Xaa in position 16 to 17 is any amino acid
  Variant (18)..(18): Xaa in position 18 is Ile, Leu or Val
  Variant (20)..(21): Xaa in position 20 to 21 is any amino acid
  Variant (22)..(22): Xaa in position 22 is Ala or Gly
  Variant (25)..(25): Xaa in position 25 is Ala, Gly or Ser
  Variant (26)..(26): Xaa in position 26 is any amino acid
  Variant (27)..(27): Xaa in position 27 is Asp or Glu
  Variant (28)..(28): Xaa in position 28 is Ala or Ser
  Variant (30)..(30): Xaa in position 30 is Asp or Glu
  Variant (31)..(31): Xaa in position 31 is any amino acid
  Variant (32)..(32): Xaa in position 32 is Ile, Leu, Met or Val
  Variant (39)..(39): Xaa in position 39 is Phe or Tyr
  Variant (43)..(43): Xaa in position 43 is Ile or Val
  Variant (45)..(45): Xaa in position 45 is Gly or Ser
  Variant (48)..(48): Xaa in position 48 is Asn or Ser
  Variant (49)..(49): Xaa in position 49 is Asp or Glu
  Variant (50)..(50): Xaa in position 50 is Lys or Arg
  Variant (52)..(53): Xaa in position 52 to 53 is any amino acid
  Variant (55)..(55): Xaa in position 55 is any amino acid
  Variant (59)..(59): Xaa in position 59 is any amino acid
  Variant (60)..(60): Xaa in position 60 is Asn or Thr
QDRXXPIANXXRIMXXXXPXXXKIXXXXKXXXQECVSEXISFXTXEAXXXCXXEXRKTXX

SEQ ID NO: 62716 - protein, 28 aa, Artificial sequence
  protein pattern
  Variant (2)..(2): Xaa in position 2 is any or no amino acid
  Variant (4)..(4): Xaa in position 4 is any amino acid
  Variant (5)..(5): Xaa in position 5 is any or no amino acid
  Variant (8)..(9): Xaa in position 8 to 9 is any amino acid
  Variant (13)..(13): Xaa in position 13 is Asp or Glu
  Variant (14)..(14): Xaa in position 14 is any amino acid
  Variant (16)..(17): Xaa in position 16 to 17 is any amino acid
  Variant (18)..(18): Xaa in position 18 is Ala or Pro
  Variant (20)..(21): Xaa in position 20 to 21 is any amino acid
  Variant (24)..(24): Xaa in position 24 is any amino acid
  Variant (25)..(25): Xaa in position 25 is Lys or Arg
  Variant (26)..(26): Xaa in position 26 is any amino acid
  Variant (27)..(27): Xaa in position 27 is Lys or Arg
DXLXXAMXXLGFXXYXXXLXXYLXXXXE

SEQ ID NO: 62717 - DNA, 897 bp, Saccharomyces cerevisiae
  CDS (1)..(897)
atgagcggtgaattagcaaattacaaaagacttgagaaagtcggtgaaggtacatacggtgttgtttataaagcgttagacttaagacctggccaaggtcaaagagtagtcgcattgaagaaaataagactagagagtgaagacgagggtgttcccagtacagccatcagagaaatctcattattgaaggaattaaaagacgataatattgtcagattatacgatattgttcactctgatgcacacaagctatatcttgtttttgagttcctcgatttggacctgaaaagatatatggagggtattccaaaggaccaaccgttaggagctgatattgttaagaagtttatgatgcaactttgtaagggtattgcatactgccactcacaccgtattctgcatcgtgatttaaaaccgcagaacttattgattaacaaagatgggaatctaaaactaggtgattttggcttagcgcgtgcttttggtgttccgttgagagcttacacacatgaaattgttactctatggtatagagctccggaggtattactgggtggaaaacaatatagtacaggtgtcgatacatggtccatcggctgtatatttgccgaaatgtgtaacaggaaaccaatcttcagtggcgatagtgagatcgatcagattttcaagatattcagagtattgggaacgccgaatgaagctatatggccagatattgtctacttgcctgatttcaagccaagctttcctcaatggcgcagaaaagacctatcacaagtggtaccaagtctagatccacgcggtattgatttgttggacaaactcctcgcgtatgaccctattaaccggattagcgccagaagagcagccatccacccctacttccaagaatcataa

SEQ ID NO: 62718 - protein, 298 aa, Saccharomyces cerevisiae
MSGELANYKRLEKVGEGTYGVVYKALDLRPGQGQRVVALKKIRLESEDEGVPSTAIREISLLKELKDDNIVRLYDIVHSDAHKLYLVFEFLDLDLKRYMEGIPKDQPLGADIVKKFMMQLCKGIAYCHSHRILHRDLKPQNLLINKDGNLKLGDFGLARAFGVPLRAYTHEIVTLWYRAPEVLLGGKQYSTGVDTWSIGCIFAEMCNRKPIFSGDSEIDQIFKIFRVLGTPNEAIWPDIVYLPDFKPSFPQWRRKDLSQVVPSLDPRGIDLLDKLLAYDPINRISARRAAIHPYFQES

SEQ ID NO: 62719 - DNA, 1353 bp, Zea mays subsp. mays
  CDS (302)..(1186)
aatggagtgagcaacgagggttgggttcggcagcagcgagggaaaagccaaagccccccagggcagcaggaagcaatagaagcgagcgaggcagcggcgtggggcgaggagtggaggacaccgatccccgccggagagcgcgtccatcccaaatggcgactgcagcttcgcccgccgctgcctttccccacatcctctccctctcctcctaatcccctcccaatccccccctctctctctcttcctcgccagctggttcgttccgcacccgccgccgcattgggtgccgaggagggacgcaatggagcagtacgagaaggtggagaagatcggggagggcacgtacggggtggtgtacaaggcgctggacaaggccaccaacgagacgatcgcgctcaagaagatccgcctcgagcaggaggacgagggcgtcccgcccaccgccatccgcgagatctctctcctcaaggagatgaaccacggcaacatcgtcaggttacatgatgttgtccacagcgagaagcggatatacctcgtcttcgagtacctggatctggacctcaagaagttcatggactcttgcccggagtttgctaagaatcccactttgattaagtcatacctctaccagatactccgtggcgttgcgtactgccattctcatagagttcttcaccgagatttgaaacctcagaacttgttgatagatcggcgtaataatgcactgaagcttgcagactttggtttagccagggcatttggaattcctgtccgtacatttactcatgaggtagtgacattatggtacagagctccagaaatccttcttggagcgagacagtattccacaccagttgacgtatggtctgtgggctgtatctttgcggaaatggtgaaccaaaagccactattccctggtgattctgagatcgacgaactgttcaagatattcagggtgctaggtacaccgaatgaacaaggttggcctggagtcagttgtttgcctgacttcaagactgctttccccaggtggcaagctcaggacctggcaacaatagtcccaaatctagaacctgctggcttggaccttctctctaaaatgcttaggtatgagccaagcaaaagaatcacagctaggcaagcacttgagcacgagtacttcaaggaccttgagatggtacagtgacctgctaaatgtgcttcgcgttgctttggcatttgtaattgtctgagctgagtcgctcattcctttttatgggcgtctgtactctctcattctctctgcatttttgtcgttcagctggatattttgaatctggtgtgttttgagatgtattaaggaatatcaaatag

SEQ ID NO: 62720 - protein, 294 aa, Zea mays subsp. mays
MEQYEKVEKIGEGTYGVVYKALDKATNETIALKKIRLEQEDEGVPPTAIREISLLKEMNHGNIVRLHDVVHSEKRIYLVFEYLDLDLKKFMDSCPEFAKNPTLIKSYLYQILRGVAYCHSHRVLHRDLKPQNLLIDRRNNALKLADFGLARAFGIPVRTFTHEVVTLWYRAPEILLGARQYSTPVDVWSVGCIFAEMVNQKPLFPGDSEIDELFKIFRVLGTPNEQGWPGVSCLPDFKTAFPRWQAQDLATIVPNLEPAGLDLLSKMLRYEPSKRITARQALEHEYFKDLEMVQ

SEQ ID NO: 62721 - DNA, 1121 bp, Sorghum bicolor
  CDS (113)..(994)
  misc_feature (1045)..(1045): n is a, g, c or t
  misc_feature (1065)..(1065): n is a, g, c or t
  misc_feature (1088)..(1088): n is a, g, c or t
  misc_feature (1098)..(1098): n is a, g, c or t
  misc_feature (1107)..(1107): n is a, g, c or t
  misc_feature (1108)..(1108): n is a, g, c or t
  misc_feature (1115)..(1115): n is a, g, c or t
cacgcaccacccccaggtcccagactcccagtccccacccaccactcctcctcctcctcctcccctcgccgccgccgccagttcccgtccgatccgcccggatcgccccgccatggaccagtacgagaagacggagaagatcggggaaggcacgtacggggtggtgtacaagggcaaggaccgccacaccaacgagacgatcgcgctcaagaagatccgcctcgagcaggaggacgaaggcgtcccttccaccgccatccgcgagatctcactcctcaaggagatgcagcaccgcaacatcgtcaggctgcaagacgtggtgcacaacgacaagtgcatctacctcatcttcgagtacctcgacctcgcggccaagaagcacatggactcctccgccgacttcaagaaccaccgcatagtcaaatcctacctctaccagattctgcggggcctcgcctactgccactcccaccgcgtgctccaccgcgatctcaagccacagaacctgctgctcgatcgccgcaacaacatcttgaagctcgccgactttggattggcgagggcatttggcatccctgtccggactttcactcacgaggtggtgacactctggtatagagcaccggaaattcttcttggtgcaaggcattattccacccctgttgatgtgtggtcagttggttgcatttttgctgaaatggtgaaccagaagccactttttcctggtgactctgagattgatgagctgtttaagattttcagaattttgggcactccaactgaaggaacatggccaggtgttgctacattacctgattacaagtcaactttcccaaagtggccatctatggatcttgcaactgtggtcccaacacttgaaccggcaggaatcgatcttctatctaagatggtgcggctagatcccagcaagagaatcaccgcccgtgccgccctcgagcatgagtacttcagggacctcgagcacgcctactagatgatggatgaaccattcattccttcccttcacttgccctgcccctctgtnaataaggtcataatgcttgngcccggcgagtacccattttggncgctgctgcngttatctanntatatangaacga

SEQ ID NO: 62722 - protein, 293 aa, Sorghum bicolor
MDQYEKTEKIGEGTYGVVYKGKDRHTNETIALKKIRLEQEDEGVPSTAIREISLLKEMQHRNIVRLQDVVHNDKCIYLIFEYLDLAAKKHMDSSADFKNHRIVKSYLYQILRGLAYCHSHRVLHRDLKPQNLLLDRRNNILKLADFGLARAFGIPVRTFTHEVVTLWYRAPEILLGARHYSTPVDVWSVGCIFAEMVNQKPLFPGDSEIDELFKIFRILGTPTEGTWPGVATLPDYKSTFPKWPSMDLATVVPTLEPAGIDLLSKMVRLDPSKRITARAALEHEYFRDLEHAY

SEQ ID NO: 62723 - DNA, 1361 bp, Glycine max
  CDS (243)..(1145)
gatagcgcttacagtaagaggtgagaaagagagacaaatcggcagaagcaaggaggctgagagcgagagagcaactgcacgcactgtaactcctaacttcccagatcgtcttcttcctcttttctctccggtgattgttggaactcagagagcttctttgatggaacaggttagtaaaacgcactgcgttttgaagcttcactttcacttttgagtttcgattctttccctctactctgcgtatgtgtgcgttttgtgaatttctgcagtacgagaaggttgagaagataggcgaaggaacatacggcgtcgtttacaagggtcgcgaccgcgtcaccaacgagaccatcgcgttgaagaagattcgcctcgagcaggaggatgagggggttcccagcaccgccattcgcgagatttctctcttgaaagaaatgcagcacaggaacattgttaggttgcaggatgtagtgcacgatgagaagagtttgtatctggtttttgagtaccttgacttagatctaaagaagcacatggattcatctccagaatttgcaaaagatccacgacaagtaaaaatgttcctgtaccaaattctctgtggcattgcatactgtcattcacatagagttcttcatcgagacttaaaaccacagaatttgttgatagatcgcagcactaatgcactgaaacttgcagattttggattggccagggcttttggaattcctgttaggacatttacacatgaggtggtaacactgtggtacagagctccggaaattttgcttggatcccgtcagtattctaccccagttgatatttggtcagtgggatgcatatttgcagagatggtaaatcaacgaccacttttccctggggactctgagattgatgaattgtttaaaatattcagaatcatgggtacaccaaatgaagatacatggcctggagtgacatcattgccagattttaaatcagcctttcccaaatggcaacctaaggacctgaaaaatgtggttccaaatcttgagccagctggtcttgatcttctttctagcatgctttacttggatcccagcaaaagaattactgctaggagcgctcttgagcatgaatacttcaaagacattaaatttgtaccctgatttcttatcttcaaggctgaggtgtcttattagtatgtgtagcatttatgggttttgactcaaacgcgtgttgtccttgcttttttcttcaatgcttttggaccgaatcatatttcatttatttgttcttacatttttatttagtatgtgtgatcttgttacctatttacccgtttaatgtattagtctcgatgcaatgcaactagcaaatttcag

SEQ ID NO: 62724 - protein, 300 aa, Glycine max
MCAFCEFLQYEKVEKIGEGTYGVVYKGRDRVTNETIALKKIRLEQEDEGVPSTAIREISLLKEMQHRNIVRLQDVVHDEKSLYLVFEYLDLDLKKHMDSSPEFAKDPRQVKMFLYQILCGIAYCHSHRVLHRDLKPQNLLIDRSTNALKLADFGLARAFGIPVRTFTHEVVTLWYRAPEILLGSRQYSTPVDIWSVGCIFAEMVNQRPLFPGDSEIDELFKIFRIMGTPNEDTWPGVTSLPDFKSAFPKWQPKDLKNVVPNLEPAGLDLLSSMLYLDPSKRITARSALEHEYFKDIKFVP

SEQ ID NO: 62725 - DNA, 1393 bp, Triticum aestivum
  CDS (108)..(989)
accacacactgccctccctccccctccctccccccaccccactcctccccgccgccgccgccgccgccccgctccgatccgccccgcgccgcgcggatcgccgcgccatggaccagtacgagaaggtggagaagatcggggagggcacgtacggggtggtgtacaaggccaaggaccgctacaccaacgagacgatcgcgctcaagaagatccggctggagcaggaggacgagggcgtcccctccaccgccatccgcgagatctccctcctcaaggagatgcagcaccggaacatcgtcaggctgcaggacgtggtgcacaacgagaagtgcatatacctcgtcttcgagtacctcgacctcgacctcaagaagcacatggactcctccgcggacttcaagaaccaccacatagtcaagtccttcctctaccagatcctgcacggcatcgcctactgccactcgcaccgtgtgcttcacagggatctcaagccccagaacctgctgatagatcgccgtaccaattcattgaagcttgctgacttcggattggcgagggcgttcggcattcctgtccggacatttactcacgaggtggtgacattatggtatagagcaccagaaattcttctgggtgcgaggcagtattctacccctgttgatgtgtggtcggttggttgcattttcgccgaaatggtgaatcagaaacctctatttcctggtgattctgagattgatgaactcttcaagattttcagaattatgggcactcctaatgaagaaacctggccaggtgtttcttcgttacctgactacaaatcagctttccccaagtggccatccgtggatcttgcaactgtggttccaacactcgaacctttgggacttgatcttctctctaaaatgctctgcttagatccaaccagaagaatcaacgcccgaaccgccctcgagcacgagtacttcaaggatctggacgtatcctcgtagatcacttgccctgctcctctgtaaattaagatcgcgtcgactgatcgatagcttcctggatcatgtactgtgtgctcctttctctcccattctttctgactctggctgtgtagagagaaatgagaacggaagcgcctccggattcacccttccttgtagtccaagccaattgaaaaatgatcctgatgctctgggagctctgcattgcgatttcgcccgtatttatatggacatcgacgccggcaccagacttgttcatgtacgatggattttggagtagtggcagatagtcaaggggctgcagtgtttcatgaactaccaactgatgtgacaatgtttgggagtgtactactacttgtacttggtaaacatcattatcatcatgaatggaatcagttgtggac

SEQ ID NO: 62726 - protein, 293 aa, Triticum aestivum
MDQYEKVEKIGEGTYGVVYKAKDRYTNETIALKKIRLEQEDEGVPSTAIREISLLKEMQHRNIVRLQDVVHNEKCIYLVFEYLDLDLKKHMDSSADFKNHHIVKSFLYQILHGIAYCHSHRVLHRDLKPQNLLIDRRTNSLKLADFGLARAFGIPVRTFTHEVVTLWYRAPEILLGARQYSTPVDVWSVGCIFAEMVNQKPLFPGDSEIDELFKIFRIMGTPNEETWPGVSSLPDYKSAFPKWPSVDLATVVPTLEPLGLDLLSKMLCLDPTRRINARTALEHEYFKDLDVSS

SEQ ID NO: 62727 - DNA, 993 bp, Zea mays
  CDS (1)..(993)
atgcccttgcccatcgacggtagacgagagcgagcggtctgtgttcgtggagcaggggccggcgccatggagatcaacatcgtggacaagtacgagaagctggagaaggtcggggagggcacctacggcaaggtgtacaaggcgcaggacaaggcgacggggcagctggtggcgctgaagaagacccgcctcgagatggacgaggagggcatcccgcccacggcgctccgcgagatctccctcctcaacctcctctcccactccatctacatcgtccgcctcctcgccgtcgagcaggccgctaagaatggcaagcccgtcctctacctcgtcttcgagttcctcgacaccgatctcaagaagtacctcgacgtctaccgcagggggcccagcgccaggccgctccccgcgacactcatcaagaatttcctgtatcagttatgcaaaggagttgcacactgccatagccatggtgtccttcaccgggatttaaagccacaaaacctgctggtggacaaggagaagggtatactgaagattgctgatctgggactcggtagggctttcactgtgcccatgaaaagctacacccatgagattgtgaccctttggtacagagctcctgaagttttgcttggagcaacacattactcaactggcgttgatatgtggtctgttggatgcatctttgctgaaatggcccgacggcaggctctctttcctggtgactcggagttgcaacagttgcttcacatcttcaggttgctgggaacacctactgaggaacagtggcctggagtgagtgatttaagggactggcatgagtttccacagtggaagccccagggtttggcacgtgtcgtcccaacactggaacctgaaggagttgaccttctatcgaaaatgcttcagcttgatccttcaaacaggatatcagctttagctgcgatggagcatccctactttaacagccttgacaagtcccagttctag

SEQ ID NO: 62728 - protein, 330 aa, Zea mays
MPLPIDGRRERAVCVRGAGAGAMEINIVDKYEKLEKVGEGTYGKVYKAQDKATGQLVALKKTRLEMDEEGIPPTALREISLLNLLSHSIYIVRLLAVEQAAKNGKPVLYLVFEFLDTDLKKYLDVYRRGPSARPLPATLIKNFLYQLCKGVAHCHSHGVLHRDLKPQNLLVDKEKGILKIADLGLGRAFTVPMKSYTHEIVTLWYRAPEVLLGATHYSTGVDMWSVGCIFAEMARRQALFPGDSELQQLLHIFRLLGTPTEEQWPGVSDLRDWHEFPQWKPQGLARVVPTLEPEGVDLLSKMLQLDPSNRISALAAMEHPYFNSLDKSQF

SEQ ID NO: 62729 - DNA, 1689 bp, Zea mays
  CDS (1)..(1173)
atggcggcacggctcttgcgttacgcgcgcccgcccgcccgcccgcgggagccacgtgacatgattgatttcaatggaaatcttatttattttgacatcgacgacacccgcgacccgccgcggccacccagttgctcaagtgattccaggcccacgccacgccaaccccgggctcaactcgagtccacacgccccagcaccacccctgcctctcagtccagtcccccacccaccaccaccactcctcccctcgccgccgcccgttcccgaccgatccggccggatcgccccgccatggaccagtacgagaaggtggagaagatcggggagggcacgtacggggtggtgtacaagggcaaggaccgccacaccaacgagacgatcgcgctcaagaagatccgcctcgagcaggaggacgagggcgtcccctccaccgccatccgcgagatctccctcctcaaggagatgcagcaccgcaacatcgtcaggctgcaggacgtcgtgcacaacgacaagtgcatctacctcgtcttcgagtacctcgacctcgacctcaagaagcacatggactcctccacggacttcaagaaccaccgcatagtcaaatccttcctctaccagattctgcggggcatcgcctactgccactcgcaccgcgtgctccaccgcgacctgaagccgcagaacctgctgattgaccgccgcaacaacctcttgaagctcgcggactttggactggcgagggcgttcggcatccctgtccggacgttcactcatgaggtggtgacgctttggtatagagcgcctgaaatccttctcggtgcaaggcattattccacccctgttgatgtgtggtcagttggttgcattttcgctgaaatggtgaaccagaaggcgctttttcctggcgactctgagatcgatgagctgtttaagattttcagaattttgggcactccaactaaagaaacatggccaggcgttgcttcgttgcctgattacaagtcaactttcccaaagtggccacctgtggatcttgcaacggtggtcccgacactcgaaccgtcgggaatcgatctcctatctaagatgctgcgtctagatcccagcaagaggatcaccgcccgcgccgccctcgagcacgactacttcagggacctcgagcacgcctagcaggatatggatggatggatggatgaaccgtttcccctcccctgctccctctgtaaattacggtagcagccgcgatgcttggggccggcgagtacccccgtctgggcggccgttgagttatgtgtgttactctatagtatgactaagctggagtgcctcatgtccaccatgcagtgcagcttttttctccgacttttttttgctgcgtagagaaatgagatgagaaatgtgatccagagatccttgtgccatgggagacctagtagtagactagtagctatgtaggtgtcggcactggcctctcttgaacctgtatgatggctggagagagaggagagacggcggcttctctggttgataagttggtcctggtatggtgtgcttgccgccgatgcacgtcatggtctttcttcctttctgatgaggacttggggtggacgccgagtgagttcgtgctcatgcacggtttgttggccatgcaagctgaagcagctgcagcagagattttggaaaaaa

SEQ ID NO: 62730 - protein, 390 aa, Zea mays
MAARLLRYARPPARPREPRDMIDFNGNLIYFDIDDTRDPPRPPSCSSDSRPTPRQPRAQLESTRPSTTPASQSSPPPTTTTPPLAAARSRPIRPDRPAMDQYEKVEKIGEGTYGVVYKGKDRHTNETIALKKIRLEQEDEGVPSTAIREISLLKEMQHRNIVRLQDVVHNDKCIYLVFEYLDLDLKKHMDSSTDFKNHRIVKSFLYQILRGIAYCHSHRVLHRDLKPQNLLIDRRNNLLKLADFGLARAFGIPVRTFTHEVVTLWYRAPEILLGARHYSTPVDVWSVGCIFAEMVNQKALFPGDSEIDELFKIFRILGTPTKETWPGVASLPDYKSTFPKWPPVDLATVVPTLEPSGIDLLSKMLRLDPSKRITARAALEHDYFRDLEHA

SEQ ID NO: 62731 - DNA, 1364 bp, Pinus radiata
  CDS (99)..(1007)
ctgatctcgtcgccgccggccgcccgtcagagtcgctcccgccgcggcgcgcactcctccgaaccgttcgaattgtttgtccgttgaaaacccgcgagatggagaagtaccaacagctcgcaaagatcggggagggcacgtacgggatcgtgtacaaggccaaagacaagaagagtggtgaactgctcgctttgaagaagattcgtttggaggcggaggatgagggcattccctccactgccatccgcgagatttccctcctcaaacagctccaacacccaaacatcgtccggttgtacgatgtcgttcacacagagaagaagctgacactggtgttcgagttcttggaccaggacctcaaaaagtacttggatgcgtgcggtgacaacggactcgaaccgtacactgtcaaatctttcttgtaccaactgctgcaaggcatcgccttctgccacgagcaccgcgtgctccaccgcgatctcaaaccgcagaatttgctcatcaacatggagggtgagttgaagctggccgacttcggtctggcgcgcgccttcggtattcccgtccggaattacacgcacgaagtcgtcaccctctggtaccgcgcccccgacgtgctgatgggatcgcggaagtactccacgcaagtcgacatttggagcgtcggctgcatcttcgctgagatggtgaacggtcggccgctgtttcccggctcgagcgagcaggaccaactgctgcgcatcttcaaaacgctcgggactccgtccctcaaaacgtggccgggaatggcggagctgccggactttaaggacaatttccccaagtatgtcgtgcagagcttcaagaagatctgtccaaagaagctcgacaagaccggcctcgatctgttgtcgcggatgttgcagtacgaccccgccaagcgcatctccgccgagcaggcgatgggccacccgtacttcaaagacctcaagttgaggaaaccgaaggcggccggaccgggaccctaaaaaaaagccacccaactcacccaattcttcttctttttccatctttttttttcgttgtagtcaagttggtggtcggttgtcgggaaaatttatttcattgtttttttcttctcgagatttttcggttctgtgggtaccgtttccaaacaaaaaaacttttgcctgccgtgtcttcactttgcttccctctgctatttagctgtgaactttcttttttttctcattcgcttctttgggcgcgtgtgttcagtggggataagtgttctcgtttttctctgtacatactcgcgcttctacgcagcaaatcacgaagagaccgtgtttactgagcaaatatttttttctaataaaaaaaaa

SEQ ID NO: 62732 - protein, 302 aa, Pinus radiata
MEKYQQLAKIGEGTYGIVYKAKDKKSGELLALKKIRLEAEDEGIPSTAIREISLLKQLQHPNIVRLYDVVHTEKKLTLVFEFLDQDLKKYLDACGDNGLEPYTVKSFLYQLLQGIAFCHEHRVLHRDLKPQNLLINMEGELKLADFGLARAFGIPVRNYTHEVVTLWYRAPDVLMGSRKYSTQVDIWSVGCIFAEMVNGRPLFPGSSEQDQLLRIFKTLGTPSLKTWPGMAELPDFKDNFPKYVVQSFKKICPKKLDKTGLDLLSRMLQYDPAKRISAEQAMGHPYFKDLKLRKPKAAGPGP

SEQ ID NO: 62733 - DNA, 1193 bp, Pinus radiata
  CDS (120)..(1004)
gccaacgccaacaccaccaccagcggcggcaacagcagcagcagcaacagcaaccggccgccattactgccccctccaggttgctgttgcattgcgcggcatctttgaactggagttgaatggatcagtatgagaagatcgagaagatcggggaaggaacttatggcgtggtctataaggctattgatcgctccaccaataagacaattgctctgaagaaaattcgtttggaacaggaagatgaaggagttccgagtactgcaatcagagaaatctctctcttgaaagaaatgcagcatggaaacattgtcaagttgcaggacgtagtgcacagtgagaggcgtctatatctagtttttgagtacttggacttggatttgaaaaagcacatggattcatgtccagaattttctaaggacacccacacaataaaaatgttcctttatcagatcctgcgtggcatttcctattgccattctcatagagttttacatcgagatttgaagccccagaatttgctgctagatcgtcgtactaattcattgaagctagctgactttgggctggccagggcttttgggattcctgttaggacatttacccatgaggtggtgactttatggtatagagctcctgagatactccttggatcccgccattactcaacgcccgttgacgtgtggtctgtgggttgtatatttgcagagatggtgaaccggcgaccactatttcctggggactctgagattgatgaattgtttaagattttcagaataatgggcacgccaaatgaagattcatggcccggagtgacctctttgcctgattttaaatcaacctttcctaagtgggcttcacaggacctaaaaactgttacgccaactgttgatccagctggcatcgatcttctttctaaaatgctgtgcatggatcctagaagaagaataactgccaaggtcgctcttgagcacgaatacttcaaggacgtcggtgtcataccgtgaatatcattgccttacttactcggtgagacatgtctatatggagtttgtagcatattaatgggttttgattgtgtgaaatgtgaatcttttcaattcttaaccgcatcttctttctcgagtcaaatacaagtcctgttgaactggattttggatgttttagccagcaaagttgatctcttaaaaaaaaaa

SEQ ID NO: 62734 - protein, 294 aa, Pinus radiata
MDQYEKIEKIGEGTYGVVYKAIDRSTNKTIALKKIRLEQEDEGVPSTAIREISLLKEMQHGNIVKLQDVVHSERRLYLVFEYLDLDLKKHMDSCPEFSKDTHTIKMFLYQILRGISYCHSHRVLHRDLKPQNLLLDRRTNSLKLADFGLARAFGIPVRTFTHEVVTLWYRAPEILLGSRHYSTPVDVWSVGCIFAEMVNRRPLFPGDSEIDELFKIFRIMGTPNEDSWPGVTSLPDFKSTFPKWASQDLKTVTPTVDPAGIDLLSKMLCMDPRRRITAKVALEHEYFKDVGVIP

SEQ ID NO: 62735 - DNA, 1122 bp, Zea mays
  CDS (1)..(1122)
atgaagcgagcgaggcagcggcgtggggcgaggagtggaggacaccgatccccgccggagagcgcgtccatcccaaatggcgactgcagcttcgcccgcctttccccgtctcctctgcctctgcctctccccctaacccccttccatttctccaccccaccccgctcccgcttccgcttcctcgccacctggttcgttccgcacccgccgccgcattgggtgccgagggggcacgcaatggagcagtacgagaaggtggagaagatcggggagggcacgtacggggtggtgtacaaggcgctggacaaggccaccaacgagacgatcgcgctcaagaagatccgcctcgagcaggaggacgagggcgtcccgtccaccgccatccgcgagatctctctcctcaaggagatgaaccacggcaacatcgtcagattacatgatgttgtccacagcgagaagcgcatatacctcgtcttcgagtacctggatctggacctcaagaagttcatggactcttgcccggagtttgctaagaatcccactttgattaagtcatacctctaccagatactccgtggtgttgcgtactgccattctcatagagttcttcaccgagatttgaaacctcagaacttgttgatagatcggcgtaataatgcactgaagcttgcagactttggtttagccagggcatttggaattcctgtccgtacatttactcatgaggtagtgacattatggtacagagctccagaaatccttcttggagcgagacagtattccacaccagttgacgtatggtctgtgggctgtatctttgcggaaatggtgaaccaaaagccactattccctggtgattctgagatcgacgaactgttcaagatattcagggtgctaggtacaccgaatgaacaaagttggcctggagtcagttgtttgcctgacttcaagactgctttccccaggtggcaagctcaggacctggcaacaatagtcccaaatctagaacctgctggcttggaccttctctctaaaatgcttaggtatgagccaagcaaaagaatcacagctaggcaagcacttgagcacgagtacttcaaggaccttgagatggtacagtga

SEQ ID NO: 62736 - protein, 373 aa, Zea mays
MKRARQRRGARSGGHRSPPESASIPNGDCSFARLSPSPLPLPLPLTPFHFSTPPRSRFRFLATWFVPHPPPHWVPRGHAMEQYEKVEKIGEGTYGVVYKALDKATNETIALKKIRLEQEDEGVPSTAIREISLLKEMNHGNIVRLHDVVHSEKRIYLVFEYLDLDLKKFMDSCPEFAKNPTLIKSYLYQILRGVAYCHSHRVLHRDLKPQNLLIDRRNNALKLADFGLARAFGIPVRTFTHEVVTLWYRAPEILLGARQYSTPVDVWSVGCIFAEMVNQKPLFPGDSEIDELFKIFRVLGTPNEQSWPGVSCLPDFKTAFPRWQAQDLATIVPNLEPAGLDLLSKMLRYEPSKRITARQALEHEYFKDLEMVQ

SEQ ID NO: 62737 - DNA, 1283 bp, Antirrhinum majus
  CDS (5)..(913)
  misc_feature (1076)..(1076): n is a, g, c or t
gtacatggtttcatctcatcgatctctgatggagcagtatgaaaaggttgagaagattggggagggaacgtatggagtggtatacaaggctcgtgatcgtgtaacaaatgagactatagccttgaagaaaatccgtctagagcaggaagatgagggagtgcccagcacagctatcagagagatttctctcttgaaagagatgcaacatgggaatatcgtgaggttgcaggatgtggtgcacagtgagaagcgcttgtacctggtgtttgaatatctggacttggatttgaaaaaacatatggattcatgcccagaattctcccaggatcctcgtttggttaaaatgtttctgtatcaaatactacgtggtatcgcctactgtcattctcatcgtgtccttcatcgagatttgaagcctcaaaacttgctgatagaccgccgtaccaatgcattaaagcttgctgactttggattggccagagcatttggtattccagtcaggacttttacacatgaggttgtgacactgtggtacagggctccagaaatactacttggatctcgccattattctactccagtggatgtctggtcagttggttgtatatttgctgaaatggttaaccaacggcctttgtttcctggggactctgagattgatgaactattcaaaatttttagagtcatgggtaccccaaatgaagaaacatggccaggagtgacttctttgcctgattttaagtcagcatttccaaaatggccagctaaggagctggctgctgtagttccgaatcttgatgcatctggccttgatctccttgataaaatgcttcgtttggaccccagcaaaagaattacggccaggaatgctcttcagcatgagtacttcaaggatattggttttgtaccctgattggtgcccctcattctggtacgagtatatattgttatatgacgtctggggttttattctgttccataggaattcgtgacagacgaacgttatctcttgtttttgattccttgggtgtaattccatttatattgaagctgtgttggttgaagcaagttaggantggcctctgctggtgctttcacttgctttaaaccccttgtgtgattttgtcgattttttgttccttttccatttttaatttccctgtaacatcatgctgatgtataacgtttgagtttttgttatctggtttaatatataaatatggtgtgccttttagttgttcaaaaaaaaaaaaaaaaaaaaaaaaaccatggtacccggatcc

SEQ ID NO: 62738 - protein, 302 aa, Antirrhinum majus
MVSSHRSLMEQYEKVEKIGEGTYGVVYKARDRVTNETIALKKIRLEQEDEGVPSTAIREISLLKEMQHGNIVRLQDVVHSEKRLYLVFEYLDLDLKKHMDSCPEFSQDPRLVKMFLYQILRGIAYCHSHRVLHRDLKPQNLLIDRRTNALKLADFGLARAFGIPVRTFTHEVVTLWYRAPEILLGSRHYSTPVDVWSVGCIFAEMVNQRPLFPGDSEIDELFKIFRVMGTPNEETWPGVTSLPDFKSAFPKWPAKELAAVVPNLDASGLDLLDKMLRLDPSKRITARNALQHEYFKDIGFVP

SEQ ID NO: 62739 - DNA, 1216 bp, Glycine max
  CDS (156)..(1040)
cgcttacagtaagaggtgagaaagagagacaaatcggcagaagcaaggaggctgagagcgagagagcaactgcacgcactgtaactcctaacttcccagatcgtcttcttcctcttttctctccggtgattgttggaactcagagagcttctttgatggaacagtacgagaaggttgagaagataggcgaaggaacatacggcgtcgtttacaagggtcgcgaccgcgtcaccaacgagaccatcgcgttgaagaagattcgcctcgagcaggaggatgagggggttcccagcaccgccattcgcgagatttctctcttgaaagaaatgcagcacaggaacattgttaggttgcaggatgtagtgcacgatgagaagagtttgtatctggtttttgagtaccttgacttagatctaaagaagcacatggattcatctccagaatttgcaaaagatccacgacaagtaaaaatgttcctgtaccaaattctctgtggcattgcatactgtcattcacatagagttcttcatcgagacttaaaaccacagaatttgttgatagatcgcagcactaatgcactgaaacttgcagattttggattggccagggcttttggaattcctgttaggacatttacacatgaggtggtaacactgtggtacagagctccggaaattttgcttggatcccgtcagtattctaccccagttgatatttggtcagtgggatgcatatttgcagagatggtaaatcaacgaccacttttccctggggactctgagattgatgaattgtttaaaatattcagaatcatgggtacaccaaatgaagatacatggcctggagtgacatcattgccagattttaaatcagcctttcccaaatggcaacctaaggacctgaaaaatgtggttccaaatcttgagccagctggtcttgatcttctttctagcatgctttacttggatcccagcaaaagaattactgctaggagcgctcttgagcatgaatacttcaaagacattaaatttgtaccctgatttcttatcttcaaggctgaggtgtcttattagtatgtgtagcatttatgggttttgactcaaacgcgtgttgtccttgcttttttcttcaatgcttttggaccgaatcatatttcatttatttgttcttacatttttatttagtatgtgtgatcttgttacctatttacccgttt

SEQ ID NO: 62740 - protein, 294 aa, Glycine max
MEQYEKVEKIGEGTYGVVYKGRDRVTNETIALKKIRLEQEDEGVPSTAIREISLLKEMQHRNIVRLQDVVHDEKSLYLVFEYLDLDLKKHMDSSPEFAKDPRQVKMFLYQILCGIAYCHSHRVLHRDLKPQNLLIDRSTNALKLADFGLARAFGIPVRTFTHEVVTLWYRAPEILLGSRQYSTPVDIWSVGCIFAEMVNQRPLFPGDSEIDELFKIFRIMGTPNEDTWPGVTSLPDFKSAFPKWQPKDLKNVVPNLEPAGLDLLSSMLYLDPSKRITARSALEHEYFKDIKFVP

SEQ ID NO: 62741 - DNA, 1157 bp, Glycine max
  CDS (76)..(960)
aattcggcacgaggtggagtgagagatagtgactgcaaaaccgctccagccttgtttcttctcagatcttcttccatggaacagtacgagaaggtggagaagataggcgagggaacatacggcgtcgtttacaaggctcgcgaccgcgtcaccaatgagaccatcgctctcaagaagattcgcctcgagcaggaggacgaaggcgttcccagcaccgccattcgcgagatttctctcctcaaagagatgcagcataggaacattgttaggttgcaggatgtagtacacagtgagaagcgattgtatctggtttttgagtatctggacttggatctaaagaaacatatggattcatctccagagtttgtgaaagatccacggcaagtaaagatgttcctttatcaaattctctgtggcattgcttactgtcattcacatagagttcttcatcgagacttgaaaccacagaatttgttgatagatcgccgtactaattcactaaagcttgcagattttggattggctagggcatttggcattcctgtcaggacatttacacatgaggtggtgacattatggtacagagctccagaaatattgcttggatctcgtcattattctacgccagttgatgtttggtcagtgggatgtatatttgcagagatggtaaaccgacgacctctattccctggggactctgagattgatgaattatttaaaatattcagaatcttgggtaccccaaatgaagacacatggcctggtgtaacttcattgcctgattttaaatcaacatttcccaaatggccatccaaggacttggcaaatgtggttccaaatcttgatgcagctggtcttaatcttctttctagtatgctttgcttggatcccagcaaaagaatcaccgccaggagcgctgtggagcatgaatacttcaaagacattaaatttgttccctgattccatatcttgatggcaaacgtgtttatagtaatattgtgcagaatttatgggttttgactctgcgagaaatgcgtgctgtctttttctattttcttagtgacttgggagtgtgagccatatttccattttttggtccttacagaatgtttcagattcaacttgagtgtgattatattgcatattactttttcatt

SEQ ID NO: 62742 - protein, 294 aa, Glycine max
MEQYEKVEKIGEGTYGVVYKARDRVTNETIALKKIRLEQEDEGVPSTAIREISLLKEMQHRNIVRLQDVVHSEKRLYLVFEYLDLDLKKHMDSSPEFVKDPRQVKMFLYQILCGIAYCHSHRVLHRDLKPQNLLIDRRTNSLKLADFGLARAFGIPVRTFTHEVVTLWYRAPEILLGSRHYSTPVDVWSVGCIFAEMVNRRPLFPGDSEIDELFKIFRILGTPNEDTWPGVTSLPDFKSTFPKWPSKDLANVVPNLDAAGLNLLSSMLCLDPSKRITARSAVEHEYFKDIKFVP

SEQ ID NO: 62743 - DNA, 936 bp, Arabidopsis thaliana
  CDS (1)..(936)
atggagaaatacgagaagctcgaaaaggtcggtgaaggaacctatggaaaagtctacaaagcaatggagaaaaccaccggaaaactcgtcgctctgaagaaaactaggctcgaaatggacgaagaaggtataccaccaacggctctccgtgagatctctcttctccaaatgctttctcaatcaatctacatcgttcgtctcctctgcgtcgaacatgttattcaatcgaaagattcgactgtttctcactctcccaaatccaatctctatctcgtttttgagtatctcgacactgatctcaagaaatttatagattctcatagaaagggctcgaatcctagaccgcttgaggcttctcttgtgcagaggtttatgtttcagctttttaaaggtgtggctcattgtcatagccatggtgtgcttcaccgtgatcttaaaccgcagaatcttctattggataaggataaagggattcttaagattgctgatttgggtcttagtcgtgcttttactgtgcctcttaaggcttatacacatgagattgttactctttggtatagagctcctgaagttttgcttggttctactcattactctactgctgttgatatttggtctgttggatgcatctttgccgagatgattaggaggcaagctcttttccctggtgattctgagtttcagcaactacttcatattttcagattgttaggaacaccaactgagcagcaatggccgggtgtaatggcattgcgtgactggcatgtctatccaaagtgggagccgcaagacttatcacgtgctgttccatctctatctcctgaaggaattgatcttctcacgcaaatgttgaagtacaatccagcagaaagaatttcagcaaaagcagctctcgatcatccctactttgacagccttgacaaatctcagttctga

SEQ ID NO: 62744 - protein, 311 aa, Arabidopsis thaliana
MEKYEKLEKVGEGTYGKVYKAMEKTTGKLVALKKTRLEMDEEGIPPTALREISLLQMLSQSIYIVRLLCVEHVIQSKDSTVSHSPKSNLYLVFEYLDTDLKKFIDSHRKGSNPRPLEASLVQRFMFQLFKGVAHCHSHGVLHRDLKPQNLLLDKDKGILKIADLGLSRAFTVPLKAYTHEIVTLWYRAPEVLLGSTHYSTAVDIWSVGCIFAEMIRRQALFPGDSEFQQLLHIFRLLGTPTEQQWPGVMALRDWHVYPKWEPQDLSRAVPSLSPEGIDLLTQMLKYNPAERISAKAALDHPYFDSLDKSQF

SEQ ID NO: 62745 - DNA, 960 bp, Bombyx mori
  CDS (1)..(960)
atggatgatttcttaaagatagaaaagatcggcgaaggtacttacggtgtcgtttacaaaggaaaaaacaaaataactggtcaatttgtagccatgaaaaaaattcgcttggagtccgaagacgaaggcataccatccacggcaataagagaaatatctctacttaaagaactgaaccaccctaatattgtcaagttggaggatgtcctgatggaagagtcgcgactttacttaatcttcgaattcctctctatggacttgaagaaatatatggactcccttggttctggaaagttcatggacccatctgtagttaagagctatctatatcaaatcaacaatgccatcttgtactgtcaccaaagacggatcctgcatcgagatctcaaaccacagaacctactcatcgacaagactggaataattaaagttgcagattttggtcttggtcgagcattcggtgttccagtgcgggtctacacacatgaagttgtcacattgtggtacagggctcctgaggtcttactaggaagtcaaagatactcttgtccaattgatatatggtcagttggctgtatattctctgagatgtcatcaaagaagccactgtttcaaggagactctgaaattgatcaactcttccgcattttcagaatgctaagaacgccaacagaagagatatggcctggtgtttctctcctaccagactacaagccaaccttcccgaactggaacacgtacaatctgcacaatcatgtacaaaacctagacgaagtgggcatggatttgttacaaaagatgttggtctacgatcctgttaaaagaatatccgcgaaggacgcgcgacgacacaagtactttagagacgtgaaactacctcccggactgacagtgcacgacgcttacatcagagtgacgccagaatacccatacgacacggattctgttcaaagtgtatag

SEQ ID NO: 62746 - protein, 319 aa, Bombyx mori
MDDFLKIEKIGEGTYGVVYKGKNKITGQFVAMKKIRLESEDEGIPSTAIREISLLKELNHPNIVKLEDVLMEESRLYLIFEFLSMDLKKYMDSLGSGKFMDPSVVKSYLYQINNAILYCHQRRILHRDLKPQNLLIDKTGIIKVADFGLGRAFGVPVRVYTHEVVTLWYRAPEVLLGSQRYSCPIDIWSVGCIFSEMSSKKPLFQGDSEIDQLFRIFRMLRTPTEEIWPGVSLLPDYKPTFPNWNTYNLHNHVQNLDEVGMDLLQKMLVYDPVKRISAKDARRHKYFRDVKLPPGLTVHDAYIRVTPEYPYDTDSVQSV

SEQ ID NO: 62747 - DNA, 822 bp, Oryza sativa (japonica cultivar-group)
  CDS (1)..(822)
atggagaagtacgagaagctggagaaggtgggggaagggacgtacgggaaggtgtacaaggcgcaggacagggcgacggggcagctggtggcgctgaagaagacgaggctggagatggacgaggaggggatcccgcccaccgcgctgcgcgagatctccatcctcaggctgctctcccagtcgctctacgtcgtccgcctcctctccgtcgagcaggccaccaagaacggcaagcccgtcctctacctcgtcttcgagttcctcgacaccgacctcaagaagttcgtcgacgcctaccgcaagggccccaaccctcgccccctccccaccaacgtcatcaagagcttcttgtatcagttatgcaaaggagtcgcacattgccatggccatggtgtccttcaccgtgatttaaagccacaaaacctgttggtcgacaaggaaaaggggatattgaaaattgctgatcttgggctaggtagggcgttcactgttcctatgaaaagctacacacatgagattgtgactctttggtacagagctcctgaagttttgcttggatcaacacattactcaaccggtgttgacatttggttgttgggaactcctactgaggagcagtggcctggagtaactgatttgagggactggcatgagtttccacagtggaagccacagattttagaacgtcaagtcccatcattggagcctgaaggagttgaccttttatcgaaaatgctccagtataacccagcaaatcggatctcagcaaaggctgctatggaacacccctacttcgacagcctcgacaagtcccagttctag

SEQ ID NO: 62748 - protein, 273 aa, Oryza sativa (japonica cultivar-group)
MEKYEKLEKVGEGTYGKVYKAQDRATGQLVALKKTRLEMDEEGIPPTALREISILRLLSQSLYVVRLLSVEQATKNGKPVLYLVFEFLDTDLKKFVDAYRKGPNPRPLPTNVIKSFLYQLCKGVAHCHGHGVLHRDLKPQNLLVDKEKGILKIADLGLGRAFTVPMKSYTHEIVTLWYRAPEVLLGSTHYSTGVDIWLLGTPTEEQWPGVTDLRDWHEFPQWKPQILERQVPSLEPEGVDLLSKMLQYNPANRISAKAAMEHPYFDSLDKSQF

SEQ ID NO: 62749 - DNA, 981 bp, Oryza sativa (japonica cultivar-group)
  CDS (1)..(981)
atggcggcgctccaccaccaggcggcggcggcgccggtgacgacgacgacggacgggggcgagctgcgggcgatggacctgtacgagaagctggagaaggtcggggaggggacgtacgggaaggtgtacaaggcgcgggagaaggcgacggggcggatcgtggcgctgaagaagacgcggctgccggaggacgacgagggcgtgccgccgacggcgctcagggaggtgtcgctgctgcggatgctgtcgcaggactcgcacgtggtgcgcctgctggacctcaagcaggggcagaacaaggagggccagaccatcctctacctcgtcttcgagtacatggacaccgacctcaagaagttcatccgcgcccaccgccagaatctccagaagatccccgtgcccaccgtcaagatcctgatgtaccagctctgcaagggcgttgctttctgccatggccgcggtgtgctgcaccgtgacctcaagccgcataacctgctcatggaccgcaagaccatggcgctcaagatcgccgacctcgggctcagccgctcgttcactgtccctctcaagaagtacacccacgagatcctgacgctgtggtacagggctcccgaggttcttcttggcgcggcacactactccactccggttgacatctggtctgtgggctgcatttttgctgagttggccactaaccaacctcttttcgctggagattccgaggttcagcagcttctgcacattttcaagttgctgggcaccccaaatgagcaagtttggccaggagtgagcaagctacctaactggcacgagtacccccagtggaatccctcgaaagtgtctgatcttgtccatggtctcgacgctgatgctcttgatcttcttgagaaaatgctgcagtacgagccgtcgaagcggatctctgcgaagaaggccatggagcatccctacttcaacgacgtgaacaaggagctctactga

SEQ ID NO: 62750 - protein, 326 aa, Oryza sativa (japonica cultivar-group)
MAALHHQAAAAPVTTTTDGGELRAMDLYEKLEKVGEGTYGKVYKAREKATGRIVALKKTRLPEDDEGVPPTALREVSLLRMLSQDSHVVRLLDLKQGQNKEGQTILYLVFEYMDTDLKKFIRAHRQNLQKIPVPTVKILMYQLCKGVAFCHGRGVLHRDLKPHNLLMDRKTMALKIADLGLSRSFTVPLKKYTHEILTLWYRAPEVLLGAAHYSTPVDIWSVGCIFAELATNQPLFAGDSEVQQLLHIFKLLGTPNEQVWPGVSKLPNWHEYPQWNPSKVSDLVHGLDADALDLLEKMLQYEPSKRISAKKAMEHPYFNDVNKELY

SEQ ID NO: 62751 - DNA, 1053 bp, Ciona intestinalis
  CDS (1)..(1053)
atgtcggacaagcgacctcccgaagttgttcgaggacaagtttttgacgttgctccacgctatacaagtctgagctacattggagagggggcatatggcatggtttgttctgcgactgatggtcagaacggtcagaaagtggcgatcaaaaaaatcagtccatttgagcaccagacatactgtcaacgtacattgcgtgagataagaatattgatctcgttcaaccacgagaacattatctccataaaggatatcataagagctcccacacttgcagaaatgaaagatgtctacatcgttcaagatcttatggaaactgatttatataagctgttgaaaactcaacatttgagtaacgaccatatctgctatttcttgtaccagattttacgaggattaaaatatattcactcagcgaatgtaatccatagagatttaaaacccagcaatttgcttctgaacacaacttgtgatttaaagatttgcgactttggtttggcgagagttgccgaccccgagcacgaccacacggggttcctcactgagtacgtcgccacccgatggtacagagctcccgaaatcatgctcaattcgaaggggtatacaaaatcaattgatatttggtctgtcggatgcattctggctgaaatgattagtaacagaccaatttttcctggaaaacactatttggatcagcttaatcacattttaggcatccttggctccccatcagaagaggacctcaactgcatcatcaatgagaaagctcgtgcttatcttatgtctctgccgaacaagccacgcctctcttggtctcgtctctactcaaaagctgacgaaaaagcgcttgaccttttggaccgtatgctgaccttcaaccccaccaagcgtattaacgtcgacgacgctcttgctcacccttatcttgagcaatattacgacccagctgacgaacccgtgacagagaaacccttcacttttgaagaggaatttgatgacctgccgaaagaacgtctgaaggaacttattttccaggtctccccctgccgttga

SEQ ID NO: 62752 - protein, 350 aa, Ciona intestinalis
MSDKRPPEVVRGQVFDVAPRYTSLSYIGEGAYGMVCSATDGQNGQKVAIKKISPFEHQTYCQRTLREIRILISFNHENIISIKDIIRAPTLAEMKDVYIVQDLMETDLYKLLKTQHLSNDHICYFLYQILRGLKYIHSANVIHRDLKPSNLLLNTTCDLKICDFGLARVADPEHDHTGFLTEYVATRWYRAPEIMLNSKGYTKSIDIWSVGCILAEMISNRPIFPGKHYLDQLNHILGILGSPSEEDLNCIINEKARAYLMSLPNKPRLSWSRLYSKADEKALDLLDRMLTFNPTKRINVDDALAHPYLEQYYDPADEPVTEKPFTFEEEFDDLPKERLKELIFQVSPCR

SEQ ID NO: 62753 - DNA, 948 bp, Arabidopsis thaliana
  CDS (1)..(948)
atggacaacaatggagttaaacccgctgtttccgccatggaagcctttgaaaagcttgagaaagtaggtgaagggacttatgggaaagtttacagagcaagagagaaagctactgggatgatcgttgctttgaagaagacgcgtctccatgaggatgaagaaggtgttcctcccactactcttcgcgagatctctatcttgcgtatgctcgctcgtgatcctcacatcgttaggttgatggatgttaagcaaggaataaacaaagaaggaaaaactgtactttaccttgttttcgagtatgttgatactgatctcaagaaattcatcagaagctttcgtcaagctggacagaacattccacaaaatactgtcaagtgcttgatgtaccagttatgcaaaggcatggctttttgccatggtcatggagtgttgcacagggatcttaagcctcacaatctcttgatggaccggaagacaatgacgctcaaaatagcagatcttggattagccagagccttcactctcccaatgaaaaagtatacacatgagattctaactctatggtatagagctccggaagttcttcttggagcaacccattactctactggagtggatatgtggtctgttggctgtatttttgctgaactagtgaccaagcaagcaatctttgcgggagactctgagctccaacagctcctccgtatattcaggttgttgggaacaccaaacgaagaagtttggcctggagtaagcaaactcaaggactggcatgaatacccgcaatggaaaccgttgagtctctccacagctgtgccaaacctcgacgaggctggacttgatctcttatctaaaatgctggagtacgagccagcaaaacgaatctcagcaaagaaagctatggagcatccttacttcgatgatttgcctgacaagtcctctctctga

SEQ ID NO: 62754 - protein, 315 aa, Arabidopsis thaliana
MDNNGVKPAVSAMEAFEKLEKVGEGTYGKVYRAREKATGMIVALKKTRLHEDEEGVPPTTLREISILRMLARDPHIVRLMDVKQGINKEGKTVLYLVFEYVDTDLKKFIRSFRQAGQNIPQNTVKCLMYQLCKGMAFCHGHGVLHRDLKPHNLLMDRKTMTLKIADLGLARAFTLPMKKYTHEILTLWYRAPEVLLGATHYSTGVDMWSVGCIFAELVTKQAIFAGDSELQQLLRIFRLLGTPNEEVWPGVSKLKDWHEYPQWKPLSLSTAVPNLDEAGLDLLSKMLEYEPAKRISAKKAMEHPYFDDLPDKSSL

SEQ ID NO: 62755 - DNA, 1047 bp, Arabidopsis thaliana
  CDS (1)..(1047)
atgtcgaaatccggcgataatcaaccagttgatagatacctccgccgtcaaatcctcggagaaggaacatacggtgtcgtttacaaagccaccgacacaaagactgggaaaactgtagcagtgaagaagataagattaggaaaccaaaaggaaggagtaaatttcacagctttaagagaaatcaagctactaaaagagctgaatcatccacatatcgttgaactcattgatgctttccctcacgatggaagtttgcatctagtttttgagtatatgcaaacagatttagaagcagtgattcgtgatcgtaatatctttttatctcctggtgatattaagtcttatatgttgatgactttgaagggtttagcttattgtcataagaaatgggttcttcacagggatatgaagccgaataatttgttgattggagagaatggtttgttgaagttggctgattttggtttggcgaggttgtttgggagtccgaatcggaggtttactcatcaggtatttgctacatggtacagagcgcctgagttactgtttgggagtcgacagtatggagcaggagttgatgtttgggctgcaggctgtatttttgctgagttactacttcgtagaccatttcttccgggttctactgagattgatcaacttggaaagatctttcaagcgtttggtactccagtaccttcccaatggtctgacatgatctatctcccagactacatggaattctcctatacacccgctccaccattacgtaccattttccctatggcaagtgatgacgctttggatcttctagcaaaaatgttcatctacgacccacgtcaaaggatcacaatacaacaagctttagaccacaggtatttctcgtcttctccatcaccaactgagccagggaagcttcagattccagcttccaaaggagacgcactcgaaccaaaggcctccgagcaaaaccaacatggaaatagcccagcggtactgtctcctcctggtaaaatgaggagagtgatgggtcctgaaggattcacttga

SEQ ID NO: 62756 - protein, 348 aa, Arabidopsis thaliana
MSKSGDNQPVDRYLRRQILGEGTYGVVYKATDTKTGKTVAVKKIRLGNQKEGVNFTALREIKLLKELNHPHIVELIDAFPHDGSLHLVFEYMQTDLEAVIRDRNIFLSPGDIKSYMLMTLKGLAYCHKKWVLHRDMKPNNLLIGENGLLKLADFGLARLFGSPNRRFTHQVFATWYRAPELLFGSRQYGAGVDVWAAGCIFAELLLRRPFLPGSTEIDQLGKIFQAFGTPVPSQWSDMIYLPDYMEFSYTPAPPLRTIFPMASDDALDLLAKMFIYDPRQRITIQQALDHRYFSSSPSPTEPGKLQIPASKGDALEPKASEQNQHGNSPAVLSPPGKMRRVMGPEGFT

SEQ ID NO: 62757 - DNA, 942 bp, Arabidopsis thaliana
  CDS (1)..(942)
atggacgagggagttatagcagtttccgccatggatgctttcgagaagcttgagaaagttggtgaagggacatacgggaaagtttacagagccagagagaaagctaccgggaaaatcgtcgctctaaagaagacgcgtctccatgaggacgaagaaggcgttccttccaccactctccgcgagatctccattttgcgaatgctcgctcgtgatcctcacgtcgtcaggttaatggatgttaagcaaggactaagcaaagaaggcaaaactgtactgtacctggtttttgaatacatggacactgatgtcaagaaattcatcagaagtttccgtagcactggcaagaacattccaacccaaactatcaagagcttgatgtatcaactatgcaaaggtatggcattctgccatggtcacgggatattgcacagagatctcaagcctcacaatctcttgatggatcccaagacaatgaggctcaaaatagcagatcttggtttagccagagccttcactctgccaatgaagaagtatacccatgagatattaactctttggtatagagctccagaggttcttcttggtgccacccattactctacagctgtggatatgtggtctgttggctgcatatttgctgaacttgtgaccaaccaagcaatctttcagggagactctgagctccaacagctcctccatattttcaagttgtttgggacacccaatgaagaaatgtggccaggagtgagcacactcaagaactggcatgaatacccacagtggaaaccatcgactctatcctctgctgttccaaacctcgacgaggctggagttgatcttctatctaaaatgctgcagtacgagccagcgaaacgaatctcagcaaagatggctatggagcatccttactttgatgatctgccagaaaagtcctctctctaa

SEQ ID NO: 62758 - protein, 313 aa, Arabidopsis thaliana
MDEGVIAVSAMDAFEKLEKVGEGTYGKVYRAREKATGKIVALKKTRLHEDEEGVPSTTLREISILRMLARDPHVVRLMDVKQGLSKEGKTVLYLVFEYMDTDVKKFIRSFRSTGKNIPTQTIKSLMYQLCKGMAFCHGHGILHRDLKPHNLLMDPKTMRLKIADLGLARAFTLPMKKYTHEILTLWYRAPEVLLGATHYSTAVDMWSVGCIFAELVTNQAIFQGDSELQQLLHIFKLFGTPNEEMWPGVSTLKNWHEYPQWKPSTLSSAVPNLDEAGVDLLSKMLQYEPAKRISAKMAMEHPYFDDLPEKSSL

SEQ ID NO: 62759 - DNA, 1215 bp, Drosophila melanogaster
  CDS (1)..(1215)
atggcgcacatgtcccacatgctccagcagccttcggggtcgacgccctccaacgtgggctccagctcatcgcgcacgatgtccctgatggagaaacaaaagtacatcgaggactacgactttccctactgcgacgagagcaacaaatacgaaaaggtggcgaaaattggccaaggcaccttcggagaggtttttaaggctcgcgagaaaaagggcaacaagaagtttgtggccatgaagaaggtgctgatggacaacgaaaaggagggctttcccatcacggctctgcgagagatccgcatcctgcagctgctaaagcacgagaacgtggtgaatctgatcgagatctgccgcaccaaggccaccgccacgaatggttacagatccaccttctatttggtctttgatttctgcgaacacgatttggcaggtcttctgtccaacatgaacgtcaagttcagtctgggcgagattaagaaggttatgcagcagcttttaaacggtttgtattacatccacagcaacaagatcctgcaccgagacatgaaagctgccaacgtgctgattaccaagcatggcatcttaaagctggctgactttggcttggcccgtgcttttagcattccaaagaacgagagtaagaatcgctataccaatcgcgtagtaaccttgtggtaccggccgcctgagctgctacttggtgaccgcaactatggtccacccgtggacatgtggggagccggctgcataatggccgagatgtggacacgctcgcccatcatgcaaggcaatacggagcagcagcagctaacctttatctcgcagctatgcggctcctttacgccggacgtgtggccgggagtggaggagctggagctgtacaaatccatcgagctgccaaagaaccagaagcgtcgagtcaaggagcgcctgcgtccgtatgtcaaggatcaaaccggctgtgatctattggacaaattgctgacccttgatcccaagaaacgcatcgatgcggacacagctctgaatcacgacttcttctggacggatcccatgcccagcgacttgagcaagatgctgtcccagcacctgcagagcatgttcgagtacctggcgcagccacgccgcagcaaccagatgcgcaactatcaccagcaactgaccaccatgaaccagaagccccaggacaacagtatgattgaccgggtttggtag

SEQ ID NO: 62760 - protein, 404 aa, Drosophila melanogaster
MAHMSHMLQQPSGSTPSNVGSSSSRTMSLMEKQKYIEDYDFPYCDESNKYEKVAKIGQGTFGEVFKAREKKGNKKFVAMKKVLMDNEKEGFPITALREIRILQLLKHENVVNLIEICRTKATATNGYRSTFYLVFDFCEHDLAGLLSNMNVKFSLGEIKKVMQQLLNGLYYIHSNKILHRDMKAANVLITKHGILKLADFGLARAFSIPKNESKNRYTNRVVTLWYRPPELLLGDRNYGPPVDMWGAGCIMAEMWTRSPIMQGNTEQQQLTFISQLCGSFTPDVWPGVEELELYKSIELPKNQKRRVKERLRPYVKDQTGCDLLDKLLTLDPKKRIDADTALNHDFFWTDPMPSDLSKMLSQHLQSMFEYLAQPRRSNQMRNYHQQLTTMNQKPQDNSMIDRVW

SEQ ID NO: 62761 - DNA, 1062 bp, Drosophila melanogaster
  CDS (1)..(1062)
atgctgcccaatgcgaatgacaaaacggaacgctatgccaagctatccttcctcggcgagggtcagtttgccacagtttacaaggcgcgcgacacggtgaccaaccaaattgtggccgtaaagaagatcaagaagggatcgcgcgaggatgcacgcgacggtatcaacaggacagcgctgcgtgagatcaagatattgcaggagctgcagcacgagaatatcattggcttggtggacgttttcggtcaactttcgaatgtctcgctggttttcgacttcatggacacggatctggaggtgatcatcaaggataacaagattatattaacgcaggcgaacatcaaggcctatgccatcatgacgctaaagggtctggagtatttgcatctcaattggatactgcaccgcgatttgaagcccaacaatttgctggtcaacagcgatggcatcctaaagattggcgatttcggtttggccaagtccttcggttcgcccaatcgcatttacacgcaccacgtggtcacacgctggtatcgttcgcccgaattgctctttggcgcccgacaatatggcaccggtgtggatatgtgggcagttggctgcattttggctgaacttatgctgcgagtgccgttcatgccgggcgattcggatctggatcagctgacacggatcttttccacactgggaacacccacggaagctgaatggccgcatttgagcaaactgcacgactatctgcagtttcgcaactttccgggcacaccattggacaatatattcaccgccgcgggcaatgacttgatccatctgatgcaacgcctgtttgccatgaatccgctgcggcgtgtgtcctgccgcgaggcactgagcatgccgtatttcgctaacaaaccggcgcccacagtgggtcccaagttgccaatgccgtcggccattctggccgccaaggagggcgccaatccgcagaccggcgacacgaagcctgcgctcaagcgcaagctggtcgagactacggtgaggggcaatggattggcccagaagaagcggctgcagttctag

SEQ ID NO: 62762 - protein, 353 aa, Drosophila melanogaster
MLPNANDKTERYAKLSFLGEGQFATVYKARDTVTNQIVAVKKIKKGSREDARDGINRTALREIKILQELQHENIIGLVDVFGQLSNVSLVFDFMDTDLEVIIKDNKIILTQANIKAYAIMTLKGLEYLHLNWILHRDLKPNNLLVNSDGILKIGDFGLAKSFGSPNRIYTHHVVTRWYRSPELLFGARQYGTGVDMWAVGCILAELMLRVPFMPGDSDLDQLTRIFSTLGTPTEAEWPHLSKLHDYLQFRNFPGTPLDNIFTAAGNDLIHLMQRLFAMNPLRRVSCREALSMPYFANKPAPTVGPKLPMPSAILAAKEGANPQTGDTKPALKRKLVETTVRGNGLAQKKRLQF

SEQ ID NO: 62763 - DNA, 891 bp, Encephalitozoon cuniculi GB-M1
  CDS (1)..(891)
atgacagaatcttttcagaaactagagaaaattggcgagggaacctacggtgttgtatataaagcaagggagaggaatacaaacagggtggttgcattgaagaaaataaggctcgagaatgaaaatgaagggattcctgccaccacaataagagagatattgctcttgaagaacctaaagcattcgaccattgtcgagttaagtgatgtaatctacaacaacaacaagatgtatcttgtatttgaatatgtggagctcgacctgagaagatacctcgacagaatgagcgatgaaggccggcttgttgaagaaggatttgtcagaaaaatgtcccagcaactgctgactgcaatggaatattgccactcaagaaacattttccatagagatctgaagcctcaaaacatcctggtggatccaaaagagaacatcaaattagcagatttcgggcttggaagggcagctggaattcctttgaggacttatacaacagaggtggtaacactttggtacaggccaccagagctactgcttggatgcaaatattatgatgcatctgtggacgtgtggagtgcagcctgtatcatggcagaagttgttcttatgagacctttcttcccgggagactctgaaatagaccagctgttcaggatattcaaggttcttgggactccaaataattcaaggtggtcaaacgtagaaaactttccaaactacaaggtggagttcccagtatgggatccggtggatttgaaaacaatcttcaggggagatccagactttgttgaccttatttcgaagatgcttgaatatgacccaaagatgcggatgacagccaagaatgggctatctcacaaatatttcgaaggtatgccgctaataatggaataa

SEQ ID NO: 62764 - protein, 296 aa, Encephalitozoon cuniculi GB-M1
MTESFQKLEKIGEGTYGVVYKARERNTNRVVALKKIRLENENEGIPATTIREILLLKNLKHSTIVELSDVIYNNNKMYLVFEYVELDLRRYLDRMSDEGRLVEEGFVRKMSQQLLTAMEYCHSRNIFHRDLKPQNILVDPKENIKLADFGLGRAAGIPLRTYTTEVVTLWYRPPELLLGCKYYDASVDVWSAACIMAEVVLMRPFFPGDSEIDQLFRIFKVLGTPNNSRWSNVENFPNYKVEFPVWDPVDLKTIFRGDPDFVDLISKMLEYDPKMRMTAKNGLSHKYFEGMPLIME

SEQ ID NO: 62765 - DNA, 909 bp, Drosophila melanogaster
  CDS (1)..(909)
atggaggactatgcgcccagccgctataaaatgcttgagaaaatcggcgaaggcgtccatggctgcgtgtttaaggccatcgatctgcagcgcaacaaggaggtggccatcaagaaggtggcccttaagaacaagttcggaaacatagccctaaatactttgagggaaatcaagaccctgcagctttgcaagtctgaatatattctggacatcattgatatatatcctgacctaactggtctctccttggtgctggaataccagccggacactctgtacaaccgcctcaagagcgaggttaatcccctgagccgccagcaggtgcgtaagtttgcacaccaaatgttcaaggggattgcatatctgcatgaagcgggtctcatgcaccgggatattaaacccgccaatctgcttatcagcgatacagatatgcttaagattgccgatttcggactggcccgtctgtacttccctgaagacgagtcgcgcctttattcgcctcaggtctcaacccggtggtatcgagcgccagagattctatttggcagccagaagtatggaaccggagtggatatgtgggcggcaggttgtgttgtggcggagatgctacgcggagtgcccctgtttgcgggaaccaccgacatcgagcaattagccatcatcattcgcactctgggcagcccacgtctgaatcagtggccagagctgacttctctgccggattacagcaagatacggtttcccaactccgtgggcattcactgggacaacttgtttcccagctgcacacatgcggtggaaatcaatctggtctcgaatctggtggtctacaatcccaaaaaccgactcaaggccagcgaggtgggttctgcttcaagtttgacaccggttaggtattataattggtaa

SEQ ID NO: 62766 - protein, 302 aa, Drosophila melanogaster
MEDYAPSRYKMLEKIGEGVHGCVFKAIDLQRNKEVAIKKVALKNKFGNIALNTLREIKTLQLCKSEYILDIIDIYPDLTGLSLVLEYQPDTLYNRLKSEVNPLSRQQVRKFAHQMFKGIAYLHEAGLMHRDIKPANLLISDTDMLKIADFGLARLYFPEDESRLYSPQVSTRWYRAPEILFGSQKYGTGVDMWAAGCVVAEMLRGVPLFAGTTDIEQLAIIIRTLGSPRLNQWPELTSLPDYSKIRFPNSVGIHWDNLFPSCTHAVEINLVSNLVVYNPKNRLKASEVGSASSLTPVRYYNW

SEQ ID NO: 62767 - DNA, 954 bp, Drosophila melanogaster
  CDS (1)..(954)
atgtcatatgtacgccagctgaagcggcagaaaatgtcccaggcgaagaagttcggcgatggcgatccgttcaactaccaggagctcaacatcatcggcgaaggtgcctatggaacggtttacagagcccgcgatgtgatcaccggcaacatagtggcgctgaagaaggttaggatatcgctgaacgagaacggtgtgccaatgtccacgctgcgggagatttcgctgctgaagcagctgaatgccagcaatcatgcgaatattgtcaaactgtacgaagtatgccagtttctggagcgcgacggccaattgctgattctgttggttttcgaacatgtggagcaggatctttcggatcttatagacagacttcccaaatcgggcatgtcgccgcccacaattcagcgcttgtcaagggaactactgaccggtgtggacttcttacactcacaccgtatcatccatcgggatcttaagccgcaaaacctgctggtctcctcgcagggccacctcaagatcgccgactttggcttggccaagacctacggttcggagatgaagctcacctccgtggtggtcaccttgtggtaccgcgcacccgaggttctgctcgcccagccctacaacagcaccgtggacatctggagtgccgcctgcatcatcttcgagatgttcaatcggcgcgccctattcccgggcacctccgaaaagaatcagctggaccgcatcttcgaactgaccggtagacccaccgagcaacagtggccacagaccatttccgtggccctggaacactttccccagcggcatccaaagagaccaaaagacttttgcccacacctgtgcaagtacgccgatgatctgttgaataaaatgctttcctacgacctccacctgcgaccatccgccttggcctgtttggagcacgattactttcagcaggaacccctatag

SEQ ID NO: 62768 - protein, 317 aa, Drosophila melanogaster
MSYVRQLKRQKMSQAKKFGDGDPFNYQELNIIGEGAYGTVYRARDVITGNIVALKKVRISLNENGVPMSTLREISLLKQLNASNHANIVKLYEVCQFLERDGQLLILLVFEHVEQDLSDLIDRLPKSGMSPPTIQRLSRELLTGVDFLHSHRIIHRDLKPQNLLVSSQGHLKIADFGLAKTYGSEMKLTSVVVTLWYRAPEVLLAQPYNSTVDIWSAACIIFEMFNRRALFPGTSEKNQLDRIFELTGRPTEQQWPQTISVALEHFPQRHPKRPKDFCPHLCKYADDLLNKMLSYDLHLRPSALACLEHDYFQQEPL

SEQ ID NO: 62769 - DNA, 1122 bp, Strongylocentrotus purpuratus
  CDS (1)..(1122)
atggcatcctctgtgccttcccggtcgacgcccgagcgttacgttcaggccgcggagattggaagtggagcttatggcattgtgtacaaggccagggacacggaaacgggccactttgtggccttgaagagcgtaaggataccgattggtgaggagggcatgccggtatccaccattagagagatatccttgctcagacatctctgccagctagaccatcctaatattgtcaaacttcttgatgtttgtgatgtgatggatgttggtagatcagagatgatgttgactctggtctttgagcttgtggaccaggacctggcccagtacctcgagaagtgtcctcctccaggattaagttcttgtacaatcaagtttttgatgcatcagcttctaagtggtgtagaataccttcactctcatcgtgtcactcacagagatctgaaaccacagaacattcttgtcgctagtgataagaaattgaagctaacagactttggtttgtctcgtgtctacagtttccagatggctctaactccagtggtggtgaccatgtggtacagggcacccgaagtcctcctccaggctagctatgccacaccggtcgacatgtggagtgttggatgcatatttgcagagctttataggagaaggcctctattcaggggacagtcggataaggaccaacttcataaaatatttgaggttattgggcttccacccgaggaccagtggccagatgttgctcttccgtggagttccttccgtcagactggacagagatccttcctagacctggtccaggagatatgcaatcaaggactggatctactagagcgaatgctgtgtttcaatccagaccatcggatgacggcggagcaaggcctgttacatggcttctttggtgatgaggaggaggatgatgaggaggacgatgataccgaagtggaggatgatgacgatgaagaagatgaagacgatgagggagtggatgtcggtcaggagcgtagtcaatccgcatcaacttcaagcatgagccaagctacagatgattctggttcacattcacagttttttagcgattcctcacagtctcaagatgtcacaccaaccaataaacgatga

SEQ ID NO: 62770 - protein, 373 aa, Strongylocentrotus purpuratus
MASSVPSRSTPERYVQAAEIGSGAYGIVYKARDTETGHFVALKSVRIPIGEEGMPVSTIREISLLRHLCQLDHPNIVKLLDVCDVMDVGRSEMMLTLVFELVDQDLAQYLEKCPPPGLSSCTIKFLMHQLLSGVEYLHSHRVTHRDLKPQNILVASDKKLKLTDFGLSRVYSFQMALTPVVVTMWYRAPEVLLQASYATPVDMWSVGCIFAELYRRRPLFRGQSDKDQLHKIFEVIGLPPEDQWPDVALPWSSFRQTGQRSFLDLVQEICNQGLDLLERMLCFNPDHRMTAEQGLLHGFFGDEEEDDEEDDDTEVEDDDDEEDEDDEGVDVGQERSQSASTSSMSQATDDSGSHSQFFSDSSQSQDVTPTNKR

SEQ ID NO: 62771 - DNA, 804 bp, Strongylocentrotus purpuratus
  CDS (1)..(804)
atggaagactttatgaagattgaaaagttgggagaaggtacgtacggtgttgtgtacaagggcaagcacaaaaggactggaaagatcgttgctctgaagaagattcggctggagagcgaagaggagggagtaccaagcacagccatcagagaaatctcactactaaaagagctctatcatccaaatattgttatgttggaagacgttctgatggaaccgaataggctgtacttggtctttgaatacctgacgatggacctcaagaagtacatggaatcactcaaaggaaaacagatggatccagcactagtcaagagctaccttcatcagatggtcgacggtatccttttctgccacagtcgtcgtatcctgcacagagatctcaaaccccagaaccttctcatagacaacaatggtaccatcaaactggcagactttgggcttgctagagcgttcggtatcccagtcagagtttatactcatgaagtaagtcagagacccctcttccacggcgactcagagattgatcaactctttaggatattcaggacccttggcacaccgacggatgacatatggcccggtgtgacacagctccaggactacaagtcaaccttcccgatgtggacaaagcccaacatcaagggagcggtcaaaggcatggacgagggaggactagatctgctagagcaaatgcttatatacgaccctgccaaacgtattacagctaaagccagcatgaggcatccctacttcgacaatattctacccctctctgaccgtctccagcccatcaggagctag

SEQ ID NO: 62772 - protein, 267 aa, Strongylocentrotus purpuratus
MEDFMKIEKLGEGTYGVVYKGKHKRTGKIVALKKIRLESEEEGVPSTAIREISLLKELYHPNIVMLEDVLMEPNRLYLVFEYLTMDLKKYMESLKGKQMDPALVKSYLHQMVDGILFCHSRRILHRDLKPQNLLIDNNGTIKLADFGLARAFGIPVRVYTHEVSQRPLFHGDSEIDQLFRIFRTLGTPTDDIWPGVTQLQDYKSTFPMWTKPNIKGAVKGMDEGGLDLLEQMLIYDPAKRITAKASMRHPYFDNILPLSDRLQPIRS

SEQ ID NO: 62773 - DNA, 906 bp, Strongylocentrotus purpuratus
  CDS (1)..(906)
atggaagactttatgaagattgaaaagttgggagaaggtacgtacggtgttgtgtacaagggcaagcacaaaaggactggaaagatcgttgctctgaagaagattcggctggagagcgaagaggagggagtaccaagcacagccatcagagaaatctcactactaaaagagctctatcatccaaatattgttatgttggaagacgttctgatggaaccgaataggctgtacttggtctttgaatacctgacgatggacctcaagaagtacatggaatcactcaaaggaaaacagatggatccagcactagtcaagagctaccttcatcagatggtcgacggtatccttttctgccacagtcgtcgtatcctgcacagagatctcaaaccccagaaccttctcatagacaacaatggtaccatcaaactggcagactttgggcttgctagagcgttcggtatcccagtcagagtttatactcatgaagtcgtcactctatggtatcgtgcccctgaggttctcctgggttccacgaggtacgcctgccctatcgacatgtggagtttgggctgcatctttgccgagatggtcaccaagagacccctcttccacggcgactcagagattgatcaactctttaggatattcaggacccttggcacaccgacggatgacatatggcccggtgtgacacagctccaggactacaagtcaaccttcccgatgtggacaaagcccaacatcaagggagcggtcaaaggcatggacgagggaggactagatctgctagagcaaatgcttatatacgaccctgccaaacgtattacagctaaagccagcatgaggcatccctacttcgacaatattctacccctctctgaccgtctccagcccatcaggagctag

SEQ ID NO: 62774 - protein, 301 aa, Strongylocentrotus purpuratus
MEDFMKIEKLGEGTYGVVYKGKHKRTGKIVALKKIRLESEEEGVPSTAIREISLLKELYHPNIVMLEDVLMEPNRLYLVFEYLTMDLKKYMESLKGKQMDPALVKSYLHQMVDGILFCHSRRILHRDLKPQNLLIDNNGTIKLADFGLARAFGIPVRVYTHEVVTLWYRAPEVLLGSTRYACPIDMWSLGCIFAEMVTKRPLFHGDSEIDQLFRIFRTLGTPTDDIWPGVTQLQDYKSTFPMWTKPNIKGAVKGMDEGGLDLLEQMLIYDPAKRITAKASMRHPYFDNILPLSDRLQPIRS

SEQ ID NO: 62775 - DNA, 900 bp, Strongylocentrotus purpuratus
  CDS (1)..(900)
atgaataattttgaaaagattgaaaagattggagaaggcacttatggagtggtttacaaggcaagagacttgaagtctggtaaaactgttgcactgaagaaaatacgattggatacagaatctgaaggtgtcccaagtactgccatcagagaaatagcactgctgaaagagctggaccacaagaacatagtcaaattacatgatgtggtacacagtgacaagaagctctatcttgtctttgagttcatgaaccaggatctaaagaaatacatggatgttgctcctccatcaggcctgccaccaggtttagtcaagagttatctacatcaacttcttcagggtattgcattttgccatgcacatcgtgtccttcacagagacctcaaacctcagaatctactcattgatgcagatggccgcatcaaacttgctgactttggactagcaagagcgtttggtgttcctgtcagaacatatactcatgaggttgtcacattatggtacagagcaccagagatcttactaggctgcaggtattactccacagcagtggacatctggagtcttggctgtatttttgtggagatgataacgagaagagcgctgttccctggggactctgaaatcgaccagctcttcaggatcttccggaccatgggtactccagatgaaaagctgtggcctggggtcacctctctacccgactacaagacaagcttcccaagatggacacctcaagacttcaccaagatagtccccatgctcaataaagatggcaaagacttactcaagtccatgctgtgctatgaaccagacaagaggatatcagcgaagaccggcctctcacatccatacttcaaggatgttaaaatggtgcctcctcctcgtcttccaacatga

SEQ ID NO: 62776 - protein, 299 aa, Strongylocentrotus purpuratus
MNNFEKIEKIGEGTYGVVYKARDLKSGKTVALKKIRLDTESEGVPSTAIREIALLKELDHKNIVKLHDVVHSDKKLYLVFEFMNQDLKKYMDVAPPSGLPPGLVKSYLHQLLQGIAFCHAHRVLHRDLKPQNLLIDADGRIKLADFGLARAFGVPVRTYTHEVVTLWYRAPEILLGCRYYSTAVDIWSLGCIFVEMITRRALFPGDSEIDQLFRIFRTMGTPDEKLWPGVTSLPDYKTSFPRWTPQDFTKIVPMLNKDGKDLLKSMLCYEPDKRISAKTGLSHPYFKDVKMVPPPRLPT

SEQ ID NO: 62777 - DNA, 1017 bp, Strongylocentrotus purpuratus
  CDS (1)..(1017)
atgaatcagtattcaatacttgatcggattggagaaggtgcacatggcattgttttcaaggcaaagcatattgagactggtgaaatagttgcattgaagaaggttccactgaggaaattagatgatggaattccaaacacagctctaagggaaataaaagctttgcaagaaattgaggagaaccaatatgttgtgaagttgaaggatgtctttccccatggcactggctttgtactagtatttgagttcatgctgtcggatctctctgaagtgattaggaattcagatcaacccctcacagaagcccaggtcaagagctacatgttaatgcttcttaaaggcataacacactgccatgagaactccattatgcacagagatctgaagccagccaatcttttaatcagtgagaccgggcacttgaagatagctgactttggtctggcaagggtcttcagcaatgacgagggaaggcagtacagccaccaagtagctacaagatggtaccgtgctccggagcttctgtatggagccagaaaatatgatgaaggagcagacctgtgggccgttggttgcatttttggagagcttttgaacaactcgcctatcttccctggagaaaatgatattgagcagctttgctgtgtgcttagaatcttgggaacgcccacagagaaaacctggccgggtatgaaagacctaccagactacaacaagatcacatttccagaaaatccacccatacccctggaacaaattgttcctgatgcatctccagaggctttagatttgctgaagaaattcttggtgtatccttcgaggcaaaggatatccgcgtccgaggccttgctccatccgtatttcttcacggagcccctcccggctcatcactccgagctcccaatcccacagcgcagcaggcgaggtcgaaggtcacagcatgccaaggagtatgacattgacgtaccactggaacagaccctgattgacccccaagaaattgctccatttgtctga

SEQ ID NO: 62778 - protein, 338 aa, Strongylocentrotus purpuratus
MNQYSILDRIGEGAHGIVFKAKHIETGEIVALKKVPLRKLDDGIPNTALREIKALQEIEENQYVVKLKDVFPHGTGFVLVFEFMLSDLSEVIRNSDQPLTEAQVKSYMLMLLKGITHCHENSIMHRDLKPANLLISETGHLKIADFGLARVFSNDEGRQYSHQVATRWYRAPELLYGARKYDEGADLWAVGCIFGELLNNSPIFPGENDIEQLCCVLRILGTPTEKTWPGMKDLPDYNKITFPENPPIPLEQIVPDASPEALDLLKKFLVYPSRQRISASEALLHPYFFTEPLPAHHSELPIPQRSRRGRRSQHAKEYDIDVPLEQTLIDPQEIAPFV

SEQ ID NO: 62779 - DNA, 897 bp, Nasonia vitripennis
  CDS (1)..(897)
atggataacttcatcaggatcgagaaaatcggagaaggtacgtatggagttgtatataagggaaaacacaagaagactggcgaaatcgttgctatgaagaagattcgactggaaagtgaggatgagggagtgccatcaacagccattagggagatatcccttttgaaggagctcaagcatccgaacattgtgagcctaatggatgttctgatggaggaatcgaagctctacctcattttcgagtatctcacgatggatctcaaaaaatacatggacagcttagggaatggcaaacttatggacccagatttggtcagatcgtacttgtatcagattacacgagcaattctgttttgtcatcaacgtagagttctccatcgcgatttgaaaccccaaaatctgttgattgacaaaaaaggagtaatcaaagtagcagattttggtctaggaagagcgttcggtattccagtacgagtctatacacatgaagttgtcactctgtggtacagagctcctgaaattcttctgggcgccaatagatacacttgcagcattgacatgtggagtgtgggctgcatttttgctgaaatggcaacaaagaagccactgtttcaaggagacagtgaaatcgatcagttgtttagaatatttcgtgtgttgaaaacacctactgaagagatttggccaggcgtcacacaactagcagactacaaagcaacttttcctaactggaaaacaaataatttacaggcacaagtgaagactttggatgaaaatggagtggacctgctggaagctatgttgatctacgatccttcagcaagaataacagccagagatgcattgcagcacaaatactttgataacttggacaagaggaaattgccagctgtataa

SEQ ID NO: 62780 - protein, 298 aa, Nasonia vitripennis
MDNFIRIEKIGEGTYGVVYKGKHKKTGEIVAMKKIRLESEDEGVPSTAIREISLLKELKHPNIVSLMDVLMEESKLYLIFEYLTMDLKKYMDSLGNGKLMDPDLVRSYLYQITRAILFCHQRRVLHRDLKPQNLLIDKKGVIKVADFGLGRAFGIPVRVYTHEVVTLWYRAPEILLGANRYTCSIDMWSVGCIFAEMATKKPLFQGDSEIDQLFRIFRVLKTPTEEIWPGVTQLADYKATFPNWKTNNLQAQVKTLDENGVDLLEAMLIYDPSARITARDALQHKYFDNLDKRKLPAV

SEQ ID NO: 62781 - DNA, 1152 bp, Nasonia vitripennis
  CDS (1)..(1152)
atgggatcagtcacgaataccaagatgtctaaggagaaaaaacgcaaaattttcaaaccatacgattttgaaaattgtaattcgattggaaaataccaaaaaatcgcaaaagtaggccaaggaacatatggagaggtgttcaaggcccaagaaaaatctgatcgaagcatcattgtggccttgaaaaaaattctgatggacaacgaagttgaaggaatgccagtgacggcgttccgtgaagttacgattttaaaatatttaaagcatgaaaatatcgttcgcctcatcgaggtggttagatcacctcccatgccaggcaataataataagagcattcatcgatgcttttatttagcattggagtattgcgagcacgatttagctggcttgctaagcgccaagcatgtacgatttcaagttggagacataaagaaagtgctctaccaactgcttgacggggtacattatttgcatgtaaacaagcttatgcatcgggacctaaaaccggcgaacatacttatcaataaaaaaggagttctgaagatcaccgattttggtctagctcggccttacagggtaaaggataacggtgagccaaatacatacaccaatcgagtggtcacattatggtaccggccgccggaacttctactcggtgagaggaattacggaccagaaatagatatgtggagcattggttgcatattggcagaaatgtggacaagaacaccgattctcccaggcaaatcagaacaggcgcagcttaacttcatcagttacctctgcggagcaatcactcctgtggtctggcctggagtcagtaatctgccactttatgacagcatagaattgtcaaaaattcacagaagaagggttgtcgaacgtttacaaccctacataaaggatcgctacgcctgcgacatgctagacaagttgttggttctagatccaaaaaaacgcatcgacgccaatgaagctctggaccacgacttcttctggagaggtgaagagctctccgatttgaagttgctgatgtccaagtttaaccagagcttgtttcagtggacggcactgcagcgtcatcagatacttcaaaaggcccagctgactgcagtgcctaaaaaggattgctacgaagaacgaatttattga

SEQ ID NO: 62782 - protein, 383 aa, Nasonia vitripennis
MGSVTNTKMSKEKKRKIFKPYDFENCNSIGKYQKIAKVGQGTYGEVFKAQEKSDRSIIVALKKILMDNEVEGMPVTAFREVTILKYLKHENIVRLIEVVRSPPMPGNNNKSIHRCFYLALEYCEHDLAGLLSAKHVRFQVGDIKKVLYQLLDGVHYLHVNKLMHRDLKPANILINKKGVLKITDFGLARPYRVKDNGEPNTYTNRVVTLWYRPPELLLGERNYGPEIDMWSIGCILAEMWTRTPILPGKSEQAQLNFISYLCGAITPVVWPGVSNLPLYDSIELSKIHRRRVVERLQPYIKDRYACDMLDKLLVLDPKKRIDANEALDHDFFWRGEELSDLKLLMSKFNQSLFQWTALQRHQILQKAQLTAVPKKDCYEERIY

SEQ ID NO: 62783 - DNA, 1206 bp, Nasonia vitripennis
  CDS (1)..(1206)
atggtggtgaacaatgtcagaagcaagatgaatatgagagagaagcaaaaatacgtcgagggatacgattttaaattttgcgatttgattgccaaatatgaaaaagttgccaaaatcggacaggggacatttggagaggtgttcaaagcccgagatcgggagaatccgaacaaatttgtcgctatgaagaggattttcatggacaatgaaattgaagggtttccaatcacagcgttgagagaaattaggatcttgcagctccttaagcacgacaacatcgtccatcttattgaaatatgcagaaccaaagccacagtgcacaatcgatggcgatctacgttttacttgatttttgagttttgcgagcacgatctcgcgggtctgttatccaacgtcaacgtcaaatttagcctgggtgagataaagaaagtcatgcatcaacttcttgatggtctgtactacattcacacaaacaagattctgcatcgagatttaaaggcggctaacgtactgattacgaagaaaggcgtcttgaagctcgccgatttcggcttggcgcgagcgttcagcataaaagccaatggacagcccaaccgttacacaaaccgagtagtgacgctctggtatcgtccacccgagctactgttgggtgatagaaattacggaccaccgattgatttatggggagcaggttgtattatggcagagatgtggacaaggtcgccaatcatgcagggaagcacagaacaaatgcaattgacccttatatcgcaactttgcggatccatcactcccgaggtctggcccggcgttgagaacctcgaacttttcaacaaaatggaacttgttaaacatcagaagagaaaagttatcgaccggctgaagccttacataaaggatgcgtacgcttgcgacctccttgacagactgttgacactggatccgagcaagcgcatcgattcagattctgcattgaaccatgactttttctggactgatccgatgccttgcgaccttacgaagatgctggcccagcacggccaaagcatgttcgagtttctgactccgcatcgacgcgccggccacatgcgcttccagcagcaaccggcagcaggcaacgccgcccccggacaagccgtgcatcagccaccacgtccaagtcaaagtaaacttgccgactcggagttccacgaacggacttattag

SEQ ID NO: 62784 - protein, 401 aa, Nasonia vitripennis
MVVNNVRSKMNMREKQKYVEGYDFKFCDLIAKYEKVAKIGQGTFGEVFKARDRENPNKFVAMKRIFMDNEIEGFPITALREIRILQLLKHDNIVHLIEICRTKATVHNRWRSTFYLIFEFCEHDLAGLLSNVNVKFSLGEIKKVMHQLLDGLYYIHTNKILHRDLKAANVLITKKGVLKLADFGLARAFSIKANGQPNRYTNRVVTLWYRPPELLLGDRNYGPPIDLWGAGCIMAEMWTRSPIMQGSTEQMQLTLISQLCGSITPEVWPGVENLELFNKMELVKHQKRKVIDRLKPYIKDAYACDLLDRLLTLDPSKRIDSDSALNHDFFWTDPMPCDLTKMLAQHGQSMFEFLTPHRRAGHMRFQQQPAAGNAAPGQAVHQPPRPSQSKLADSEFHERTY

SEQ ID NO: 62785 - DNA, 1146 bp, Nasonia vitripennis
  CDS (1)..(1146)
atgaacattaaagaaaaggaaaagtacattgaagaattcgattttccctactgcgacgagtccagcaagtatgagaaagtcgccaagatcggacagggcaccttcggcgaggtcttcaaggcgagggacagaaccaactccaagcgttacgtagccatgaagaaggttctcatggacaacgagaaggagggctttcccataacggcactgcgagaaatcaggatactgcaactcctcaagaacgagaacatcgtcaatctcattgagatttgcaggaccaaagccaatcaaaacaataagtatcgttctactttctaccttatcttcgatttttgtgagcacgatctcgctggcctcttgtccaacgttaatgttaagtttagtttaggcgaaatcaagaaagtcatgcaacagttgttgaacggactgtactacatacacagcaacaagattctgcacagggatatgaaagcggcaaatgtcttgattaccaagaatggtattctgaagctggcagattttggcctcgcaagagcattcagtgccaacaaaaaggatcagcccaatcgatacacaaaccgggtggtcacattgtggtacagaccaccggagctgttactgggggacagaaattacggcccacccgtcgatctctggggtgcaggatgtataatggccgaaatgtggaccaggtcaccgatcatgcagggcaacacagagcagcaacaactgactctaatttcacaactttgtggctccataacaccggatgtttggcctggtgtagatgcactagagttgttcaataaaatggaactcattcaaggtcaaaaacgtaaggtaaaggatagattaaggccgtacgttaaggacccatatgcctgtgatttgcttgacaagcttttaattctcgaccccagccgaaggtttgactcagattcggctttgaaccacgattttttctggacagaccccatgccttgtgatctcagcaaaatgttagcacagcacacccagagtatgttcgaatatctcgctccacctagaaggccggggcatatgcgacacccacaccaagtccccggtggacaagcaaaacccagctctagtgtggcagacacaagctaccaggatcgagtattttag

SEQ ID NO: 62786 - protein, 381 aa, Nasonia vitripennis
MNIKEKEKYIEEFDFPYCDESSKYEKVAKIGQGTFGEVFKARDRTNSKRYVAMKKVLMDNEKEGFPITALREIRILQLLKNENIVNLIEICRTKANQNNKYRSTFYLIFDFCEHDLAGLLSNVNVKFSLGEIKKVMQQLLNGLYYIHSNKILHRDMKAANVLITKNGILKLADFGLARAFSANKKDQPNRYTNRVVTLWYRPPELLLGDRNYGPPVDLWGAGCIMAEMWTRSPIMQGNTEQQQLTLISQLCGSITPDVWPGVDALELFNKMELIQGQKRKVKDRLRPYVKDPYACDLLDKLLILDPSRRFDSDSALNHDFFWTDPMPCDLSKMLAQHTQSMFEYLAPPRRPGHMRHPHQVPGGQAKPSSSVADTSYQDRVF

SEQ ID NO: 62787 - DNA, 1008 bp, Nasonia vitripennis
  CDS (1)..(1008)
atgccgtcagactgtttagcatcagtgaaggcgtccttttttgctttctcagtagaatatctcactagttactcagcttgtgcagaatcagtgaaagaacaggaggtcgggacaagggcgaaaaaatataaaaagattggcgagggtacctatggagtcgtttacaaggccaaggacaaaatcacggggaagctggtggccctcaaaaagattcgcctcgaaacggaaagtgaaggtgtaccgtcaactgcaattagagaaatatcactgttaaaagaattgacccatgaaaacgtgattcagctgcttgatgttgtacaaggagataagtatctttatttggtttttgaatttttacaacaagatctcaaaaaattgctagattccttaaaaactggactaagcccacaattggtcaagagctatttatggcaattgttgaaagcaatagctttttgccatgttaatcgtatcttgcatagggatttaaagcctcaaaatcttctagtagaccaagaaggttatttgaaattagcagattttggattggcccgatcttttggtgtaccagtaagaacatttactcatgaagttgtaaccttatggtatagagcacctgaaattcttcttggcactaaattgtactctacagctgttgacgtatggagcctaggctgtatttttgctgaaatggcaactaaaagagcactgtttccaggtgattcagagatagatcaactgttcaggatttttcgaactttaggtacaccagatgaaactgtttggcctggtgtttcacaacttcaagactacaaatctatgtttcctcagtgggaggctacagatttagatgaggttgttccaatgtttgatgataaggccaaagatttgcttatgaaactactcatatatgatcctaatatgaggataactgcgaaacaagcactaagccattcatattttgaaggagttaaattggttcctccaccaatgccaaaaaaagactga

SEQ ID NO: 62788 - protein, 335 aa, Nasonia vitripennis
MPSDCLASVKASFFAFSVEYLTSYSACAESVKEQEVGTRAKKYKKIGEGTYGVVYKAKDKITGKLVALKKIRLETESEGVPSTAIREISLLKELTHENVIQLLDVVQGDKYLYLVFEFLQQDLKKLLDSLKTGLSPQLVKSYLWQLLKAIAFCHVNRILHRDLKPQNLLVDQEGYLKLADFGLARSFGVPVRTFTHEVVTLWYRAPEILLGTKLYSTAVDVWSLGCIFAEMATKRALFPGDSEIDQLFRIFRTLGTPDETVWPGVSQLQDYKSMFPQWEATDLDEVVPMFDDKAKDLLMKLLIYDPNMRITAKQALSHSYFEGVKLVPPPMPKKD

SEQ ID NO: 62789 - DNA, 999 bp, Nasonia vitripennis
  CDS (1)..(999)
atgttggagtggtggataaataaagacactggcgattccccattcggaaaatcggaagcatacgttaaattggaacagttaggtgagggatcttatgcaacagtatttaaaggctttagtcatttaacgaatcaagtagttgcattgaaggaaataagactgcaagaagaggaaggtgctccatttactgccattcgtgaggcaagcttacttaaagagttgaaacacaacaatatagttacgcttcacgatatcattcatacaagagaaactctgaccttcgtttttgaatacgttcataccgatctttcacaatatatggaaaggtatggtacgggtggtggaggactagatccacgcaatgttaagctctttttatttcaacttttacgtggacttgcttattgccatcgcaggcgagtcttgcatcgagatgtgaaaccacaaaacttactcataagtgaaattggtgaattaaagctagctgattttggtttggctagagcgaaatcagttccatcacatacgtattcccatgaagtagtcactttatggtacaggcctccagatgttttactcggttcgacagaatattctacttcattagatatgtggggcgttggatgtatttttgtagaaatgctaacaggagtgccaactttcccaggtgtgcgttgcacttatgatcagctggataaaatttttaaaatccttggcacacctactgaagatacatggcctggagtctctcagttacctgcttataaacccaatagattagcattttaccctataagaaaacttggcctttcattcccgagattgtacgatattgccgaagttgataatatggcatcatctcttcttaaattaaatccagaagaaagaattggtgctgaggatgctttacatcatctttattttgcttcattacccaaaaaaatttatgaattgcccgatgagacgacctccgtttcacttaagcagattggaaaatag

SEQ ID NO: 62790 - protein, 332 aa, Nasonia vitripennis
MLEWWINKDTGDSPFGKSEAYVKLEQLGEGSYATVFKGFSHLTNQVVALKEIRLQEEEGAPFTAIREASLLKELKHNNIVTLHDIIHTRETLTFVFEYVHTDLSQYMERYGTGGGGLDPRNVKLFLFQLLRGLAYCHRRRVLHRDVKPQNLLISEIGELKLADFGLARAKSVPSHTYSHEVVTLWYRPPDVLLGSTEYSTSLDMWGVGCIFVEMLTGVPTFPGVRCTYDQLDKIFKILGTPTEDTWPGVSQLPAYKPNRLAFYPIRKLGLSFPRLYDIAEVDNMASSLLKLNPEERIGAEDALHHLYFASLPKKIYELPDETTSVSLKQIGK

SEQ ID NO: 62791 - DNA, 1128 bp, Nasonia vitripennis
  CDS (1)..(1128)
atgagaattttatttcgccattacaactgtagcgccgagctagcgtgcttgcctccagatgacaagatcccgggttcaaatccacctcaggattgcttgggacttctaaataaactcatcctggcgatctgcacactgaatgggggctctgcactgagagaaaaatcatggattcgttgctgccagtatcggctcggcaattgcacttccataaccgattacgaaataatcgaaaaagtgggccaaggaaccttcggaaaggtatttaaggcccgacataaaaaagatttaaatactcctgtagccttaaaaaggataccgctgaacagcgagttcgaagggattccagtgacagcatatcgtgaactgacgatactaaaatacacaaattatgaaaacattgtgcgtctggtcgaggtggtcaggtcacctcccatgtcgggaaaaaacacccctaaaagtttaaggccatgtttttacatggccctagagttttgtgagtataacttggctagcttgctgggcgcacgacacatccgatttcatattggtgaaattaaaaaacttatttattcgatgatcgatgggttatattatttacatatcaataagataatgcatcgagacttaaagccggccaatgttctaataagaaagacaggagttctgaagatcgctgacttcggattatccagagcctttaaagaaaacagcaacggtgagcaaaaccaatacacaaatagagtggtgactctatggtaccggccaccggagcttttactcggtgaaagaaactatggcccctctattgatatgtggggggctggttgtatactagccgaaatgtggacgaggacccctattctacagggtaattcggaacaaggacagctccatcaaatctgctacctttgtggctcaataacttctgaagcttgggttggtgttgacaatctgccactgttcaacaaccttcatttacccaagaatcacaggcgacggcttatggatcgcttaaaaccgtttgtaacggataggtatgcctgcgatttattagataagttactggttgtcgacccgaaagcgcgtattgatgcaaaccaggctctcgaccataatttcttttga

SEQ ID NO: 62792 - protein, 375 aa, Nasonia vitripennis
MRILFRHYNCSAELACLPPDDKIPGSNPPQDCLGLLNKLILAICTLNGGSALREKSWIRCCQYRLGNCTSITDYEIIEKVGQGTFGKVFKARHKKDLNTPVALKRIPLNSEFEGIPVTAYRELTILKYTNYENIVRLVEVVRSPPMSGKNTPKSLRPCFYMALEFCEYNLASLLGARHIRFHIGEIKKLIYSMIDGLYYLHINKIMHRDLKPANVLIRKTGVLKIADFGLSRAFKENSNGEQNQYTNRVVTLWYRPPELLLGERNYGPSIDMWGAGCILAEMWTRTPILQGNSEQGQLHQICYLCGSITSEAWVGVDNLPLFNNLHLPKNHRRRLMDRLKPFVTDRYACDLLDKLLVVDPKARIDANQALDHNFF

SEQ ID NO: 62793 - DNA, 1005 bp, Nasonia vitripennis
  CDS (1)..(1005)
atgaacaggtacacgatctccggtcgcataggcgaaggagctcacggattggtgctcaaggcatacgacaacgcgagtccggtaccaaagcccgtggccttgaagaggatcttgctgaagaggatagaggatggaatacccacgtccgtcgtccgcgaggtcaagactctgcagaggcttaagcatccatacatagtcgaactgctggacgcttttccagcgggcttggatttcgtcatggttttcgagtacatgccctcgggactgtgggagctattgaaggattacgacaaggctctgacggactcgcagatcaaaacttacacgaggatgcttctggaaggcgtcgcttacatgcacgcgaataacattatgcacagagatttgaaaccggctaatctgctgatacgagaagacggagttttgaccatagccgatttcggcctgggcagattgatgtgggaggacataagtcggccgtattcgcatcaagtagccaccagatggtacagggcaccagagctgctctacggagctagattttacacggcggctatcgacatgtgggcagtcggctgtatcttcggcgaaatgctgaacaactcgccgctttttccaggcgagagcgacatcgagcaattggcgatagttctgggacacctagggtcacccactgcagagtcctggccggaattgagctctttgcccgactacaataaaataacttttccttaccacaagggcgtcttgtgggagcgcatagtgcccgacgcacaacaggaggctgtagacctcttgcggaatattctgatatacgactcgtcgaaacgactgaccgcagaggaggcgcttcgacacgtgtacttcaataccaagccgtatccttgcacgaaagccgagctggtgaaaccgccgaccgatcatcggactcgtctcaagccgaaagaggtcgagaccaacgttaaagcatcgactttattcagaaacatgctcagcatcatatga

SEQ ID NO: 62794 - protein, 334 aa, Nasonia vitripennis
MNRYTISGRIGEGAHGLVLKAYDNASPVPKPVALKRILLKRIEDGIPTSVVREVKTLQRLKHPYIVELLDAFPAGLDFVMVFEYMPSGLWELLKDYDKALTDSQIKTYTRMLLEGVAYMHANNIMHRDLKPANLLIREDGVLTIADFGLGRLMWEDISRPYSHQVATRWYRAPELLYGARFYTAAIDMWAVGCIFGEMLNNSPLFPGESDIEQLAIVLGHLGSPTAESWPELSSLPDYNKITFPYHKGVLWERIVPDAQQEAVDLLRNILIYDSSKRLTAEEALRHVYFNTKPYPCTKAELVKPPTDHRTRLKPKEVETNVKASTLFRNMLSII

SEQ ID NO: 62795 - DNA, 1017 bp, Nasonia vitripennis
  CDS (1)..(1017)
atggtcgagaaactgagaagatacgagaaaatcgactttctcggagaaggacagttcgccacggtatacaaggccaaagacaccgtaacggacaaaattgtagctgtaaaaaagatcaaagtcggaagtcatgccgaggcaaaggatggaataaacagaacagccctcagagaaatcaagttgttgcaagagctgaaacatgaaaatatcattggcctgttggatgtttttggccacaagtcaaacgtttctttagtctttgattttatggacaccgatttggaagtcataatcaaagacacaaacatagtgttgacacctgcgaatatcaagtctttcatgatacagactctgcaaggtctagattatttgcacttcaattggatactacacagggatttgaaacctaataatctgctgataagtagtgatggtattgtgaaaattggagattttggcttggccaagttttatggctcccctaacagggtaaacacacatcaagtagtaacgaggtggtatcgagctccagaacttttattcggtgctagactttatggtgctggaattgacatgtgggcaattggttgtatcttagcagaattgttattgcgtgttcccttcttaccaggagaatctgacttggatcaactgaccaaaatttttcaggttttagggacacctaccgaagaaacatggcctggagtcacaaagttgccagatttcatccagttcaagccttttccagctgtaccgttaaaagacatatttactgctgctggtgatgatctactagatctgcttgctagtctactgaacataaatcctatagagaggtgtagttgcgatcaagcattgcaaatgacttattttagtaataatcctcctccaacgccaaaggccagattaccactgccaatggccattagacgtcagacagaaaacaaacccagtttaaaacgaaaattgttagaagcaacagatggtgctacacttgctaaaagactgctattttaa

SEQ ID NO: 62796 - protein, 338 aa, Nasonia vitripennis
MVEKLRRYEKIDFLGEGQFATVYKAKDTVTDKIVAVKKIKVGSHAEAKDGINRTALREIKLLQELKHENIIGLLDVFGHKSNVSLVFDFMDTDLEVIIKDTNIVLTPANIKSFMIQTLQGLDYLHFNWILHRDLKPNNLLISSDGIVKIGDFGLAKFYGSPNRVNTHQVVTRWYRAPELLFGARLYGAGIDMWAIGCILAELLLRVPFLPGESDLDQLTKIFQVLGTPTEETWPGVTKLPDFIQFKPFPAVPLKDIFTAAGDDLLDLLASLLNINPIERCSCDQALQMTYFSNNPPPTPKARLPLPMAIRRQTENKPSLKRKLLEATDGATLAKRLLF

SEQ ID NO: 62797 - DNA, 882 bp, Anopheles gambiae str. PEST
  CDS (1)..(882)
atggacgattatatgccatcgcgctatcagctgctcggcagaatcggtgaaggagtccatggagtcgtcgtaaaagctcgtgacctgcaaagtgatgacaagatggttgccatcaaaaagctatcgttgcgaacaaagttcggggttatatcactcaacacggttcgcgaaattcgtgccctgcagcactgccggtgtgataatgttctagagctattagatatgtatcctgatttggccggcatatctttggtattcgagtacatgccgcacacactgtacagtaaactaaaagacgaagagaaccccttatcccgagcaaccgttcgacgctatacgggaatgctgctgaagggtttggcctaccttcacgggttacgtttgatgcatcgcgatattaagcctgccaatctgctcattgatcgacatgatgtgctcaaaatagcggactttggattggctcgcatctacaccgaaccacagcagcaatcaagcaaggtgtattcaccacaggttgccacccgatggtaccgagcgccggaaatactgtggggctgccaacggtacggtccctcgatagacctatgggccagcggagccgtctgtgctgagatgcttcgaggtgtgccgcttttcgctggcgccaccgacatagaacaactggcgctggtagtccgcacactaggcactccaaatcagaaggattggcccgaagtgcgaagccttccggattataacaaaatccgctttccgaactcgcgcggagagcgctgggaggacatcttccccagctgtaccactcgcgacgagatcagcctggtcgatgggctggtgagatataatcctgctaagcgtctcacggccgaagaggtgggtttttaa

SEQ ID NO: 62798 - protein, 293 aa, Anopheles gambiae str. PEST
MDDYMPSRYQLLGRIGEGVHGVVVKARDLQSDDKMVAIKKLSLRTKFGVISLNTVREIRALQHCRCDNVLELLDMYPDLAGISLVFEYMPHTLYSKLKDEENPLSRATVRRYTGMLLKGLAYLHGLRLMHRDIKPANLLIDRHDVLKIADFGLARIYTEPQQQSSKVYSPQVATRWYRAPEILWGCQRYGPSIDLWASGAVCAEMLRGVPLFAGATDIEQLALVVRTLGTPNQKDWPEVRSLPDYNKIRFPNSRGERWEDIFPSCTTRDEISLVDGLVRYNPAKRLTAEEVGF

SEQ ID NO: 62799 - DNA, 993 bp, Magnaporthe grisea 70-15
  CDS (1)..(993)
atggacggcaaaaggcacctaaactcgttccagcagctggagaagctgggcgagggaacatatgctaccgttttcaaaggtcgaaatagacacacaggagagcttgttgcactaaaagagattcacctcgactcggaggagggtacaccatcaacggcaatccgtgagatctcgcttatgaaagagctcaagcacgagaacatagtcggccttcacgatgtcattcacaccgagaacaaactgatgctggtctttgagcacatggacggcgatttgaagaaatacatggacaccaagggagaccgcggagcgctgcaacccatggtgatcaagtcatttatgtaccagctgctcaagggtatcgatttctgtcaccagaaccgcgtcctgcaccgcgatctcaagccgcaaaaccttttgatcaacaacaagggtgccctcaaactcggcgactttggtctggctcgtgcttttggtattcctgtcaacacattctccaacgaggtagtgacgctctggtaccgcgcccccgacgttcttctgggtagccggacgtacaacacaagcatagacatatggtcggccggatgcatcatggcagagatgtttaccggtaggcctctgttcccgggcacaaccaacgaggaccaaatcgttcgcatcttccggatcatgggcacaccgtcggagcgtacatggccggggttctcgcagttccccgagtacaagaagacgttccacacgtacgccactcaggatctccgcaacattctcccccaaatcgacgctaccggcatagaccttctgggcaggatgttgcagttgcgtcccgagatgcgtatcagtgcgcacgatgcactgaagcacccttggttcaacgatatccttatgcagcaacaccagcaacaacacgcgatacaggcccaagcccaagcccaccaagcaaggacgcagtcggggagcacagacacattcgcaggcgcagccgtatga

SEQ ID NO: 62800 - protein, 330 aa, Magnaporthe grisea 70-15
MDGKRHLNSFQQLEKLGEGTYATVFKGRNRHTGELVALKEIHLDSEEGTPSTAIREISLMKELKHENIVGLHDVIHTENKLMLVFEHMDGDLKKYMDTKGDRGALQPMVIKSFMYQLLKGIDFCHQNRVLHRDLKPQNLLINNKGALKLGDFGLARAFGIPVNTFSNEVVTLWYRAPDVLLGSRTYNTSIDIWSAGCIMAEMFTGRPLFPGTTNEDQIVRIFRIMGTPSERTWPGFSQFPEYKKTFHTYATQDLRNILPQIDATGIDLLGRMLQLRPEMRISAHDALKHPWFNDILMQQHQQQHAIQAQAQAHQARTQSGSTDTFAGAAV

SEQ ID NO: 62801 - DNA, 963 bp, Magnaporthe grisea 70-15
  CDS (1)..(963)
atggaaaactaccagaagctcgagaagatcggtgaaggtacatatggagtcgtctacaaggctcgagaccttctcaacggaggtcggatcgtcgcaatgaagaagatccggctggaagcggaggacgagggtgtcccgtcaacagcgattcgagagatcagtctcctgaaagagatgcgggatccaaacatcgtccgactgttcaacatcgtgcacactgatggtaccaagctctacctcgtctttgaattcctcgacctcgatctcaaaaagtacatggaggcactacctgtggcggacggcggacgcggcaaggcgctgcccgagggcactggcccacaactgagccgactgggtctgggcgatactatgatcaagaagttcatgagccagttgtgtgatggtgttcggtactgccattcacacaggattctacatcgcgaccttaagccgcagaacctgctcatcgaccgggaaggcaacctgaagcttgccgactttggtctggcccgcgcctttggtgtgcctcttcgaacctacacccacgaagttgtcacgctctggtaccgtgcccccgagattctgattggtggacggcaatattcgacaggcgtggacatgtggtcggtgggatgcatctttgctgagatgtgcacacggaagccactcttccccggagactctgaaattgatgagatcttcaagatcttcaggttgcttggcacgcccacagaagagacgtggcccagcgtcacagatgaacacatctaccctgacttcaagccatctttccccaagtggcagcgcgatccaaacatgaagctctgcccaggtctcaatgacgctggtctggatctcctcgagatgatgctcgtctacgaccctgccggccgcatctcggcaaaacaagcttgcaaccacccatattttgaggacaacaccccagcgcccccgaggcgatag

SEQ ID NO: 62802 - protein, 320 aa, Magnaporthe grisea 70-15
MENYQKLEKIGEGTYGVVYKARDLLNGGRIVAMKKIRLEAEDEGVPSTAIREISLLKEMRDPNIVRLFNIVHTDGTKLYLVFEFLDLDLKKYMEALPVADGGRGKALPEGTGPQLSRLGLGDTMIKKFMSQLCDGVRYCHSHRILHRDLKPQNLLIDREGNLKLADFGLARAFGVPLRTYTHEVVTLWYRAPEILIGGRQYSTGVDMWSVGCIFAEMCTRKPLFPGDSEIDEIFKIFRLLGTPTEETWPSVTDEHIYPDFKPSFPKWQRDPNMKLCPGLNDAGLDLLEMMLVYDPAGRISAKQACNHPYFEDNTPAPPRR

SEQ ID NO: 62803 - DNA, 972 bp, Gibberella zeae PH-1
  CDS (1)..(972)
atggacggaaaacgacaccccagctcgttccagcagctcgagaagctgggagagggaacttatgccactgtcttcaagggccgcaacaggcagactggcgagcttgtggcgctcaaggaaatacatctcgactctgaagaaggcaccccgtcgaccgccattcgagaaatctcccttatgaaggaactcaagcacgagaacattgttgggctacatgatgttatccataccgagaataagctcatgctcgtcttcgagtacatggatggcgatctgaagaggtacatggatacaaatggcgagcgcggtgctcttaaaccaactaccatcaagtcattcatgtaccagctcctcaagggtatcgacttttgccaccagaaccgcgttctccaccgtgatctcaagccccagaatctgctgatcaacaacaagggtatcctgaagcttggagattttggtcttgcccgcgcatttggtattcctgtcaacacattctcgaatgaagtcgtcactctctggtatcgcgcccccgatgtcctgctcggcagccgtacatacaacaccagcatcgatatatggtcagcgggctgcatcatggctgagatgtttacggggcggccattattccctggaaccaccaacgaagaccagatcgttcgcatcttccgtatcatgggaacgccgacagagcgtacctggcctggcattacccaattccccgagtataagccaaccttccatatgtatgctactcaggatctccgaaatatcctccagacgatcgatccaaccggcatagacctgttacaaaggatgcttcagcttcgaccggaattgaggatcagtgcccacgatgcccttcagcacgcttggtttaacgacctgctggtgcaccctcagcagcagaacctccaatcgcaggcccgcgcataccctcaagcagttccaagccaagccttcgatacgtactaa

SEQ ID NO: 62804 - protein, 323 aa, Gibberella zeae PH-1
MDGKRHPSSFQQLEKLGEGTYATVFKGRNRQTGELVALKEIHLDSEEGTPSTAIREISLMKELKHENIVGLHDVIHTENKLMLVFEYMDGDLKRYMDTNGERGALKPTTIKSFMYQLLKGIDFCHQNRVLHRDLKPQNLLINNKGILKLGDFGLARAFGIPVNTFSNEVVTLWYRAPDVLLGSRTYNTSIDIWSAGCIMAEMFTGRPLFPGTTNEDQIVRIFRIMGTPTERTWPGITQFPEYKPTFHMYATQDLRNILQTIDPTGIDLLQRMLQLRPELRISAHDALQHAWFNDLLVHPQQQNLQSQARAYPQAVPSQAFDTY

SEQ ID NO: 62805 - DNA, 978 bp, Gibberella zeae PH-1
  CDS (1)..(978)
atggagaattaccagaagctggaaaagattggtgaaggcacctacggtgtcgtctacaaggctcgagacctcgccaatggcgggcgaattgtcgccctgaagaagatccgcctcgaagctgaagatgaaggcgtcccaagtaccgccattcgcgaaatttctctcctcaaggaaatgcgagatcccaacattgtccgtctgttcaatattgttcactcagatggtcacaagctgtatctcgtttttgaattcctcgatctcgatctcaagaagtacatggaatctcttcccataagcgatggtggtcgaggcaaggccttgcccgagggttcatcgccacacttgcaacaccttggcctcggtgacacagttgttcgcaaattcatgtaccagctttgtgacggtgtcaagtactgccactcccatcgggtccttcaccgtgatctcaagccacagaaccttttgatcgacaaggatggcaacctcaaactcgccgatttcggtcttgcccgcgcttttggcgtgcctctgcgtacgtacactcacgaagtcgtcactctttggtatcgagcccctgaaattctactgggaggccgtcaatactcgactggcgtggacatgtggtccgttggctgtatctttgccgagatgtgcacgcgcaagcctcttttccccggcgactctgaaatcgacgagatcttcaagatcttccgcactctcggtacaccctctgaagacaactggccaggtgtcacatcgtaccctgacttcaaggcatccttccccaagtggcaacgtgactacagcaagtctctatgcagcacccttgatgaccatggtctggaattgctcgagatgatgttggtgtatgacccagcagggcgtatctcggccaagggagccttcaaccacccttattttgagccgcacctggcacagaagcaggcatctgctcagacgaatggctactatcactag

SEQ ID NO: 62806 - protein, 325 aa, Gibberella zeae PH-1
MENYQKLEKIGEGTYGVVYKARDLANGGRIVALKKIRLEAEDEGVPSTAIREISLLKEMRDPNIVRLFNIVHSDGHKLYLVFEFLDLDLKKYMESLPISDGGRGKALPEGSSPHLQHLGLGDTVVRKFMYQLCDGVKYCHSHRVLHRDLKPQNLLIDKDGNLKLADFGLARAFGVPLRTYTHEVVTLWYRAPEILLGGRQYSTGVDMWSVGCIFAEMCTRKPLFPGDSEIDEIFKIFRTLGTPSEDNWPGVTSYPDFKASFPKWQRDYSKSLCSTLDDHGLELLEMMLVYDPAGRISAKGAFNHPYFEPHLAQKQASAQTNGYYH

SEQ ID NO: 62807 - DNA, 900 bp, Apis mellifera
  CDS (1)..(900)
atgcaaaaatatgagaaactcgagaaaataggagaaggtacttatggaaccgttttcaaagccaagaatcgcgagacccacgaaatcgttgctttaaaaagagttcgactagacgaagacgatgaaggtgtaccgtcgtccgcactcagagagatttgtttactaaaagaattgaaacacaaaaatgtagtaagattgtatgatgtgttgcatagtgataaaaaattaaccttggtttttgaacattgtgatcaagatctgaagaaatattttgacagtttaaacggagagatcgatttggatgtcgtcaaatcctttttatatcaattattacgaggattggcgttttgtcacagtagaaatgtattacacagagatcttaaaccacaaaatttacttattaacaagaatggcgagttgaagttggccgattttggactagcaagagcttttggaattcccgtaaaatgttattcagcggaagttgtaacgttatggtaccgtccgccagatgttctttttggagcgaaattgtacacaacatccattgacatgtggagtgccggatgtatatttgctgaactagcaaacgccggtagaccattgttccccggttcggatgtggacgatcaattgaagagaatatttaagatgttaggcacaccgaccgaagaaacgtggccagattttacaactcttccagattacaaacctttcccactttatcatcccgctcaaggattggctcaagttacgccaaaacttaattccagaggcagagatttattgcagaggttgttggtatgtaatccagcgttacgattgtcagcggacgaggcaatggctcatccctatttcaacgacttgaaccctgccattaaaaacgatcgttgtcagtag

SEQ ID NO: 62808 - protein, 299 aa, Apis mellifera
MQKYEKLEKIGEGTYGTVFKAKNRETHEIVALKRVRLDEDDEGVPSSALREICLLKELKHKNVVRLYDVLHSDKKLTLVFEHCDQDLKKYFDSLNGEIDLDVVKSFLYQLLRGLAFCHSRNVLHRDLKPQNLLINKNGELKLADFGLARAFGIPVKCYSAEVVTLWYRPPDVLFGAKLYTTSIDMWSAGCIFAELANAGRPLFPGSDVDDQLKRIFKMLGTPTEETWPDFTTLPDYKPFPLYHPAQGLAQVTPKLNSRGRDLLQRLLVCNPALRLSADEAMAHPYFNDLNPAIKNDRCQ

SEQ ID NO: 62809 - DNA, 900 bp, Apis mellifera
  CDS (1)..(900)
atggacaacttcgtcaagatagaaaaaataggggaagggacctatggggtggtttataaagccaaagataagttaactggaaaactggtggcacttaaaaagattcgtcttgagacggaaagtgaaggtgttccatccactgctattcgagaaatatcattattaagagaactcacacatccaaatattgttcaattatttgatgtagtagatggggataatcatctatatcttgtttttgaattcttacaacaagatttaaaaaaattgttagattccgttaaaggaggattagatcaagctcttgttaagagttatttgtatcagttattgaaagcaatttctttctgccatcttcattgcattttacatagagatttaaaaccacagaatctgttaatagatcaggagggtcacataaaattagcagattttggattagccaggacatttggtgttcctgttcgtacatatactcatgaaatagtaactctttggtatcgagcaccagagatacttttaggaacaaaattatattccaatgcagtagatgtttggagtttaggttgtatatttgcagaaatggcaactaggagagctttattcccaggtgattcagaaatagatcaactcttcaggatattccgtacattaggcacaccagatgaaaatatttggccaggagtatcacaactacgtgattatacatcaatgtttccaagatgggaaccacgacctttagatgaagttgtaccttcttttgattctgatgccaaagatttgcttttgaaactcttgacttatgatcctaatcagaggataactgcaaaaaaaggattaagccatccttattttaatggagttacattagttccacccccactgccaaagaaaacttga

SEQ ID NO: 62810 - protein, 299 aa, Apis mellifera
MDNFVKIEKIGEGTYGVVYKAKDKLTGKLVALKKIRLETESEGVPSTAIREISLLRELTHPNIVQLFDVVDGDNHLYLVFEFLQQDLKKLLDSVKGGLDQALVKSYLYQLLKAISFCHLHCILHRDLKPQNLLIDQEGHIKLADFGLARTFGVPVRTYTHEIVTLWYRAPEILLGTKLYSNAVDVWSLGCIFAEMATRRALFPGDSEIDQLFRIFRTLGTPDENIWPGVSQLRDYTSMFPRWEPRPLDEVVPSFDSDAKDLLLKLLTYDPNQRITAKKGLSHPYFNGVTLVPPPLPKKT

SEQ ID NO: 62811 - DNA, 1149 bp, Apis mellifera
  CDS (1)..(1149)
atgaatacgaaggaaaaagaaaaatatattgaagaatttgattttcctcattgtgatgaatcttctaaatatgaaaaagttgcaaaaattggtcaaggtactttcggagaagtgtttaaagctagagataagaattgtactaaaaaattcgtagctatgaaaaaagtattaatggataatgaaaaagaagggtttcctataactgctttaagagaaataagaatactgcaattattaaaacatgacaatgtagtaaatttaatagaaatatgtagaacaaaagcaactcaatataatcgttatcgttctacattctatcttgtatttgatttttgtgaacatgacttagcaggtttattgtcaaatgtaaatgtcaaatttaatttaggagaaattaaaaaagttatgcaacaattattaaatggtctttattatatacatagtaacaagattttgcatagagatatgaaggctgcaaatgttttaataacgaaaaatggtatattaaaattagctgattttggattagctcgtgcatttagtgtaaataaaaatggtcaaccaaatcgttatacaaatagagttgttactctttggtatagaccacctgaacttttgcttggtgatagaaattatggtcctcctgtagatttatggggtgcaggatgcataatggctgaaatgtggaccagatcacctataatgcaagggaatacagagcaacaacagctcatattaatttctcaattatgtggttcgattacaacagaagtatggccaggagtagaaaatttagaattatttaataaaatggatttacctaaaggtcaaaaacgaaaagttaaagataggttaaaaccatatttaaaggatccttatgcatgtgatttattagataaacttttaattcttgatccatctaaaagatttgatgcagattccgcattaaatcacgactttttttggacggatcctatgccttgtgatcttagtaaaatgttggctcagcatacccagagtatgtttgaatacttagccccaccaagacgtcctggtcatatacgccatcctcatcatcaagtacctggaggaccagccaaacctagttctagtatggccgacagtggttaccaagatcgtgtattttag

SEQ ID NO: 62812 - protein, 382 aa, Apis mellifera
MNTKEKEKYIEEFDFPHCDESSKYEKVAKIGQGTFGEVFKARDKNCTKKFVAMKKVLMDNEKEGFPITALREIRILQLLKHDNVVNLIEICRTKATQYNRYRSTFYLVFDFCEHDLAGLLSNVNVKFNLGEIKKVMQQLLNGLYYIHSNKILHRDMKAANVLITKNGILKLADFGLARAFSVNKNGQPNRYTNRVVTLWYRPPELLLGDRNYGPPVDLWGAGCIMAEMWTRSPIMQGNTEQQQLILISQLCGSITTEVWPGVENLELFNKMDLPKGQKRKVKDRLKPYLKDPYACDLLDKLLILDPSKRFDADSALNHDFFWTDPMPCDLSKMLAQHTQSMFEYLAPPRRPGHIRHPHHQVPGGPAKPSSSMADSGYQDRVF

SEQ ID NO: 62813 - DNA, 897 bp, Candida glabrata CBS 138
  CDS (1)..(897)
atgagcagcgaattggctaactataagaggctggagaaggtcggagaaggtacatatggtgttgtctacaaggcactcgatttgagacctgggaagggtcaaagggtggttgcgctaaagaagatcagattagagagtgaggatgaaggtgttccgagtactgctattcgggagatctcgctgttgaaggagttgaaggacgacaatatcgtcaggttatatgatattgtgcacagcgatgcgcataagttgtacttagttcttgagtttctggacttggatttgaagaggtacatggagagcatacctaaggaccaaccactgggagtcaatataatcaagaagttcatggtgcagctctgtaaaggtattgcgtattgccatgcgcaccgtatcctgcaccgtgatttaaagccccagaacctgctgatcgacaaagaaggtaacctgaagcttggtgatttcggtttagcgcgggcctttggtgttccattgagagcgtacacacacgagattgttactttgtggtaccgtgcccccgaggtcttgcttggaggcaagcagtacagtacgggtgtcgacacctggtccattgggtgtatatttgctgagatgtgcaaccggaagcctatattcagtggtgacagtgagatcgaccagatcttcaagatattcaggatactgggcacaccgtccgaggcagtgtggccggacatcgtctacttgccagacttcaagcccagcttcccgcaatggaggcgcaaggacctggccgaggtggtaccatcgctagacccccacggtatagacctgctggacaagctgcttgcatacgacccaatcaaccgtatcagcgcaagaagagcggccaaccacccatactttcacgagcagtaa

SEQ ID NO: 62814 - protein, 298 aa, Candida glabrata CBS 138
MSSELANYKRLEKVGEGTYGVVYKALDLRPGKGQRVVALKKIRLESEDEGVPSTAIREISLLKELKDDNIVRLYDIVHSDAHKLYLVLEFLDLDLKRYMESIPKDQPLGVNIIKKFMVQLCKGIAYCHAHRILHRDLKPQNLLIDKEGNLKLGDFGLARAFGVPLRAYTHEIVTLWYRAPEVLLGGKQYSTGVDTWSIGCIFAEMCNRKPIFSGDSEIDQIFKIFRILGTPSEAVWPDIVYLPDFKPSFPQWRRKDLAEVVPSLDPHGIDLLDKLLAYDPINRISARRAANHPYFHEQ

SEQ ID NO: 62815 - DNA, 888 bp, Kluyveromyces lactis NRRL Y-1140
  CDS (1)..(888)
atgtccgaattaacaaactacaagagacttgagaaagtcggagaaggtacttatggtgttgtttacaaagcggttgatttgcgtcaccagaatcgagtggtagcaatgaaaaagatcagattagaatctgaagacgaaggtgttcccagtactgcgatacgtgagatttcattattgaaggaactgaaggatgacaacattgtcagattatatgacatcgtgcactcggacgcgcacaagttatatctagtgttcgaatttttggatcttgatttgaaaagatacatggaatcgatccccaaggaccagccattgggaggcaacattataaagaagtttatgatgcaattgtgcaagggaattgcttattgccatgctcataggatcatacatcgtgatttgaagccgcagaatctattgatcaacagagatgggaacttgaagttgggagatttcggccttgcacgtgcattcggtgtccccttgagagcgtacacccatgagatcgtcactttatggtatagggcaccagaagtgttattaggtgggaaacagtacagtacaggggtcgatgtatggtccattggctgtatatttgccgagatgtgcaacaggaaaccgttattcagcggagacagtgaaattgatcagatcttcaagatattccgagtgttaggcacaccaaacgagagaacatggccggatattatttatctaccggatttcaagactacattccctaaatggaaccgtcgtaatttatccgaggtaattccatcgctagatgcaaacggtatcgatctcttggacaaattgatcacctacgatccaatccaccgcattagcgccaaaagagcagtacaacacccgtacttcaaggaggagtga

SEQ ID NO: 62816 - protein, 295 aa, Kluyveromyces lactis NRRL Y-1140
MSELTNYKRLEKVGEGTYGVVYKAVDLRHQNRVVAMKKIRLESEDEGVPSTAIREISLLKELKDDNIVRLYDIVHSDAHKLYLVFEFLDLDLKRYMESIPKDQPLGGNIIKKFMMQLCKGIAYCHAHRIIHRDLKPQNLLINRDGNLKLGDFGLARAFGVPLRAYTHEIVTLWYRAPEVLLGGKQYSTGVDVWSIGCIFAEMCNRKPLFSGDSEIDQIFKIFRVLGTPNERTWPDIIYLPDFKTTFPKWNRRNLSEVIPSLDANGIDLLDKLITYDPIHRISAKRAVQHPYFKEE

SEQ ID NO: 62817 - DNA, 930 bp, Debaryomyces hansenii CBS767
  CDS (1)..(930)
atggtcgaattaacggattatcagcgtcaagagaaagttggtgaaggtacatatggagttgtgtataaggcattggataccaagcataataatagggttgttgctttgaagaagatcagattggagtcggaggatgaaggagttccatcgacagccataagagaaatttcgttgttaaaggaaatgaaagacgataatatcgttcggttgtacgatataatacactctgactcgcataagttgtatttggtgtttgaatttttagacttggatttgaagaaatacatggagtcgattcctcagggtgttggcttaggcgccgacatggtcaagaggtttttgaaccagttggtcaagggtattaagcattgtcacagtcacagggtattgcatagagacttgaagccccagaacttattgattgacaaggaaggaaatttaaaattggccgattttggcctcgcaagagcgttcggggtgcctttaagagcgtatacacacgaagtggtaactttgtggtatagagcacctgagattttgttgggtggtaaacaatattcaactggggtggatatgtggtcggttggttgtatctttgcagagatgtgtaatagaaagccactcttcccaggggattcagaaatcgacgaaatcttcagaatcttcagaattttaggtacgccatcagaagaaacctggcctgatgtttcatacttgccagatttcaagtcgactttccctaagtggtccaagaaaaatttggctgaatttgtgcctactttagatgaagatgggatcgatttgttagagcaaatgcttgtttacgatccaagtggtagaatcagtgcaaagcgagccttaattcatccatattttcaggaagatggtgaaaactacgatagttatccaagatctgttaacatgggttag

SEQ ID NO: 62818 - protein, 309 aa, Debaryomyces hansenii CBS767
MVELTDYQRQEKVGEGTYGVVYKALDTKHNNRVVALKKIRLESEDEGVPSTAIREISLLKEMKDDNIVRLYDIIHSDSHKLYLVFEFLDLDLKKYMESIPQGVGLGADMVKRFLNQLVKGIKHCHSHRVLHRDLKPQNLLIDKEGNLKLADFGLARAFGVPLRAYTHEVVTLWYRAPEILLGGKQYSTGVDMWSVGCIFAEMCNRKPLFPGDSEIDEIFRIFRILGTPSEETWPDVSYLPDFKSTFPKWSKKNLAEFVPTLDEDGIDLLEQMLVYDPSGRISAKRALIHPYFQEDGENYDSYPRSVNMG

SEQ ID NO: 62819 - DNA, 951 bp, Yarrowia lipolytica CLIB122
  CDS (1)..(951)
atggtcgacttaaatcattaccagaagctggagaaagtgggagagggaacatacggagtggtatacaaggcacgagatactctcaacaataaccgtttggtggccttgaagaagatccgactggaagccgaggacgagggagtgccttccacagccattcgagaaatctcactgctcaaggaaatgcgaaacgacaacattgtgtcgctctacaacattgtccactccgactcacacaagctctacctggtgtttgagttcctcgacctggatctcaaaaagtacatggagagcatttcgcccggcgtaggtctcggcgccgacatggtcaagaagttcatgaaccagctcattttgggaacccgatactgccacgcacacagaatcctgcatcgggatctcaagccccagaacctgctcatcgaccgggagggtaacctcaagctggccgactttggtctggcccgggcctttggtgtgcctctcagaacctatacccacgaggttgtcacactttggtaccgagctcctgagattcttctgggaggtcgacaatactccactggtgtggacatgtggtccattggctgtatctttgccgagatggtgacccgaaagcccctgttccccggagactcggagattgacgagatcttcaagattttcagactgctgggcacccccaccgaggagacctggcccggcgtgacagctcttcccgactacaagcccacattcccccagtggagccgcaaagacattggtcgaacagtgactccattggatcacgagggtctcgatctgctggagcatctgctggcatacgatcctgcatgccgaatctcggccaagcgggctgccgaccacgcctactttgacgtgggaaccaacatgaagagtggatataacgctgctgcaggtccggggctcatgatgtccactagagcataa

SEQ ID NO: 62820 - protein, 316 aa, Yarrowia lipolytica CLIB122
MVDLNHYQKLEKVGEGTYGVVYKARDTLNNNRLVALKKIRLEAEDEGVPSTAIREISLLKEMRNDNIVSLYNIVHSDSHKLYLVFEFLDLDLKKYMESISPGVGLGADMVKKFMNQLILGTRYCHAHRILHRDLKPQNLLIDREGNLKLADFGLARAFGVPLRTYTHEVVTLWYRAPEILLGGRQYSTGVDMWSIGCIFAEMVTRKPLFPGDSEIDEIFKIFRLLGTPTEETWPGVTALPDYKPTFPQWSRKDIGRTVTPLDHEGLDLLEHLLAYDPACRISAKRAADHAYFDVGTNMKSGYNAAAGPGLMMSTRA

SEQ ID NO: 62821 - DNA, 915 bp, Apis mellifera
  CDS (1)..(915)
atggatagatatataatcacaggaaaaattggaaaaggagcacaaggtattgttttaaaagcacatgatttggaaacagaaaaaaatgttgcattaaaaaaattatttttaaaaaatattgacaatggtatatctacatctattattagagaaataaaaattttgcaacaattaaaacatctcaatattatagagttattagatgcttttcctgctggtttagattttataatggtctttgaatatatgccaacaggattatgggaaataataaaagataatgatatattattaactccagttcaaataaaaatttatataaaaatgattttagagggcattgcatatatacatgaaaaaaatataatacatagagatctaaaacctgctaatttattaataaatgagaaaggtattctaaaaattgctgattttggcttaggaagattgttgtggaaaaatgtaacaaagccatattcacatcaaattgccactaggtggtacagagcacctgaattattatatggtgcacgatattatacatcagctattgatatgtggtctattggttgcatttttggtgaattacttaataaatctccattatttcctggtgaaacagatattgagcagttagcaattgttttaaaatatttaggttcacctacatcagaaacctggccagatttaagtatattacctgattataacaagattacatttccatatcataaaggaataacttgggaaaaaattattgaggattctgaaccagaagctattgatttaattagtaaaatacttatttataattcatcaaaacgcttgtcagctagtgaagtatgcactacaacatatatactttcatgtcaaaccttatacttcttcaaaatatttgataaaaccacaaactaa

SEQ ID NO: 62822 - protein, 304 aa, Apis mellifera
MDRYIITGKIGKGAQGIVLKAHDLETEKNVALKKLFLKNIDNGISTSIIREIKILQQLKHLNIIELLDAFPAGLDFIMVFEYMPTGLWEIIKDNDILLTPVQIKIYIKMILEGIAYIHEKNIIHRDLKPANLLINEKGILKIADFGLGRLLWKNVTKPYSHQIATRWYRAPELLYGARYYTSAIDMWSIGCIFGELLNKSPLFPGETDIEQLAIVLKYLGSPTSETWPDLSILPDYNKITFPYHKGITWEKIIEDSEPEAIDLISKILIYNSSKRLSASEVCTTTYILSCQTLYFFKIFDKTTN

SEQ ID NO: 62823 - DNA, 927 bp, Aspergillus nidulans FGSC A4
  CDS (1)..(927)
atgacccgaacccaccccagctcctttcagcagctggaaaagctcggtgaaggaacttatgccacggtctacaagggccggaattgccaaacaggggagatggtggcgctgaaggagattcacctcgactcggaagaagggacgccatctacggcgattcgcgagatttctctaatgaaggaactgcaccacgataacatcctttcgctatacgacgtcgtgcacaccgagaataagctcatgctagtattcgagtacatggaccaggacctgaagaaatatatggacacacacggaaatcatggtcaacttgagcccgcgatagtcaagtcattcgcttttcagcttctgcggggtatcgcgttttgccacgataatcggatactccaccgcgatctcaaaccccagaatctgcttatcaactccaagggccaactcaaactcgccgatttcggccttgcgcgcgcgttcggaattccagtcaacacattctctaatgaggtagttacgctctggtaccgcgcaccagacgtgctcctcggcagccgcacctataatacgacaatcgatatctggtcgatcggttgcatcattgcggagatgttcactgggcgcgcgttgtttccaggcacgacgaatgaggaccagcttcagaagattttccgcgtcatgggcacgccttctgagcgtacttggcctggagtttctcagtttccggaatacaaaagtgattttcccgtttaccctcctcaggacctgcgacaagtcgtccctaggattgatccatacggtctcgacctactccggtgtatgttgcgccttcaaccggatttacgaatcagtgccgtcgatgcgctgcgacatccttggtttaatgatccagtttctgatctacctattgatcatggtatggaggctctcacttga

SEQ ID NO: 62824 - protein, 308 aa, Aspergillus nidulans FGSC A4
MTRTHPSSFQQLEKLGEGTYATVYKGRNCQTGEMVALKEIHLDSEEGTPSTAIREISLMKELHHDNILSLYDVVHTENKLMLVFEYMDQDLKKYMDTHGNHGQLEPAIVKSFAFQLLRGIAFCHDNRILHRDLKPQNLLINSKGQLKLADFGLARAFGIPVNTFSNEVVTLWYRAPDVLLGSRTYNTTIDIWSIGCIIAEMFTGRALFPGTTNEDQLQKIFRVMGTPSERTWPGVSQFPEYKSDFPVYPPQDLRQVVPRIDPYGLDLLRCMLRLQPDLRISAVDALRHPWFNDPVSDLPIDHGMEALT

SEQ ID NO: 62825 - DNA, 1101 bp, Aspergillus nidulans FGSC A4
  CDS (1)..(1101)
atgacttcgcagcggccaacatcatcctcttcctccctgctggatattgtcgcaaatctcgcttcgccaaagtctttgctttttaacgctcatcacaccaacccccctccttccctgccgtctcaacgcgcaccaacgatggataagtcgcaacagcccagctcgttccagcagctggaaaagctcggagagggtacatatgctactgtcttcaaaggacgaaaccggcagacaggcgaacttgtcgccctgaaagaaatccacctcgactccgaagagggaacgccatcaactgccattcgcgaaatctcattgatgaaagagttgaaacatgagagtatcgtatcactctacgatgtgattcacacggagaacaagctcatgcttgtgttcgaatatatggacaaggatttgaaaaagtatatggacactcggggcgaccgagggcagttggatcaagcgaccatcaaatcgttcatgcaccaacttatgagtggtatcgctttttgtcacgacaaccgagtcctacaccgagatctgaagccgcagaacttattgatcaataagaaagggcaattaaagctgggtgatttcggacttgctcgcgcattcggcattcccgtgaacacattttcaaatgaagtcgtgacgctttggtatcgtgctcccgacgtccttctcggcagcaggacatataatacaagtatcgatatctggtcggctggctgtatcatggcagagctatatacaggccgccccttgtttccgggaacaaccaatgaggaccaactgcagaagattttccgcctgatggggacaccctctgaacgctcttggccagggatctcccagctgccggagtacagggccaatttccacgtatacgcaacacaggaccttggcctcatccttccccaaattgacccgctcggtctcgatctgttaaaccgaatgctgcaactccgaccggagatgcgaattgacgcccatggcgctctgcagcatccatggttccatgaccttccgcagctccaggcacagttgcagcaacagcaaatggccggatatggagggatgatgccaccgcaacaagcgtattag

SEQ ID NO: 62826 - protein, 366 aa, Aspergillus nidulans FGSC A4
MTSQRPTSSSSSLLDIVANLASPKSLLFNAHHTNPPPSLPSQRAPTMDKSQQPSSFQQLEKLGEGTYATVFKGRNRQTGELVALKEIHLDSEEGTPSTAIREISLMKELKHESIVSLYDVIHTENKLMLVFEYMDKDLKKYMDTRGDRGQLDQATIKSFMHQLMSGIAFCHDNRVLHRDLKPQNLLINKKGQLKLGDFGLARAFGIPVNTFSNEVVTLWYRAPDVLLGSRTYNTSIDIWSAGCIMAELYTGRPLFPGTTNEDQLQKIFRLMGTPSERSWPGISQLPEYRANFHVYATQDLGLILPQIDPLGLDLLNRMLQLRPEMRIDAHGALQHPWFHDLPQLQAQLQQQQMAGYGGMMPPQQAY

SEQ ID NO: 62827 - DNA, 1140 bp, Ustilago maydis 521
  CDS (1)..(1140)
atggagactgccgcggcacagaacctgttgatcgccaactcttacgccaaggtggagaaagtgggtgaaggtacatatgcctccgtattcttggcacgcagcatcaatacaggtcaaaaggtagccatcaagaagatcaagattgtttccaatgagaacggtatggacgtcactgcaattcgtgaagtcaagtttcttaaggagctaaaccaccccaatgtgatcaagctggtcgacgttttttcttcaggttctcgatctccgtctctcaacctggtgcttgaattcttggacaccaatctagaagcactcatcaaggacaggacgcttatttttactcaagccgacatcaaaagctggatggcgatgctctgccgtggtttggagtactgccatcgctattgggtattgcatcgtgatctgaaaccgaacaatttgctcatctctccacaaggcgaactcaagatcgctgattttggtcttgcacgcgaacacggcgatccaggtgcacgcatgactcatcaggtggtaacgagatggtatcgaccgccagagctgctgttgggttcccgcgcctactcttctgccgtggacatgtggagtgtaggctgcatctttgccgagcttatgctgcgcgtcccctatctaccaggcgagtcggatgccgaccagctcatcacgattttcaaggcgctcggtacaccaaccgataaggattggcccggtcacaagtctttgccagagtacacggccttcgaacaataccccaagtccaatttagctgatctgttcctagctgcaagtccagaagcacttgatttcctccaaaagatgcttcttttcgatccgctcaaacggctcagtgctaatcaagccttgcatcacgcgtacttcaagcagggtccgccaccgacaccattcaagcagcttccgaggcacccaacaaaagcgttggattccggggatccagctgcgcatcctctgctttcggacagcaaggagaagaacgaagtgcgtgaaaagcagcagaaccaagcacatggtaacggtaacgtcaacggcaacagcagaaagcgtcctttcgatgcaaaagagattgaagaacgaaggagattggcgagaaagctggctttcgcgtaa

SEQ ID NO: 62828 - protein, 379 aa, Ustilago maydis 521
METAAAQNLLIANSYAKVEKVGEGTYASVFLARSINTGQKVAIKKIKIVSNENGMDVTAIREVKFLKELNHPNVIKLVDVFSSGSRSPSLNLVLEFLDTNLEALIKDRTLIFTQADIKSWMAMLCRGLEYCHRYWVLHRDLKPNNLLISPQGELKIADFGLAREHGDPGARMTHQVVTRWYRPPELLLGSRAYSSAVDMWSVGCIFAELMLRVPYLPGESDADQLITIFKALGTPTDKDWPGHKSLPEYTAFEQYPKSNLADLFLAASPEALDFLQKMLLFDPLKRLSANQALHHAYFKQGPPPTPFKQLPRHPTKALDSGDPAAHPLLSDSKEKNEVREKQQNQAHGNGNVNGNSRKRPFDAKEIEERRRLARKLAFA

SEQ ID NO: 62829 - DNA, 1131 bp, Strongylocentrotus purpuratus
  CDS (1)..(1131)
atgcctatccttgttccaacgattctcacgatgcccaagtcgtccacccgacgggccaggttcatcaaaccactcccagtcatggtgactggaccaacctgcaatcacaagcgatttggaaaatcgccgtactgcaagtcatgttcaccctttggaaaagttgagacatacaagaaaatctgtccactaggagaaggatcatatgccaaagtctacaaggcagtaagctgtataaaccagcaagtggtagcgctcaaggagatcagactgcagcaagatgaggggacaccgttcacggcgatacgtgaggcatccctcttgaaagacctcaagcatgctaacattgtgtgtcttcatgatatcattcacacaaagacaacgctctcgttcgtctttgagtatgtgcatacagacctgagtacgtatctggagaggcatccagggggcttgaaccctaacaacgtgaggttgttcctcttccagctcatcagaggtttgtcgttctgtcacaagcggaagatccttcacagagacctcaaaccgcagaacctcctcatcagcgaagcaggagagctcaagttggcagattttggccttgcaagagccaagtcaataccaagcaggacatactcacatgaagtagtgacgttatggtacagaccacccgatgtgctcatgggttcaacggactactcaacacagctagacatctggggtgtaggatgcatctttcttgagatgatgtggggacagccggccttccctggtctcaaggatgctaccgatcagctggaaaagatattcaaggttctaggaacaccaacagaacagacatggcatggagtatcaagattacccaactacggcaaggttgcggcagcgggtagattccacaagccaaagcttttatgtgaaatcttaccaagtatactccttatacctggagcagaaagcctcatgactgatatgctacagttggaaccaaggaagaggatatcaacagtgcaagcaatgacctgtcagtacttcaaggatctaccaccaaagatctttgatctcccacctggtgcttctgttttcaatgtgcctggaatgaaactagagccagagaaaaacaatctttccaaatga

SEQ ID NO: 62830 - protein, 376 aa, Strongylocentrotus purpuratus
MPILVPTILTMPKSSTRRARFIKPLPVMVTGPTCNHKRFGKSPYCKSCSPFGKVETYKKICPLGEGSYAKVYKAVSCINQQVVALKEIRLQQDEGTPFTAIREASLLKDLKHANIVCLHDIIHTKTTLSFVFEYVHTDLSTYLERHPGGLNPNNVRLFLFQLIRGLSFCHKRKILHRDLKPQNLLISEAGELKLADFGLARAKSIPSRTYSHEVVTLWYRPPDVLMGSTDYSTQLDIWGVGCIFLEMMWGQPAFPGLKDATDQLEKIFKVLGTPTEQTWHGVSRLPNYGKVAAAGRFHKPKLLCEILPSILLIPGAESLMTDMLQLEPRKRISTVQAMTCQYFKDLPPKIFDLPPGASVFNVPGMKLEPEKNNLSK

SEQ ID NO: 62831 - DNA, 888 bp, Strongylocentrotus purpuratus
  CDS (1)..(888)
atggcttcacattactgtatgaggcaaaggagcacagaggccaaggagtattacacgactgctgaacgaacatatggaactgtttttaaagcgaagaatcgtgaaacacaagagatagtagcacttaagagggtgcgactagatgatgatgatgaggtaattacggtagtgaggaaaatcgtcacgcaaagtgaatgcaattttttttcactaccgtcacttcatgaaaacagcgacgatatgtacaataaagtcaatgaatattgtgatgaaatgtttatatactcattatgtagggtgaatgtcatagtggagtcattcatgtaccagctgttgagaggcttggctttctgtcacagtcatcatgttcttcaccgtgatctcaaaccacagaatctcctcattaacaagaatggagagcttaagctagctgattttggtcttgcccgtgcctttggcattcccgtgcgttgctactccgcagaggtcgtgaccctttggtaccgcccacctgatgtcctgtttggtgctaaggtctacaccacttccattgatatgtggtctgctggatgcatctttgcagagatggctaatgcggggcgccctctgttccctggtaatgacgtcgaggatcagctcaagaggatcttcaagctccttggtacacccacagaggatacatggccaggaatatcaaaactccctgatttcaagccataccctatctatcctgtgaccacacccctggcctctgtcgtgcccagtctatcagcaacaggaagggatctcttgcagcgtctgatgatgtgtaatccagccctgaggatgtcagcggaagagggactcatgcatcaatactttgcggatctcaactctgttgtcaactag

SEQ ID NO: 62832 - protein, 295 aa, Strongylocentrotus purpuratus
MASHYCMRQRSTEAKEYYTTAERTYGTVFKAKNRETQEIVALKRVRLDDDDEVITVVRKIVTQSECNFFSLPSLHENSDDMYNKVNEYCDEMFIYSLCRVNVIVESFMYQLLRGLAFCHSHHVLHRDLKPQNLLINKNGELKLADFGLARAFGIPVRCYSAEVVTLWYRPPDVLFGAKVYTTSIDMWSAGCIFAEMANAGRPLFPGNDVEDQLKRIFKLLGTPTEDTWPGISKLPDFKPYPIYPVTTPLASVVPSLSATGRDLLQRLMMCNPALRMSAEEGLMHQYFADLNSVVN

SEQ ID NO: 62833 - DNA, 1017 bp, Tribolium castaneum
  CDS (1)..(1017)
atgtcgaataaactaacccgttacgaaaaaatcgagtttctgggcgagggccaattcgccacggtgtacaaagcccgcgatgtagagaccgacaacatcgtcgcagtgaaaaaaatcaaaatggggagtcgtcaagaggcccaagacggcatcaaccgaacagcccttcgcgaaatcaaactcttacaagaactgcaccaccgcaacgtaatcggcctcttggacgtcttcggacacatgtccaacgtgtcccttgtgtttgatttcatggacacggatttggaagttataataaaagacaacacgattattttaacaactggcaacataaaagcctacattattcaaacgctgcaagggctggactacttgcaccgaaactgggtccttcaccgggacctcaagcccaacaaccttctggtgaactccaacggcgtgctcaaaatcggcgatttcgggcttgcgaagctctacggctccccaaaccgcatcaacacgcaccaggtggtcaccaggtggtacaggtgccccgagctgctcttcggggcaaagttgtacagcacgggggtggacatgtgggctgtggggtgcatcctcgcggagctcctcctgcgagtgcccttgtttcctggcgagtcggacctggaccagctgaccaaaattttcgcagtttttggaaatccgaccgaggagaattggccggggctgaagagtttgtccgattacgtcgaatttaagccgtttacgccgattccgttgaagaatattttcacagccgccggtgatgatctgcttgatgtcttggaggggcttttggtgttgaatccgttgaagcggttcgagtgcagcaagtgtttggcgatgccgtttttcagtaataaaccggcgccgacgccgggatccaagttgccgttgcctcaaaacatcagaaaaactgaagtggaaaggcctactttgaagaggaagctgctggatgcggtggagggagggtcgctatctaaacgattgtttttctaa

SEQ ID NO: 62834 - protein, 338 aa, Tribolium castaneum
MSNKLTRYEKIEFLGEGQFATVYKARDVETDNIVAVKKIKMGSRQEAQDGINRTALREIKLLQELHHRNVIGLLDVFGHMSNVSLVFDFMDTDLEVIIKDNTIILTTGNIKAYIIQTLQGLDYLHRNWVLHRDLKPNNLLVNSNGVLKIGDFGLAKLYGSPNRINTHQVVTRWYRCPELLFGAKLYSTGVDMWAVGCILAELLLRVPLFPGESDLDQLTKIFAVFGNPTEENWPGLKSLSDYVEFKPFTPIPLKNIFTAAGDDLLDVLEGLLVLNPLKRFECSKCLAMPFFSNKPAPTPGSKLPLPQNIRKTEVERPTLKRKLLDAVEGGSLSKRLFF

SEQ ID NO: 62835 - DNA, 987 bp, Tribolium castaneum
  CDS (1)..(987)
atggagaactacaagctgttgggtaaagtgggcaaaggagcccacggcctagttttcaaagccttggacttgcaaaataataaaacagtcgctctcaagcaaatagctgtagttaacgtcactaatggaataccaaaaaacaccatgcgtgagatttgcgttttacgagcccttcagtcaaaacatattgttaaactggtggacatattcaacgtcgacagttccattatcatagcaatggagtacttgcagaggagcttatcggacgttctgaaagacatagaacggcccttaaccaccccacagattaaactgtacacgaaaatgatcctgatgggtgtggagaccatgcattcgaaccgaatcatgcaccgggacttaaaacccgccaatttgctcatagacgaccacggcgtgttaaaaatcgccgacttcggtctgtctcgaatttacaacaaggaaaaagaccgtcaatatacccaccaagtggggacgcggtggtaccgagcccctgaacttttatacggctcgcaaaagtacaccccagctgtggacatttgggccgttgggtgcattctagccgaaatgatcaacaaacaacctttatttcccggggagacggacattgcccaactcgccatagtcattgcaactttggggaccccaaatgaggaaatctggcccggactgacatcgcttcctgactacaataaaatcgcttttacacacagcgatggccagacctggaattccaaatttcccgattgtgacgaagctacggttgatttgattcaacagtttttgcattacgaccaaagcaaacggattggggcaaaaaaagccttaaatcaccgatttttcttcgtaaagccgctcccttgtgatctggaccaaatgcccaaacctagcgaagtaaagactgaaacttgttggcttgccaaagattttgatgatattgtaaacatgaataaagttgtacacatctga

SEQ ID NO: 62836 - protein, 328 aa, Tribolium castaneum
MENYKLLGKVGKGAHGLVFKALDLQNNKTVALKQIAVVNVTNGIPKNTMREICVLRALQSKHIVKLVDIFNVDSSIIIAMEYLQRSLSDVLKDIERPLTTPQIKLYTKMILMGVETMHSNRIMHRDLKPANLLIDDHGVLKIADFGLSRIYNKEKDRQYTHQVGTRWYRAPELLYGSQKYTPAVDIWAVGCILAEMINKQPLFPGETDIAQLAIVIATLGTPNEEIWPGLTSLPDYNKIAFTHSDGQTWNSKFPDCDEATVDLIQQFLHYDQSKRIGAKKALNHRFFFVKPLPCDLDQMPKPSEVKTETCWLAKDFDDIVNMNKVVHI

SEQ ID NO: 62837 - DNA, 921 bp, Tribolium castaneum
  CDS (1)..(921)
atgtcgaaacagggggccaacatggatgacttcctcaagatcgaaaaaattggtgaaggcacttacggtgtggtgtacaagggcaaaaacaagaagacgggtcagctagtcgcaatgaaaaaaatccgactgcaacccgaagacgaaggtgtgccttccacagccattcgcgaaatctccctcctgaaggagctcacacaccccaatatagtctccctggaagacgtgatgatggaagagaatcgtctttacctaatttttgaatttttgtcaatggacttaaagaagtacctcgacaccatcccacagggctcctacatggacccccaactcgtcaaaagctacctctaccaaatcaacgaagccattctcttctgccaccaaagacgagtccttcatcgcgaccttaagccccaaaatctgctcatcaactccgaaggggctatcaaagtggccgattttggactagggcgcgcctttggggtcccggttcgcgtttacacgcacgaagttgtcactttgtggtaccgcgcccccgaggtgctcctcggctctgcacgttactcgtgccctattgatatttggtctctgggctgcattttcgccgaaatggccaacaaaaaagcccttttccaaggcgactccgaaatcgaccaacttttccgcatttttcgggttttgaaaacaccaagcgacgaaatctggccaggggtgtccacattacctgaatataaggttacgttccctaattggaaatcatgtactttggaaagtcaggtaaaaaatatgactagcgacgctatagatttgttgaaacaaatgctgatttatgacccggccaagaggatttcggccaaaaaaatcgctttacatccgtatttgcaaaaggttgatacgtcaataaagccgatccttaaataa

SEQ ID NO: 62838 - protein, 306 aa, Tribolium castaneum
MSKQGANMDDFLKIEKIGEGTYGVVYKGKNKKTGQLVAMKKIRLQPEDEGVPSTAIREISLLKELTHPNIVSLEDVMMEENRLYLIFEFLSMDLKKYLDTIPQGSYMDPQLVKSYLYQINEAILFCHQRRVLHRDLKPQNLLINSEGAIKVADFGLGRAFGVPVRVYTHEVVTLWYRAPEVLLGSARYSCPIDIWSLGCIFAEMANKKALFQGDSEIDQLFRIFRVLKTPSDEIWPGVSTLPEYKVTFPNWKSCTLESQVKNMTSDAIDLLKQMLIYDPAKRISAKKIALHPYLQKVDTSIKPILK

SEQ ID NO: 62839 - DNA, 1131 bp, Tribolium castaneum
  CDS (1)..(1131)
atgaatatgcgagataaagagaaatacattgaaaatttccatttcccgttctgtgatgaatcggaaaaatacgagaaaattgcgaaaattggccaaggaacgttcggtgaagtgttcaaggcgagggacaaaagtaatcctaagaaattcgtagcaatgaaaaaagtgttaatggacaatgaaaaagagggctttccaatcacagctttgcgcgaaatacgaattttgcaactattgaaacacgaaaacgttgttaatcttatagaaatatgccaaactaaggctgcataccgcaacagatacaagtcaacgttttatttagtgttcgatttttgtgaacacgacttggccgggttgttgtcaaacgtccacgttaagtttagtctaggagagataaaaaaagtagtgcaacaattatttaacggtctgtattacatacacagcaacaaaattcttcatagagatatgaaagccgccaatgtgttaattacaaagaatggtgttttaaaattggccgattttggcctagctcgtgcatttagtaccaataagaatggactgccaaatagatttacaaatcgtgtcgttacgttatggtataggcctccagaactgttgttaggtgaaagaaactacggccccccagttgatttgtggggggctggctgtattatggccgaaatgtggacaaggtcccccataatgcagggcaacagcgagcaacaacagctcactctgatttctcaactttgtggcaccatctgcccccaggtctggccaggagttgagaatctggagttgtacaagaagatggaactccccgtccaaaagcgaaaagtgaaagagaggctgaagcactacatgaaagacccgtacgcttgtgatttactcgataagctgttggtcctcgaccccgccaaacgggccgatgctgatacggccctcaaccatgactttttctggactgacccaatgccatgcgatttgagcaaaatgttagccactcacactcaaagcatgtttgaatatttggctccgccgagaagaccgacacaaatgaggcatcattcgttgccaagaccgacaacttccgctgtgcaagacagcggataccaagatagggttttttag

SEQ ID NO: 62840 - protein, 376 aa, Tribolium castaneum
MNMRDKEKYIENFHFPFCDESEKYEKIAKIGQGTFGEVFKARDKSNPKKFVAMKKVLMDNEKEGFPITALREIRILQLLKHENVVNLIEICQTKAAYRNRYKSTFYLVFDFCEHDLAGLLSNVHVKFSLGEIKKVVQQLFNGLYYIHSNKILHRDMKAANVLITKNGVLKLADFGLARAFSTNKNGLPNRFTNRVVTLWYRPPELLLGERNYGPPVDLWGAGCIMAEMWTRSPIMQGNSEQQQLTLISQLCGTICPQVWPGVENLELYKKMELPVQKRKVKERLKHYMKDPYACDLLDKLLVLDPAKRADADTALNHDFFWTDPMPCDLSKMLATHTQSMFEYLAPPRRPTQMRHHSLPRPTTSAVQDSGYQDRVF

SEQ ID NO: 62841 - DNA, 927 bp, Tribolium castaneum
  CDS (1)..(927)
atgattctgctacccgagagcctttccgcgatgcagaaatatgaaaagttggagaaaatcggcgaaggcacttacggcaccgtctttaaggcaaaaaaccgcgaaacccacgaaatcgtagctctcaaaagggtgcgcttggacgacgatgacgagggggtgccttcctcagctttacgggaaatatgcttactgaaggaactcaaacacaaaaacatcgtccgtttatatgatgttctccacagtgataagaaattgactctagtttttgaacactgtgatcaagatctcaagaagtatttcgatagcttgaacggtgatattgacttagacgtagttaaatccttcatgtaccagttactaagaggtctagcgttctgccatagtcataatgtgttacacagagacctgaaaccacaaaatttgctcattaacaaaaacggcgagttgaagttggccgactttgggctggctagggcgttcggaatcccggtgaagtgttactcggccgaagtggtcaccttgtggtaccggcccccggatgtcttgtttggggccaaactgtacaccacttccattgacatgtggtcagcggggtgtatttttgcggaattggcaaatgccggtcgacccttattcccgggttccgatgttgatgaccagttgagacggatttttaaattactagggacccccactgaagaaacttggagcggaatgactcaacttcccgattataaaccgtttccgctctatcagcctaacatgagtttatctcaggttgtgcctaaattagggaacagaggtagagatcttctgcagagactactagtttgtaaccccatgggaaggatgtccgcagacgacgctatggcgcacgcttatttcagtgatttaaatccagcaattaaaaatgaccgatgctaa

SEQ ID NO: 62842 - protein, 308 aa, Tribolium castaneum
MILLPESLSAMQKYEKLEKIGEGTYGTVFKAKNRETHEIVALKRVRLDDDDEGVPSSALREICLLKELKHKNIVRLYDVLHSDKKLTLVFEHCDQDLKKYFDSLNGDIDLDVVKSFMYQLLRGLAFCHSHNVLHRDLKPQNLLINKNGELKLADFGLARAFGIPVKCYSAEVVTLWYRPPDVLFGAKLYTTSIDMWSAGCIFAELANAGRPLFPGSDVDDQLRRIFKLLGTPTEETWSGMTQLPDYKPFPLYQPNMSLSQVVPKLGNRGRDLLQRLLVCNPMGRMSADDAMAHAYFSDLNPAIKNDRC

SEQ ID NO: 62843 - DNA, 906 bp, Tribolium castaneum
  CDS (1)..(906)
atgcctccagaaaagaccctttacgatgaaatggacagtataggccgaggtgcttacgggatcgtctacaaaggcaagcacaaaaccaccggcaagatcgtagccttgaaaaaaatcagcgtgcctctgaacgacgatggggtccccatgaacaccctccgggaaatcggggtcctcaagcagctcaactcacacgagcaccccaacattgtccagctcctggacgtctgccatggcatccagaccgagcgcgaattgttaatgtatttagtgttcgaacacgtggaccaggatctcgccctctacatggaaaagtacgccaaacgtggtggcttctcctccgtacaaatccgtaacatgtctcaggaaattctcagaggtgttgacttcttgcacagtaataggatagttcatagggacttaaagccgcaaaacttgttggtgaccaacgagggccacatcaagattgcggattttggcttggccaagacctacgattttgaaatgaggctgacctctgttgttgttacgttgtggtacagagcgcctgaagtattgttaggagtgccgtatgcgacgcctgtggacgtgtggtccatcggatgcatcatagcggagctttttagtctaaaaccgctgttttatggcagttctgagagcgatcagttgagcaaaattttgagaattttggggaagccgccgcagcacgagtggcctgataacagcctctccatcaattgggattcttttgataacaccgagaggatcgattttaaagaaatcatccagaatttgggtgacagcgcacatgacttgcttacgaaaatgcttacttttgatcctaaaaaacgaatgagtaccttagatgccctcaatcatgtgtatttcactgaggaaccgatataa

SEQ ID NO: 62844 - protein, 301 aa, Tribolium castaneum
MPPEKTLYDEMDSIGRGAYGIVYKGKHKTTGKIVALKKISVPLNDDGVPMNTLREIGVLKQLNSHEHPNIVQLLDVCHGIQTERELLMYLVFEHVDQDLALYMEKYAKRGGFSSVQIRNMSQEILRGVDFLHSNRIVHRDLKPQNLLVTNEGHIKIADFGLAKTYDFEMRLTSVVVTLWYRAPEVLLGVPYATPVDVWSIGCIIAELFSLKPLFYGSSESDQLSKILRILGKPPQHEWPDNSLSINWDSFDNTERIDFKEIIQNLGDSAHDLLTKMLTFDPKKRMSTLDALNHVYFTEEPI

SEQ ID NO: 62845 - DNA, 894 bp, Drosophila simulans
  CDS (1)..(894)
atggaggattttgagaaaattgagaagattggcgagggcacatatggcgtggtgtataagggtcgcaaccgcctgaccggccaaattgtggcaatgaaaaaaatccgcttggagtccgacgacgaaggcgttccatcaaccgcgatcagagaaatttcgttgcttaaggagttgaaacatgagaacattgtctgtttggaggatgttttgatggaggagaatcgcatatacttgatctttgaattcctatcgatggacctcaagaaatacatggattcgctgccagttgataagcacatggagagtgaattggtccgtagctatttgtaccaaataactagcgccattctcttctgccatcgtcggcgagtacttcaccgtgatcttaagccgcagaacttactaatcgacaagagtggcctcataaaagtagccgactttggacttggccgatcctttggcattccggtgcgcatttatacgcacgagattgtgaccttgtggtacagagcgccggaggttctactgggatcaccccggtattcctgtcccgtcgatatctggtccattggatgcatattcgcggagatggcaacgagaaagccgctgttccagggtgactcggaaattgaccagttatttagaatgtttagaattctgaaaacacctaccgaagacatttggccgggcgttacttcgctacccgactataagaacacgttcccctgctggtccacgaaccaattgaccaaccagttgaagaatctcgatgcgaatggtattgatctcattcaaaagatgttaatctacgatccggttcatcgcatttccgcgaaggacattttggagcatccctatttgcaatggttttcaatcgggcttagttcgaaataa

SEQ ID NO: 62846 - protein, 297 aa, Drosophila simulans
MEDFEKIEKIGEGTYGVVYKGRNRLTGQIVAMKKIRLESDDEGVPSTAIREISLLKELKHENIVCLEDVLMEENRIYLIFEFLSMDLKKYMDSLPVDKHMESELVRSYLYQITSAILFCHRRRVLHRDLKPQNLLIDKSGLIKVADFGLGRSFGIPVRIYTHEIVTLWYRAPEVLLGSPRYSCPVDIWSIGCIFAEMATRKPLFQGDSEIDQLFRMFRILKTPTEDIWPGVTSLPDYKNTFPCWSTNQLTNQLKNLDANGIDLIQKMLIYDPVHRISAKDILEHPYLQWFSIGLSSK

SEQ ID NO: 62847 - DNA, 1338 bp, Ustilago maydis
  CDS (312)..(1289)
gactcacgactcacacgaagcaggacgaaacacgaaagctgattgacactgaagctgacgcatcgcagaatcacaccaacaccttgctgctttctaacgttcgacgtaacttgtctggtccggctccactcgccttgactccatcacatcgcttcgccgcaaacacgtatatccacaagcatcagcatcgagtaacatcgagtcctcccgcaacaccgagctcaagttgttctgcatctgcgccccgcccacgcacaccacgctaggaacatcacagcgcctgcagcgtcgatcgccgaggtcgtgacacgatgaactacgtccaactcgaaaagctcggtgagggcacctacgctactgtctacaagggtcgatctaggctcaataacgagatcgtggccctcaaggagattcacctcgatgctgaagagggaacaccgtccactgcgatccgcgaaatctcgctcatgaaggagttgcgccacaccaacatcgtacgcctgtacgacgtcattcataccgagtccaagctcatgctcgtgttcgagtacatggagcaggacctgaaaaagtacatggagattcatggccaccgatgcgcccttgatccagtcacaacacgatccttcatgttccaactgctcaaaggaacagccttctgtcatgagaatcgagtgctgcaccgcgatctcaaaccacagaacctgctcatcaacaagcgtggcgagctcaagctggccgactttggtctggctcgtgcctttggtattcccgtcaacaccttttctaacgaagtcgtcactctgtggtaccgtgcacctgatgtgctgctaggatcgcgtacttattcgacctcgatcgacgtttggagcgcaggctgcatcatggctgagatgatctctgggctgccactcttccgtggacgtgacaacaatgaccagctcaaccaaattttgcgcatcctcggcacgccagacgacaatacaatgaagagactcgttaacgactcgcccgaaatccagatgcgagctttccctcgagttcccagagtgcccttccagaacatgttccccaaagcacaccctctcgcaatcgatttgcttgacaagctgctcaagttcgacccaacgcaacgcatttctgccgatgaagcgcttcgacacccctacttcaccacctcggcggcgatcgctggcctgacacacccgcaaagcaacagccagctcaacgtcggcaatggcggtgcgcctcagcaaggagcgtatcagcaaggtgttccaggacagtaattcaactgaggaatgattgcagtcagctaaagcactggtcatgctaaga

SEQ ID NO: 62848 - protein, 325 aa, Ustilago maydis
MNYVQLEKLGEGTYATVYKGRSRLNNEIVALKEIHLDAEEGTPSTAIREISLMKELRHTNIVRLYDVIHTESKLMLVFEYMEQDLKKYMEIHGHRCALDPVTTRSFMFQLLKGTAFCHENRVLHRDLKPQNLLINKRGELKLADFGLARAFGIPVNTFSNEVVTLWYRAPDVLLGSRTYSTSIDVWSAGCIMAEMISGLPLFRGRDNNDQLNQILRILGTPDDNTMKRLVNDSPEIQMRAFPRVPRVPFQNMFPKAHPLAIDLLDKLLKFDPTQRISADEALRHPYFTTSAAIAGLTHPQSNSQLNVGNGGAPQQGAYQQGVPGQ

SEQ ID NO: 62849 - DNA, 885 bp, Aspergillus niger
  CDS (1)..(885)
atgttttcattccctcaccagggttccttcaagaaattggagaagttgggccagggaacgtatgcaacggtttacaaaggacgcaatcgcgagacgaatgaattagtggccttgaaagaaatcaacctcgatgctgaggaaggcgcaccctcaacggctatccgggaagtctcattgctgagacgtcttacacatgagaatatcttgaccttgcacgatgtaataaatgttgaagacaaattggtgctggtgtttgaatacatggataaggacctcaagcgctacattgacactcatgggggccccctcgatgccgccacggccaagtccttcgtctaccaattgctgcgcggtgtttctttctgtcacgagaacggcatcctacatcgagacctgaagcccgagaacctactactcaatcaggatggacgactaaaacttgctgattttggacttggccgtgcgttcggtatccccatcagcaaattttcgagtgacgtggtcactctttggtaccgtcctccagatgtgctgctcggaagtcgcacgtacacgaccagcatagacatctggtccgtcggatgtatcatggcggaaatatatacaggttctgcattatttactggaacaacaaatgcggatcaactgttgaagatcttcaatattatgggcacaccaaccgagctcacctggccaggcgtcagtcagttgcccgaatacagaaacgatttcccgccttgctccccacaaagtctgcaacaacttataccgtcattagaccctgtagggattgacctcctgggacgcatgttgcaattatgcccagaagcacgcatcagcgccactgatgctttgaatcacccctggttccagggttttacttag

SEQ ID NO: 62850 - protein, 294 aa, Aspergillus niger
MFSFPHQGSFKKLEKLGQGTYATVYKGRNRETNELVALKEINLDAEEGAPSTAIREVSLLRRLTHENILTLHDVINVEDKLVLVFEYMDKDLKRYIDTHGGPLDAATAKSFVYQLLRGVSFCHENGILHRDLKPENLLLNQDGRLKLADFGLGRAFGIPISKFSSDVVTLWYRPPDVLLGSRTYTTSIDIWSVGCIMAEIYTGSALFTGTTNADQLLKIFNIMGTPTELTWPGVSQLPEYRNDFPPCSPQSLQQLIPSLDPVGIDLLGRMLQLCPEARISATDALNHPWFQGFT

SEQ ID NO: 62851 - DNA, 1164 bp, Aspergillus niger
  CDS (1)..(1164)
atggacatggacggtcgcgaccgctcaaaaagcaggacattgcaacctccaaccgccgattatctggatctcatctctaacttggcctctcccaagacttttctctttcatcacccacgctccacctctcgttctcatccaactcctgctgcgcagagtaccaccgtcgcaccatcgaccaccatggacaagcagcagcccagctcgttccagcagctggaaaagcttggagaaggcacctatgccaccgtcttcaagggacgcaatcgccagactggcgagctggtcgccctgaaagagatccatctcgattctgaagagggaacgccatctaccgccattcgagaaatatcgttgatgaaggagctgaagcacgagagcatcgtgtcgctctatgatgtgattcacacggagaacaaactcatgctcgtctttgagtacatggacaaggatctgaagaagtacatggatacccgcgccgaccgcggccagttggaccaagccacaatcatgtcattcatgcaccagcttctcaagggcattgcgttttgccatgagaaccgcgtcctccaccgcgatctgaagcctcaaaacctcctcatcaacaagaagggacaacttaaacttggagatttcggtctagcccgcgcctttggcattcccgtcaatactttctccaacgaagtcgtgaccttgtggtaccgtgccccagatgtgcttctgggcagccgcacatacaacacgagcatcgacatctggtctgctggatgtatcatggcggaactctacactggccgtcctctgttccctggcaccaccaacgaagaccagcttatcaagatcttccgcctgatgggaaccccttcggaacgctcatggcccggcatctcccagctcccggagtacaagccaaacttccacgtatatgcgacgcaggatctcagtctcattctcccccagattgaccccctaggtctggatctcttgagccggatgctccagctccggccagagatgcggatcagtgcccaggacgccctgcatcacccctggttccgcgatctcccgcaattgcaggcccaattgcagcaacagcagcagcagcaacaacaacaaatggctggggcgtatggtggcatggttcccccacagcaaacatattga

SEQ ID NO: 62852 - protein, 387 aa, Aspergillus niger
MDMDGRDRSKSRTLQPPTADYLDLISNLASPKTFLFHHPRSTSRSHPTPAAQSTTVAPSTTMDKQQPSSFQQLEKLGEGTYATVFKGRNRQTGELVALKEIHLDSEEGTPSTAIREISLMKELKHESIVSLYDVIHTENKLMLVFEYMDKDLKKYMDTRADRGQLDQATIMSFMHQLLKGIAFCHENRVLHRDLKPQNLLINKKGQLKLGDFGLARAFGIPVNTFSNEVVTLWYRAPDVLLGSRTYNTSIDIWSAGCIMAELYTGRPLFPGTTNEDQLIKIFRLMGTPSERSWPGISQLPEYKPNFHVYATQDLSLILPQIDPLGLDLLSRMLQLRPEMRISAQDALHHPWFRDLPQLQAQLQQQQQQQQQQMAGAYGGMVPPQQTY

SEQ ID NO: 62853 - DNA, 972 bp, Aspergillus niger
  CDS (1)..(972)
atggagaactaccagaagatcgagaagattggagaaggaacctatggcgttgtctacaaggctcgcgagctcacccatcccaatcggattgtcgccctcaagaagattcggctagaggcggaggatgaaggcgttcctagcacagccatccgtgaaatctccctactcaaagagatgagcgatcccaatattgtgcgactcctgaatattgtgcatgccgatggccacaagctctatctcgtcttcgaattcctcgatctcgacctcaagaagtatatggaggctcttcctgtcagcgaaggtggacgtggcaaagctcttccggaaggctctgctttgagcaagaacatgggccttggcgatgccatggtcaagaagttcatggctcagctagtggagggtattcgttactgccacagccaccgtattttacaccgtgatctcaagccccagaaccttctgatcgaccgcgatggcaatcttaagctggcggactttggattggctagagctttcggtgttcctctgagaacctacacccatgaggttgtcaccctttggtaccgctcccctgagattctcttgggtggtcgtcagtactcgaccggcgtcgacatgtggtccgctggtgccattttcgcggagatgtgcactcgcaagcctttgttccctggtgattcggagattgatgagatcttcaagatcttccgtctccttggtaccccagatgaagctatctggcccggcgtcacctctttccccgacttcaaacccactttccctaaatggaaacgtgatgaaacccgtgcactcgtccctgaccttgaagaggatggtctggacctcctcgatgctctgctcgagtatgaccctgcacgacgtatctccgccaaacaggcctgcatgcatccctacttccggaacggcagtgcctactactcaggacgtacccggaggaatggttttaactag

SEQ ID NO: 62854 - protein, 323 aa, Aspergillus niger
MENYQKIEKIGEGTYGVVYKARELTHPNRIVALKKIRLEAEDEGVPSTAIREISLLKEMSDPNIVRLLNIVHADGHKLYLVFEFLDLDLKKYMEALPVSEGGRGKALPEGSALSKNMGLGDAMVKKFMAQLVEGIRYCHSHRILHRDLKPQNLLIDRDGNLKLADFGLARAFGVPLRTYTHEVVTLWYRSPEILLGGRQYSTGVDMWSAGAIFAEMCTRKPLFPGDSEIDEIFKIFRLLGTPDEAIWPGVTSFPDFKPTFPKWKRDETRALVPDLEEDGLDLLDALLEYDPARRISAKQACMHPYFRNGSAYYSGRTRRNGFN

SEQ ID NO: 62855 - DNA, 927 bp, Aspergillus niger
  CDS (1)..(927)
atgacacgaacgtctcccaactccttccaacagctggaaaagctcggcgaaggcacctacgccacggtcttcaaaggccgcaataccaaaactggtgagctcgtcgcactcaaagaaatcgccctcgacacagaagaaggcacaccctcgacggcgatccgcgaaatttccctaatgaaagaactccaccacgagaacatcctccgcctccacgatgtcatccatgctgagaacaagctcatgctcgtcttcgaatacatggacaaagatctgaaacgctacatggacaccaacggcggccagctcaaaccctccgtcatcaaatccttctcattccaactcctccgcggcgtcgccttctgccacgaaaaccgcatcctccaccgcgacctcaagccccagaatcttctcgttaacaacaaggggcaactaaaactcgcagacttcggtctcgcccgcgcattcggtatcccggtgaacaccttctccaatgaagtagttacgctgtggtaccgcgcgccagacgtgttactagggagtcgaagctacagcacaagtatcgacatatggtccattggatgtatcatcgcagagatgtctatgggccggtcattgttccccggatcaaataacgaggaccaactgcagaagatttttaaggtcatgggaaccccatgtgagacgtcgtggcctggtgtgtctaggttccctgagtatcgggcggatttccccctgtatgtggagcaggacttgtgggcactgatgcctaggatggaagaagatggaatggccctcgtgagggaaatgttgaggttgaagcctgagaggagggttagtgctgcagacgcgttgagacattcttggtttactgatggtcggttttatgccgaggagggtgatccccacaattatctcttgtcaggatga

SEQ ID NO: 62856 - protein, 308 aa, Aspergillus niger
MTRTSPNSFQQLEKLGEGTYATVFKGRNTKTGELVALKEIALDTEEGTPSTAIREISLMKELHHENILRLHDVIHAENKLMLVFEYMDKDLKRYMDTNGGQLKPSVIKSFSFQLLRGVAFCHENRILHRDLKPQNLLVNNKGQLKLADFGLARAFGIPVNTFSNEVVTLWYRAPDVLLGSRSYSTSIDIWSIGCIIAEMSMGRSLFPGSNNEDQLQKIFKVMGTPCETSWPGVSRFPEYRADFPLYVEQDLWALMPRMEEDGMALVREMLRLKPERRVSAADALRHSWFTDGRFYAEEGDPHNYLLSG

SEQ ID NO: 62857 - DNA, 903 bp, Pneumocystis carinii
  CDS (1)..(903)
atggagcaatatcagaggttagagaagattggagaaggaacttatggagttgtttataaagcaaaggatcttgaaagtggtacaattgtagctcttaagaaaatccgattagaagcagaagatgagggagttcctagtacagcaattcgtgagatatcacttttgaaagagatgcacaatgataatgttgtaagacttttgaatataattcatcaagagtcacgtttatatcttgtttttgaatttcttgatcttgatttaaaaaagtatatgaatagtattccaaaggacatgatgcttggtgcagaaatgattaaaaagtttatgtcacaacttgtatcaggtgttaaatattgtcattctcatcgtattcttcatcgtgacttgaaaccacaaaatcttcttatagatcgagaaggaaatcttaaattagcagattttgggcttgcaagggcgtttggtgttccattgcgtggttatactcatgaagttgttacactttggtatcgtgctccagaagttcttttaggtggtcgacaatatgcaacagcgcttgatatatggagcattggatgtatttttgcagaaatggctacaaaaaagccattatttccaggtgattctgaaattgatgaaatatttagaatatttagaatattagggactccagatgaaaattcttggcctggtattacatcttatccggattttaaggcaacttttccaaaatggtcaccaaaaaatcttggagaattaattacagaacttgatagtgatggaatagatttattacagaaatgtcttagatattatcctgctgaacgtattagcgctaaaaaagctctcgatcatccttattttgatgatttcattaatatcaatagatctaatgtggtgctatag

SEQ ID NO: 62858 - protein, 300 aa, Pneumocystis carinii
MEQYQRLEKIGEGTYGVVYKAKDLESGTIVALKKIRLEAEDEGVPSTAIREISLLKEMHNDNVVRLLNIIHQESRLYLVFEFLDLDLKKYMNSIPKDMMLGAEMIKKFMSQLVSGVKYCHSHRILHRDLKPQNLLIDREGNLKLADFGLARAFGVPLRGYTHEVVTLWYRAPEVLLGGRQYATALDIWSIGCIFAEMATKKPLFPGDSEIDEIFRIFRILGTPDENSWPGITSYPDFKATFPKWSPKNLGELITELDSDGIDLLQKCLRYYPAERISAKKALDHPYFDDFININRSNVVL

SEQ ID NO: 62859 - DNA, 903 bp, Pneumocystis carinii
  CDS (1)..(903)
atggagcaatatcagaggttagagaagattggagaagggacttatggagttgtttataaggccaaggatcttgaaagtggcacaattgtagctcttaaaaaaatccggttagaggcagaagatgagggagttcctagcacagcaattcgtgaaatatctcttttgaaagaaatgcacaatgataatgtcgtaagacttttgaatattattcatcaggaatcacgtctatatcttgtttttgaatttcttgatcttgatttgaaaaaatatatgaatagtattccaaaagacatgatgcttggagctgaaatgatcaaaaaatttatgtctcaacttgtatcaggtgttaaatattgtcattctcatcgtattcttcatcgtgacttgaagccccaaaatcttcttattgatcgagaaggaaatcttaaacttgctgatttcgggcttgctcgggcatttggtgttcctttacgtggttatactcatgaggttgttacactttggtatcgtgctccagaagttcttttaggtggtcgacaatatgcaacagcacttgatatttggagcattggatgtatttttgctgaaatggctacaaaaaaaccgttatttccaggcgattctgaaattgatgaaatattcagaatatttagaatattaggaacacctgatgaaaattcttggcctggtattacatcatatcctgattttaaagcaacttttcccaaatggtcaccaaaaaatcttggagaattaattacagaacttgatagtgatggaatagatttattacagaaatgtctcagatattatcctgctgaacgtattagtgcaaaaaaggctctcgatcatccatattttgatgatttcattaatctcaatagatctaatgtggtgctatag

SEQ ID NO: 62860 - protein, 300 aa, Pneumocystis carinii
MEQYQRLEKIGEGTYGVVYKAKDLESGTIVALKKIRLEAEDEGVPSTAIREISLLKEMHNDNVVRLLNIIHQESRLYLVFEFLDLDLKKYMNSIPKDMMLGAEMIKKFMSQLVSGVKYCHSHRILHRDLKPQNLLIDREGNLKLADFGLARAFGVPLRGYTHEVVTLWYRAPEVLLGGRQYATALDIWSIGCIFAEMATKKPLFPGDSEIDEIFRIFRILGTPDENSWPGITSYPDFKATFPKWSPKNLGELITELDSDGIDLLQKCLRYYPAERISAKKALDHPYFDDFINLNRSNVVL

SEQ ID NO: 62861 - DNA, 906 bp, Hemicentrotus pulcherrimus
  CDS (1)..(906)
atggaagactttaccaagattgaaaagttgggagaaggtacatatggtgttgtgtacaaaggcaggcacaaaaggactggaaagattgttgctttgaagaagatccgactggagagcgaagaggagggggtacccagtaccgccatcagagaaatctcactacttaaagagctctatcatccaaatattgttttgttggaagacgttctgatggaacccaataggctgtacttggtctttgaatacctgacaatggacctcaagaaatacatggaatcactcaaaggaaaacagatggatccagcactagtcaagagctaccttcatcagatggtcgacggtatccttttctgccacagtcgtcgtatcctgcacagagacctcaaaccccagaaccttctcatagacaacaatggcaccatcaagctggcagattttgggcttgctagagcgttcggtatcccagtcagagtttatactcatgaggtcgtcactctatggtatcgtgcccctgaggttctcctgggttccacgaggtacgcctgcccgatcgacatgtggagtttgggctgcatctttgccgagatggtcaccaagagacccctcttccacggcgactccgagatcgatcaactctttaggatattcaggacccttggcacaccaacggatgagatatggcccggtgtgacccagctccaggactacaaatcaaccttccccatgtggaccaagcccaacatcaagggcgctgtcaagggcatggacgaggaaggactggatctgctagagaaaatgcttatatatgatcctgccaagcgtattacagctaaagccagcatgaggcatccctacttcgacaatattccagacctttcagaccgtctccagcccatcaggagctag

SEQ ID NO: 62862 - protein, 301 aa, Hemicentrotus pulcherrimus
MEDFTKIEKLGEGTYGVVYKGRHKRTGKIVALKKIRLESEEEGVPSTAIREISLLKELYHPNIVLLEDVLMEPNRLYLVFEYLTMDLKKYMESLKGKQMDPALVKSYLHQMVDGILFCHSRRILHRDLKPQNLLIDNNGTIKLADFGLARAFGIPVRVYTHEVVTLWYRAPEVLLGSTRYACPIDMWSLGCIFAEMVTKRPLFHGDSEIDQLFRIFRTLGTPTDEIWPGVTQLQDYKSTFPMWTKPNIKGAVKGMDEEGLDLLEKMLIYDPAKRITAKASMRHPYFDNIPDLSDRLQPIRS

SEQ ID NO: 62863 - DNA, 1260 bp, Allium cepa
  CDS (81)..(965)
ctctatattattttgtgggagaattttgcgctggattcgttcatcaaaccctagctacaacgcagtatggtttggattgaatggatcagtatgagaaagtggagaagattggagaaggaacttatggagttgtttacaaagcacgtgatcggctgactaatgaaacgattgctttgaagaagattaggttggagcaggaagatgagggagttcctagtactgccattagagaaatatcactgttgaaggaaatgcagcatgctaacattgtcaggctgcaagacgtagttcatagtgagaagcgaatatatcttgtgttcgagtatctagatctggaccttaagaagcatatggattcatgcccagattttgctaaagattctcgtttggctaaaacatttctctatcagcttctccgaggaattgcttattgtcactcacaccgagttcttcatcgtgacttaaagcctcaaaatttattgatcgacagacgtaccaattcattaaagcttgctgactttggacttgcaagggcatttggtatcccagtccgaaccttcacacacgaggttgtgacactgtggtatagggcacctgaaatcctcttaggtgctcgtcagtattctactcctgtagacatatggtctgtgggatgtatctttgctgaaatggtgaaccaacgacctctattccctggggactctgagatcgacgagctgttcaaaatatttagaattatgggtaccccaaacgaagacacatggccaggtgttacttccttgcccgacttcaagtctgcttttccaaagtggccggcaaaggacttggcaactatagttccaaagcttgattcagctggaattgatcttctttataaaatgctgcaccttgaaccgagcaaaagaatcactgctcggaaggctcttgagcatgaatacttcagggatcttgggacaattccatgaaacaactgagcacatccttccccattgtatattattatgaccattgcatcaacctttgcagattggtatgtttgagtgccgtcctttgttatctttcggttttttattcaatcttattcaagtttgtgtgttttagacagctagggagccttcacttatccttatgttgtagaaaatactgtctcatcttttttgcttcgttttccttaccgttgtgtgttctaaaagacaattttatttgtactactaatattcttgtgctaatgttactccaatttttgagtgatccttgtat

SEQ ID NO: 62864 - protein, 294 aa, Allium cepa
MDQYEKVEKIGEGTYGVVYKARDRLTNETIALKKIRLEQEDEGVPSTAIREISLLKEMQHANIVRLQDVVHSEKRIYLVFEYLDLDLKKHMDSCPDFAKDSRLAKTFLYQLLRGIAYCHSHRVLHRDLKPQNLLIDRRTNSLKLADFGLARAFGIPVRTFTHEVVTLWYRAPEILLGARQYSTPVDIWSVGCIFAEMVNQRPLFPGDSEIDELFKIFRIMGTPNEDTWPGVTSLPDFKSAFPKWPAKDLATIVPKLDSAGIDLLYKMLHLEPSKRITARKALEHEYFRDLGTIP

SEQ ID NO: 62865 - DNA, 900 bp, Sphaerechinus granularis
  CDS (1)..(900)
atgaataactttgaaaagattgagaagattggcgaaggcacttatggagtggtttacaaggcaaaagacctaaaatctggaaaaaccgtcgcactgaagaaaatacgattggatacagaatcggaaggtgtcccaagtactgccatcagagaaatcgcactcttgaaggaactggaccacaagaatatagtaaaattacatgatgtggtgcacagtgataagaagctgtatcttgtctttgagttcatgaaccaggatctcaagaaatacatggatattgcacctccgtctggtctaccaacagctttagtcaagagttatcttcagcaacttctacatggtatagcattctgccatgcacaccgtgtccttcacagagacctcaagcctcagaatctgctcattgacgcagatggccacatcaaacttgctgattttggactagcaagagcatttggggttcctgtcaggacatacactcatgaggttgtcacattatggtatcgtgctcccgaaatcttactaggctgcaggttttactctacagcggtggacatctggagtataggatgtatctttgtagagatgataacaagaagagctctattccctggtgattctgaaattgaccagctcttcaggatattccgaacaatgggcactccagatgaaaaactctggcctggggtcacctctctacccgactacaaaaccagtttcccaagatggtcacctcaggatttcaacaagatagtccccatgctcagtaaagatggcaaggacttactcaagtgtatgctgtgctacgaaccagacaagaggatatcagccaagacagctctctcacatccatatttcaaggatgttaaactggtgccgcctcctcatcttccaacatga

SEQ ID NO: 62866 - protein, 299 aa, Sphaerechinus granularis
MNNFEKIEKIGEGTYGVVYKAKDLKSGKTVALKKIRLDTESEGVPSTAIREIALLKELDHKNIVKLHDVVHSDKKLYLVFEFMNQDLKKYMDIAPPSGLPTALVKSYLQQLLHGIAFCHAHRVLHRDLKPQNLLIDADGHIKLADFGLARAFGVPVRTYTHEVVTLWYRAPEILLGCRFYSTAVDIWSIGCIFVEMITRRALFPGDSEIDQLFRIFRTMGTPDEKLWPGVTSLPDYKTSFPRWSPQDFNKIVPMLSKDGKDLLKCMLCYEPDKRISAKTALSHPYFKDVKLVPPPHLPT

SEQ ID NO: 62867 - DNA, 1061 bp, Dunaliella tertiolecta
  CDS (47)..(991)
ttgaggtccagtcaaacgtgtaagcagcaacccagttgctggcgggatggacgcctacgagaagctggagaaaatcggggaggggacctacggcaaggtctacaaggccagggacatcaacaccggcaagctggtggcgctgaagaagacgcgcttggagatggaggaggagggcgtgccctcgaccacgctgcgagaggtatccctgctactgatgctgagcgagagcaaccacgtcgtgaagctgattgctgtagaacacgttgaggagaatggcaagccctgcctgtacctggtgttcgagtacttaagcacagacatgaagaagtggatggacaggaatggcagggggccagcccacccgctgccaaaaccagccatcaagagccttacgtaccagctgattaagggcctagcgcactgccacaagcacggtgtcatgcaccgcgacttgaagccccagaacttattggtggatgacagcatcatgtgctgtaagattgctgacttgggattgggccgcgccttcagtatccccatcaagagctatacacatgagattgtgaccttgtggtaccgagctcctgaggttttgctgggctctacacactattcaacgcctgtagacatgtggagcgtgggctgcatctttgccgagctcgtgcggaagacacctctattccctggagactgcgaattgcaacaactgctgcatatcttcaagctgcttggaacgccaaatgaagaagtctggcctggagtgagcaagctccgcgactggcacgagttcccccagtggcacccacaagacctgtcacgtatcttccccacgctggagcctgagggtgtggatctgcttaagaggatgattgagtacgaccctgccaagcgcatctcggccaaggaggccctgaagcacccctactttgatgaccccatgatccgggaggtggatcagcaagagaaccccgaggtgcgagcccgagactgagctcaaccgcggacgtttggctttgctccccacctttctctttttgtagaatatatcttcagtgcatgcc

SEQ ID NO: 62868 - protein, 314 aa, Dunaliella tertiolecta
MDAYEKLEKIGEGTYGKVYKARDINTGKLVALKKTRLEMEEEGVPSTTLREVSLLLMLSESNHVVKLIAVEHVEENGKPCLYLVFEYLSTDMKKWMDRNGRGPAHPLPKPAIKSLTYQLIKGLAHCHKHGVMHRDLKPQNLLVDDSIMCCKIADLGLGRAFSIPIKSYTHEIVTLWYRAPEVLLGSTHYSTPVDMWSVGCIFAELVRKTPLFPGDCELQQLLHIFKLLGTPNEEVWPGVSKLRDWHEFPQWHPQDLSRIFPTLEPEGVDLLKRMIEYDPAKRISAKEALKHPYFDDPMIREVDQQENPEVRARD

SEQ ID NO: 62869 - DNA, 1457 bp, Solanum lycopersicum
  CDS (134)..(1018)
ttgactgtagtccaaacattttggtaacaccgtagaagtacgccgacacttgcctgtcgcctcctccccgcttcacgaacggcgatttcgtcctcttttcccgaccaaagggagtccattgagtttgaaatagatggaccagtatgaaaaagttgagaagattggggaaggaacatatggtgtagtgtacaaggctcgtgatcgtgtaactaatgaaactattgcactgaagaaaataaggttggagcaggaagacgagggggtaccaagcacagctattagagaaatatctctcttgaaagagatgcaacatgctaatattgtgaggttgcaggatgtggtgcacagtgaaaagcgattgtatctagtgtttgaatatcttgacttggacttgaagaagcacatggattcgtgtcctgaattctctaaggatccacgtctggttaaaatgttcttgtatcaaatactccgtggtattgcttattgtcattctcatagagttcttcatagagatttgaagcctcagaacttactaatagatcgacgtacaaatgctttaaagctggcagactttggtttggctagagcatttggtattcctgtcagaactttcactcatgaggtggtgacattgtggtacagggcaccagaaatactgcttggatcacgccattactctactcctgttgatgtgtggtcagttggttgcatatttgctgagatggtgaatcagccgcctctgtttcctggtgactctgagattgatgaacttttcaagattttcagagtattgggtactccaaatgaggatacatggcctggagtgacttctctgcctgattacaaatctgccttcccaaaatggcctcctaaggacctggcaattattgtaccaaatgttgatggagcaggccttgatcttcttggtaaaatgctctccttggatcccagtaagagaatcaccgcgaggaatgcccttgagcatgagtacttcaaggatattgggtatgtgccgtgattgtctgccccttcatccagaatgctattgtaaatttggtatgtcatctacaggttttgttctggagaatctgtgtgatctttaggcctttttggcccctcaaagttttattccattgtgtatcctgttccagcacatgtggtcacaattcgtgtccacatgttgtagtatactttcccgtgtaatatccatttggttctattcaggggttcagtatccttgtacaacgaatgcttatttagatacaacaatggatactgtaatgttaaatagattggatttggtgtgtcaattagaagttttgcatagttttgcctggagtggaacaaagcttgagatgattgtccgactcctaggttatgccagtgcatttcttgatgacgcaggctggttatatcaagttctattttgatgttaaaaaaaaaaaaaaaaaaaaaaa

SEQ ID NO: 62870 - protein, 294 aa, Solanum lycopersicum
MDQYEKVEKIGEGTYGVVYKARDRVTNETIALKKIRLEQEDEGVPSTAIREISLLKEMQHANIVRLQDVVHSEKRLYLVFEYLDLDLKKHMDSCPEFSKDPRLVKMFLYQILRGIAYCHSHRVLHRDLKPQNLLIDRRTNALKLADFGLARAFGIPVRTFTHEVVTLWYRAPEILLGSRHYSTPVDVWSVGCIFAEMVNQPPLFPGDSEIDELFKIFRVLGTPNEDTWPGVTSLPDYKSAFPKWPPKDLAIIVPNVDGAGLDLLGKMLSLDPSKRITARNALEHEYFKDIGYVP

SEQ ID NO: 62871 - DNA, 1176 bp, Solanum lycopersicum
  CDS (112)..(996)
tccgtcttccgccagtaccgccggcagcttttcatctccgatcctccggttcacgaacggcgatatccttctctagacatactcaagagtccatccagtttgacctaatgcatggaccagtatgaaaaagttgaaaagattggtgaaggaacgtacggcgtagtgtacaaagctcgtgatcgtgtaactaatgaaactattgcactgaagaaaattcggctggagcaggaagacgagggtgtgccaagcacggctattagagaaatctccctcttgaaagagatgcagcatggaaacattgtgaggttgcaagatgtggttcacagtgagaagcgattatatctagtgtttgaatatctcgacttggatttgaagaagcatatggactcatgtcctgagttctctaaggatccgcgtctggtaaaaatgtttttgtatcaaattctccgtggaattgcttattgtcattctcatagagttcttcaccgagacttgaagcctcagaacttgctgatagatagacgtacaaacgttctaaagcttgcagactttggattggctagagcattcggcattcctgtcagaactttcacccacgaggtggtgacgttatggtacagggcaccagaaatactgctaggatcacgccactactctactcctgttgatgtttggtcagtaggctgcatatttgctgagatggtgaaccagcggcctctgtttcctggtgactccgagattgacgaacttttcaagattttcagagttgtcggtactccaaatgaggatacatggcctggagtgacttctttgcctgattttaaatctgcttttccaaagtggccatctaaggacttaggaactgtagtacctaatcttggtgcagcaggccttgatctcattggtaaaatgcttaccttagaccccagcaagagaatcactgcccgaagcgcccttgagcatgagtacttcaaggacattgggttcgtaccatgaatcgaggcacctgcatcttcagttctaatgtatatttgagtgtgttatttttaggctttatttgtcctctacttttaattatatttcctccaatgacatccaatctgtttacgattcacgctagatgtttgaagatagtttcactgcaaaaaaaaaaaaaaaaaaaaaaaaaaaaaaaaa

SEQ ID NO: 62872 - protein, 294 aa, Solanum lycopersicum
MDQYEKVEKIGEGTYGVVYKARDRVTNETIALKKIRLEQEDEGVPSTAIREISLLKEMQHGNIVRLQDVVHSEKRLYLVFEYLDLDLKKHMDSCPEFSKDPRLVKMFLYQILRGIAYCHSHRVLHRDLKPQNLLIDRRTNVLKLADFGLARAFGIPVRTFTHEVVTLWYRAPEILLGSRHYSTPVDVWSVGCIFAEMVNQRPLFPGDSEIDELFKIFRVVGTPNEDTWPGVTSLPDFKSAFPKWPSKDLGTVVPNLGAAGLDLIGKMLTLDPSKRITARSALEHEYFKDIGFVP

SEQ ID NO: 62873 - DNA, 1108 bp, Pisum sativum
  CDS (105)..(989)
ctgagactagactatgtgactggaaagaccatacgccgcgctgtctgtgtaacggtttctcgctccgaactagaacatcgctttgaacttagagagtttcttccatggaacagtatgagaaggttgagaaaataggagaaggtacatacggtgtggtgtacaaggctagggaccgtgttaccaatgagaccattgctttgaagaagattcgactcgaacaggaagatgagggggttcctagcactgccataagagagatttctcttttgaaagaaatgcagcatcggaacattgttaggttgcaggatgttgtgcatagtgagaagcgattgtatcttgtttttgagtaccttgacttagatctaaagaagcatatggattcatctccggaattttccaaagatcaacgtcaagtaaaaatgttcctctatcaaattctctgtggcattgcttactgtcattctcatagagttcttcaccgagacctgaaaccacaaaatctgttgatagatcgcagctctaatgcgctaaagcttgcagattttgggttggctagagcatttggaattcctgttaggacatttacacatgaggtggtgacactatggtacagagctccagaaatattgcttgggtcccgtcattattctaccccagttgatgtttggtcagtgggatgcatatttgcagagatgataaaccagcgaccacttttccctggggattctgagattgatgaattgtttaaaatattcagaatcacgggtacaccaaatgaagatacatggcctggagtgacttcattgcctgattttaaatccgcctttcccaagtggccatctaaggacctggcaactctggtcccaagtcttgagccatctggtcttgatctgttatctagtatgcttcgcttggatcccagcagaagaattactgccaggggcgctcttgagcacgaatacttcaaagacattaaatttgtcccctgaagtcctggcttcactgaagaggtgtctatattattatgtgtagcagttatgggtttttggctcagaagtgtgtgctatccgtgctattttcttcaaatgctttggactgagtaatattt

SEQ ID NO: 62874 - protein, 294 aa, Pisum sativum
MEQYEKVEKIGEGTYGVVYKARDRVTNETIALKKIRLEQEDEGVPSTAIREISLLKEMQHRNIVRLQDVVHSEKRLYLVFEYLDLDLKKHMDSSPEFSKDQRQVKMFLYQILCGIAYCHSHRVLHRDLKPQNLLIDRSSNALKLADFGLARAFGIPVRTFTHEVVTLWYRAPEILLGSRHYSTPVDVWSVGCIFAEMINQRPLFPGDSEIDELFKIFRITGTPNEDTWPGVTSLPDFKSAFPKWPSKDLATLVPSLEPSGLDLLSSMLRLDPSRRITARGALEHEYFKDIKFVP

SEQ ID NO: 62875 - DNA, 1240 bp, Brassica napus
  CDS (100)..(984)
tataaactgccttttcatccagagagtgaggatccgtcggtgtcactacatccgatcgtcgccggtgacgtgtttcagcctagtttaatcttggaagtgatggatcagtacgagaaagttgagaagatcggcgaaggaacttacggtgttgtgtacaaggcacgagacaaggtcaccaatgagactattgctttgaagaagatccgcctcgagcaggaggatgaaggtgttcctagcactgccattagagaaatctctcttttgaaggaaatgcagcacagcaacattgtcaagctgcaggatgtagtgcacagcgagaagcgtttgtatcttgttttcgagtatcttgacttggatctcaaaaagcacatggactcttctcctgatttctccaaggatcttcatatgatcaaaaggtatgtttaccagattctccgtggaatcgcgtattgccactctcacagggttctccatcgtgacctcaagccacagaatttgttgattgatcgccgcaccaactcactaaagcttgctgattttggactggccagagctttcggtatccctgtcaggacttttactcatgaggtggttactctctggtaccgagcaccagagatacttctagggtctcatcactactctacaccggttgatatttggtctgtgggatgcatatttgccgagatgatcagccaaaagcccttgtttcctggagactccgagattgatcaactcttcaagatattcagaatcatgggaactccaacggaggatacatggcctggggtaacttcgctgccggattataaatctgctttcccaaaatggaaaccaacggacttggaatcttttgtcccaaacctggatcctaatggcatagatctcctttctaaaatgctgttgatggatccaaccaaaagaatcaacgcaagagccgccctggagcatgattacttcaaggatattggcgtcatgccgtagagaatgcttcaaaaccagtagtctcctacattctctctatatatataagtaattcgatatcttccatcctaagaaaacgaggttaaatacatcaatggtttttgtttattcttttgatttcttttaagtttgttattctctgatacgaaaaatggaaaagatttagagtgtgctttgtttatttcttctaagcttttgagatcattttcttgtgtatctttttaccaagttcagtaatgtatggtatttattttgc

SEQ ID NO: 62876 - protein, 294 aa, Brassica napus
MDQYEKVEKIGEGTYGVVYKARDKVTNETIALKKIRLEQEDEGVPSTAIREISLLKEMQHSNIVKLQDVVHSEKRLYLVFEYLDLDLKKHMDSSPDFSKDLHMIKRYVYQILRGIAYCHSHRVLHRDLKPQNLLIDRRTNSLKLADFGLARAFGIPVRTFTHEVVTLWYRAPEILLGSHHYSTPVDIWSVGCIFAEMISQKPLFPGDSEIDQLFKIFRIMGTPTEDTWPGVTSLPDYKSAFPKWKPTDLESFVPNLDPNGIDLLSKMLLMDPTKRINARAALEHDYFKDIGVMP

SEQ ID NO: 62877 - DNA, 1274 bp, Medicago sativa
  CDS (34)..(969)
ctgaatcacacacactttcgttcaaaattcgaaatggaaaagtacgaaaaactcgaaaaagttggtgaaggaacctatggaaaagtatacaaagcaaaagaactctccacaggccaaatcgtagcactcaaaaaaacccgtctcgaaatggacgaagaaggtgttcctccaacagcacttcgcgaagtttctcttcttcaaatgctctcacaatctctctacatcgttcgtcttctcaacgtcgaacacatcgataaaccccccaaaaacgctacccacaccccctcaaaaccacttctctatcttgtattcgagtatcttgacaccgatctgaagaaattcattgatacttttcgaaaaggcactaaccctagaccgttaccgaatacgctggttcagagttttttgtttcagttgtgtaaaggtgttgctcattgtcatagtcatggtgtgttacatcgtgatttgaaaccgcagaatttgttgctggatcaagcgaaagggattttgaagattgctgatttagggcttgggagagcttttactgtgccgttgaaaagttatactcatgagattgtcactctttggtatagagctcctgaggttttgcttggttcttctacttactctactggtgttgatatttggtctgttggatgtatttttgctgaaatggtgagaagacaggctttgtttccaggggattctgaattccagcagcttctgaacatattcaagcttttggggactccaacggagcagcaatggccaggagttagctctctgcgtgattggcatgtctacccaaggtgggagcctcagaacttggcaagggctgtgccctcattgtcacctgatggagttgacctcctcacgaaaatgctcaagtacaatcctgctgagagaatatctgccaaagcagcacttgatcatccatactttgacagtcttgacaagtctcaatactaatgatggctctagccaaaatgtttggtgcagaagtgtatgttaagcaacattgtatcacagtcagtgaaaataaattcactacatggagtttaaggatctacaaagtggttgttatactgttgtgtaatatttcctcatcatcttggtgatgcaaacaatttactctcggtttagttcatggttgtcatgtccctctctgcaggaccattgaacaactttatttaccttttaaagttgtattatctgtttggattaaacttgaaagtgatagttcgtgaggatgctgctattactttaaaaaaaaa

SEQ ID NO: 62878 - protein, 311 aa, Medicago sativa
MEKYEKLEKVGEGTYGKVYKAKELSTGQIVALKKTRLEMDEEGVPPTALREVSLLQMLSQSLYIVRLLNVEHIDKPPKNATHTPSKPLLYLVFEYLDTDLKKFIDTFRKGTNPRPLPNTLVQSFLFQLCKGVAHCHSHGVLHRDLKPQNLLLDQAKGILKIADLGLGRAFTVPLKSYTHEIVTLWYRAPEVLLGSSTYSTGVDIWSVGCIFAEMVRRQALFPGDSEFQQLLNIFKLLGTPTEQQWPGVSSLRDWHVYPRWEPQNLARAVPSLSPDGVDLLTKMLKYNPAERISAKAALDHPYFDSLDKSQY

SEQ ID NO: 62879 - DNA, 1285 bp, Medicago sativa
  CDS (56)..(1006)
caaaaaccccttttcagaccaaaccctaaccctaattttctcaatcgattcaatcatggagaaacctggtgaaacaatcgcagtagtgttatcggcgaaggaagcattcgagaagctcgagaaagttggagaaggaacgtacgggaaggtttacagagcaagagagaaagctactgggaaaattgttgcgttgaagaagactcgtcttcatgaagatgatgaaggtgttcctccgactacgcttcgcgaggtttcgattttgagaatgctctctcgtgatccacatgttgttaggttgttggatgtgaaacaagggcagaacaaagaagggaaaactgtgttgtatttggtttttgagtatatggatactgatcttaagaaattcattcggagttttcgtcaaactgggcaaaatattccacccccaaccatcaaaggtttgatgtatcaactttgcaagggtgttgctttctgccatggtcatggaattttgcacagggatttgaagcctcacaatctcttgatggaccggaaaacaatgatgctcaaaattgctgatcttggacttgctagagcttttactgtgccacttaagaagtacactcatgagatactaaccctgtggtatagagcacctgaagtccttttgggggctacccattactcaatggctgtggatatgtggtctgttgcctgcattttcgctgaacttgttaccaagacagcactatttcctggtgattctgagctgcaacaactcctccatatattcaggctgttggggactcctaatgaagatgtgtggccaggtgttagtaaactaatgaactggcatgagtaccctcagtggggtcctcaaagtctttcaaaggctgttcccggtttggaagaggctggagtggatttactctctcaaatgctgcaatatgagccctccaagcggctatctgcaaagaaagctatggaacacccttactttgatgacctggacaagacccatctttaggttccaaatgttgttttggatttaggaattcttatcatgcttctctcgagcgcatatcctagtctgttataggatgattaacatttcccgtcttatttttttttgtattcgataaagttgtggattgtaaggatttggatttggatcaatttaaaactctttagtactgaaaaagagtgtatgttgtgtattcatataaaagttgcagtactgttattgttacctataatgaataattggttctacctgacatgaaaaaaaaaaaaaaaaaaaaaaaaa

SEQ ID NO: 62880 - protein, 316 aa, Medicago sativa
MEKPGETIAVVLSAKEAFEKLEKVGEGTYGKVYRAREKATGKIVALKKTRLHEDDEGVPPTTLREVSILRMLSRDPHVVRLLDVKQGQNKEGKTVLYLVFEYMDTDLKKFIRSFRQTGQNIPPPTIKGLMYQLCKGVAFCHGHGILHRDLKPHNLLMDRKTMMLKIADLGLARAFTVPLKKYTHEILTLWYRAPEVLLGATHYSMAVDMWSVACIFAELVTKTALFPGDSELQQLLHIFRLLGTPNEDVWPGVSKLMNWHEYPQWGPQSLSKAVPGLEEAGVDLLSQMLQYEPSKRLSAKKAMEHPYFDDLDKTHL

SEQ ID NO: 62881 - DNA, 1227 bp, Sesbania rostrata
  CDS (150)..(1034)
gcacgagcttctcttgtcttggttgagtgagtgagtgagtctcactgcgccaacaactctgtccctttcttcttcttcttttcagatcttgtatttgtttactcaatttccctcttaagtctcttagctttcaactgagactttgttccatggaacagtacgagaaggtcgagaagattggcgaaggaacatacggcgtcgtttataaggcccgcgaccgcgtcaccaatgagaccatcgctctcaagaaaattcgcctcgagcaagaggacgaaggggttcccagcaccgccatacgcgagatttctctcttgaaagaaatgcagcataggaacattattaggttgcaagatgtagtgcacagcgagaagcgattgtatctggtttttgagtatctggacttagatctaaagaagcacatggattcatctcctgagtttgtgaaagatccgcgacaagtaaaaatgttcctttatcaaattctctgtggcattgcttactgtcattcacatagagttcttcaccgagacttgaaaccacagaatttgttgatagatcgccgtactaattcactaaagcttgcagattttggattggctagggcatttggcattcctgtcaggacatttacacatgaggttgtcacactgtggtacagagctccaggcatattgcttggatctcgtcattattctaccccagttgatatctggtcagtgggatgtatatttgcagagatggtaaaccgacggcctctattccctggtgactctgagattgatgaattgtttaaaatattcagaatcttgggtacaccaaatgaagatacatggcccggagtaacttcattgcctgattttaaatcaacatttcccaagtggccacctaaggatctagcaactgtggttccaaatcttgagcaagctggtcttaatcttctttctagtatgctttgcttggatcccagcaaaagaattaccgccaggagcgctgtggagcatgaatacttcaaagacattaaatttgtaccctgattccatatcttcatggccaaggtgtttatagtaatatgttcagaatttatgggttttgactatgcgagaaatgcgttctatctttgctcttttcttcaatgacttggggctgtcatatttcaattttttgtccttgccaatatttcagaatcaacttgagtgtggaaaaaaaaaaaaaaaaaaaaaaaaaaaa

SEQ ID NO: 62882 - protein, 294 aa, Sesbania rostrata
MEQYEKVEKIGEGTYGVVYKARDRVTNETIALKKIRLEQEDEGVPSTAIREISLLKEMQHRNIIRLQDVVHSEKRLYLVFEYLDLDLKKHMDSSPEFVKDPRQVKMFLYQILCGIAYCHSHRVLHRDLKPQNLLIDRRTNSLKLADFGLARAFGIPVRTFTHEVVTLWYRAPGILLGSRHYSTPVDIWSVGCIFAEMVNRRPLFPGDSEIDELFKIFRILGTPNEDTWPGVTSLPDFKSTFPKWPPKDLATVVPNLEQAGLNLLSSMLCLDPSKRITARSAVEHEYFKDIKFVP

SEQ ID NO: 62883 - DNA, 903 bp, Asterina pectinifera
  CDS (1)..(903)
atggaagactactcgaagattgagaagattggagaaggtacctatggagtggtgtacaagggtcgttgtaagaaggacggcagtattgtggccctgaagaaaatccggctggagagtgaggaggaaggagttcccagcaccgctatccgtgagatctcgctgcttaaggagctgcagcatcccaatgttgtcaacttgagcaatgtcctgatgcaggagagcagattgtacttggtctttgagttcctgaccatggacctcaagaagtacatggagacactacgaggcactaccatggacccagcccttgtcaagagctatctccatcagatagtccagggcatcctgttctgccactgccgtcgggttcttcaccgcgacctgaagccccagaacctgctcatcgacgagaagggcatcatcaagttggccgactttggcctcgcgagggcgtttggtattcctgtccgagtctacacacacgaggtggttaccttatggtacagggccccagaggtcctccttggctcaccaaggtactccacaccggttgacgtctggagcataggctgcatctttgctgagatggtcactaagagaccactgttccacggcgactcggagattgatcaactcttcagaatattcagaacccctggcacacccacggacaagacatggcccggcgtgacagagctcccagatcacaagtcaacattccccaaatggacgactaacaatctcgccaagtctgtcaagacgctgaccctgaggaatgacctcctacagaaaatgctgatctacgacccagccaagcgaatttcatgcaaggccgcactgtcgcacccctacctcaaagacttcgaagggggcacagtcttgcccacaagactaggtcagtag

SEQ ID NO: 62884 - protein, 300 aa, Asterina pectinifera
MEDYSKIEKIGEGTYGVVYKGRCKKDGSIVALKKIRLESEEEGVPSTAIREISLLKELQHPNVVNLSNVLMQESRLYLVFEFLTMDLKKYMETLRGTTMDPALVKSYLHQIVQGILFCHCRRVLHRDLKPQNLLIDEKGIIKLADFGLARAFGIPVRVYTHEVVTLWYRAPEVLLGSPRYSTPVDVWSIGCIFAEMVTKRPLFHGDSEIDQLFRIFRTPGTPTDKTWPGVTELPDHKSTFPKWTTNNLAKSVKTLTLRNDLLQKMLIYDPAKRISCKAALSHPYLKDFEGGTVLPTRLGQ

SEQ ID NO: 62885 - DNA, 945 bp, Drosophila virilis
  CDS (1)..(945)
atgacaactgctttagacaactttcaacgcgccgagaaaatcggcgaaggcacatacggcattgtgtacaaagcgtgcaacaatcaaaccggccaggacgtcgcactcaagaaaatccgcctagaaggcgaatcggaaggagtaccatcgactgccatacgggaaatatctctattgaaaaaccttaagcacaaaaatgtagtacaactttttgatgttgttatatctggcaacaatctatacatgatattcgagtaccttaacatggatctcaagaaacttatggataagaaaaaggatgtctttacaccacagctaattaaaagctatatgtatcagatattcgatgcgctcgacttttgccacacgaatagaatactgcatcgggatctcaagccgcagaatttacttgttgatacggcaggcaatattaagctggctgatttcggtttggctcgtgcattcaatgtacccatgcgcgcctatacacatgaggtagtaacactttggtatcgggcgcctgaaatactgttgggcaccaagttctattcgacgggcgtggatatctggagcctgggctgtatattttccgaaatgatcatgcggcgttcgttgtttccaggcgacagcgaaatcgatcaattgtaccgcatctttcgcacactaagcacacccgacgaaagcaaatggccgggtgttacacaactgccggactttaaggctaagttccccaaatgggaggcatccaatgtgccaacggccatacgcgagcatgaagctaacgatctcattatgtcgatgctgtgctacgatccaaatctgcgcatatctgccaaggatgcacttcaacatgcctactttcacaatgtgcagcatgtgaaagatgttgcattgcctgtggaccccaatgctggcaacgcgtcacggcttacgcagctcgtttga

SEQ ID NO: 62886 - protein, 314 aa, Drosophila virilis
MTTALDNFQRAEKIGEGTYGIVYKACNNQTGQDVALKKIRLEGESEGVPSTAIREISLLKNLKHKNVVQLFDVVISGNNLYMIFEYLNMDLKKLMDKKKDVFTPQLIKSYMYQIFDALDFCHTNRILHRDLKPQNLLVDTAGNIKLADFGLARAFNVPMRAYTHEVVTLWYRAPEILLGTKFYSTGVDIWSLGCIFSEMIMRRSLFPGDSEIDQLYRIFRTLSTPDESKWPGVTQLPDFKAKFPKWEASNVPTAIREHEANDLIMSMLCYDPNLRISAKDALQHAYFHNVQHVKDVALPVDPNAGNASRLTQLV

SEQ ID NO: 62887 - DNA, 1050 bp, Drosophila melanogaster
  CDS (1)..(1050)
atgcgaatatctcagtttggccgctgtcgtcctgtctccgaattcgagaaactgaaccgcgttggcgagggcagctatggaattgtctatcgcgcacgtgacacccgtagcaatgagattgtggccttaaagaaggtccgcatggatcaggaaaaggatggtctgccaattagtggactccgcgagatcatgatcctaaagcagtgccatcatgagaatattgtccgcttgcgtgaggtggtggtgggcaaaagcttggacagcatcttcctggtaatggatttctgcgagcaggacctagcctccgtgctagacaacatgtcgcagcccttcaccgagtccgaggttaagtgcatcaccttgcaggtgcttaaagccttgaagtatctccattcgcgctttatgatccatagggatctaaaggtatccaatctgctgatgaccgacaagggctgcattaaagttgctgattttggactggcccgcatgtttagcaatcccccgaaaccaatgactccgcagatggttactttgtggtacagagcaccggaacttcttttgggatgccgaacacacaccacggcggtggatatgtgggcttttggctgcattcttggtgagctgctgctcggaaaacctttgctgccgggtaattcggagattgcacagctggacatgatcatcgatctcttgggagctccatcggagtccatttggcctggctttgccgatctgcccgctgtacaaaattttaccttaagtcagcagccctacaataaccttacgccgaagtttcacatgattggccaatcaggcaggaatctcctgaacattttgtttatctataacccaaaaacgagagccacggccgaagagtgcctgaaaagcaagtactttgtcgatccgccgcaggcttgtgacccgggcatgatgcccactttccctcagcacaggaacaatgctgcacctgctccagctgtccagcctcccgccgacattcccatctcggatttactcaatgtatttattaagcgtcaacgcatggagtaa

SEQ ID NO: 62888 - protein, 349 aa, Drosophila melanogaster
MRISQFGRCRPVSEFEKLNRVGEGSYGIVYRARDTRSNEIVALKKVRMDQEKDGLPISGLREIMILKQCHHENIVRLREVVVGKSLDSIFLVMDFCEQDLASVLDNMSQPFTESEVKCITLQVLKALKYLHSRFMIHRDLKVSNLLMTDKGCIKVADFGLARMFSNPPKPMTPQMVTLWYRAPELLLGCRTHTTAVDMWAFGCILGELLLGKPLLPGNSEIAQLDMIIDLLGAPSESIWPGFADLPAVQNFTLSQQPYNNLTPKFHMIGQSGRNLLNILFIYNPKTRATAEECLKSKYFVDPPQACDPGMMPTFPQHRNNAAPAPAVQPPADIPISDLLNVFIKRQRME

SEQ ID NO: 62889 - DNA, 885 bp, Camellia sinensis
  CDS (1)..(885)
atggagcagtacgaaaaagttgagaagattggtgaaggaacctatggtgtggtctataaggctcgggaccgagtgaccaatgaaactatagctttaaagaagattcgtttggagcaggaagatgagggtgtaccaagcacggcaattagagaaatttctctattgaaagagatgaagcatggaaatgttgtcaggttacaggatgtagtgcacagtgagaagcgtttgtatctggtttttgagtatctggacttggatttgaagaaacacatggattcatgtccggagttctctaaggatccacgtctgataaaaatgttcctgtatcaaattcttcgtggtattgcttattgtcactcccatagagttctgcatcgagatctgaaacctcagaatctgctgatagatcgccgtacaaatgctttaaagcttgcagattttggattggccagagcatttggtattcccgtcaggacatttacacatgaggtggtgactctatggtacagggcaccagaaatactccttggatcccgccactattcgactcctgtggatgtgtggtcagtgggttgtatatttgctgaaatggtgaatcagcggccattgtttcctggggactctgagattgatgaactattcaaaatcttcagaatcttgggtactccaaatgaggatacgtggcctggagtgacttctttggctgattttaaatctgcctttccaaaatggccttctaaggacctggccactgtggtcccaaatcttgactcagctggcattgatcttcttagtaaaatgctctgtctggatccaagcagaagaattacagctagaagtgcccttgaacatgaatacttcaaggatattgggtttgtaccttga

SEQ ID NO: 62890 - protein, 294 aa, Camellia sinensis
MEQYEKVEKIGEGTYGVVYKARDRVTNETIALKKIRLEQEDEGVPSTAIREISLLKEMKHGNVVRLQDVVHSEKRLYLVFEYLDLDLKKHMDSCPEFSKDPRLIKMFLYQILRGIAYCHSHRVLHRDLKPQNLLIDRRTNALKLADFGLARAFGIPVRTFTHEVVTLWYRAPEILLGSRHYSTPVDVWSVGCIFAEMVNQRPLFPGDSEIDELFKIFRILGTPNEDTWPGVTSLADFKSAFPKWPSKDLATVVPNLDSAGIDLLSKMLCLDPSRRITARSALEHEYFKDIGFVP

SEQ ID NO: 62891 - DNA, 915 bp, Camellia sinensis
  CDS (1)..(915)
atggagaagtatgagaagctagagaaggtaggagaaggaacatacgggaaggtgtacaaagccaaggacaaagagacaggtcaattggtggctctgaagaagacgaggctcgagatggacgaggaaggtgtgcctccgactgctctcagggaggtttctcttctccagatgctctctcattctctctacgtcgtccgattactctgcgtcgagcacgtcgataacaagcatggaaagccccttctctacctcgtcttcgagtacctcgataccgatctcaagaagtttattgactcccaccgcaagggccccgatccccgggctcttccgctttcactaatccagagttttctctatcagttgtgtactggggttgcccactgccacagccatggcgttcttcatagagatttgaagccacaaaaccttctggtagacaaggagaagggcatcctgaagattgcagatcttggtctcggaagggccttcactgttcctctcaagagctacacccatgagattgttactctttggtacagagctccagaggttttattaggatcaactcattactcaactgccgtggatatgtggtctgtgggttgcatttttgctgaaatggcaaggagacaagctttatttcctggcgactccgagtttcagcagctgcttcacatattcaggttattgggaacaccaactgataagcagtggccaggagttagttctctacgggactggcatgtgtatccccagtgggaagctcagaatttggcgcgtgctgttccatcattgggacctgatggggttgatctgttatcgaaaatgctgaaatatgatccagctgagaggatctcagccaaagcagctctagatcatcccttttttgacggtttggacaagtctcaattctaa

SEQ ID NO: 62892 - protein, 304 aa, Camellia sinensis
MEKYEKLEKVGEGTYGKVYKAKDKETGQLVALKKTRLEMDEEGVPPTALREVSLLQMLSHSLYVVRLLCVEHVDNKHGKPLLYLVFEYLDTDLKKFIDSHRKGPDPRALPLSLIQSFLYQLCTGVAHCHSHGVLHRDLKPQNLLVDKEKGILKIADLGLGRAFTVPLKSYTHEIVTLWYRAPEVLLGSTHYSTAVDMWSVGCIFAEMARRQALFPGDSEFQQLLHIFRLLGTPTDKQWPGVSSLRDWHVYPQWEAQNLARAVPSLGPDGVDLLSKMLKYDPAERISAKAALDHPFFDGLDKSQF

SEQ ID NO: 62893 - DNA, 927 bp, Aspergillus oryzae
  CDS (1)..(927)
atggagaaataccagaagatcgaaaagatcggagaagggacttatggtgtcgtctacaaagctcgtgagcttgctcatcccaaccggattgtcgccttaaagaaggtccgattagagacagacgatgaaggggtccctagtacaactattcgtgaaatatccttgctcaaagagatgaaccaccctaatatcgttagattgttcaacatccacacagagggttataaactctaccttgtctttgaacatctagactccgatctcaagaaatacatggacgctcttcccgtgaacgatggcggacgcggtagatctctcccgaatggtttaagcatggatatggggctaggggaagccatgatcaaaaagttcatgtctcaactcatcgaaggcatttacttctgccacagtcgtcgggttcttcatcgtgaccttaagcctcaaaatcttctgatcaatcgtgacggcagtctaaagttagccgattttggattggcaagagcttttggcgttcctttgagaacctatacgcacgaggtcgtcacactatggtatcgttctccggagattctcctcggcggtccccaatattcaacgtcagtagatatgtggtcatgtggcgctatctttgcggagatgtgcacacgcaagcccttgttccccggggattcggaaattgatcagattttcaagattttccgtctccttggtaccccggatgaagattcttggccaggcgttacttccttcccggattataagccatcattccctaagtggaagcgtgacagtgatgaacatctaattcctggattggaaaggcatggattacgtcttttagatgctcttcttgaatttgatcctgcacgaaggatgtctgccaagcaggcccgctcccacccttactttcggcataggagctcataa

SEQ ID NO: 62894 - protein, 308 aa, Aspergillus oryzae
MEKYQKIEKIGEGTYGVVYKARELAHPNRIVALKKVRLETDDEGVPSTTIREISLLKEMNHPNIVRLFNIHTEGYKLYLVFEHLDSDLKKYMDALPVNDGGRGRSLPNGLSMDMGLGEAMIKKFMSQLIEGIYFCHSRRVLHRDLKPQNLLINRDGSLKLADFGLARAFGVPLRTYTHEVVTLWYRSPEILLGGPQYSTSVDMWSCGAIFAEMCTRKPLFPGDSEIDQIFKIFRLLGTPDEDSWPGVTSFPDYKPSFPKWKRDSDEHLIPGLERHGLRLLDALLEFDPARRMSAKQARSHPYFRHRSS

SEQ ID NO: 62895 - DNA, 993 bp, Aspergillus oryzae
  CDS (1)..(993)
atggacaaagcgcagcagcctagctcttttcaacagctggaaaagctaggagaaggaacgtatgccactgtattcaagggccggaatcgccagactggcgagctagtagctttgaaggagattcatcttgattccgaggaggggacaccatcgacggccattcgagagatctcattgatgaaggagcttaagcatgagagtattgtttcgctttacgacgtcatccataccgaaaacaagctgatgctcgtttttgagtatatggacaaggatctgaagaagtacatggacactcgaggcgaacggggacaattagaccaggcgacgatcaagtcattcatgcaccagctcctcaagggcatcgcgttttgtcacgagaaccgagtcctccaccgtgacttgaagccccagaatctcttgattaacaaaaaggggcaactcaaactaggagacttcggtcttgcccgggcttttggcatacccgtcaatacattttcgaacgaggtagtgacgctatggtaccgcgcccccgatgtcctcctcggcagcaggacgtataacacaagtattgatatttggtctgctggatgtatcatggcggaattgtacactggccgtccactgttcccaggcaccaccaatgaggaccagttgcagaagatcttccgtctcatgggaacgccgtcggagcgctcgtggcccggtatctctcaattgccagaatacaagcccaatttccatgtctatgcgacacaagatctaggccttatcttgccccaaatcgatcctcttgggctcgatttgctaaacaggatgcttcaacttcgaccagagatgcgagttagcgctcacgatgcactgcagcacccgtggttccacgatctgcctcaaatgcaggcacagctgcagcagcagcagcagcagcagcagcagcaacaacaacaaatgtccgggtacggagggatggttacttcccagcaggcgtatcaatga

SEQ ID NO: 62896 - protein, 330 aa, Aspergillus oryzae
MDKAQQPSSFQQLEKLGEGTYATVFKGRNRQTGELVALKEIHLDSEEGTPSTAIREISLMKELKHESIVSLYDVIHTENKLMLVFEYMDKDLKKYMDTRGERGQLDQATIKSFMHQLLKGIAFCHENRVLHRDLKPQNLLINKKGQLKLGDFGLARAFGIPVNTFSNEVVTLWYRAPDVLLGSRTYNTSIDIWSAGCIMAELYTGRPLFPGTTNEDQLQKIFRLMGTPSERSWPGISQLPEYKPNFHVYATQDLGLILPQIDPLGLDLLNRMLQLRPEMRVSAHDALQHPWFHDLPQMQAQLQQQQQQQQQQQQQMSGYGGMVTSQQAYQ

SEQ ID NO: 62897 - DNA, 912 bp, Aspergillus oryzae
  CDS (1)..(912)
atggcttcggcgccgcacgcctcattccagcagttagaaaagttgggggaaggaacatatgcgacagtcttcaaaggtcgcaacaaccaaacaggagaaatggtcgcattaaaagagatccacctcgacacagaagaagggacgccctccaccgcgattcgcgagatctccctgatgaaagagctccagcacgagaacatcctgtcgctgtacgatgtcgtgcacaccgagaacaagctcatgttagtctttgaatacatggacaaggatctcaaacgttatatggatacctacggcaatcgcggccagctcgaaccgggcatcattaaatcctttgtctaccagctactccgaggcgtcgcgcattgccacgagaaccggattctgcatcgcgatctcaagcctcagaacctgctcattaacactaagggccagttaaaactagctgatttcggcttagccagagccttcggtatcccagtcaacaccttttccaacgaagtcgtcacgctttggtatcgcgcgccggacgtgctcctcggtagccgcagctacaacactagtattgacatttggtcaatcggttgtattctagcagagatgtacacaggacgcccgctattcccaggaaccacgaatgaagaccagctgctaaagattttccgcgtgatgggcacgccatcggagatctcttggcccgggatttccaaattcccggaatacaagcctgacttcccagtctatgcgacgcaggatctgcggcaggttgtttcgcgaatcgaccacttgggcgtcgatttgctgaggcgcatgttgcaaatgcggccggagatgcggatcagcgcggcgagcgcattgaagcatgcgtggttcaatgatattcctcggccaataccgtcgaatgctcaatag

SEQ ID NO: 62898 - protein, 303 aa, Aspergillus oryzae
MASAPHASFQQLEKLGEGTYATVFKGRNNQTGEMVALKEIHLDTEEGTPSTAIREISLMKELQHENILSLYDVVHTENKLMLVFEYMDKDLKRYMDTYGNRGQLEPGIIKSFVYQLLRGVAHCHENRILHRDLKPQNLLINTKGQLKLADFGLARAFGIPVNTFSNEVVTLWYRAPDVLLGSRSYNTSIDIWSIGCILAEMYTGRPLFPGTTNEDQLLKIFRVMGTPSEISWPGISKFPEYKPDFPVYATQDLRQVVSRIDHLGVDLLRRMLQMRPEMRISAASALKHAWFNDIPRPIPSNAQ

SEQ ID NO: 62899 - DNA, 1379 bp, Nicotiana tabacum
  CDS (163)..(1047)
cacgagcctctatgcaaatagaagcaaaagaagagtattgactgtagtccaaacattttggtacgagtacgccgacacttgcctgtcgcctcctcctccgcttcacgaaccgcgatttagtcctcttttttcgatcaaagggagttcattgagtttgactagatggaccagtatgaaaaagttgagaagattggggaaggaacatacggtgtagtgtacaaggctcgtgatcgtgtaactaatgaaacaattgcgctgaagaaaataaggctggagcaggaagatgagggagtaccaagcacagctattagagaaatctctcttttgaaagagatgcagcatgctaatattgtgaggttgcaggatgttgtgcacagtgaaaagcgattgtatctagtttttgaatatcttgacttggacttgaagaagcacatggattcatctcctgaattctctaaggatccacgtctggttaaaatgtttttgtatcaaatactccgtggtattgcttattgtcattctcatagagttcttcatcgagatttgaagcctcaaaacttgctgatagatcgacgtacaaatgctttaaagcttgcagactttggattggctagagcatttggtattcctgtcagaactttcactcatgaggtggtgacattgtggtacagggcaccagaaatactgctgggtacacgccattattctactcctgttgatgtgtggtcagttggttgcatatttgctgagatggtgactcagcgccctctgtttcctggtgactccgagattgatgaacttttcaagattttcagagtgatgggtactccaaatgaggatacatggcctggagtgactactctgcctgattttaaatctgccttcccaaaatggccttctaaggacctggcaactattgtcccaaatcttgatggagcaggccttgatcttcttgataaaacttcgcgcttggatcccagcaagagaatcactgccaggaatgcccttgagcatgagtacttcaaggatattgggtatgttccgtgagtctttgcaccttcatccagaatgctactgtaaatttggtatgtcatctacaggttttgttctggaggatttatgtgatttttagaggccccaccccacccctcaagttgttattcttccaatgtgattcaatctatattaaagtggtcttgcacagccctcatggatatttgttgttccagcatttgtggtcacaattcgtgtccgcatgttgaaccatactttccagtgtaatatcattttgttatagttccgggtgcggtatacctgtccaatcatacttgttcagcactggattctgtaatgttaaatagattggttttggtgtgtca

SEQ ID NO: 62900 - protein, 294 aa, Nicotiana tabacum
MDQYEKVEKIGEGTYGVVYKARDRVTNETIALKKIRLEQEDEGVPSTAIREISLLKEMQHANIVRLQDVVHSEKRLYLVFEYLDLDLKKHMDSSPEFSKDPRLVKMFLYQILRGIAYCHSHRVLHRDLKPQNLLIDRRTNALKLADFGLARAFGIPVRTFTHEVVTLWYRAPEILLGTRHYSTPVDVWSVGCIFAEMVTQRPLFPGDSEIDELFKIFRVMGTPNEDTWPGVTTLPDFKSAFPKWPSKDLATIVPNLDGAGLDLLDKTSRLDPSKRITARNALEHEYFKDIGYVP

SEQ ID NO: 62901 - DNA, 1359 bp, Nicotiana tabacum
  CDS (121)..(1002)
aattcggcacgagttttggtacaagtacgccgacacttgcccgtcgcctcctcctccgcttcaagacggcgatttcgtcctctttatccgaccaaagggagttcattgagtttgacctagatggaccagtatgaaaaagttgagaagattggggaaggaacatacggtgtagtgtacaaggctcgtgatcgtgtaactaatgaaacaattgcgctgaagaaaataaggctggagcaggaagatgagggagtaccaagcacagctattagagaaatctctctcttgaaagagatgcagcatgctaatattgtgaggttgcaggatgtagtgcacagtgagaagcgattatatctagtctttgaatatcttgacttggacttgaagaacacatggattactactcctgaattctctgaggatccacgtctggttaaaatgtttttgtatcaaatactccgtggtattgcctattgtcattctcatagagttcttcatcgagatttgaagcctcaaaacttgctgatagatcgacgtacaaatgctttaaagcttgcagactttggattggctagagcatttggtattcctgtcagaactttcactcatgaggtggtgacattgtggtacagggcaccagaaatactgctgggatcgcgccattactctactcctgttgatgtgtggtcagttggttgcatatttgctgagatggtgactcagcgccctctgtttcctggtgattccgagattgatgaactttcaagattcagagtgatgggtactccaaatgaggatacatggcctggagtgacaactctgcctgattttaaatctgccttcccaaaatggccttctaaggacctggcaactattgtcccaaatcttgatggagcaggccttgatcttcttgataaaatcgtccgcttggatcccagcaagagaatcactgccaggaatgcccttgagcatgagtacttcaaggatattgggtatgttccgtgagtctttgcaccttcatccagaatgctactgtaaatttggtatgtcatctacaaggttttgttctggaggatttgtgttatttttagggccaccccacccatcccctcaagtgccccaccccatcccctcaagttgttattcttccaatgtgattcaatatatattaaagtggtcttgcacagccctcatggatatttgttgttccagcatctgtggtcacaattcgtgtccacatgttgaaccatactttccagtgtaatatttgtttgttatagtttggggtgcggtacacttatccaatcatacttgtttagcactggatactgtaatgttaattagattggttttggtgtgtca

SEQ ID NO: 62902 - protein, 293 aa, Nicotiana tabacum
MDQYEKVEKIGEGTYGVVYKARDRVTNETIALKKIRLEQEDEGVPSTAIREISLLKEMQHANIVRLQDVVHSEKRLYLVFEYLDLDLKNTWITTPEFSEDPRLVKMFLYQILRGIAYCHSHRVLHRDLKPQNLLIDRRTNALKLADFGLARAFGIPVRTFTHEVVTLWYRAPEILLGSRHYSTPVDVWSVGCIFAEMVTQRPLFPGDSEIDELSRFRVMGTPNEDTWPGVTTLPDFKSAFPKWPSKDLATIVPNLDGAGLDLLDKIVRLDPSKRITARNALEHEYFKDIGYVP

SEQ ID NO: 62903 - DNA, 1398 bp, Nicotiana tabacum
  CDS (151)..(1035)
gcggccgcggatccaaagaagagtattgactgtagtccaaacattttggtacaagtacgccgacacttgcccgtcgcctcctcctccgcttcaagacggcgatttcgtcctctttatccgaccaaagggagttcattgagtttgacctagatggaccagtatgaaaaagttgagaagattggggaaggaacatacggtgtagtgtacaaggctcgtgatcgtgtaactaatgaaacaattgcgctgaagaaaataaggctggagcaggaagatgagggagtaccaagcacagctattagagaaatctctctcttgaaagagatgcagcatgctaatattgtgaggttgcaggatgtagtgcacagtgagaagcgattatatctagtctttgaatatcttgacttggacttgaagaagcacatggattcatctcctgaattctctgaggatccacgtctggttaaaatgtttttgtatcaaatactccgtggtattgcctattgtcattctcatagagttcttcatcgagatttgaagcctcaaaacttgctgatagatcgacgtacaaatgctttaaagcttgcagactttggattggctagagcatttggtattcctgtcagaactttcactcatgaggtggtgacattgtggtacagggcaccagaaatactgctgggatcgcgccattactctactcctgttgatgtgtggtcagttggttgcatatttgctgagatggtgactcagcgccctctgtttcctggtgattccgagattgatgaacttttcaagattttcagagtgatgggtactccaaatgaggatacatggcctggagtgacaactctgcctgattttaaatctgccttcccaaaatggccttctaaggacctggcaactattgtcccaaatcttgatggagcaggccttgatcttcttgataaaatgctccggttggatcccagcaagagaatcactgccaggaatgcccttgagcatgagtacttcaaggatattgggtatgttccgtgagtctttgcaccttcatccagaatgctactgtaaatttggtatgtcatctacaaggttttgttctggaggatttgtgttatttttagggccaccccccacccccatccccctcaagttgttattcttccaatgtgattcaatatatattaaagtggtcttggcacagccctcatggatatttgttgttccagcatctgtggtcacaattcgtgtccacatgttgaaccatactttccagtgtaatatttgtttcttatagtttggggtgcggtacacttgtccaatcatacttgtttagcactggatactgtaatgttaattagattggttttggtgtgtcattagaagttttgcatagttttt

SEQ ID NO: 62904 - protein, 294 aa, Nicotiana tabacum
MDQYEKVEKIGEGTYGVVYKARDRVTNETIALKKIRLEQEDEGVPSTAIREISLLKEMQHANIVRLQDVVHSEKRLYLVFEYLDLDLKKHMDSSPEFSEDPRLVKMFLYQILRGIAYCHSHRVLHRDLKPQNLLIDRRTNALKLADFGLARAFGIPVRTFTHEVVTLWYRAPEILLGSRHYSTPVDVWSVGCIFAEMVTQRPLFPGDSEIDELFKIFRVMGTPNEDTWPGVTTLPDFKSAFPKWPSKDLATIVPNLDGAGLDLLDKMLRLDPSKRITARNALEHEYFKDIGYVP

SEQ ID NO: 62905 - DNA, 1288 bp, Petroselinum crispum
  CDS (103)..(987)
agagaactccttttctacataaaatctccccccttcctctgaagatttccccttgccaacgctctaaaatatctttgcgacttatctgttaggtgaaatcaaatggaccagtatgaaaaggttgagaagattggtgaaggaacatatggagtagtttataaggctcgtgaccgcgtcacaaatgaaaccatcgctttaaagaagattcggctagagcaagaagatgaaggagtgccaagcactgctattagagaaatttctttactgaaggaaatgcagcatggaaatattgtcaggttacaagatgttgtgcacagcgagaaacggttgtatctggtttttgaatatctggacctagatttgaagaaacatatggattcatgtccagagtttgccaaggatccacgtctgataaagatgtttctgtatcaaatacttcgtgggattgcttattgtcattcccatagagttctgcatcgggatctcaaaccccaaaacctgctcatagatcgacgtaccaatgctctaaagcttgcagattttggacttgccagggcatttggaattcctgtcagaacatttacacacgaggttgtgacactttggtacagggcaccagagatactccttggatcccgccactattccacacctgttgatgtgtggtctgtcggttgtatttttgctgagatggtgaaccagcggccattgtttccgggggattctgagattgatgaattatttaaaatattcagaattacgggtaccccgaatgaggatacctggcctggagttacatctctccctgattttaagtctgcctttccaaaatggccatctaaggaactggaaactgtggtcccaaatcttgattcggccggtctgaatctcctcaaaaaaatgctttgcttggatccgagcagaagaattacagccaggattgcacttgagcatgaatacttcaaggatattgggattgttccttaagtcttatctttccggccgcatttgtatatgatattagagtttcttgggtttgattttgtaagaaaagtgtgctagttttttttatcgttctatagttatttaatttccttttccttggatgcgattcttattgtttccaagctggctgtagagcaatcatatatcatctcgtccctgctctctgggcttaatgttcaatgatacatgtattgtcacatgtttttttttgtaattctttgtactgtcactaggcatacattggataatctcttacttaatgaatttgtttggtgtgctttgt

SEQ ID NO: 62906 - protein, 294 aa, Petroselinum crispum
MDQYEKVEKIGEGTYGVVYKARDRVTNETIALKKIRLEQEDEGVPSTAIREISLLKEMQHGNIVRLQDVVHSEKRLYLVFEYLDLDLKKHMDSCPEFAKDPRLIKMFLYQILRGIAYCHSHRVLHRDLKPQNLLIDRRTNALKLADFGLARAFGIPVRTFTHEVVTLWYRAPEILLGSRHYSTPVDVWSVGCIFAEMVNQRPLFPGDSEIDELFKIFRITGTPNEDTWPGVTSLPDFKSAFPKWPSKELETVVPNLDSAGLNLLKKMLCLDPSRRITARIALEHEYFKDIGIVP

SEQ ID NO: 62907 - DNA, 1291 bp, Pinus contorta
  CDS (95)..(979)
ccggtctgaatctttgaatctagagatttctctctaaatattccgacgggtgcagagaaaaagtcgaacagaacgggatcttgaatcaggctgaatggaacagtatgagaaagttgagaagataggagaaggaacatatggtgtggtttacaaggcccgtgatcgcttgacaaatgagaccatagctctcaagaaaattcgtttggagcaagaagatgagggtgtaccaagcactgcgattagagaaatttctcttcttaaagaaatgcaacatgggaacatcgtaaggttgcaagatgttgtccatagtgaaaagcggctctatttggttttcgagtatttggatttggacctcaagaagcatatggattcttgccctgagctagcaaaggatcctcgtctaatcaaaacatttctgtatcagattctgcgtggcattgcctattgtcattctcatcgggttcttcatcgtgatctgaagccgcaaaatttgcttattgaccgcaaaaccaatgcgttgaaacttgccgactttggacttgccagggcatttggaattccagtgaggacctttactcatgaggtggttacattgtggtatcgtgcacccgagatcttacttggttcccggcattattcgactcctgttgatgtttggtctgttggatgtatctttgctgaaatggtcaatcagcgaccacttttcccaggagactcagagattgatgagctctttaagatatttagagtgctggggacgccaaatgaagaaacatggccaggagtcacctctctgcctgacttcaagtcagccttcccaaagtggccagccaaggatttggcaactgtggtttcaggtcttgagccagcaggaattgatattctctcgaaaatgctgtgcctggagcccagtagacgcatcactgctcgtagtgctctggagcacgagtatttcaaagatctaggttttgtaccctgacctgtatattagctgcggggataaaaagattattggactgtcgtagcatagcctgcatcttctcaccagtgagttgctcgttggaagctggtaaactagatggaaacctgtataagtaaacatgattaagtataccatgttttttttttaaatattttgccacacttgttaaggatttgcacctttggtgtagctggattgtggtggttctagttcttcaagactattgaacaaaactttatttggaaattaagttgtttacgattgtcaaatatgactgatcatttgaaattctttgccaaaaaaaaaaaa

SEQ ID NO: 62908 - protein, 294 aa, Pinus contorta
MEQYEKVEKIGEGTYGVVYKARDRLTNETIALKKIRLEQEDEGVPSTAIREISLLKEMQHGNIVRLQDVVHSEKRLYLVFEYLDLDLKKHMDSCPELAKDPRLIKTFLYQILRGIAYCHSHRVLHRDLKPQNLLIDRKTNALKLADFGLARAFGIPVRTFTHEVVTLWYRAPEILLGSRHYSTPVDVWSVGCIFAEMVNQRPLFPGDSEIDELFKIFRVLGTPNEETWPGVTSLPDFKSAFPKWPAKDLATVVSGLEPAGIDILSKMLCLEPSRRITARSALEHEYFKDLGFVP

SEQ ID NO: 62909 - DNA, 1328 bp, Picea abies
  CDS (105)..(989)
ttcgtgaatgcgtgtttgaatcgctgaatctagagatttctctctaaatattccgacgggtgcagagaaaaagtcgaacagaacgggagcttgaatcaggctgaatggagcagtatgagaaagttgagaagataggagaaggaacatatggtgtggtctacaaggcccgtgatcgcttgacaaatgagaccatagctctcaagaaaattcgtttggagcaagaagatgagggtgtaccaagcactgcaattagagaaatttctcttctcaaagaaatgcaacatgggaacatcgtaaggttgcaggatgttgtccacagtgaaaagcgtctctatttagtttttgagtatttggacttggacctcaagaagcatatggattcttgccccgagctagcaaaggatcctcgtctaatcaaaacatttctgtatcagattctgcgtggcattgcctattgtcattctcatcgagttcttcatcgtgatttgaaaccacaaaatttgcttattgaccgcaaaaccaatgcgttgaaacttgccgactttggacttgcaagggcatttggaattccagtgaggacctttactcatgaggtggttacattgtggtaccgtgcaccagagatcttgcttgggtcccgacattattcgactcctgttgatgtttggtctgtggggtgtatctttgctgaaatggtgaatcagcgaccacttttcccaggagactcagagattgatgaactctttaagatatttagagtgctggggacaccaaatgaagaaacatggccaggagtcacctctctgccagacttcaagtcagccttcccaaagtggccagccaaggatttggcaactgtggttccaggtcttgagccagcaggaattgatcttctctcgaaaatgttgtgcctggagcccagtaaacgcatcactgctcgtagtgctctggagcatgagtatttcaaagatctaggttttgtaccctgacctgtatattagctgtggggttaagaagattattggactgttgtactgtagcttgcatcttctcaccagtgaattgcttttcggagactggtaaactagatggagacctctataagtaacatgattaagtatatcatgttttttgtattttgccacatttgttaatgatttgcacctttggtgtagctggattatggcgcttctagttcttcaagaccattgaacaatactttttctggaaagcagattgtttacgattgtcaaatatgacttatcatttgaaattctttgccatgtgttctcactgatggagtattttataatattgtgcattctgat

SEQ ID NO: 62910 - protein, 294 aa, Picea abies
MEQYEKVEKIGEGTYGVVYKARDRLTNETIALKKIRLEQEDEGVPSTAIREISLLKEMQHGNIVRLQDVVHSEKRLYLVFEYLDLDLKKHMDSCPELAKDPRLIKTFLYQILRGIAYCHSHRVLHRDLKPQNLLIDRKTNALKLADFGLARAFGIPVRTFTHEVVTLWYRAPEILLGSRHYSTPVDVWSVGCIFAEMVNQRPLFPGDSEIDELFKIFRVLGTPNEETWPGVTSLPDFKSAFPKWPAKDLATVVPGLEPAGIDLLSKMLCLEPSKRITARSALEHEYFKDLGFVP

SEQ ID NO: 62911 - DNA, 1044 bp, Scutellaria baicalensis
  CDS (1)..(1044)
atgcacctgttacacaaactaacttctccatctctctctctctctcactctgatctctctttctctctctggaatcaatttcaagagagagagagagaagcacagatcttatctccgatcaattcatccatggagaagtacgagaagctggagaaggtgggcgaaggcacgtacggcaaggtgtacaaagccaaggagaaagccaccggccaagtggtggcgctgaagaaaacccggctggaaatggacgaggaaggggtgccgccgacggcgctccgggaagtctccctcctccaaatgctctcccaatctctctacgtcgtccgattgctctgcgtcgaacacgtcgacaacaagaacggcaagcctctcctctacctcgttttcgagtatctcgacaccgatctcaagaaattcatcgattcccaccgcaaaggccctaaccctaggcctctgcctccgccgcagattcagagctttctctatcagctctgcaagggtgtcgctcactgccatagccacggtgtgcttcaccgagatttgaagccccaaaatctgctccttgataaggacaaaggcatactcaaaatcgccgatctcggtctcggccgagcctttactgttcctctgaagagctacacgcatgagatcgttactctctggtacagagctccggaggtcctcctcggatccactcattactctactgccgtagatatgtggtctgttgggtgcatctttgcggagatggctagaaggcaagctttgtttcctggagattctgagtttcaacagcttcttcatatttttaggttgctggggacaccaactgagaaggactggccaggagttagttcactacgggattggcacgtgtatccccagtgggaacctcagaacttggcccgagctgtacccgcattgggacctgatggtgttgaccttctatcgaagatgctgaagtttgatccagctgatagaatttcagcaaaagaagctatggaccatccctactttgataccttggataaatgtcagttttga

SEQ ID NO: 62912 - protein, 347 aa, Scutellaria baicalensis
MHLLHKLTSPSLSLSHSDLSFSLWNQFQEREREAQILSPINSSMEKYEKLEKVGEGTYGKVYKAKEKATGQVVALKKTRLEMDEEGVPPTALREVSLLQMLSQSLYVVRLLCVEHVDNKNGKPLLYLVFEYLDTDLKKFIDSHRKGPNPRPLPPPQIQSFLYQLCKGVAHCHSHGVLHRDLKPQNLLLDKDKGILKIADLGLGRAFTVPLKSYTHEIVTLWYRAPEVLLGSTHYSTAVDMWSVGCIFAEMARRQALFPGDSEFQQLLHIFRLLGTPTEKDWPGVSSLRDWHVYPQWEPQNLARAVPALGPDGVDLLSKMLKFDPADRISAKEAMDHPYFDTLDKCQF

SEQ ID NO: 62913 - DNA, 1226 bp, Scutellaria baicalensis
  CDS (13)..(897)
ggcacgaggcagatggatcagtatgaaaaagttgagaagattggtgagggaacatatggagtggtttacaaggctcgtgatcgtgtaactaatgaaactattgccctaaaaaaaatccggttggagcaggaagatgagggagtgccaagcacggctatcagagagatttcactattgaaagagatgcaacatgggaatattgtaaggttgcaggacgtggtgcatagtgagaagcgcttgtatctggtatttgaatatctggacttggatttgaagaaacacatggattcttgtccagaattctcccaggatcctcgtacagttaaaatgttcctataccagatactacgtggaattgcctattgtcactctcatcgtgtccttcatcgagacttgaagcctcaaaacttgctaattgatcgacgtaccaatgcattaaaacttgcagactttggattggccagagcatttggtattcctgtcaggacatttacacatgaggttgtgactttatggtatagggctccagaaatactacttggatcacgccactactctactcccgtggatgtgtggtcagttgggtgtatatttgctgagatggtaacccagcgagcattgtttcctggggactccgaaattgatgaactttttagaatttttagagtcatgggtaccccgactgaagagacatggcctggagtaacgtctctgcctgatttcaaatcatcatttcctaaatggcctaccaaggagctggcaaccgtggtcccaagtctcgattcagctggacttgacctccttggtaaaatgctcattttagaccccagcaaaaggattacggcaagaagtgctcttgagcatgagtacttcaaggatattgggttcgtcccctgatatggttggtctcccctcatcctggtgcaaatgtatattggtatgtggcatttatgtttgatatgccggtgatattatatctctcttcttccttgggtgtacttcaatcggtatcgaagttattctgtgcacagcaatccgagaatttgctattacttgctctttcaatttgcttatatgcccttttgtgtgattgcttcaatttttgcccttttgttttgttggattggatttgttgtaagaagatgttaatgtaaacatgtaagctttctgttatctaatagattaacatgatgtgcaatttgtcgtttcaaaaaaaaaaaaaaaaa

SEQ ID NO: 62914 - protein, 294 aa, Scutellaria baicalensis
MDQYEKVEKIGEGTYGVVYKARDRVTNETIALKKIRLEQEDEGVPSTAIREISLLKEMQHGNIVRLQDVVHSEKRLYLVFEYLDLDLKKHMDSCPEFSQDPRTVKMFLYQILRGIAYCHSHRVLHRDLKPQNLLIDRRTNALKLADFGLARAFGIPVRTFTHEVVTLWYRAPEILLGSRHYSTPVDVWSVGCIFAEMVTQRALFPGDSEIDELFRIFRVMGTPTEETWPGVTSLPDFKSSFPKWPTKELATVVPSLDSAGLDLLGKMLILDPSKRITARSALEHEYFKDIGFVP

SEQ ID NO: 62915 - DNA, 1207 bp, Scutellaria baicalensis
  CDS (12)..(896)
ggcacgaggagatggagcagtatgaaaaagttgagaagattggtgagggaacatatggggtggtgtacaaggcacgtgatcgtgtaacaaatgaaacttttgctttgaagaaaatccggctagagcaggaagatgagggagtgcccagcacagcgatcagagagatttccctcttgaaagagatgcaacatgggaatatcgtaaggttgcaggatgtgattcacagtgagaagcgcttgtatctggtatttgaatttctggacttagatttgaaaaaacacatggattcttgcccagaattctccaaggatcctcgcctggttaaaacgtttctaaatcaaatactccgtggtattgcctattgtcattctcatcgcgtccttcatcgggacttgaagccgcaaaacttgctgatagatcgccgtacaaatgccttaaagcttgcagactttggattggctagagcatttggcattcctgtgaggacatttacacacgaggttgtaacgttatggtatagagctccagaaatattgctcggatcacgccactattctactccagtggacgtatggtcggttggttgcatatttgctgaaatggtgaaccagcgaccgttatttcctggtgactctgagatagatgaactcttcaaaatctttagaatcatgggcaccccaaatgaagatacatggcctggagtgacatcgctgcctgatttcaaatcagcatttccgaaatggccatccaaggaacttgctactgtggttccaaatcttgatgcacctggcctcgacctccttggaaaaatgctgtgcttagatccaagcaaaagaattactgccagacatgcactcgagcacgactacttcaaggatatagggtttgtcccttgatcgatgctcctttccaaccctggtgcaaatgtatattcgtatgtggcttcatcagattattaatctttcgataaaaatgcgtgatatccaattgatgataaccttcctcctttttgatctgattcctgtggtgtctcatcttctcttcttttatctgagtgattgtctcaaagttattttctttttcttccttttctttttgatcttctcgtcttttctttttttggacagtttttgctgtagcatcatactctttattctattttatatattaatttggcttgccattaaaaaaaaaaaaaaaaaaaaaa

SEQ ID NO: 62916 - protein, 294 aa, Scutellaria baicalensis
MEQYEKVEKIGEGTYGVVYKARDRVTNETFALKKIRLEQEDEGVPSTAIREISLLKEMQHGNIVRLQDVIHSEKRLYLVFEFLDLDLKKHMDSCPEFSKDPRLVKTFLNQILRGIAYCHSHRVLHRDLKPQNLLIDRRTNALKLADFGLARAFGIPVRTFTHEVVTLWYRAPEILLGSRHYSTPVDVWSVGCIFAEMVNQRPLFPGDSEIDELFKIFRIMGTPNEDTWPGVTSLPDFKSAFPKWPSKELATVVPNLDAPGLDLLGKMLCLDPSKRITARHALEHDYFKDIGFVP

SEQ ID NO: 62917 - DNA, 912 bp, Oryza sativa
  CDS (1)..(912)
atggagaagtacgagaagctggagaaggtgggggaagggacgtacgggaaggtgtacaaggcgcaggacagggcgacggggcagctggtggcgctgaagaagacgaggctggagatggacgaggaggggatcccgcccaccgcgctgcgcgagatctccatcctcaggctgctctcccagtcgctctacgtcgtccgcctcctctccgtcgagcaggccaccaagaacggcaagcccgtcctctacctcgtcttcgagttcctcgacaccgacctcaagaagttcgtcgacgcctaccgcaagggccccaaccctcgccccctccccaccaacgtcatcaagagcttcttgtatcagttatgcaaaggagtcgcacattgccatggccatggtgtccttcaccgtgatttaaagccacaaaacctgttggtcgacaaggaaaaggggatattgaaaattgctgatcttgggctaggtagggcgttcactgttcctatgaaaagctacacacatgagattgtgactctttggtacagagctcctgaagttttgcttggatcaacacattactcaaccggtgttgacatttggtccgttggttgcatcttcggtatgatggtcagaagacaagctctttttccaggtgactctgagttgcaacagttgcttcacattttcaggttgttgggaactcctactgaggagcagtggcctggagtaactgatttgagggactggcatgagtttccacagtggaagccacagattttagaacgtcaagtcccatcattggagcctgaaggagttgaccttttatcgaaaatgctccagtataacccagcaaatcggatctcagcaaaggctgctatggaacacccctacttcgacagcctcgacaagtcccagttctag

SEQ ID NO: 62918 - protein, 303 aa, Oryza sativa
MEKYEKLEKVGEGTYGKVYKAQDRATGQLVALKKTRLEMDEEGIPPTALREISILRLLSQSLYVVRLLSVEQATKNGKPVLYLVFEFLDTDLKKFVDAYRKGPNPRPLPTNVIKSFLYQLCKGVAHCHGHGVLHRDLKPQNLLVDKEKGILKIADLGLGRAFTVPMKSYTHEIVTLWYRAPEVLLGSTHYSTGVDIWSVGCIFGMMVRRQALFPGDSELQQLLHIFRLLGTPTEEQWPGVTDLRDWHEFPQWKPQILERQVPSLEPEGVDLLSKMLQYNPANRISAKAAMEHPYFDSLDKSQF

SEQ ID NO: 62919 - DNA, 990 bp, Ostreococcus tauri
  CDS (1)..(990)
atgggtggacactcgatcaacgacgcgtacgaaaagctggaaaagatcggacaggggacgtacgggaaggtgtacaaggcccgggatcgagcgaccggaaggttggtggcgctgaagaagacgcgattggagatggaggaggagggggtgccgtcgacggcgctgcgagaggtgtcgttgttgcaaatgttgagcgagtcgccgtacatcgttcgattattgcgcgtggagcacgtcgaggaggacgggaaggcgatgttgtaccttgtgtttgaattcttggatcaagatttgaagcagttcatggatctcacgggaagggggccgtcgaacccgctgccgacgacgacggtgcaaaactacatgtatcagctctgtttagggtgcgcgcacttgcacaagcacggggtgatgcaccgcgatctgaagccgcagaacatgttggtggataaggcgaagaacttgctcaagattgcggatcttggtctcggtagggcgttcagtgtgccggtgaagagttacacgcacgagatcgtgacgctgtggtatcgcgcgcccgaggtgttgcttggcgggtcacactactcaactccggtcgatatgtggagcgttgggtgcatgttcgccgagatggcgcgcaagcaaccgttgtttccgggtgattccgagctgcagcagctcttgcacatctttaagctgctagggacgccgagcgagcaagtgtggccgggcgtctcaaaccttcgagactggcacgagttcccgcaatggaagccgcaagacttggccaagctgatccctcagctggacgcgcacggcatcgatctgcttcaaaagcttctcgtttttgatccggcgaagcgcattcacgccacggacgctctcgagcatccgtattttgactcgctcgacaagacgcaattcgagaagatcgagcgcgagttcgagatcgagttccttcgcgagaaagagaaccgtatggcgcagtaa

SEQ ID NO: 62920 - protein, 329 aa, Ostreococcus tauri
MGGHSINDAYEKLEKIGQGTYGKVYKARDRATGRLVALKKTRLEMEEEGVPSTALREVSLLQMLSESPYIVRLLRVEHVEEDGKAMLYLVFEFLDQDLKQFMDLTGRGPSNPLPTTTVQNYMYQLCLGCAHLHKHGVMHRDLKPQNMLVDKAKNLLKIADLGLGRAFSVPVKSYTHEIVTLWYRAPEVLLGGSHYSTPVDMWSVGCMFAEMARKQPLFPGDSELQQLLHIFKLLGTPSEQVWPGVSNLRDWHEFPQWKPQDLAKLIPQLDAHGIDLLQKLLVFDPAKRIHATDALEHPYFDSLDKTQFEKIEREFEIEFLREKENRMAQ

SEQ ID NO: 62921 - DNA, 891 bp, Ostreococcus tauri
  CDS (1)..(891)
atggagaactacgagaaggtggcgaagatcggtgaggggacgtacggggtagtgtacaaggcgaaaagccttcgagatgacgccatggtggcgctgaagcgcataaggctcgatcaggacgacgagggggtgccgtcgactgcgattagagagatctcgctcctcaaagagctgcgtcacgagaacgtggtgtccctcctcgaggtgattcacgaggagacaaaactgtacctggtgttcgagtacttggatctggacctgaaaaagcacatggattcctccccgcacatctcgaacgatcggatggtgataaagggatatgtctaccagatatgcgcgggcatcgcgttttgtcactcgcaccgagtgctccatcgtgatctaaagccacagaatttgttgatcgatacgacgaataatgtgttaaagttggcagattttggcctggcgcgggcgttcggcatccccgtacgtgcgtacactcacgaagttgtgacgctctggtatcgtgcgccagaaattctcctcggagtgcgcacgtactcaactccagtggacgtttggagcataggatgcattatggcggagatggttaatcacgcgcccctgtttccgggcgattctgagatcgatgaattgttcaaaatcttcaaaactttgggtactccgggcgagaccttgtggcccgaggcgaagcagttgccagattaccaagagggatttccaaagtggaaggcgaagccgtgggagtcgctgtgcccagccctggacgaagctggcgtagacctcttgagatcgttactgcagtactcaccagagaagcgtataagcgccaaatacgcgacgcaacacagatggtttgatgactacagggaacacatcggtcgctga

SEQ ID NO: 62922 - protein, 296 aa, Ostreococcus tauri
MENYEKVAKIGEGTYGVVYKAKSLRDDAMVALKRIRLDQDDEGVPSTAIREISLLKELRHENVVSLLEVIHEETKLYLVFEYLDLDLKKHMDSSPHISNDRMVIKGYVYQICAGIAFCHSHRVLHRDLKPQNLLIDTTNNVLKLADFGLARAFGIPVRAYTHEVVTLWYRAPEILLGVRTYSTPVDVWSIGCIMAEMVNHAPLFPGDSEIDELFKIFKTLGTPGETLWPEAKQLPDYQEGFPKWKAKPWESLCPALDEAGVDLLRSLLQYSPEKRISAKYATQHRWFDDYREHIGR

SEQ ID NO: 62923 - DNA, 1066 bp, Saccharum officinarum
  CDS (19)..(903)
cattgggggttaaccctgatggagcagtacgagaaggtggagaagatcggggagggcacgtacggggtggtgtacaaggggctggacaaggccaccaacgagacgatcgcgctcaagaagatccgcctcgagcaggaggacgagggcgtcccgtccaccgccatccgcgagatctctctcctcaaggagatgaaccacgacaacatcgtcaggttacatgatgttatccacagcgagaagcgcatatatcttgtcttcgagttcctggatctggacctgaagaagttcatggactcttgcccggagtttgctaagaatcccactttgattaagtcatacctctaccagatactccgtggtgttgcttactgccattctcatagatttcttcatcgagatttgaaacctcagaacttattgatagatcggcgtactaatacactgaagcttgcagactttggtttatccagggcatttggaattcctgtccgtacattcactcatgaggtagtgacattatggtacagagctccagaaattctgcttggagcgaaacagtattccacaccagtcgatgtatggtctgtgggctgtatctttgcggaaatggtgaaccaaaagccactattccctggtgattctgagatcgacgaactgtttaagatattcagggtactaggtacaccaaatgaacaaagttggccaggagtcagttgtttgcctgacttcaagactgctttccccaggtggcaggctcaggacctggcaacaattgtcccaaatcttgaacctgctggtttggaccttctctcgaaaatgcttcgatacgagccaagcaaaagaatcacagctaggcaagcacttgagcatgagtacttcaaggaccttgaaatggtacagtgatacctgctatggctttacattggattggcatatgtatgagctgctcgtttcattccttttgtgaacgcctgtgaaatttcaatgttactagtagttctgaaagcagacaatgctatgtatccaaaaaatgaagttatgtagcttgaatcaaaaaaaaaaaaaa

SEQ ID NO: 62924 - protein, 294 aa, Saccharum officinarum
MEQYEKVEKIGEGTYGVVYKGLDKATNETIALKKIRLEQEDEGVPSTAIREISLLKEMNHDNIVRLHDVIHSEKRIYLVFEFLDLDLKKFMDSCPEFAKNPTLIKSYLYQILRGVAYCHSHRFLHRDLKPQNLLIDRRTNTLKLADFGLSRAFGIPVRTFTHEVVTLWYRAPEILLGAKQYSTPVDVWSVGCIFAEMVNQKPLFPGDSEIDELFKIFRVLGTPNEQSWPGVSCLPDFKTAFPRWQAQDLATIVPNLEPAGLDLLSKMLRYEPSKRITARQALEHEYFKDLEMVQ

SEQ ID NO: 62925 - DNA, 1744 bp, Papaver rhoeas
  CDS (298)..(1404)
tgatagtgatttttttcatttttgtaggacggagaaagaattttgtttctgataagtgattttgaagagaagttggtgaaattagagataattgcaatagatctttgttcaagaaattttatttcagataagtgataattaggaaaagagaggcatgatttagacgatgtaggacttggggtttgtcattgaaattcagagattttgtgtaaaagaggaattttatttaagaagagctgttcaattaagtcgattttgctcaacaattttctgctgtttttactacacgaaggtaatatggctacttatgtcgaccccccaaatggaaccggctctccgggaaagcattattattcaatgtggcaaacggtgtttgagattgatacaaagtatgtacctattaaaccaattgggagaggagcttatggtatagtttgttcatcagtaaatagggaaacaaatgataaagtggcaattaagaagatccagaatgcttttgaaaatcgtattgatgccctcagaacattgcgggaattaaagctacttcggcatctacgacacgaaaatgtgattgctttgagagatgtaatgatgcctactcataggagaagcttcaaggatgtttatctggtgtatgaactaatggatacagatttgcatcaaattgtcaaatcctctcaacccctatctaatgaccactgccagtatttcttattccagttacttcgagggctgaagtatctccactctgcaaacatcctacatcgggatctcaagcctgggaaccttctcgtcaatgcaaactgtgacttgaagatctgtgatttcggattggctcgcacctgtagcggcaagggccaattcatgaccgaatacgttgtcactcgttggtatcgagcccctggactccttctttgctgcgacaattatggtacgtctattgatgtctggtccgttggatgcatctttgctgagcttctagggcgaaaacccatcttccctggcactgaatgcctcaaccaactcaaactgataatcaacgtccttggcagccaaagtgaggccgatctagagttcatcgacaacccaaaggccaggaagtatatcaaatctctcccttactcacctaagaccccctttgcacgtatctacccaaacgccagcccgttggctattgacctgctgcagaaaatgctcgtctttgatccatctaaaagaattagtgtgactgaagcacttcagcatccttacatgtcaccactctacgacccaaacgccgaccctcctgcacaggttccagtcgatctcgacatagatgaagaagatctaggagaagagacgataagggaaatgatgtggactgaaatgcttcattatcacccagaagccgtgtcatccaattaataggcaattaagggtaattatgatcctgttctcgctctttttcctgtttcactgagaaaagtctatgcgatgcttgttgttttgtgaaagtaggtctgtttctttcccttcttatcattttcatgctgttataattatatgcatgagattccaaagattttgcgtaaagagttggaactcagtcactacaagatagggttggctaatttaagtttgtatataggtgtgattgttttgtaccactgtttaatgtttatcttggacttcaatctctcttccatttctgtatacttacaatgaatgtatgactgactattttgtatcaaaaaaaaaaaaaaaa

SEQ ID NO: 62926 - protein, 368 aa, Papaver rhoeas
MATYVDPPNGTGSPGKHYYSMWQTVFEIDTKYVPIKPIGRGAYGIVCSSVNRETNDKVAIKKIQNAFENRIDALRTLRELKLLRHLRHENVIALRDVMMPTHRRSFKDVYLVYELMDTDLHQIVKSSQPLSNDHCQYFLFQLLRGLKYLHSANILHRDLKPGNLLVNANCDLKICDFGLARTCSGKGQFMTEYVVTRWYRAPGLLLCCDNYGTSIDVWSVGCIFAELLGRKPIFPGTECLNQLKLIINVLGSQSEADLEFIDNPKARKYIKSLPYSPKTPFARIYPNASPLAIDLLQKMLVFDPSKRISVTEALQHPYMSPLYDPNADPPAQVPVDLDIDEEDLGEETIREMMWTEMLHYHPEAVSSN

SEQ ID NO: 62927 - DNA, 1063 bp, Glycine max
  CDS (32)..(976)
acgggaagaaggactcaattgagagagagagatggagaagccaggaggaggaggagtgttatcggcgaaggaggcattcgagaagcttgaaaaggtgggagaagggacatatgggaaggtgtacagagcaagagagaaggccatggggaagatcgtggctctgaagaagactcgtctccacgaggacgaagaaggtgtccctcccaccactctccgtgaggtttccattctgcgaatgctctctcgcgatccccatgtcgttaggttaatggatgtcaaacaaggtcagaacaaggaagggaagacagtgctctacttggtctttgagtacatggacaccgatctcaagaaattcattcgctctttccgtcaaactggacaaaccgttccaccccaaaccatcaaaagcttgatgtaccagctttgcaagggcgttgctttctgccacggtcatgggatcttgcacagggacttgaaacctcacaatctcttgatggacccaaaaaccatgatgcttaaaattgctgatcttggactcgctcgagcatttactgtgccgattaagaaatatacacatgagatactaaccctgtggtatagagctcctgaagtcctcttgggtgctacccattactcaatggcggtggacatttggtccgtaggctgcatatttgccgaacttgtcaccaaacaagcactctttcctggtgattccgaactgcaacaactcctgcatatattcaggctattgggtactcccaacgaagacgtgtggccaggcgtgagtaaactaatgaactggcatgaataccctcaatggaaccctcaaagtctgtcaacggctgttccaagtttggatgagcttggactggatgtgctatctcaaatgttgaaatatgaaccttccaagaggatttctgccaagaaagcaatggaacatgtatactttgatgacctggacaagaggcacctttagaaagaacaaattgatccaatatttggacgtagaattttatgactaccaatttactctatgcttctctcgagcgtgtattctaatccg

SEQ ID NO: 62928 - protein, 314 aa, Glycine max
MEKPGGGGVLSAKEAFEKLEKVGEGTYGKVYRAREKAMGKIVALKKTRLHEDEEGVPPTTLREVSILRMLSRDPHVVRLMDVKQGQNKEGKTVLYLVFEYMDTDLKKFIRSFRQTGQTVPPQTIKSLMYQLCKGVAFCHGHGILHRDLKPHNLLMDPKTMMLKIADLGLARAFTVPIKKYTHEILTLWYRAPEVLLGATHYSMAVDIWSVGCIFAELVTKQALFPGDSELQQLLHIFRLLGTPNEDVWPGVSKLMNWHEYPQWNPQSLSTAVPSLDELGLDVLSQMLKYEPSKRISAKKAMEHVYFDDLDKRHL

SEQ ID NO: 62929 - DNA, 909 bp, Emericella nidulans
  CDS (1)..(909)
atgacccgaacccaccccagctcctttcagcagctggaaaagctcggtgaaggaacttatgccacggtctacaagggccggaattgccaaacaggggagatggtggcgctgaaggagattcacctcgactcggaagaagggacgccatctacggcgattcgcgagatttctctaatgaaggaactgcaccacgataacatcctttcgctatacgacgtcgtgcacaccgagaataagctcatgctagtattcgagtacatggaccaggacctgaagaaatatatggacacacacggaaatcatggtcaacttgagcccgcgatagtcaagtcattcgcttttcagcttctgcggggtatcgcgttttgccacgataatcggatactccaccgcgatctcaaaccccagaatctgcttatcaactccaagggccaactcaaactcgccgatttcggccttgcgcgcgcgttcggaattccagtcaacacattctctaatgaggtagttacgctctggtaccgcgcaccagacgtgctcctcggcagccgcacctataatacgacaatcgatatctggtcgatcggttgcatcattgcggagatgttcactgggcgcgcgttgtttccaggcacgacgaatgaggaccagcttcagaagattttccgcgtcatgggcacgccttctgagcgtacttggcctggagtttctcagtttccggaatacaaaagtgattttcccgtttaccctcctcaggacctgcgacaagtcgtccctaggattgatccatacggtctcgacctactccggtgtatgttgcgccttcaaccggatttacgaatcagtgccgtcgatgcgctgcgacatccttggtttaatgatgttcctggggctcagccagtccctgtgtga

SEQ ID NO: 62930 - protein, 302 aa, Emericella nidulans
MTRTHPSSFQQLEKLGEGTYATVYKGRNCQTGEMVALKEIHLDSEEGTPSTAIREISLMKELHHDNILSLYDVVHTENKLMLVFEYMDQDLKKYMDTHGNHGQLEPAIVKSFAFQLLRGIAFCHDNRILHRDLKPQNLLINSKGQLKLADFGLARAFGIPVNTFSNEVVTLWYRAPDVLLGSRTYNTTIDIWSIGCIIAEMFTGRALFPGTTNEDQLQKIFRVMGTPSERTWPGVSQFPEYKSDFPVYPPQDLRQVVPRIDPYGLDLLRCMLRLQPDLRISAVDALRHPWFNDVPGAQPVPV

SEQ ID NO: 62931 - DNA, 897 bp, Ustilago maydis
  CDS (1)..(897)
atggacaagtatcaaaggatcgaaaaggtcggcgaaggaacatatggtgtcgtatacaaggcaaaggacttgacaccgggtgccaacggtcgtatcgttgcgctcaaaaagattcgtctcgagacagaagatgagggtgtcccttccacagccatccgcgagatctcattactcaaggaactcagagatgacaacatcgtaaggctgttcgacattgttcaccaggaaagcaggctgtacctcgtctttgagttcctcgatcttgacctgcgcaagtacatggaccatgtctcgcgaaaccgcggaggcgacggtatgggtcccgaaatcgttcgcaagttcacctatcagctcattcgcggtctttactactgccacgcacaccgcatcctccaccgcgacttgaagcctcagaaccttcttatcgaccgcgaaggtaacctcaaactcgccgactttggtctcgcccgtgcctttggtatccctctccgcacctatacccacgaagttgtaacgctctggtaccgtgcgcccgaagtgctgctgggctcgcgacactacagcaccgccatcgacatgtggtccgtcggctgcatctttgccgagatgactttgggacatccgctcttcccaggtgactccgagattgaccagatctttaaaatctttcgcgcgctcggcacccccactgacgacgtttggccgggagtacagcagctgcccgactacaaggatagcttccccaagtgggccggacgaccgctgcgcgatgctgtgcctggcctcgacgaggcaggcttggatctgctcgagggcatgctcgtttacgaccccgcaggaaggacatccgccaagcgcagtcttgtccacccgtacttcaggaggctcctcacatga

SEQ ID NO: 62932 - protein, 298 aa, Ustilago maydis
MDKYQRIEKVGEGTYGVVYKAKDLTPGANGRIVALKKIRLETEDEGVPSTAIREISLLKELRDDNIVRLFDIVHQESRLYLVFEFLDLDLRKYMDHVSRNRGGDGMGPEIVRKFTYQLIRGLYYCHAHRILHRDLKPQNLLIDREGNLKLADFGLARAFGIPLRTYTHEVVTLWYRAPEVLLGSRHYSTAIDMWSVGCIFAEMTLGHPLFPGDSEIDQIFKIFRALGTPTDDVWPGVQQLPDYKDSFPKWAGRPLRDAVPGLDEAGLDLLEGMLVYDPAGRTSAKRSLVHPYFRRLLT

SEQ ID NO: 62933 - DNA, 1167 bp, Oryza sativa
  CDS (69)..(977)
cggcgctccaccaccaggcggcggcggcgccggtgacgacgacgacggacgggggcgagctgcgggcgatggacctgtacgagaagctggagaaggtcggggaggggacgtacgggaaggtgtacaaggcgcgggagaaggcgacggggcggatcgtggcgctgaagaagacgcggctgccggaggacgacgagggcgtgccgccgacggcgctcagggaggtgtcgctgctgcggatgctgtcgcaggactcgcacgtggtgcgcctgctggacctcaagcaggggcagaacaaggagggccagaccatcctctacctcgtcttcgagtacatggacaccgacctcaagaagttcatccgcgcccaccgccagaatctccagaagatccccgtgcccaccgtcaagatcctgatgtaccagctctgcaagggcgttgctttctgccatggccgcggtgtgctgcaccgtgacctcaagccgcataacctgctcatggaccgcaagaccatggcgctcaagatcgccgacctcgggctcagccgctcgttcactgtccctctcaagaagtacacccacgagatcctgacgctgtggtacagggctcccgaggttcttcttggcgcggcacactactccactccggttgacatctggtctgtgggctgcatttttgctgagttggccactaaccaacctcttttcgctggagattccgaggttcagcagcttctgcacattttcaagttgctgggcaccccaaatgagcaagtttggccaggagtgagcaagctacctaactggcacgagtacccccagtggaatccctcgaaagtgtctgatcttgtccatggtctcgacgctgatgctcttgatcttcttgagaaaatgctgcagtacgagccgtcgaagcggatctctgcgaagaaggccatggagcatccctacttcaacgacgtgaacaaggagctctactgaaggtcgattgatgatgttcaccaccaaggaaaaaaaaacgttgtgcgtcttcgtgactagcctgccctgaagcattgcttttgcttttagggggaaaagtactgtttgtgtctgtttcctggatgctgcttagtgtgcttaagaattcacttgtttgtgatggtaatgagtaatgacttaagaattcgac

SEQ ID NO: 62934 - protein, 302 aa, Oryza sativa
MDLYEKLEKVGEGTYGKVYKAREKATGRIVALKKTRLPEDDEGVPPTALREVSLLRMLSQDSHVVRLLDLKQGQNKEGQTILYLVFEYMDTDLKKFIRAHRQNLQKIPVPTVKILMYQLCKGVAFCHGRGVLHRDLKPHNLLMDRKTMALKIADLGLSRSFTVPLKKYTHEILTLWYRAPEVLLGAAHYSTPVDIWSVGCIFAELATNQPLFAGDSEVQQLLHIFKLLGTPNEQVWPGVSKLPNWHEYPQWNPSKVSDLVHGLDADALDLLEKMLQYEPSKRISAKKAMEHPYFNDVNKELY

SEQ ID NO: 62935 - DNA, 1470 bp, Festuca arundinacea
  CDS (5)..(1114)
caagatggtgatgatggtggaccctccgaacggcatggggaaccacggcaagcactactacaccatgtggcagaccatgttcgagatcgacaccaagtacgtgcccatcaagcccatcgggagaggggcctacgggatcgtctgctcatccatcaaccaggagaccaacgagaaggtcgccatcaagaagatgaacaacgtcttcgacaaccgcgtggatgcgctcaggacgctgcgcgagctcaagctcctccgccacctgcgccacgagaacgtgatttgcttgaaggatataatgatgcctgtacacaggaggagcttcaaggatgtgtacctggtctcggagctcatggacacggatctgcatcagatagtcaagtcgttgcagccgctttccaatgaccactgccagtatttcctttttcagctactccgagggctgaagtaccttcattcagcagggattctccatagagacctgaaaccagggaaccttctggttaatgcaaactgtgatctgaagatctgtgactttggcctggctcgcacaaacaacactaaaggtcagtttatgactgaatatgttgtcacccgctggtatagagctcctgagctgctgctctgctgcgacaactatggcacctccatagatgtctggtctgttggctgcatatttgctgagctacttggccgcaagccgatctttccgggaactgagtgcctaaatcagcttaagcttatagtcaatgttcttggcaccatgagtgacagtgaccttgagttcattgacaaccggaaagctcgcaactacatcaaatcccttccatacaccccagggattcccctctctaacatgtacccacaggtgcaccctcttgccattgatctgttgcagaagatgcttgtctttgatccttctaaaaggattagtgtcattgaggctctggcgcacccctacatgtctgagctgtatgatccagccgcaaaccctcctgcccaggtacccattgatcttgatatagatgaaaacatcggtgtagagacgatccgagaaatgttgtggcaggagatgctccagtaccaccctgaggccgccacaatggtgaatatgtgacaagcaggaatgaacatgtgagagcagtatgccgcaccaggctcttcgcatgttcgttttttgtataaatcttacatcgactatcacacctaccaagatatcacgtccggtgatctgttttgtaaatatttgcacaataagccagcgtatggatttttctggctatggatcactacttgtagtatatatgttgtactgtgttgtagaagcggaattcagttatcagagacttgtgtaagttgtaatcttttctttttaacctgtgtaagttgtaatcttagacgctcctctatatatggaggtgtcaactttcgagtgaccttggttccatctgttttgctacaaaaaaaaaaaaa

SEQ ID NO: 62936 - protein, 369 aa, Festuca arundinacea
MVMMVDPPNGMGNHGKHYYTMWQTMFEIDTKYVPIKPIGRGAYGIVCSSINQETNEKVAIKKMNNVFDNRVDALRTLRELKLLRHLRHENVICLKDIMMPVHRRSFKDVYLVSELMDTDLHQIVKSLQPLSNDHCQYFLFQLLRGLKYLHSAGILHRDLKPGNLLVNANCDLKICDFGLARTNNTKGQFMTEYVVTRWYRAPELLLCCDNYGTSIDVWSVGCIFAELLGRKPIFPGTECLNQLKLIVNVLGTMSDSDLEFIDNRKARNYIKSLPYTPGIPLSNMYPQVHPLAIDLLQKMLVFDPSKRISVIEALAHPYMSELYDPAANPPAQVPIDLDIDENIGVETIREMLWQEMLQYHPEAATMVNM

SEQ ID NO: 62937 - DNA, 927 bp, Halocynthia roretzi
  CDS (1)..(927)
atgactacaatggaagattacatcaaaattgaaaagattggtgaaggtacctacggggttgtctacaaaggtaggaacaaaaaaacaaaccagtacgtagctctcaaaaagattcgactggaaagcgaagaagagggcgtcccaagcactgctattcgagaaatatcaattctaaaagaacttcaacatccaaacattgtcagcttacttgatgttttgttacaagaatcaaagctctacctagtgtttgaatttctacaaatggaccttaaaaagtatatggattccattccagcaggaaagtacatggacaaagaactggttaagagttacacctaccaaatcctgcaaggaatcacattctgtcattcgagaagagttctacatcgagatctgaaacctcagaaccttcttattgataaaaatggtatcatcaaattagcagactttgggctggctcgtgcattcggtattcctgttcgggtttacacccatgaggttgtcacattatggtatcgtgcacccgaagttcttctcggtgcatcacgttattcaactccggttgacatttggagcattggaactatttttgctgaaatggcaacgaaaaagccgctcttccatggggactcggagattgatcaattattcagaatattcagagtgctagggaccgctactgaagacgactggcccggtgtaacgtccctcaaggactacaagagaacctttcctaaatggaaaaaaggcatggtagttgaatctgttaaaaacttgaacgaagaaggaatagatttgctgcagaaatgtctcgtctatgatccggcaaaacgaatatctgccaaagcagccctaatgcatccatacttcaataaccttgataaaaagctttgcctggtactcacgtctgccttgttccacgaatag

SEQ ID NO: 62938 - protein, 308 aa, Halocynthia roretzi
MTTMEDYIKIEKIGEGTYGVVYKGRNKKTNQYVALKKIRLESEEEGVPSTAIREISILKELQHPNIVSLLDVLLQESKLYLVFEFLQMDLKKYMDSIPAGKYMDKELVKSYTYQILQGITFCHSRRVLHRDLKPQNLLIDKNGIIKLADFGLARAFGIPVRVYTHEVVTLWYRAPEVLLGASRYSTPVDIWSIGTIFAEMATKKPLFHGDSEIDQLFRIFRVLGTATEDDWPGVTSLKDYKRTFPKWKKGMVVESVKNLNEEGIDLLQKCLVYDPAKRISAKAALMHPYFNNLDKKLCLVLTSALFHE

SEQ ID NO: 62939 - DNA, 1101 bp, Emericella nidulans; identical to SEQ ID NO: 62825
  CDS (139)..(1101)

SEQ ID NO: 62940 - protein, 320 aa, Emericella nidulans
MDKSQQPSSFQQLEKLGEGTYATVFKGRNRQTGELVALKEIHLDSEEGTPSTAIREISLMKELKHESIVSLYDVIHTENKLMLVFEYMDKDLKKYMDTRGDRGQLDQATIKSFMHQLMSGIAFCHDNRVLHRDLKPQNLLINKKGQLKLGDFGLARAFGIPVNTFSNEVVTLWYRAPDVLLGSRTYNTSIDIWSAGCIMAELYTGRPLFPGTTNEDQLQKIFRLMGTPSERSWPGISQLPEYRANFHVYATQDLGLILPQIDPLGLDLLNRMLQLRPEMRIDAHGALQHPWFHDLPQLQAQLQQQQMAGYGGMMPPQQAY

SEQ ID NO: 62941 - DNA, 1179 bp, Populus tremula x Populus tremuloides
  CDS (61)..(981)
ctttgaaagcagagaagcatagagagagagagagagagagtagcaacagcaacgagcacgatggtgtcggcgatggatttgttcgagaagctagagaaagtaggagagggaacttacgggaaagtttacagagcaagggagaaagccaccgggaagatcgttgcactcaaaaagacacgtctccatgaagacgatgaaggtgtcccacccaccactcttcgcgaagtctccatcttgcgtatgctttccagagatcctcacatcgtccgattgttggacgtgaaacaagggcaaaataaagaaggcaagacagttttgtatctggtttttgagtacatggacaccgatctcaagaaatttatccgaagctttcgccaaactggagagaacattcctataaaaaatgtcaagagcttgatgtatcaactatgtaagggtgtggctttctgccatggccatggagtcttacacagggatcttaagcctcataatctcttgatggaccgcaagactatgatgcttaaaatagctgatctcggactagctcgagcatttactcttcctattaagaagtatacccatgagatattgactttgtggtatagatctcctgaagtccttttgggggctacccattactcaactgcagtggatgtatggtctgttggctgtatatttgctgaactggccacaaagcaagcactcttccctggagactctgaactgcaacagctcctgcatattttcaggttattaggtactccaaatgaagaaatgtggccaggagtaagcaacctgatgaactggcatgagtatccccaatggaaacctcagagtttgtcatcagctgttactaatttggacaaggatgggctggatttactatcacaaatgttgcagtatgacccttcaaagcgcatctcagcaaagaaagccatggaacatccttactttgatgatctagagaaggaccatctctgagaatcacaatgctgcgactagtatgggcagcaaccttgtttggtgattttaggaccggcgaactgaatttatgtactgaatctatttgcttcactcaagcatactgatcggagtcgtgttatatttgtcgtagtatgatgcttaatgttgaatctttatcaatttaatgccattattgtttgcttaaaaaaaaaaaaa

SEQ ID NO: 62942 - protein, 306 aa, Populus tremula x Populus tremuloides
MVSAMDLFEKLEKVGEGTYGKVYRAREKATGKIVALKKTRLHEDDEGVPPTTLREVSILRMLSRDPHIVRLLDVKQGQNKEGKTVLYLVFEYMDTDLKKFIRSFRQTGENIPIKNVKSLMYQLCKGVAFCHGHGVLHRDLKPHNLLMDRKTMMLKIADLGLARAFTLPIKKYTHEILTLWYRSPEVLLGATHYSTAVDVWSVGCIFAELATKQALFPGDSELQQLLHIFRLLGTPNEEMWPGVSNLMNWHEYPQWKPQSLSSAVTNLDKDGLDLLSQMLQYDPSKRISAKKAMEHPYFDDLEKDHL

SEQ ID NO: 62943 - DNA, 1515 bp, Physcomitrella patens
  CDS (278)..(1189)
gaattcggcacgagcgccagccagcctcgtatctgactgccttgtcgcgcgtgcccccttgtgacgcatcttcgtgcctcactaagaagccctcccggattgtcctgtcttcattcgtgcctacaaattggccgcatttcgctcccgcattctgcgatgaataaggctgcatcagctttgccgtccatcgtgttttgtttcgtcttcacttctcgttttgtgcggagctggtactccatcaggcgatttggtctgatctcgttacctcaagtttcaaatggatcagtatgagaaagtggagaagattggagagggcacatacggtgtcgtatacaaggcccgggatcgcctcactaatgaaactattgctctgaaaaaaatacggctggagcaagaagatgaaggtgttccaagcaccgccattcgagaaatttcactcctgaaagaaatgcaccatggcaacatcgttcggctacaagatgtggtgcatagtgagaaacgattgtacttggtttttgaatacctggacctcgacctaaagaagcatatggacacctgcccggaccttgccaaagacccacgcttgatcaagacctttctataccagatcttgcggggcattgcttattgccatgcccacagggtccttcacagagacttgaaacctcagaatcttttgattgatcgacgtaccaatgctttgaagctagctgactttggccttgcacgagcttttggtattcctgtcaggacattcactcatgaggtggtaacattgtggtacagagcaccagaaattctcttaggttctcgccactactctacacctgtagatgtgtggtctgtaggatgcattttcgctgagatggtcaatcaacggcccttgtttccaggagattctgagatagatgagctgttcaaaatcttcaggacacttggcactccaaatgaagaagtttggccaggtgtaacttcattgccagatttcaagactgcttttccaaagtggcctccgaagcctttgtcatcagtcgtacctagccttgagccagcaggcatcgacttgctagaggtatgtgatctttcaactccggcatctgaattctgtgtggttttgtttttttttattatttctacttttagtctaattgttcgccttaagcaatgcatgcagtcatatgcctcttgaaaccagaatgatgggagcagcgtattcggatattgcaatttgttccaatatcggtttccaagtcttacgttattaggacacctgaaacagaaaatgctgacacttgagccaagtcgacgggtaacagcacgaaatgcattggaacacgagtatttcaaggatatcggtcttgtaccctgattcttgtatgcaacttgtatgatactgtctagggtatccctgcaaggcagctactttagattctgaagatcggattgcctccgtcgcctttcctactatgcaaaaaaaatgccattttttttcccaacaaaaaaaaaaaaaaaaaa

SEQ ID NO: 62944 - protein, 303 aa, Physcomitrella patens
MDQYEKVEKIGEGTYGVVYKARDRLTNETIALKKIRLEQEDEGVPSTAIREISLLKEMHHGNIVRLQDVVHSEKRLYLVFEYLDLDLKKHMDTCPDLAKDPRLIKTFLYQILRGIAYCHAHRVLHRDLKPQNLLIDRRTNALKLADFGLARAFGIPVRTFTHEVVTLWYRAPEILLGSRHYSTPVDVWSVGCIFAEMVNQRPLFPGDSEIDELFKIFRTLGTPNEEVWPGVTSLPDFKTAFPKWPPKPLSSVVPSLEPAGIDLLEVCDLSTPASEFCVVLFFFIISTFSLIVRLKQCMQSYAS

SEQ ID NO: 62945 - DNA, 927 bp, Sorghum bicolor
  CDS (1)..(927)
atggagatcaacatcgtggacaagtacgagaagctggagaaggtcggtgaggggacgtacgggaaggtgtacaaggcgcaggacaaggcgacggggcagctggtggcgctgaagaagacccggctcgagatggacgaggaagggatcccgcccaccgcgctccgcgagatctccctcctcaacctcctctcccactccatctacgtcgtccgactcctcgccgtcgagcaggccgccaagaacggcaagcccgtcctctacctcgtcttcgagttcctcgacaccgatctcaagaagtacctcgatgtctaccgtaggggacccgccgccaggccgctccccgctacactcatcaagaatttcctgtatcagttatgcaaaggagttgcacactgccatggccatggtgtccttcaccgggatttgaagccacaaaacctgctggtggacaaggataaagggatactcaagattgctgatcttggtcttggtagagctttcactgtgcctatgaaaagctacacccatgagattgtgacactttggtatagagctcctgaagttttgcttggagcaacacattactcaactggggttgatatgtggtctgttggatgcatctttgctgaaatggcccgacggcaggctctctttcccggtgactctgagttgcaacagttgcttcacatcttcaggttgctgggaacaccttctgaggagcagtggcctggagtgagtgaattgagggattggcatgaatttccacagtggaagcctcagagtttggcacgtgtcgtcccaacactggaacctgaaggcgttgacctgctatcgaaaatgcttcagcttgatccttcaaacaggatatcagctatagctgcgatggagcatccatactttgacagccttgacaagtcccagttctag

SEQ ID NO: 62946 - protein, 308 aa, Sorghum bicolor
MEINIVDKYEKLEKVGEGTYGKVYKAQDKATGQLVALKKTRLEMDEEGIPPTALREISLLNLLSHSIYVVRLLAVEQAAKNGKPVLYLVFEFLDTDLKKYLDVYRRGPAARPLPATLIKNFLYQLCKGVAHCHGHGVLHRDLKPQNLLVDKDKGILKIADLGLGRAFTVPMKSYTHEIVTLWYRAPEVLLGATHYSTGVDMWSVGCIFAEMARRQALFPGDSELQQLLHIFRLLGTPSEEQWPGVSELRDWHEFPQWKPQSLARVVPTLEPEGVDLLSKMLQLDPSNRISAIAAMEHPYFDSLDKSQF

SEQ ID NO: 62947 - DNA, 882 bp, Oryza sativa
  CDS (1)..(882)
atggagcagtacgaggaggagaagattggagagggcacgtacggggtagtgtacaaggcgcgggacaaggtcaccaacgagacgatcgcgctcaagaagatccggcttgagcaggaggatgagggtgtcccctccaccgccatccgcgagatctcgctcctcaaggagatgcatcaccgcaacatcgtcaggttacacgatgttatccacagtgagaagcgcataggtcttgtctttgagtatctggatctggacctgaagaagttcatggactcttgtccagagtttgcaaaaaaccccactttaattaagtcatatctctatcagatactccgcggcgttgcttactgtcattctcatagagttcttcatcgagatttgaaacctcagaatttattgatagatcggcgtactaatacactgaagcttgcagactttggtttagccagggcatttggaattcctgtccgcacatttactcatgaggttgtaaccttgtggtatagagctccagagatccttcttggatcaaggcagtattctacaccagttgatatgtggtcagttggttgtatctttgcagaaatggtgaaccagaaaccactgttccctggtgattctgagattgatgaattatttaagatattcagggtactaggaactccaaatgaacaaagttggccaggagttagctcattacctgactacaagtctgctttccccaagtggcaggcacaggctcttgcaactattgtccctactcttgaccctgctggtttggaccttctctctaaaatgcttcggtacgagccaaacaaaaggatcacagctagacaggctcttgagcatgagtacttcaaggaccttgagatggaacgctaa

SEQ ID NO: 62948 - protein, 293 aa, Oryza sativa
MEQYEEEKIGEGTYGVVYKARDKVTNETIALKKIRLEQEDEGVPSTAIREISLLKEMHHRNIVRLHDVIHSEKRIGLVFEYLDLDLKKFMDSCPEFAKNPTLIKSYLYQILRGVAYCHSHRVLHRDLKPQNLLIDRRTNTLKLADFGLARAFGIPVRTFTHEVVTLWYRAPEILLGSRQYSTPVDMWSVGCIFAEMVNQKPLFPGDSEIDELFKIFRVLGTPNEQSWPGVSSLPDYKSAFPKWQAQALATIVPTLDPAGLDLLSKMLRYEPNKRITARQALEHEYFKDLEMER

SEQ ID NO: 62949 - DNA, 1206 bp, Helianthus tuberosus
  CDS (65)..(979)
tccaaatcccaaatatatccgctcctctcccacatctctctcaatccccaaaccctaatccaccatggaagacaaatacgagaagctcgaaaaggtaggcgaaggtacctacggcaaagtctacaaagccaaagacaaaaacaccggcgaactcgtcgccttgaaaaaaaccagactcgaaatggacgaagaaggaatcccacccaccgcgcttcgcgagatctcgcttctgcaaatgctctcaacttcaatctacatcgttcgtcttctttgtgttcaacacatccagcacaaaggcaaacctatactttacctcgtgtttgagtatctggatacagatctgaagaagtttattgactcgcaccgtaaaggaccgaatccttcgcctcttccgccgtcgcagatccagagttttctgtaccagttgttgaaaggtgtggctcattgtcatggccatggtgtgcttcaccgagatcttaagccgcagaacttgttggttgataaggaaaaggggattttgaagattgcggatcttgggttgggtcgggcgtttacagttccgcttaaaagctatactcatgagattgttacgctttggtatagggctccggaggttctattgggatcggctcattactcgactggagttgatatgtggtctgtcggttgtattttcgctgaaatgtcaagaagacaagctttgtttcctggtgattctgagttccaacaactgcttcatatattcaggctgctcgggacaccgaccgaggaggtgtggccaggggttagcagcctaaaggactggcatgtctatccgcgttgggaagcacagaatttggcacgttctgttccgtcattggggcctgagggtgtagaccttctatcgaaaatgctgaaatacgaccctgcagacaggatttcggctaaacttgctatggatcatccttatttcgacagccttgaccgatctcagttctgaagcttctgtcctgctgtctgattgtaagaaatcatcatcatcttggtgattgattataccgtgtgatatgcattctacaagttatgttctttatcctacaagtgttatgtgtttatcgtgcttctgtagtatgtcatccaacaagaactcatctacaattccctattgtgatatacaaatattatgttttctcattgcgtattggattaaaaaaaaaaaaaaaaaaa

SEQ ID NO: 62950 - protein, 304 aa, Helianthus tuberosus
MEDKYEKLEKVGEGTYGKVYKAKDKNTGELVALKKTRLEMDEEGIPPTALREISLLQMLSTSIYIVRLLCVQHIQHKGKPILYLVFEYLDTDLKKFIDSHRKGPNPSPLPPSQIQSFLYQLLKGVAHCHGHGVLHRDLKPQNLLVDKEKGILKIADLGLGRAFTVPLKSYTHEIVTLWYRAPEVLLGSAHYSTGVDMWSVGCIFAEMSRRQALFPGDSEFQQLLHIFRLLGTPTEEVWPGVSSLKDWHVYPRWEAQNLARSVPSLGPEGVDLLSKMLKYDPADRISAKLAMDHPYFDSLDRSQF

SEQ ID NO: 62951 - DNA, 1233 bp, Helianthus tuberosus
  CDS (109)..(993)
cccaaaacctagtgagaggctttgttctctctcacacaaaaagcttcgattcttcatctcagatacagatatccactatccagttgagtttgttttactggacttgtgatggagcagtacgagaaggttgagaagattggtgaaggaacatacggtgtggtctacaaggctcgtgacaaagtgaccaatgaaacaattgctttgaaaaagatccgtctggaacaagaagatgagggtgtcccgagcacggctatcagagagatttcactgttgaaggagatgcaacatggaaacattgtcaggttacaggatgttgtgcacagtgacaaacgattgtatctagtttttgagtatctggaccttgatttgaagaagcacatggactcgtgtccagagttttcaaaggatccacgccttgtaaaaacgtttctttatcaaatcctacgtggcattgcttattgtcattcccatagagttctccacagagatctaaaacctcaaaacttgttaattgatcgccgtaccaatgcactaaaacttgccgattttggattggccagggcctttggtatccctgtcaggacgttcacacatgaggtggtgacactgtggtatagagcccccgaaattcttcttgggtcccgtcactattctactcctgttgatgtgtggtccgttggttgtatatttgctgagatggtgaaccagcgaccactctttcctggagactcagagattgatgaacttttcaagattttcaggatcatgggaactccaaatgaagagacatggcctggtgtcacttctctgcctgactttaagtccgcctttccaaagtggtcatcaaaggatctggcaaccgtggtcccgaatcttgaaaaagccggtctcgatctcttatgtaaaatgctgtggcttgatcccagtaaaaggattacagcccggaccgcactggagcatgaatacttcaaagatatcggattcgtgccataatccaccaatgttgtcttcatgagcccttttttaaggtttgattatgtgatatatgtgtggcgtttttaggaaccttaaaagtaaggtgctttgttgctaagccattatcgaattggcttgtgcttgtgcgtgttcatctgaatccttaaaaagttttaaatcccttgtaacagttttcttgatgaaggacatatcatcatgctttttatttcctttcaatggatttgtttggtgtgcaat

SEQ ID NO: 62952 - protein, 294 aa, Helianthus tuberosus
MEQYEKVEKIGEGTYGVVYKARDKVTNETIALKKIRLEQEDEGVPSTAIREISLLKEMQHGNIVRLQDVVHSDKRLYLVFEYLDLDLKKHMDSCPEFSKDPRLVKTFLYQILRGIAYCHSHRVLHRDLKPQNLLIDRRTNALKLADFGLARAFGIPVRTFTHEVVTLWYRAPEILLGSRHYSTPVDVWSVGCIFAEMVNQRPLFPGDSEIDELFKIFRIMGTPNEETWPGVTSLPDFKSAFPKWSSKDLATVVPNLEKAGLDLLCKMLWLDPSKRITARTALEHEYFKDIGFVP

SEQ ID NO: 62953 - DNA, 912 bp, Oryza sativa
  CDS (1)..(912)
atggagaagtacgagaagctggagaaggtgggggaagggacgtacgggaaggtgtacaaggcgcaggacagggcgacggggcagctggtggcgctgaagaagacgaggctggagatggacgaggaggggatcccgcccaccgcgctgcgcgagatctccatcctcaggctgctctcccagtcgctctacgtcgtccgcctcctctccgtcgagcaggccaccaagaacggcaagcccgtcctctacctcgtcttcgagttcctcgacaccgacctcaagaagttcgtcgacgcctaccgcaagggccccaaccctcgccccctccccaccaacgtcatcaagagcttcttgtatcagttatgcaaaggagtcgcacattgccatggccatggtgtccttcaccgtgatttaaagccacaaaacctgttggtcgacaaggaaaaggggatattgaaaattgctgatcttgggctaggtagggcgttcactgttcctatgaaaagctacacacatgagattgtgactctttggtacagagctcctgaagttttgcttggatcaacacattactcaaccggtgttgacatttggtccgttggttgcatcttcgctgaaatggtcagaagacaagctctttttccaggtgactctgagttgcaacagttgcttcacattttcaggttgttgggaactcctactgaggagcagtggcctggagtaactgatttgagggactggcatgagtttccacagtggaagccacagattttagaacgtcaagtcccatcattggagcctgaaggagttgaccttttatcgaaaatgctccagtataacccagcaaatcggatctcagcaaaggctgctatggaacacccctacttcgacagcctcgacaagtcccagttctag

SEQ ID NO: 62954 - protein, 303 aa, Oryza sativa
MEKYEKLEKVGEGTYGKVYKAQDRATGQLVALKKTRLEMDEEGIPPTALREISILRLLSQSLYVVRLLSVEQATKNGKPVLYLVFEFLDTDLKKFVDAYRKGPNPRPLPTNVIKSFLYQLCKGVAHCHGHGVLHRDLKPQNLLVDKEKGILKIADLGLGRAFTVPMKSYTHEIVTLWYRAPEVLLGSTHYSTGVDIWSVGCIFAEMVRRQALFPGDSELQQLLHIFRLLGTPTEEQWPGVTDLRDWHEFPQWKPQILERQVPSLEPEGVDLLSKMLQYNPANRISAKAAMEHPYFDSLDKSQF

SEQ ID NO: 62955 - DNA, 1299 bp, Daucus carota
  CDS (100)..(984)
tcttttccgcataaaatcttcccctttcctctctcgagatttctctcccccatcttctcgctctgtcttcagtgcagagatttctattcagtcgaccaaatggaccagtatgaaaaggttgagaagattggggaggggacgtatggggtagtttataaggctcgtgaccgcgttacaaatgaaactattgctttaaagaaaattcgtttagagcaggaagatgagggagtgccaagcactgctattagagaaatttctttactgaaggagatgcagcatgaaaatattgtcaggctacaagatgttgtgcatagcgagaaacggctgtatctggtatttgaatatctggacctggatctgaagaaacatatggattcatgtccagagtttgcaaaggatccacgtctgattaaaatgtttctgtatcaaatactgcgtggtattgcttattgtcattcccatagagttctgcatcgcgatctcaaaccccaaaacctgctcatagatcgccgtaccaatgctctaaagcttgcagattttggacttgccagggcatttggaattccagtcaggacatttacccacgaggtggtgacactttggtacagggccccagagatactccttggatcccgccactactccacaccagttgatgtgtggtcagttggttgtatttttgctgagatggtgaaccaacagccattgtttccgggcgattctgagattgatgaattatttaagattttcagaattgtgggtaccccaaatgaggatacctggcctggagtaacagctcttcctgattttaagtctgccttcccaaaatggccatctaaggaactgggaaacgtagtcccaaatctcgatgtggccggtctcaatctcctcaaaaaaatgctttgcttggatcccagcagaagaattactgccaggagtgcacttgagcatgaatacttcaaggatatcgggattgttccttaagtcttatctctccggctggaattgtatattcatgatagagtttatggtgtttgattttttaagatatgtgtgctagtattttgataattatttactttccttctccttggaagtggttcgtattgcatccaagctggattgctggagcaatcatatatagtctctccctgcattttaaaatgtgatgttcaatggcacatgtattgtcaaattttttgtaattttttgtactgttgctaggcatacatttgaaattttttatttaaggaagtatgttttgattgaaaaaaaaaaaaaaaaaaaaaaaaaaaaaaa

SEQ ID NO: 62956 - protein, 294 aa, Daucus carota
MDQYEKVEKIGEGTYGVVYKARDRVTNETIALKKIRLEQEDEGVPSTAIREISLLKEMQHENIVRLQDVVHSEKRLYLVFEYLDLDLKKHMDSCPEFAKDPRLIKMFLYQILRGIAYCHSHRVLHRDLKPQNLLIDRRTNALKLADFGLARAFGIPVRTFTHEVVTLWYRAPEILLGSRHYSTPVDVWSVGCIFAEMVNQQPLFPGDSEIDELFKIFRIVGTPNEDTWPGVTALPDFKSAFPKWPSKELGNVVPNLDVAGLNLLKKMLCLDPSRRITARSALEHEYFKDIGIVP

SEQ ID NO: 62957 - DNA, 1132 bp, Coffea arabica
  CDS (1)..(885)
atggatcagtatgagaaggtggagaagataggggaaggaacgtatggagtggtgtacaaggcacgtgacaagtcgactaatgaaactattgctttgaagaagattcgtctggagcaggaagatgaaggtgtgccgagcactgctattagagaaatttctctcttgaaagagatgcagcatggaaacattgtcaggttgcaggatgtggtgcacagcgagaagcgcttatatcttgtatttgagtatctggacttggatctgaagaagcacatggattcctgtccagaattctctaaggacccacgccttgtaaaaatgtttctgtatcaaatccttcgtggtatcgcatattgccattctcacagagttcttcatagagacttgaaaccacaaaacttgctcatagatcgccgtactaatgcactgaagcttgcagattttggattggcccgtgcctttggtattcctgtcaggacatttactcatgaggttgttacgctgtggtacagggcaccagaaatactacttggatcacgccactattctactcctgttgacgtgtggtcagttggctgcatatttgctgagatggtgaaccagcggcctttgttccctggggattctgagatagatgaactcttcaaaattttcagagttatgggcactccaaatgaggatacttggcctggagtaacctctctgcctgatttcaagtctgcatttccaaggtggctttcacaggatctggcaactgtggttcccaatcttgatgctgctggtcttgatctcctgcgtaaaatgctgtgcctggatcccagcaagagaatcacagctaggaatgcacttgagcatgagtacttcaaagatatcggttttgtcccttaatattgtcttcgcctcctattggttgcaagtgtatattggtgtctgtcatccatgggattttattcagtcatatatgtgtgctcttagggtgattattttttgttctttgatttccttggtcgcattcaatctatattgcagtggtttgctggcgtggaatccaaatttcttgttctttatatatgttgaattccagtttaatgctcaaagatatacattcggtttgtcaaaaaaaaaaaaaaaaaaa

SEQ ID NO: 62958 - protein, 294 aa, Coffea arabica
MDQYEKVEKIGEGTYGVVYKARDKSTNETIALKKIRLEQEDEGVPSTAIREISLLKEMQHGNIVRLQDVVHSEKRLYLVFEYLDLDLKKHMDSCPEFSKDPRLVKMFLYQILRGIAYCHSHRVLHRDLKPQNLLIDRRTNALKLADFGLARAFGIPVRTFTHEVVTLWYRAPEILLGSRHYSTPVDVWSVGCIFAEMVNQRPLFPGDSEIDELFKIFRVMGTPNEDTWPGVTSLPDFKSAFPRWLSQDLATVVPNLDAAGLDLLRKMLCLDPSKRITARNALEHEYFKDIGFVP

SEQ ID NO: 62959 - DNA, 942 bp, Arabidopsis thaliana; identical to SEQ ID NO: 62757
  CDS (31)..(942)

SEQ ID NO: 62960 - protein, 303 aa, Arabidopsis thaliana
MDAFEKLEKVGEGTYGKVYRAREKATGKIVALKKTRLHEDEEGVPSTTLREISILRMLARDPHVVRLMDVKQGLSKEGKTVLYLVFEYMDTDVKKFIRSFRSTGKNIPTQTIKSLMYQLCKGMAFCHGHGILHRDLKPHNLLMDPKTMRLKIADLGLARAFTLPMKKYTHEILTLWYRAPEVLLGATHYSTAVDMWSVGCIFAELVTNQAIFQGDSELQQLLHIFKLFGTPNEEMWPGVSTLKNWHEYPQWKPSTLSSAVPNLDEAGVDLLSKMLQYEPAKRISAKMAMEHPYFDDLPEKSSL

SEQ ID NO: 62961 - DNA, 948 bp, Arabidopsis thaliana; identical to SEQ ID NO: 62753
  CDS (37)..(948)

SEQ ID NO: 62962 - protein, 303 aa, Arabidopsis thaliana
MEAFEKLEKVGEGTYGKVYRAREKATGMIVALKKTRLHEDEEGVPPTTLREISILRMLARDPHIVRLMDVKQGINKEGKTVLYLVFEYVDTDLKKFIRSFRQAGQNIPQNTVKCLMYQLCKGMAFCHGHGVLHRDLKPHNLLMDRKTMTLKIADLGLARAFTLPMKKYTHEILTLWYRAPEVLLGATHYSTGVDMWSVGCIFAELVTKQAIFAGDSELQQLLRIFRLLGTPNEEVWPGVSKLKDWHEYPQWKPLSLSTAVPNLDEAGLDLLSKMLEYEPAKRISAKKAMEHPYFDDLPDKSSL

SEQ ID NO: 62963 - DNA, 1104 bp, Drosophila melanogaster
  CDS (1)..(1104)
atgaagtaccattcgcacgtggtcatgcgtcccaagaagccgcccagacccaaatccgaggtctttctgaacaaacaggaaacgcatccgcgccggaaacgattcagtgcatttggtggcgactccccatttggcaagcaggaggcctatgttaaactcgagccgctgggcgaaggctcctatgcgacggtctacaaaggatttagcaaattaacctaccagcgggtggcgctgaaggagattcgcctgcaggaggaggagggagcacccttcaccgcgattcgcgaggcctcgctgctgaaagaactgaaacacagcaacatcgtcacgctgcacgacattgtccacacgcgcgagacgctgacctttgtctttgaatatgtgaatacggatctgtcgcaatacatggagaagcatccgggcggcctggatcatcgcaacgtgcgcctgttcctcttccagctgctccgtggactctcctactgccacaagcggcgtgtcctccatcgggatgtcaagccgcagaacctgcttattagcgactgcggcgaactgaagttggccgatttcggactggccagggccaagagcgtgcccagccacacctactcccacgaggtggtcacgttatggtaccgccctccagatgtcctgctgggcagcacggagtactcgacctcgctggacatgtggggcgtgggctgcatcttcgtggagatggtgaccgggatgccgacgtttccgggcatacgtgatacctacgatcagctggacaagatattcaaattgctgggcacgcccaccgaggacacgtggccgggagtcacccactttcccggctacaagccacacaagctgggtttctatcgaccacggaaactgggtcacaacttcccacggctatacgacatcatcgagggcgagacgatagctaacggcttcctgcaactgaatccggagcagcgtttgggcgccgatgatgcactgcagcatccgtactttgcgcagttgccaaagaaactctacgaattgccagacgaaacctcaattttcaccgtggaaggcgtgcagctttacacggagccaaatcgacagaataaatga

SEQ ID NO: 62964 - protein, 367 aa, Drosophila melanogaster
MKYHSHVVMRPKKPPRPKSEVFLNKQETHPRRKRFSAFGGDSPFGKQEAYVKLEPLGEGSYATVYKGFSKLTYQRVALKEIRLQEEEGAPFTAIREASLLKELKHSNIVTLHDIVHTRETLTFVFEYVNTDLSQYMEKHPGGLDHRNVRLFLFQLLRGLSYCHKRRVLHRDVKPQNLLISDCGELKLADFGLARAKSVPSHTYSHEVVTLWYRPPDVLLGSTEYSTSLDMWGVGCIFVEMVTGMPTFPGIRDTYDQLDKIFKLLGTPTEDTWPGVTHFPGYKPHKLGFYRPRKLGHNFPRLYDIIEGETIANGFLQLNPEQRLGADDALQHPYFAQLPKKLYELPDETSIFTVEGVQLYTEPNRQNK

SEQ ID NO: 62965 - DNA, 1249 bp, Juglans nigra x Juglans regia
  CDS (1)..(873)
atggaccagtacgagaaggtggagaagattggggaaggaacctatggtgtggtatataaggctcgtaaccgtaagacgaatcagactctagctttaaagaagattcgcttggagcaggaagacgagggagtaccaagcacggcaatacgggaaatctccctcttgaaagaaatgcagcatgggaacattgtcaagttacaggacgtagtgcacggcgagaagcgcttgtatctggtttttgagtaccttgacttggatttgaagaagcacatggattcatctccagaatttgcaaatgatctacgccaaataaaaatgtttcttcatcaaattctccgtggcattgcttactgtcattcccatagagttcttcatcgagatctgaaaccccagaatttgctaatagatcgccgcagcaattcgctaaagcttgcagactttgggctggccagagcatttggtattcctgtcaggacatttacacatgaggtggtgactctctggtacagagctccagaaatattgcttggatcccgccattactctacccctgttgatgtgtggtcagtcggttgcatcttcgccgaaatggttaaccaacggccattatttcctggcgactctgagattgatgaacttttcaagattttcagagtcttgggtactccaaatgaggatacatggcctggtgtgacttctttgcccgattataaaggtgcctttcccaaatggcctcctaaggatctagctgctgtggtttcaagtctggattcaaccggagttgatcttctttctaaaatgctctccttggatcccagcagaaggatcacggccaggactgccctcgagcatgaatacttcaaagatatctgatttacacctcgattatctgcaaccatcctcgtggcagagaactgtctatattagtattgtgtagctaatatatcgcttttgattgtgtgagaaatatgcgcgctgcattttttatgcgattcttcttattgcaatttccttcggattgagtttagattttactttgatttggttttggagagacatatttgaatcagctagggtatgtttcatttctctccttactctctccatgtcataaagatatataactgccattttgtctccaattcgaattcgcttgtaatcgacaatctatccgttctgagagaaactattttttttcatgtagatttggaaagttcagatttaaaaaaaaaaaaaaaaaaaaaaaaaa

SEQ ID NO: 62966 - protein, 290 aa, Juglans nigra x Juglans regia
MDQYEKVEKIGEGTYGVVYKARNRKTNQTLALKKIRLEQEDEGVPSTAIREISLLKEMQHGNIVKLQDVVHGEKRLYLVFEYLDLDLKKHMDSSPEFANDLRQIKMFLHQILRGIAYCHSHRVLHRDLKPQNLLIDRRSNSLKLADFGLARAFGIPVRTFTHEVVTLWYRAPEILLGSRHYSTPVDVWSVGCIFAEMVNQRPLFPGDSEIDELFKIFRVLGTPNEDTWPGVTSLPDYKGAFPKWPPKDLAAVVSSLDSTGVDLLSKMLSLDPSRRITARTALEHEYFKDI

SEQ ID NO: 62967 - DNA, 1288 bp, Arabidopsis thaliana
  CDS (176)..(1069)
ctcctctcttcaagcttttcacagaaaaccaccacccttctctctctactgcctttttaccacagagaagagagaggatccgtcggtgtgctagtctcactgacactacatccgatcgtcgccggtgacattttataagtgtggagtttacttcagctttattattcaggaattgatggatcagtacgagaaagttgagaagattggtgaaggaacttacggtgtggtttataaggcacgtgacaaagtgactaatgagacaattgctttgaagaagatcaggctagagcaggaggatgaaggtgttcctagcacagcaatcagagaaatctccctcttgaaagaaatgcagcacagcaacattgtcaaattgcaggatgtggtgcacagcgagaaacgtttgtatctggtttttgagtatcttgacttggatctcaaaaagcacatggattctactcctgatttctccaaggatctacatatgatcaaaacatatctttaccagattctccgtggaattgcgtattgccactctcatagggttctccatcgtgatctgaagccacagaatttgttgattgatcgccgcacaaactcactgaagcttgctgattttggactggccagagcattcggtatccctgtcaggacatttactcatgaggttgttactctctggtaccgagcaccagagatactcctaggatctcatcattactctacacctgttgatatttggtctgtggggtgcatatttgctgagatgatcagccaaaagcccttatttcctggagactccgagattgatcaactcttcaagattttcagaatcatgggaactccgtacgaggatacatggcgtggggtaacttctctaccggattataaatctgctttccctaaatggaaaccaacggacctagaaacttttgtccccaatctagatcccgatggagtcgatctcctttctaaaatgctgttaatggatccgaccaaaagaatcaacgcaagagccgccctggagcatgatacttcaaggatcttggaggcatgccttagaaaggcataaaaccagtaatctccttcattctatatataattatcaatcctaagaaaatgaagaacaatattaatgggttttgtttattctttttctgagttcgtttcctacttatattctattacgaaaaaaaagaaagaagaagatttcgagtgtgtttttttttacttctaagcttttgagatcagtttcttgtatcttattttacccagaatatagtatttcccc

SEQ ID NO: 62968 - protein, 297 aa, Arabidopsis thaliana
MDQYEKVEKIGEGTYGVVYKARDKVTNETIALKKIRLEQEDEGVPSTAIREISLLKEMQHSNIVKLQDVVHSEKRLYLVFEYLDLDLKKHMDSTPDFSKDLHMIKTYLYQILRGIAYCHSHRVLHRDLKPQNLLIDRRTNSLKLADFGLARAFGIPVRTFTHEVVTLWYRAPEILLGSHHYSTPVDIWSVGCIFAEMISQKPLFPGDSEIDQLFKIFRIMGTPYEDTWRGVTSLPDYKSAFPKWKPTDLETFVPNLDPDGVDLLSKMLLMDPTKRINARAALEHDTSRILEACLRKA

SEQ ID NO: 62969 - DNA, 1247 bp, Helianthus annuus
  CDS (99)..(983)
gagtgagaggctttgttctctctcacacaaaagcttcgattcttcatctcagatacagatatccactatccagttgagtttgttttactggacttgtgatggagcagtacgagaaggttgagaagattggtgaaggaacatatggtgtggtctacaaggctcgtgacaaagtgaccaatgaaacaattgctttgaaaaagatccgtttggagcaagaagatgagggtgtcccgagcacggctatcagagagatttcactgttgaaggagatgcaacatggaaacattgtcaggttacaggatgttgtgcacagtgacaaacgattgtatctagtttttgagtatctggaccttgatttgaagaagcacatggactcgtgtccagagttttcaaaggatccacgccttgtaaaaacgtttctttatcaaatcctacgtggcattgcttattgtcattcccatagagttctccacagagatctaaaacctcaaaacttgttaattgatcgccgtaccaatgcactaaaacttgccgattttggattggccagggcctttggtatccctgtcaggacattcacacatgaggtggtgacactgtggtatagagcccccgaaattcttcttgggtcccgtcactattctactcctgttgatgtgtggtccgttggttgtatatttgctgagatggtgaaccagcgaccactctttcctggagactcagagattgatgaacttttcaagattttcaggatcatgggaactccaaatgaagagacatggcctggcgtcacttctctgcctgactttaagtccgcctttccaaagtggtcatcaaaggatctggcaaccgtggtcccgaatcttgaaaaaaccggtctcgatctcttacgtaaaatgctgtgcttggatcccagtaaaagaattacagcccggaccgcactggagcatgaatacttcaaagatatcggattcgtgccataatccaccaaggttgtcttcatgagcccttttttaaggtttgattatgtgatatatgtgtggcgtttttaggaaccttaaaattaaggtgctttgttgctaagccattatcgaattggcttgtgcttgtgcgtgttcgtctgaatccttaaaaagttttaaatcccttgtaacagttttcttgatgaaggacatatcatcatgctttttatttcctttcaatggatttgtttggtgtgcaatttgcgcgtggtacggatttgtgct

SEQ ID NO: 62970 - protein, 294 aa, Helianthus annuus
MEQYEKVEKIGEGTYGVVYKARDKVTNETIALKKIRLEQEDEGVPSTAIREISLLKEMQHGNIVRLQDVVHSDKRLYLVFEYLDLDLKKHMDSCPEFSKDPRLVKTFLYQILRGIAYCHSHRVLHRDLKPQNLLIDRRTNALKLADFGLARAFGIPVRTFTHEVVTLWYRAPEILLGSRHYSTPVDVWSVGCIFAEMVNQRPLFPGDSEIDELFKIFRIMGTPNEETWPGVTSLPDFKSAFPKWSSKDLATVVPNLEKTGLDLLRKMLCLDPSKRITARTALEHEYFKDIGFVP

SEQ ID NO: 62971 - DNA, 1116 bp, Lytechinus variegatus
  CDS (1)..(1116)
atggcatctcctgtgccttcccagtcatcccctgagcgttatgttcaggctgcagagatcggcagtggagcatatggcatcgtgtacaaagccagggacacagaaactggtcactttgtggccttgaagagtgtgcggataccaattggtgaggagggcatgcctgtttctaccataagagagatatccttgctccgacatctttgtcagctagaccatcctaatattgttaaacttcttgacgtttgtgatgtgatggatgttggaagatcagagatgatgttaactttggtctttgagcttgtagaccaggacctagcccagtatcttgagagatgtcctcccccaggattaagttctagtactatcaaggtattaatgcaacagcttcttagtggtgtagaatatcttcactcccaccgtgttactcacagagatttgaagccacagaatattctcattgcttgtgataagaaactcaagctcactgattttggtttgtcacgtgtttacagttttcaaatggctctgactccagtggtggtcacaatgtggtatcgggcacctgaagttcttctacaggctagctatgcaacaccagttgacatgtggagtgttggatgcatatttgctgagcttcataggagaaggcctctgttcaggggacagtctgacaaggatcaacttcataaaatatttgaggttattgggcttccaccggaggatcaatggccagatgttgcacttccatggagctcctttcgtcagactggacagcgatctttcctagaccttgtccaggagatatgcaatcatggcctcgatctattggagcgaatgctatgtttcaatccagaccatcggatcacagctgagcaaagcctgtcacacagttactttgacgatgaacagggtgatgaggaggaagaagatgatgacgataccgaagtggaggaagaggatgatgatgagggggttgatgttggccaagaacgtagtctatcggtagcgtcttcaagaatgagcctttctacagacgactctggttcacattcacagtttggtgttagtgacgactcacagtctcaagaaatcacaccaactaatgtgcgatga

SEQ ID NO: 62972 - protein, 371 aa, Lytechinus variegatus
MASPVPSQSSPERYVQAAEIGSGAYGIVYKARDTETGHFVALKSVRIPIGEEGMPVSTIREISLLRHLCQLDHPNIVKLLDVCDVMDVGRSEMMLTLVFELVDQDLAQYLERCPPPGLSSSTIKVLMQQLLSGVEYLHSHRVTHRDLKPQNILIACDKKLKLTDFGLSRVYSFQMALTPVVVTMWYRAPEVLLQASYATPVDMWSVGCIFAELHRRRPLFRGQSDKDQLHKIFEVIGLPPEDQWPDVALPWSSFRQTGQRSFLDLVQEICNHGLDLLERMLCFNPDHRITAEQSLSHSYFDDEQGDEEEEDDDDTEVEEEDDDEGVDVGQERSLSVASSRMSLSTDDSGSHSQFGVSDDSQSQEITPTNVR

SEQ ID NO: 62973 - DNA, 954 bp, Drosophila melanogaster
  CDS (1)..(954)
atgtcatatgtacgccagctgaagcggcagaaaatgtcccaggcgaagaagttcggcgatggcgatccgttcaactaccaggagctcaacatcatcggcgaaggtgcctatggaacggtttacagagcccgcgatgtgatcaccggcaacatagtggcgctgaagaaggttaggatatcgctgaacgagaacggtgtgccaatgtccacgctgcgggagatttcgctgctgaagcagctgaatgccagcaatcatgcgaatattgtcaaactgtacgaagtatgccagtttctggagcgcgacggccaattgctgattctgttggctttcgaacatgtggagcaggatctttcggatcttatagacagacttcccaaatcgggcatgtcgccgcccacaattcagcgcttgtcaagggaactactgaccggtgtggacttcttacactcacaccgcatcatccatcgggatctgaagccgcaaaacctgctggtctcctcgcagggccacctcaagatcgccgactttggcctggccaagacctacggttcggagatgaagctcacctccgtggtggtcaccttgtggtaccgcgcacccgaggttctgctcgcccagccctacaacagcaccgtggacatctggagtgccgcctgcatcatcttcgagatgttcaatcggcgcgccctattcccgggcacctccgaaaagaatcagctggaccgcatcttcgaactgactggcagacccacggagcaacagtggccacagaccatttccgtggccctggaacactttccccagcggcatccaaagagaccaaaagacttttgcccacacctgtgcaagtacgccgatgatctgttgaataaaatgctttcctacgacctccacctgcgaccatccgccttggcctgtttggagcacgattactttcagcaggaacccctatag

SEQ ID NO: 62974 - protein, 317 aa, Drosophila melanogaster
MSYVRQLKRQKMSQAKKFGDGDPFNYQELNIIGEGAYGTVYRARDVITGNIVALKKVRISLNENGVPMSTLREISLLKQLNASNHANIVKLYEVCQFLERDGQLLILLAFEHVEQDLSDLIDRLPKSGMSPPTIQRLSRELLTGVDFLHSHRIIHRDLKPQNLLVSSQGHLKIADFGLAKTYGSEMKLTSVVVTLWYRAPEVLLAQPYNSTVDIWSAACIIFEMFNRRALFPGTSEKNQLDRIFELTGRPTEQQWPQTISVALEHFPQRHPKRPKDFCPHLCKYADDLLNKMLSYDLHLRPSALACLEHDYFQQEPL

SEQ ID NO: 62975 - DNA, 942 bp, Arabidopsis thaliana
  CDS (1)..(942)
atggacgagggagttatagcagtttccgccatggatgctttcgagaagcttgagaaagttggtgaagggacatacgggaaagtttacagagccagagagaaagctaccgggaaaatcgtcgctctaaagaagacgcgtctccatgaggacgaagaaggcgttccttccaccactctccgcgagatctccattttgcgaatgctcgctcgtgatcctcacgtcgtcaggttaatggatgttaagcaaggactaagcaaagaaggcaaaactgtactgtacctggtttttgaatacatggacactgatgtcaagaaattcatcagaagtttccgtagcactggcaagaacattccaacccaaactatcaagagcttgatgtatcaactatgcaaaggtatggcattctgccatggtcacgggatattgcacagagatctcaagcctcacaatctcttgatggatcccaagacaatgaggctcaaaatagcagatcttggtttagccagagccttcactctgccaatgaagaagtatacccatgagatattaactctttggtatagagctccagaggttcttcttggtgccacccattactctacagctgtggatatgtggtctgttggctgcatatttgctgaacttgtgaccaaccaagcaatctttcagggagactctgagctccaacagctcctccatattttcaagttgtttgggacacccaatgaagaaatgtggccaggagtgggcacactcaagaactggcatgaatacccacagtggaaaccatcgactctattctctgctgttccaaacctcgacgaggctggagttgatcttctatctaaaatgctgcagtacgagccagcgaaacgaatctcagcaaagatggctatggagcatccttactttgatgatctgccagaaaagtcctctctctaa

SEQ ID NO: 62976 - protein, 313 aa, Arabidopsis thaliana
MDEGVIAVSAMDAFEKLEKVGEGTYGKVYRAREKATGKIVALKKTRLHEDEEGVPSTTLREISILRMLARDPHVVRLMDVKQGLSKEGKTVLYLVFEYMDTDVKKFIRSFRSTGKNIPTQTIKSLMYQLCKGMAFCHGHGILHRDLKPHNLLMDPKTMRLKIADLGLARAFTLPMKKYTHEILTLWYRAPEVLLGATHYSTAVDMWSVGCIFAELVTNQAIFQGDSELQQLLHIFKLFGTPNEEMWPGVGTLKNWHEYPQWKPSTLFSAVPNLDEAGVDLLSKMLQYEPAKRISAKMAMEHPYFDDLPEKSSL

SEQ ID NO: 62977 - DNA, 1608 bp, Acrosiphonia duriuscula
  CDS (120)..(1133)
aagagaagcctgtcaactcgagcagtacaaccagtgcctattttcgctaggcagaactttgcgtgtgcgttggtttgcttttcgtatcagtgttcttagtagagcggtgcacagtcgcgatgccgcgaaatcgagacgactcccctgacggagcgtacctaattcatggaagatacgagaagatcgaaaaacttggggaaggtacatacggcaaagtgtacaaagcgagggactcgaagacagaccaagtcgtagctctcaagaagtgccgactccagttggatgctgaaggtgtcccaccaacaactatccgcgaagtctctctgctgcaagtattgagtagaagcaatcacgtggtcaagcttcttggagtggaacagattgaagaggatggcaaagttgtgctgtacctgatttttgagtacttgcagcatgatctgaagaagttcatggacttcaagaagaaggagaaacacaaccctctgcagcccgaattggtgaagccgtacttattccaacttattcgaggcatggctttcatgcaccagcatggtgtcatgcacagagatctgaagccacaaaacttgctcgtagacccaaagaccaacgttctcaagattgccgatcttggcctgggccgagtgtttgccttgccctgtaaagcttacactcatgagatcgtgacgctgtggtatcgcgcacctgaggtgctgcttgggacaaaaatttattcgctaccagtcgatgtttggagcatcggctgcatctttgcagagatggttaaggggattccattctttccagctgattgcgagatcgcacagcttttcatgatcttccaagtgttgggcacacccaacgaggaagtctggcctggcgtgacaagcctacgggactggcatatgtacccacagtggcaaccaatggacctgcacactcacttggaaggcttgcttgaccatcagggatgtgacctgctcaagaagatgcttgtctacaaccctaacaaacgtatcccggcaaagcaggcgatgaagcatccatactttgacgacctggacatggaggtcatggatgccctggagaatcccgaagtgctaaatgccggcatggagtaccaggaaaacgcgtgatctaatcacacatgttcctggggtatggaaacggattctgcacgtactctgtgtttgtgattggcgcattggacctatgcagtctagctgagtgtgaattgaaacaaattgaacagacataaacaatagcagaactcagactacggtgtttccagtggttttatcaattcggtgttttgaaaggttgctggagagtctccaagtgccgaggaatgaagtatgcccataccagttgcccctcgaataatactaacatggttgcggtggtgcgcattgcgagtgtcagctgctgtccctgagctgtgcttttacctactgtaacgctggcagtgcaaccgagctagaaccagtataatattttacgtacagtagtagaaggctagagtcgagaaactgctgagtactgttcgcgcgcaagcatgtaaacgttaacttgaccccaaaaaaaaaaaaaaaaaaaaaaaaaaaaaaaaaa

SEQ ID NO: 62978 - protein, 337 aa, Acrosiphonia duriuscula
MPRNRDDSPDGAYLIHGRYEKIEKLGEGTYGKVYKARDSKTDQVVALKKCRLQLDAEGVPPTTIREVSLLQVLSRSNHVVKLLGVEQIEEDGKVVLYLIFEYLQHDLKKFMDFKKKEKHNPLQPELVKPYLFQLIRGMAFMHQHGVMHRDLKPQNLLVDPKTNVLKIADLGLGRVFALPCKAYTHEIVTLWYRAPEVLLGTKIYSLPVDVWSIGCIFAEMVKGIPFFPADCEIAQLFMIFQVLGTPNEEVWPGVTSLRDWHMYPQWQPMDLHTHLEGLLDHQGCDLLKKMLVYNPNKRIPAKQAMKHPYFDDLDMEVMDALENPEVLNAGMEYQENA

SEQ ID NO: 62979 - DNA, 1332 bp, Populus tremula x Populus tremuloides
  CDS (192)..(1076)
ccacgcgtccggagagaaagcatctgtggctactttctgagagagagagggaaaaaaaagagagtaaagagcaaagcaacaaagttgcagagtgagtgattgtgtatctgtgcttccttttctttctttcttcttggtaagagaagagagagagaggcggtgtttgatttgaccaacccatacccattcccatggatcagtatgagaaagtggaaaaaattggtgaaggaacctacggagtggtctacaaagctcgtgatcgtgtcaccaatgagaccattgctttgaagaagatccgtttggagcaggaagacgagggcgtacccagcactgctatccgagaaatttctctcttgaaagagatgcagcatggtaacattgtcagactgcaggatgtggtgcacagtgagaagcgcctttacttggtttttgagtatctagacttggatttgaagaagcacatggattcttctcctgaatttgctaaggatccacgccttgtgaaaacatttctttatcaaattctccgtggcattgcttactgccattctcatagagttctgcatcgagatttgaaacctcagaatttgcttattgatcgccgtaccaacgctctgaagcttgcagattttggtctggctagagcatttggtatacctgttaggacatttacacatgaggttgttaccctgtggtatagagcccctgaaattctgcttggatctcgccattactcaactccagttgatgtgtggtcggtgggatgtatatttgctgagatggtgaaccagaagccattattcccaggggattccgagattgatgaactattcaaaattttcagaatcttgggtactccaaatgaggacacgtggcctggagttacttctttgcccgacttcaagagtgcattccctaagtggccttctaaggatttggcaactgtagttccaacccttgaaaaagctggtgtggatcttctctctaaaatgcttttcttggatcccactaaaagaattactgccaggagtgctttggagcatgaatacttcaaggatattggttttgtaccataaatgccatttctcatcttctttttcaagacatttctgtctgtatcgatgtgcagcactcaagggctctgattttgtcccaaacaagcgtggtttcattactttcttcttggcattgaactgattaaagtacctttttttttttttcgtttgcaagcttgcttgtaagttgtaacagacttcagtctttgcgttgcctagcatcatctatttgatttcagtttaaaaaaaaaaaaaaaaaaaaaaaaaaaaaaaaaaa

SEQ ID NO: 62980 - protein, 294 aa, Populus tremula x Populus tremuloides
MDQYEKVEKIGEGTYGVVYKARDRVTNETIALKKIRLEQEDEGVPSTAIREISLLKEMQHGNIVRLQDVVHSEKRLYLVFEYLDLDLKKHMDSSPEFAKDPRLVKTFLYQILRGIAYCHSHRVLHRDLKPQNLLIDRRTNALKLADFGLARAFGIPVRTFTHEVVTLWYRAPEILLGSRHYSTPVDVWSVGCIFAEMVNQKPLFPGDSEIDELFKIFRILGTPNEDTWPGVTSLPDFKSAFPKWPSKDLATVVPTLEKAGVDLLSKMLFLDPTKRITARSALEHEYFKDIGFVP

SEQ ID NO: 62981 - DNA, 1279 bp, Solanum lycopersicum
  CDS (44)..(991)
cggcacgagagcgcacaaacacaaacacagcgagagtgaagaaatggaggctgctaaaaatgctggtaagagtgtatcggcgatggaggcatttgagaagctggagaaggttggggagggtacctatggaaaggtgtacagagcgagagataggattactggcaagattgttgcactgaagaagacaaggcttcatgaggacgaagaaggtgttcctccaactactctccgtgagatctcactcctcagaatgctctcaagggatccccacattgtcaggctgatggatgttaaacaagggcagaacaaagaaggaaagactgttctttacttggtctttgagtacatggatactgatgtcaagaaatttattcgtactttccgtgcaaaaggagaaactatgccccttaaaattgtaaagagcttgatgtaccagctctgcaaaggggttgctttctgccatggccatggtgtattgcacagggatctgaaaccacacaatcttctgatggaccgtaagacgaatgtgctcaaattagcagattttggacttggcagagcttatactctgcccattaagaagtacacacatgagatattaaccctgtggtatagagcccctgaggttctacttggagctactcattattccacagcagttgacatgtggtctgttggttgtatatttgctgaactagtgacaaaccaagccctcttcccaggagactctgagctgcaacaactgcttcacattttcagattgctaggtactcctaatgaagaactctggcctggggtgagcaagttagttaactggcatgaatacccccagtggaaaccacagccactctcaaccgttgtccctggtcttgatgaagatgggattcaccttctcagtgagatgttgcattatgagccgtctaggaggatttcagctaagaaagctatggaacatccctattttgatgatctcgacaaaactcctctctgaaaaaagtcagcaatttgatcaacaaaactcgtctaacctctatcgcaagcttttattgcttttctcaagcatcttttaatagtagtatcaattagtatgatgatgtgtttcatttctaaaccttttcttttaatatcaactggatcaatgtaagcacaactatgtgcaatgatatattttgctatcacattacttggggtgttttgctgtaaaaaaaaaaaaaaaaaaaaaaaaaaaaaaaaaaaaaaaaaaaaaaaaaaaaaaaaaaaaaaaaaaaaaaaaaaaaaa

SEQ ID NO: 62982 - protein, 315 aa, Solanum lycopersicum
MEAAKNAGKSVSAMEAFEKLEKVGEGTYGKVYRARDRITGKIVALKKTRLHEDEEGVPPTTLREISLLRMLSRDPHIVRLMDVKQGQNKEGKTVLYLVFEYMDTDVKKFIRTFRAKGETMPLKIVKSLMYQLCKGVAFCHGHGVLHRDLKPHNLLMDRKTNVLKLADFGLGRAYTLPIKKYTHEILTLWYRAPEVLLGATHYSTAVDMWSVGCIFAELVTNQALFPGDSELQQLLHIFRLLGTPNEELWPGVSKLVNWHEYPQWKPQPLSTVVPGLDEDGIHLLSEMLHYEPSRRISAKKAMEHPYFDDLDKTPL

SEQ ID NO: 62983 - DNA, 1261 bp, Solanum lycopersicum
  CDS (91)..(1002)
cggcacgagcttctctgtttgctttacgctcccctttctctttctctttccttaagatctgctaaaccaatcaatcaagcttcatcatcaatggagaaatacgagaaattggagaaggtaggtgaaggaacctatggaaaagtgtacaaagcaaaggacaaggctaccggacaattggtggctttgaagaagactcgtcttgaaatggatgaagaagggataccgcctactgctctcagagagatctcacttcttcaaatgctatctcattctctctacatcgtccgtttgctttgtgttgaacatattgacaaaaatgggaaaccaattctttatcttgtttttgagtatttggatactgatcttaagaaattcattgattctcatcggaaaggacctaatgctagggctcttcctactgccctcatccagagttttttgtttcaattgtgcaaaggggttgctcactgccatagccatggagttctccacagagatttgaagccgcagaatcttctagtggataaagagaagggaatacttaagattgctgatctggggcttggaagggcgtttactgttcctatgaagagctacacccatgagattgttactctatggtacagagctcctgaagttttgttgggatctactcattactcaactgctgttgatatgtggtctgtgggatgtatttttgccgagatggttagaaggcaagccttatttcctggtgactctgagttccagcaattgcttcacatattcaggttgttaggaactccaactgataagcagtggcctggagtgagttcactccgcgactggcatgtttatccacaatgggagcctcagaacttggcctctgctgttccagcattgggacctgatggtgtcgacctcctaacgaaaatgctcaaatttgatccatcagataggatttctgcgaaagctgcacttgatcatccatactttgacagcttggacaagtctcaattctgaggatgctcacttgcatcacttgtttaagtacattctcagtccatgaatgaggatatcatcgtcttggtgatttgaaatttgccatgttaatcttgtcactttcatatttcactgtattgttctagctcttctaatgtatttctaaaagatcccctgtaaaaaggcctgttttgcagtcaagtttagtgtattattacaatgttttgaggaaacaaaaaaaaaaaaaaaaaaaaaaaaaaaaaaaaaaaaaaaaaaaaaa

SEQ ID NO: 62984 - protein, 303 aa, Solanum lycopersicum
MEKYEKLEKVGEGTYGKVYKAKDKATGQLVALKKTRLEMDEEGIPPTALREISLLQMLSHSLYIVRLLCVEHIDKNGKPILYLVFEYLDTDLKKFIDSHRKGPNARALPTALIQSFLFQLCKGVAHCHSHGVLHRDLKPQNLLVDKEKGILKIADLGLGRAFTVPMKSYTHEIVTLWYRAPEVLLGSTHYSTAVDMWSVGCIFAEMVRRQALFPGDSEFQQLLHIFRLLGTPTDKQWPGVSSLRDWHVYPQWEPQNLASAVPALGPDGVDLLTKMLKFDPSDRISAKAALDHPYFDSLDKSQF

SEQ ID NO: 62985 - DNA, 2069 bp, Chlamydomonas reinhardtii
  CDS (279)..(1448)
gtactgaggtcatgtccacatagcaactagtcaatagcacaacacagaaacccgaccactccccttcgccttcgcgtcaaacgcaggccctactcgtctcggacagaatccagcactggaaaacattgtttgcacttgcatgagaacgattataacttaatccttgcaattcactgcggcactgcctgcaaccgagcacatttgacgaggacgcgtcttggttacccctttagtccaggcccatggcacggtgaaatacgatatagctacacagcaacatggcggaccctggggcccaacctgtcccagctccccagtctgcggaagagccggtcaccggaggccttcaagagtccgtggaagtcacagcgtcagggaaattagactcatacaaccgcgagtacaaccaattcctggtttgcggcagcctctttgagtgccccgctaagtacctgcccatcaagcccatcggcaagggggcgtatggcgtcgtctgctccgccaagaacctggacaaccaggagaaggtggccatcaagaagatcgcaaacgcctttgacaacgtcatcgacgccaaacgcaccctgcgcgagatcaagttgttgcgccacctgcagcacgagaacattgtgcagatcaaagacatcatcccgcccaccaaccgcgatgccttcaaggacctctacgtggtgtatgagctgatggacaccgacctgcaccagatcatccgctcgccacaggcgctgtccaacgaccacagccagtacttcctgtaccagctgttgagagggctcaaatacatccacagcgccaacatcctgcacagagatttgaagcccagcaacctgctcgtgaacgccaactgcgacctcaaaatctgcgacttcggccttgcacggaccagcaccagcaacgagaaggagttcatgacggagtacgtggtgacgcgctggtaccgcgcccccgagctgctgctgagctgcagcggctacaccactgccatcgacgtgtggtccgtgggctgcatcttcgcggagctgctgggccgcaagccgctgttccccggcaaggactacgtgcaccagctgtccctcatcaccaaggtgatcggctcccccagcgaggaggagcttggcttcatcaccagcgagaaggccaagcgctacatccgctcgctgccgcgatccgagcgagtggacttcgggcagctgtggccgcacgtcaccaagacggcgctggacctgattgacaagatgctggtgttcgaccccaccaagcgcatcaccgtggagcaggcgctggagcacccctacctggcctcgctgcacgacgtgtccgacgagcccgtgtgccccacacccttcaccttcgacttcgacagcgagcacctcacgccggacgtggtgcgggaggtcatactgcaggacatggccgagctgcacacctgaccgacgcaccagccgtgacggacggggacgatggacgggcggcaccgcataaacggtggcagctgccagccatcgtgggccaccggatgatcggagggccagcagcacagcagtacaggaggcctcgtgctgttgcggtggggctgcgaagttttgtacggatggatgagtgcggtggaggcgacgcgacgaggtggatgccccggacggcggtggcacccaatcaaagggccgcgctgtgtgcatgtgatgtgcatacgctgatgcaggcatgcgagcagcatatattgagtgtgagttacaacggaagtgctgcagctgggcgtgcgcgctgactagtgctggaccagaacttcttggttatatactgtccatacttgacgcgcctagacacgtgcaaggattggtttagtgagtgccatgatgtcatcgtaatggtgctgcgttgggcccgaggattgcgcccgcaggcagcaggtcaagggctgagctcaggcggggccggggcgtgtctaacgcgaatccgcatggggaccggcttgcgagttgcggcactgttcaggccgttcaggccaggtcacgaacaagtgtatatttctgttgacaaaaaaaaaaaaaaaa

SEQ ID NO: 62986 - protein, 389 aa, Chlamydomonas reinhardtii
MADPGAQPVPAPQSAEEPVTGGLQESVEVTASGKLDSYNREYNQFLVCGSLFECPAKYLPIKPIGKGAYGVVCSAKNLDNQEKVAIKKIANAFDNVIDAKRTLREIKLLRHLQHENIVQIKDIIPPTNRDAFKDLYVVYELMDTDLHQIIRSPQALSNDHSQYFLYQLLRGLKYIHSANILHRDLKPSNLLVNANCDLKICDFGLARTSTSNEKEFMTEYVVTRWYRAPELLLSCSGYTTAIDVWSVGCIFAELLGRKPLFPGKDYVHQLSLITKVIGSPSEEELGFITSEKAKRYIRSLPRSERVDFGQLWPHVTKTALDLIDKMLVFDPTKRITVEQALEHPYLASLHDVSDEPVCPTPFTFDFDSEHLTPDVVREVILQDMAELHT

SEQ ID NO: 62987 - DNA, 1334 bp, Nicotiana tabacum
  CDS (109)..(1020)
gttgcaaagggaaaatgctttactttacgctccccaaataactagtagttgaaattcatcactgttatctctaccactctcttcgttaaaatcaatcagcgtttaacaatggagaaatacgagaaattggagaaagtaggagaaggaacgtacggcaaagtatataaagcaaaggacaaggcgacgggacaattggtggcgctgaagaaaactcggctagaaatggacgaagaagggatcccacccactgccctaagagaaatctcgcttcttcaaatgctttcccattctctctacatcgttcgtctcctctgtgtcgagcaaattgacaaaaatgggaagccccttctttacctagtttttgagtatttggatactgatctgaagaaattcgtcgattctcatcgtaaaggtcccaatcctagacctctccctccttctctcatccagagtttcttatatcaattgtgcaaaggggtagctcactgccatagccatggagttctccacagagatttgaagccacagaacctattagtggacaaagagaagggcatacttaagattgctgatttgggccttggaagggctttcactgtcccaataaagagctacacccacgagattgttactctatggtacagagctcctgaggttttgttgggatctactcattactcaactgcggttgatatgtggtctgtgggatgtatttttgccgagatggttcgaaggcaagccttatttcctggtgactctgagtttcagcaactgcttcacatattcaggctgttaggaaccccaactgagaagcagtggcctggagtcagttcactccgcgactggcatgtttatccaaaatgggaacctcagaacttggcctctgctgttccagcattgggtcctgatggcgtggacctcctcacgaaaatgctccaatatgatccggcagataggatttcagcaaaagctgcacttgatcatccatacttcgatagcttggacaagtctcagttttgaggttgcttctacttctaagatcagccttaaggatcacttgcatcagttcataggacgttctcagtcttgaacaatatcatcttcttggtgatttgaaattggccttgtaatctttttcgtgaactttagtttgtccgagtgtagagattagagaatgcaagttaggttttgacatgctatattctcatttgtgctttgaagctgcaagttagggattttatcagaggaatttaacgttccttttgatcacacatgaaaaattggcatttgatctttaaaaaaaaaaaaaaaaaaaaaaaaaaaaaaaaaaaaaa

SEQ ID NO: 62988 - protein, 303 aa, Nicotiana tabacum
MEKYEKLEKVGEGTYGKVYKAKDKATGQLVALKKTRLEMDEEGIPPTALREISLLQMLSHSLYIVRLLCVEQIDKNGKPLLYLVFEYLDTDLKKFVDSHRKGPNPRPLPPSLIQSFLYQLCKGVAHCHSHGVLHRDLKPQNLLVDKEKGILKIADLGLGRAFTVPIKSYTHEIVTLWYRAPEVLLGSTHYSTAVDMWSVGCIFAEMVRRQALFPGDSEFQQLLHIFRLLGTPTEKQWPGVSSLRDWHVYPKWEPQNLASAVPALGPDGVDLLTKMLQYDPADRISAKAALDHPYFDSLDKSQF

SEQ ID NO: 62989 - DNA, 1173 bp, Nicotiana tabacum
  CDS (23)..(934)
tgaaatcaatcagcgtttaacaatggagaaatacgagaaattggagaaagtaggagaaggaacgtacggcaaagtatataaagcaaaggacaaagcaacgggtcaattggtggcgctgaagaaaactcggctagaaatggacgaagaagggattccacccactgctttaagagaaatatcacttcttcaaatgctttccaattctctctacatcgttcgtctcctctgtgtcgagcaaattgacaaaaatgggaagcctcttctttacctagtttttgagtatttggatactgatctgaagaaattcgtcgattctcatcgtaaaggtcctaatcctagacctctccctccttctctcatccagagtttcttatatcaattgtgcaaaggggtcgctcactgccatagccatggagttctccacagagatttgaagccacagaacctattagtggacaaagagaagggcatacttaagattgctgatttgggtcttggaagggctttcactgtcccaataaagagctacacccatgagattgttactctatggtacagagctcctgaagtcttgttgggatctactcattactcaactgcggttgatatgtggtctgtgggatgtatttttgccgagatggttcgaaggcaggccttatttcctggtgactctgagtttcagcaattgcttcacatattcaggttgttaggaaccccaactgagaagcagtggcctggagtgagttcactccgcgactggcatgtttatccaaaatgggaacctcagaacttggcctctgctgttccagcattgggtcctgatggtgtggatctcctcacgaaaatgctccaatatgatccggcagataggatttcagcaaaagctgcacttgatcatccatactttgatagcttggacaagtcgcaattctgaggttgcttctaatgctccaatatgctccaacatccatattttagttcttaggacgttctcagtcctgaagaatatcatcttcttggtgatttgaagtctgcattgtaatcttgtcgactttcatattttactgttatgatccagcttttctaaaggcctgttttatggtcaagtttcatgtagttcaaatgctatgaggaaaaaagttttcttttttgctgaaaaaaaaaaaaaaaaaa

SEQ ID NO: 62990 - protein, 303 aa, Nicotiana tabacum
MEKYEKLEKVGEGTYGKVYKAKDKATGQLVALKKTRLEMDEEGIPPTALREISLLQMLSNSLYIVRLLCVEQIDKNGKPLLYLVFEYLDTDLKKFVDSHRKGPNPRPLPPSLIQSFLYQLCKGVAHCHSHGVLHRDLKPQNLLVDKEKGILKIADLGLGRAFTVPIKSYTHEIVTLWYRAPEVLLGSTHYSTAVDMWSVGCIFAEMVRRQALFPGDSEFQQLLHIFRLLGTPTEKQWPGVSSLRDWHVYPKWEPQNLASAVPALGPDGVDLLTKMLQYDPADRISAKAALDHPYFDSLDKSQF

SEQ ID NO: 62991 - DNA, 1505 bp, Sporothrix schenckii
  CDS (421)..(1446)
ccttgctccttcctctccacgcccaaaacgacgacgacacgaccactccagcgtttctggactttttcgaccattctgcctcacgatcctctttgacgaccgtcgaccacctccactcggcagcgcggccaccgagacacactcgttctatccgtcccccgttggtcgccaaggcccagcgcgtcccctcgttttcttctttgcttctttcttcctcgcctgcttcccgacgacgccgccgtgagagaccatacgactcgagcgaccgttaacgccacgacatttcatcccttccgaacacccatcacgacatggcccttggcctctagagagcgtatccggcagacttttttgtatccattgtactcccttacttcgttgcatcgctctttttcgctccccaccacaacactcaccaccatggataattaccagaagctggaaaaggtcggcgagggcacgtacggtgttgtctacaaggcccgcgacctgacggccggcggacgcatcgtggcgctgaagaagatccggctcgaggccgaggacgagggcgtcccatcgacggccatccgcgagatcagcctgctcaaagagatgcgcgaccccaacatcgttcgcctctacaacattgtccacgccgaaggccacaagctgtacctcgtctttgagtttctggacctcgacctcaagaaatacatggactccctgcccgtgtccgacggcggtcgcggcaaggccctgcccgagggcaccggcacccggctgcacacgctgggcctcggcgacgacatcatcaagaagttcatgagccagctctgtgccggcatccgctactgccacagccaccgcatcctgcaccgcgatctcaagccccagaacctgctcattaacaaggaggggaacctcaagctcgccgatttcggtctcgcccgcgcctttggcgtgcccctccgcacctacacccacgaggtcgtcacgctgtggtaccgcgcccccgagattctgctgggcggccaccagtactcgaccggcgtcgacatgtggtccgtcggctgcatctttgccgagatggccatgcgcaagccgctgttccctggcgactcggaaattgacgagatcttcaagatcttccggctgctgggcacgcccaccgaagacgtgtggcccggcgtgacgacgtatcccgacttcaaggcctccttcccgcgctgggtgcaggacaccgagacgcccatctgcccgacgctggatcccatgggccaggaactgctggagctgatgctcgtgtacgacccggccagccgcctgtccgccaagcaggcgtgcaaccacccgtactttgacgatctcgaaaaggcgctgcccggcacggctgctgccgccgcgcgccagcacacgacgacggccgcagcaggcggtgcctacaacggcagcggataccactagcaaggggtcctctgctaaggcgtcgagtcgagagaacgaacgcacggtcaaccccctga

SEQ ID NO: 62992 - protein, 341 aa, Sporothrix schenckii
MDNYQKLEKVGEGTYGVVYKARDLTAGGRIVALKKIRLEAEDEGVPSTAIREISLLKEMRDPNIVRLYNIVHAEGHKLYLVFEFLDLDLKKYMDSLPVSDGGRGKALPEGTGTRLHTLGLGDDIIKKFMSQLCAGIRYCHSHRILHRDLKPQNLLINKEGNLKLADFGLARAFGVPLRTYTHEVVTLWYRAPEILLGGHQYSTGVDMWSVGCIFAEMAMRKPLFPGDSEIDEIFKIFRLLGTPTEDVWPGVTTYPDFKASFPRWVQDTETPICPTLDPMGQELLELMLVYDPASRLSAKQACNHPYFDDLEKALPGTAAAAARQHTTTAAAGGAYNGSGYH

SEQ ID NO: 62993 - DNA, 1454 bp, Sporothrix schenckii
  CDS (505)..(1425)
acccaccaacatcattactttacaaccattcgttctggtcgaggcctctcgtatcgtcgatatcggccaacgctcatctctcggtagtctcaacgtcgctctttacgctggcgacgccaacccgaccaacgccgggcgccgacgaatcccacctcgccgccctcgtcgagagtgtttcgcctggtgacgttctttttgatcggagccgcacaaggaccaccattgtaacatccatcccctcatggaggaccacatctcctgttggaggtgctgccacgtacggatcagaccggtaccgtgtcgaagacgacgacgacgaatttcggacgacgacgacattgtgggtcaattagcagctaccttgcaaacgtatactgcaaacccgccgtccctcagaccagcacctttggccttcccagccaaccccctgcagtgccccattttcgcacatatccgaccgccaccggagtggaagaatacacagccgaagcaaactacgtcaagatggatggcaaacgccaactgaattcgttccagcagctggagaagctgggcgaaggtacctatgctacagtctttaaaggtcgaaaccgccataccggcgagtttgtcgcgctcaaggaaatacatctcgactccgaggagggaacgccgtcgactgctatccgcgagatttcgctcatgaaggagctgaagcacgagaacattgttgcgctgcacgatgtcattcacaccgagagcaagctgatgcttgtgttcgagtacatggacggtgacttgaaaaagtacatggacaccaacggcgagcgcggtgccctgaagccgatgcttatcaagtccttcatgtaccaactactcaagggcatcgacttctgccaccagaaccgtgtcctccaccgcgacctgaagccccagaacttgctcatcaacggcaagggccagctgaagcttggcgacttcggtctcgcccgcgcctttggcatccctgtcaacaccttctcaaacgaggtcgtcaccctctggtaccgcgcgcccgatgtcctgctgggcagccgcacgtacaacacgagcattgacatttggtccgtgggctgcatcatggccgagatgtataccggccgcccactgttcccgggtaccaccaacgaagaccagatgctgcgcatcttccgaatcatgggaacacccgccgagcacaactggcccggcatcagccagttccccgagtacaaggccactgcgccgcgctatgccacgcaggacttgcgccagatcctcccgcagattgatgctacgggtatcgatctgctgcagcgtctgctgcagctgcgtcccgagctccgcatcagcgcacatgacgctctccagcacccttggttccacgatatcctgcagtaccagcactgccagcaagccgcgggataaaaaaaaaaaaaaaaaaaaaaaaaaaaaaa

SEQ ID NO: 62994 - protein, 306 aa, Sporothrix schenckii
MDGKRQLNSFQQLEKLGEGTYATVFKGRNRHTGEFVALKEIHLDSEEGTPSTAIREISLMKELKHENIVALHDVIHTESKLMLVFEYMDGDLKKYMDTNGERGALKPMLIKSFMYQLLKGIDFCHQNRVLHRDLKPQNLLINGKGQLKLGDFGLARAFGIPVNTFSNEVVTLWYRAPDVLLGSRTYNTSIDIWSVGCIMAEMYTGRPLFPGTTNEDQMLRIFRIMGTPAEHNWPGISQFPEYKATAPRYATQDLRQILPQIDATGIDLLQRLLQLRPELRISAHDALQHPWFHDILQYQHCQQAAG

SEQ ID NO: 62995 - DNA, 1470 bp, Prunus armeniaca
  CDS (52)..(1158)
gagaatctctctctgattaatgttgctcgccaagtattgagaagaaaaaaaatggcaactttagttgagcctccagatggaattaggcaacgggggaagcattattactcaatgtggcaaacattgtttgaggttgacaccaagtacgttccgatcaaacccatagggcgaggagcatatggcatagtgtgctcatccatcaatagggcaacaaatgagaaagttgcaatcaagaagatcaataatgtgtttgagaaccgaatcgatgcattgaggactctgagggagttgaagcttcttaggcatatccggcacgagaatgtgattgctttgaaggatgttatgatgcctatccacaggacaagtttcaaggatgtgtattttgtttatgagctcatggatacagatcttcatcaaattataaagtcctctcaaccactttccagtgaccattgcaaatactttctatttcagttgcttcgagggctcaagtatcttcactcagcaaacatccttcaccgggacttgaagcctggaaacctgctcatcaatgctaactgtgacttaaaaatatgtgattttgggttggcccgaaccagtggaggtactggccaattcatgacagagtatgttgtcactcgctggtatcgtgcaccagagctgctattgtgctgtgacaattatggaacatccattgacgtctggtccgtaggatgcatctttgctgagattcttggtcggaaaccaatcttccctggaactgaatgcctcaaccaactaaaactaattatcaatgttcttggtagccagcatgaacctgatcttgcattcattgacaatccgaaagccaggaagtacatcaaatcactgccctattctaggggaacacatttttcccgtctatacccccaagctgatccgttagctatagacttgttgcaaaggatgcttgtgtttgatccaactaagagaatctctgtcacagaagcactccaacacccttacatgtcagggttatatgatccaagatgcaatcctcctgcccaggttccgatcaacctcgacatagatgagaatttagcggaaccaatgattagggagatgatgtggcatgagatgcttcactaccacccagaagctgcttttgtgaatgcctaggtaattttcaaaaggctttccagtttcctcaacaatgcttcttcgtgcaattggtttataatagaaaaccatgcaatagagaaatgtggtgttagtcataatgatcttaacaagattttgtattatcttgtttggtagcttgaggtctctgaatgggacatactgtcttgtaactctgtatataattgtgctttgttatttgaagtgtacgactatggttctgtatcatcgataatgcatgtaagatatttcctaagaaaaaccaagggaattgaataaaggtgcatctattttaaaaaaaaaaaaaaaaaa

SEQ ID NO: 62996 - protein, 368 aa, Prunus armeniaca
MATLVEPPDGIRQRGKHYYSMWQTLFEVDTKYVPIKPIGRGAYGIVCSSINRATNEKVAIKKINNVFENRIDALRTLRELKLLRHIRHENVIALKDVMMPIHRTSFKDVYFVYELMDTDLHQIIKSSQPLSSDHCKYFLFQLLRGLKYLHSANILHRDLKPGNLLINANCDLKICDFGLARTSGGTGQFMTEYVVTRWYRAPELLLCCDNYGTSIDVWSVGCIFAEILGRKPIFPGTECLNQLKLIINVLGSQHEPDLAFIDNPKARKYIKSLPYSRGTHFSRLYPQADPLAIDLLQRMLVFDPTKRISVTEALQHPYMSGLYDPRCNPPAQVPINLDIDENLAEPMIREMMWHEMLHYHPEAAFVNA

SEQ ID NO: 62997 - DNA, 1170 bp, Triticum aestivum
  CDS (216)..(1100)
gcccccctctccccctcccccccacccccccaatggcggcagcagcagcagcagcagcagcagcttcgcccgccgcagccgctctcccccgcccctcctccccgtgatccccttccccttcccctcccccgcttcctcctctcccccctcccgcctcctcacccatttcccacgcccgcgccgccgccgccgccgtagcattggacgccgacccgatggagcagtacgagaaggtggagaagatcggggagggcacgtacggggtggtgtacaaggcccgggacaggaccaccaacgagaccatcgcgctcaagaagatccgcctggagcaggaggacgagggcgtcccctccaccgccatccgcgagatctcgctcctcaaggagatgcagcacggcaacatcgtcaagctgcacgatgttgtccacagcgagaagcgcatatggctcgtctttgagtacctggatctggacctgaagaagttcatggactcctgtccagagtttgccaagagccccgccttgatcaagtcatatctctatcagatactccgcggcgttgcttactgtcattctcatagagttcttcatcgagatttgaaacctcagaatttattgatagaccggcgtactaatgcactgaagcttgcagactttggtttagcaagggcatttggaattcctgtccgtacatttactcatgaggtagtaacattatggtacagagctcctgaaatccttcttggagcaaggcagtattccacaccagttgacgtgtggtcagtgggctgtatctttgcagaaatggtgaaccagaaaccactgttccctggcgattctgagattgatgagctatttaagatattcagggtactcggcactccaaatgaacaaacttggccaggcgtgagttccttgcctgactacaagtccgccttccccaggtggcaggcagaggaccttgcaaccgttgtccccaatcttgaacctgttggcctggaccttctctcgaaaatgcttcggttcgagccaaacaagaggatcacggctaggcaggctcttgagcatgagtacttcaaggacatggagatggtacagtgagctggctatgtggtagtgactggcatatgtatgagctgagctgctcgtttcattccttttgtgaacgctc

SEQ ID NO: 62998 - protein, 294 aa, Triticum aestivum
MEQYEKVEKIGEGTYGVVYKARDRTTNETIALKKIRLEQEDEGVPSTAIREISLLKEMQHGNIVKLHDVVHSEKRIWLVFEYLDLDLKKFMDSCPEFAKSPALIKSYLYQILRGVAYCHSHRVLHRDLKPQNLLIDRRTNALKLADFGLARAFGIPVRTFTHEVVTLWYRAPEILLGARQYSTPVDVWSVGCIFAEMVNQKPLFPGDSEIDELFKIFRVLGTPNEQTWPGVSSLPDYKSAFPRWQAEDLATVVPNLEPVGLDLLSKMLRFEPNKRITARQALEHEYFKDMEMVQ

SEQ ID NO: 62999 - DNA, 1115 bp, Oryza sativa
  CDS (134)..(1018)
acctctcctccgattaatcccctcccctcctcttcctcccacttctgcgcctgctcttcctcccctcgccgaccctacctactcgcgccgccgccgtcgcattgggcggcaaacggagggggggttaaccctgatggagcagtacgagaaggaggagaagattggggagggcacgtacggggtggtgtacagggcgcgggacaaggtcaccaacgagacgatcgcgctcaagaagatccggcttgagcaggaggatgagggcgtcccctccaccgcaatccgcgagatctcgctcctcaaggagatgcatcacggcaacatcgtcaggttacacgatgttatccacagtgagaagcgcatatatcttgtctttgagtatctggatctggacctaaagaagttcatggactcttgtccagagtttgcgaaaaaccccactttaattaagtcatatctctatcagatactccgcggcgttgcttactgtcattctcatagagttcttcatcgagatttgaaacctcagaatttattgatagatcggcgtactaatgcactgaagcttgcagactttggtttagccagggcatttggaattcctgtccgcacgtttactcacgaggttgtaaccttgtggtatagagctccagagatccttcttggatcaaggcagtattctacaccagttgatatgtggtcagttggttgtatctttgcagaaatggtgaaccagaaaccactgttccctggtgattctgagattgatgaattatttaagatattcagggtactaggaactccaaatgaacaaagttggccaggagttagctcattacctgactacaagtctgctttccccaagtggcaagcacaggatcttgcaactattgtccctactcttgaccctgctggtttggaccttctctctaaaatgcttcggtacgagccaaacaaaaggatcacagctagacaggctcttgagcatgaatacttcaaggaccttgagatggtacaatgaccctgctatggctttacattggattggcatatgtatgggctgggctcctcatttcattccttctgtgaacgctgtgcccttcgtttgggcatttttg

SEQ ID NO: 63000 - protein, 294 aa, Oryza sativa
MEQYEKEEKIGEGTYGVVYRARDKVTNETIALKKIRLEQEDEGVPSTAIREISLLKEMHHGNIVRLHDVIHSEKRIYLVFEYLDLDLKKFMDSCPEFAKNPTLIKSYLYQILRGVAYCHSHRVLHRDLKPQNLLIDRRTNALKLADFGLARAFGIPVRTFTHEVVTLWYRAPEILLGSRQYSTPVDMWSVGCIFAEMVNQKPLFPGDSEIDELFKIFRVLGTPNEQSWPGVSSLPDYKSAFPKWQAQDLATIVPTLDPAGLDLLSKMLRYEPNKRITARQALEHEYFKDLEMVQ

SEQ ID NO: 63001 - DNA, 1308 bp, Medicago sativa
  CDS (70)..(954)
cacggcgcgctgtctgtgtaaccgtttctctgaatttcaacatcgctttgaactttaagcgtttttttgatggaacagtacgagaaagttgagaagataggagaaggtacttacggtgtggtttacaaggctcgtgaccgtgctaccaatgagacgatagctttgaagaagattcgtcttgagcaggaagatgagggagttccgagtaccgctattcgagagatttctctcttgaaggaaatgcagcacaggaacattgttaggttgcaggatgtggtgcacagtgagaagcgattgtatctggtttttgagtaccttgacttggatctaaagaagtttatggattcatctccagaatttgcaaaagatcaacggcaaataaagatgttcctttatcaaattctctgtggcattgcttactgtcattctcatagagttcttcatagagacttgaaaccacagaatctgctgattgatcgcagctctaatgccgtaaagcttgcagattttggattggccagggcatttggaattcctgtcaggacatttacacatgaggtggtgacactctggtacagagctccagaaatattgcttgggtctcgtcattattctaccccggttgatgtctggtcagtgggatgcatatttgcagagatgataaaccaacggccacttttcccaggggactctgagattgatgaattgtttaaaatattcagaatcacgggtacaccgaatgaggaaacatggcctggagtgacttcattgcctgattttaaatcagcctttcccaagtggccagctaaggacctggcaactcaagtcccaaatctggagccagctggtcttgatcttctatccagtacttgtcgcttggatcccaccagaagaattactgccaggggagctcttgagcatgaatacttcaaagacattaagtttgtcccatgagttcttggcttcacggaagaggtgtctatattattgtgtgtatcatttatgggttttgactcagaaatgggtgctatccttggtattttcttcaatgcttggactgagtaatatttaatttattggttcttggattttttttagattcagcttgagtgtgatcatactgcctattaccttttttaatgtcttagtctcagtacaatgcaaccagcaaatttcctgtttgattgatgtataatattaatagacattgttgaatggtggttgtagaacaaatgttactcctactggcatggagcatgtaaatttgacatccgttcatgtctataagttggttttaaaaaaaaaaaa

SEQ ID NO: 63002 - protein, 294 aa, Medicago sativa
MEQYEKVEKIGEGTYGVVYKARDRATNETIALKKIRLEQEDEGVPSTAIREISLLKEMQHRNIVRLQDVVHSEKRLYLVFEYLDLDLKKFMDSSPEFAKDQRQIKMFLYQILCGIAYCHSHRVLHRDLKPQNLLIDRSSNAVKLADFGLARAFGIPVRTFTHEVVTLWYRAPEILLGSRHYSTPVDVWSVGCIFAEMINQRPLFPGDSEIDELFKIFRITGTPNEETWPGVTSLPDFKSAFPKWPAKDLATQVPNLEPAGLDLLSSTCRLDPTRRITARGALEHEYFKDIKFVP

SEQ ID NO: 63003 - DNA, 1126 bp, Oryza sativa
  CDS (35)..(913)
cccacgccgccgccgccgcccggatcgccgcgagatggagcagtacgagaaggtggagaagatcggggaggggacgtacggggtggtgtacaagggcaagcaccggcataccaacgagacgatcgcgctcaagaagatccgcctggagcaggaggacgagggcgtcccctccaccgccatccgcgagatctcgctgctcaaggagatgcagcatcgcaacatcgtcaggctgcaggacgtcgtgcacaaggagaaatgcatatacctcgtcttcgagtacctcgaccttgacctcaagaagcacatggactcatccccggatttcaagaaccaccgcatagtcaaatcgttcctctaccagattctccggggcattgcgtactgccactcgcaccgtgttctccaccgagatttgaagccccagaacctgctgatagatcggcgtaccaactcattgaagctcgcggactttgggttggccagggcatttggcattcctgtccggacatttactcacgaggtggtgacattgtggtatagagcacctgaaattcttcttggtgcaaggcattattccacccctgttgacatgtggtcagttggttgcatttttgctgaaatggtgaatcagaagccactatttcctggagattctgagattgatgaactctttaagattttcagtattatgggcactccaaatgaagaaacttggccaggtgttgcttcactacctgactacatatcaactttcccaaagtggccatctgtggatcttgcaaccgtggtcccaacacttgattcttcaggactcgatcttctctctaaaatgctccgtttagatccaagcaaaagaatcaatgcccgtgctgccctcgagcacgagtacttcaaggacctggaagtggcgtagattatgcctcatcttgtccatttgtaaattaagattgcattgtttgctcagccgagttcttttttggctttccttaatctaagttggtgtgctcctcccccaactctatttttgcccttttggttgtgtagagatgagaacagaaggtacctcctggctatccctctgtgtaattcaagccaattgaaagatccttattgcgggagctctaaa

SEQ ID NO: 63004 - protein, 292 aa, Oryza sativa
MEQYEKVEKIGEGTYGVVYKGKHRHTNETIALKKIRLEQEDEGVPSTAIREISLLKEMQHRNIVRLQDVVHKEKCIYLVFEYLDLDLKKHMDSSPDFKNHRIVKSFLYQILRGIAYCHSHRVLHRDLKPQNLLIDRRTNSLKLADFGLARAFGIPVRTFTHEVVTLWYRAPEILLGARHYSTPVDMWSVGCIFAEMVNQKPLFPGDSEIDELFKIFSIMGTPNEETWPGVASLPDYISTFPKWPSVDLATVVPTLDSSGLDLLSKMLRLDPSKRINARAALEHEYFKDLEVA

SEQ ID NO: 63005 - DNA, 954 bp, Candida albicans
  CDS (1)..(954): transl_table=12
atggtagagttatctgattatcaacgtcaagaaaaagtcggagaaggtacttatggggttgtttataaagcattagataccaagcacaataatagagttgttgcattaaagaaaattcgattagaatcagaagatgaaggtgtacctagtaccgccattagagaaatctcgttattaaaagaaatgaaagatgataatatcgttcgattatatgatattattcattcagattctcataaattatatttagtatttgaatttttggatttagatttaaagaaatatatggaaagtattcctcaaggagttggactaggggctaatatgataaaaagatttatgaatcaattaattcgaggtattaaacattgtcattctcatcgagttttacatcgtgatttaaaaccacaaaatttattgattgataaagaagggaatttaaaattagcagattttggattagctcgagcatttggagttccattaagagcatatactcatgaagttgtcactttatggtatcgagctcccgaaatcttgttaggagggaaacaatattccactggggtagatatgtggtctgttggatgtatatttgctgaaatgtgtaataggaaaccattatttcctggtgattcagaaattgatgaaattttccgaattttccgaattttaggaacacctaatgaagaaatttggcctgatgttaattatttaccagattttaaatcaagtttccctcaatggaaaaagaaacctttgagtgaagcagttccaagtttggatgctaatggaattgatcttttggatcaaatgttggtgtatgatccaagtagaagaataagtgctaaacgagctttaattcatccttattttaatgataatgatgatcgtgatcataacaattataatgaagataatattgggattgacaaacaccaaaacatgcaataa

SEQ ID NO: 63006 - protein, 317 aa, Candida albicans
MVELSDYQRQEKVGEGTYGVVYKALDTKHNNRVVALKKIRLESEDEGVPSTAIREISLLKEMKDDNIVRLYDIIHSDSHKLYLVFEFLDLDLKKYMESIPQGVGLGANMIKRFMNQLIRGIKHCHSHRVLHRDLKPQNLLIDKEGNLKLADFGLARAFGVPLRAYTHEVVTLWYRAPEILLGGKQYSTGVDMWSVGCIFAEMCNRKPLFPGDSEIDEIFRIFRILGTPNEEIWPDVNYLPDFKSSFPQWKKKPLSEAVPSLDANGIDLLDQMLVYDPSRRISAKRALIHPYFNDNDDRDHNNYNEDNIGIDKHQNMQ

SEQ ID NO: 63007 - DNA, 1283 bp, Antirrhinum majus; identical to SEQ ID NO: 62737
  CDS (29)..(913)
  misc_feature (1076)..(1076): n is a, g, c or t

SEQ ID NO: 63008 - protein, 294 aa, Antirrhinum majus
MEQYEKVEKIGEGTYGVVYKARDRVTNETIALKKIRLEQEDEGVPSTAIREISLLKEMQHGNIVRLQDVVHSEKRLYLVFEYLDLDLKKHMDSCPEFSQDPRLVKMFLYQILRGIAYCHSHRVLHRDLKPQNLLIDRRTNALKLADFGLARAFGIPVRTFTHEVVTLWYRAPEILLGSRHYSTPVDVWSVGCIFAEMVNQRPLFPGDSEIDELFKIFRVMGTPNEETWPGVTSLPDFKSAFPKWPAKELAAVVPNLDASGLDLLDKMLRLDPSKRITARNALQHEYFKDIGFVP

SEQ ID NO: 63009 - DNA, 885 bp, Arabidopsis thaliana
  CDS (1)..(885)
atggatcagtacgagaaagttgagaagattggtgaaggaacttacggtgtggtttataaggcacgtgacaaagtgactaatgagacaattgctttgaagaagatcaggctagagcaggaggatgaaggtgttcctagcacagcaatcagagaaatctccctcttgaaagaaatgcagcacagcaacattgtcaaattgcaggatgtggtgcacagcgagaaacgtttgtatctggtttttgagtatcttgacttggatctcaaaaagcacatggattctactcctgatttctccaaggatctacatatgatcaaaacatatctttaccagattctccgtggaattgcgtattgccactctcatagggttctccatcgtgatctgaagccacagaatttgttgattgatcgccgcacaaactcactgaagcttgctgattttggactggccagagcattcggtatccctgtcaggacatttactcatgaggttgttactctctggtaccgagcaccagagatactcctaggatctcatcattactctacacctgttgatatttggtctgtggggtgcatatttgctgagatgatcagccaaaagcccttatttcctggagactccgagattgatcaactcttcaagattttcagaatcatgggaactccgtacgaggatacatggcgtggggtaacttctctaccggattataaatctgctttccctaaatggaaaccaacggacctagaaacttttgtccccaatctagatcccgatggagtcgatctcctttctaaaatgctgttaatggatccgaccaaaagaatcaacgcaagagccgccctggagcatgaatacttcaaggatcttggaggcatgccttag

SEQ ID NO: 63010 - protein, 294 aa, Arabidopsis thaliana [sequence omitted]

SEQ ID NO: 63011 - DNA, 930 bp, Arabidopsis thaliana
  CDS (1)..(930)
atggagaagtacgagaagctagagaaggtcggagaaggaacatacgggaaagtctacaaagcgatggagaaaggaactggtaagcttgttgctctgaagaaaactcgtctcgagatggacgaagaaggtattccaccaactgctcttcgtgagatctcgcttctccagatgttatcaacatcgatctatgttgttcgattactctgcgtcgaacatgttcatcaaccatcaaccaaatctcaatctaccaaatccaatctctatctcgttttcgagtatctcgatactgatcttaagaaattcatcgattcgtataggaaaggacctaatcctaagcctcttgagccttttttgattcagaagttgatgtttcagctttgtaaaggtgttgcgcattgtcatagtcatggtgtgcttcaccgtgatcttaaaccgcagaatcttcttctggtgaaagataaagagcttcttaagattgctgatttgggtcttggtcgtgcttttactgttcctcttaagtcttatacgcatgagattgttactctttggtatagagctcctgaagttcttcttggatctactcattattcaactggtgttgacatgtggtctgttggttgtatctttgctgagatggttcggaggcaagctcttttccctggtgattctgagtttcagcaattgcttcatatcttcaggttgctaggaacaccaactgagcagcaatggccgggtgtttccacactgcgtgactggcatgtttaccctaagtgggagccgcaagacttaactcttgctgttccttctctttcacctcaaggagttgatcttctcacgaaaatgctcaagtacaatccagccgaaagaatttcagcaaaaacagcacttgatcacccatattttgacagccttgacaagtctcagttctga

SEQ ID NO: 63012 - protein, 309 aa, Arabidopsis thaliana
MEKYEKLEKVGEGTYGKVYKAMEKGTGKLVALKKTRLEMDEEGIPPTALREISLLQMLSTSIYVVRLLCVEHVHQPSTKSQSTKSNLYLVFEYLDTDLKKFIDSYRKGPNPKPLEPFLIQKLMFQLCKGVAHCHSHGVLHRDLKPQNLLLVKDKELLKIADLGLGRAFTVPLKSYTHEIVTLWYRAPEVLLGSTHYSTGVDMWSVGCIFAEMVRRQALFPGDSEFQQLLHIFRLLGTPTEQQWPGVSTLRDWHVYPKWEPQDLTLAVPSLSPQGVDLLTKMLKYNPAERISAKTALDHPYFDSLDKSQF

SEQ ID NO: 63013 - DNA, 1038 bp, Antirrhinum majus
  CDS (23)..(940)
  misc_feature (1003)..(1003): n is a, g, c or t
gaattagaaaaacaaaaaagaaatggaaaagtacgagaagctggagaaagttggtgaaggcacatacggcaaagtgtacaaagccctagaaaaatccacaggtcaagtggtcgctctgaagaagactcgcctcgagatggacgaagaaggcgtacctccgacggctcttcgcgaggtttcgcttctccagatgctctcgcaatcgctctacgtcgttcgtttgctctccgtcgaacacgtggactgcgccaagaacgggaagcccctgctctacctggttttcgagtatttggacactgatctgaagaaattcatcgattcacatcgaaagggaccaaaccctaggccacttcctcctcagcagattcagagcttcctgttccagctctgtaagggcgtgtcgcattgtcacgctcacggtgttcttcaccgtgatctgaagccgcagaatttgttgttggataaggataagggggttttgaagattgcggatttggggctggcgagggcgtttaccgttcctctcaagagctacacgcacgagattgtgactctgtcgtacagggctcccgaggttctgttgggatcgtcgcattactcgactgccgtggatatgtcgtcggttggttgtatttttgcggagatggtgaggaggcaggctctgtttccgggtgattcggagtttcagcagctgctgcacatttttaggttgctggggacgccgagtgatgagcagtggcccggtgttagttcgctgagggattggcatgtttatccgcagtgggagcctcagaactccgctcccgctgttccgagcttaggacctgatggtcttgaccttctaacgaagacgcttaagtatgatccggcagacaggatttcggcaaaagctgctctggaccatccatactttgacaccctggacaaatctcagttctgaagaaagcttggatgaatcacatttcatcatcttggtgatgtgatattatagatgttactactnctcagtcgatgtctaaaatcaagcttctctccctg

SEQ ID NO: 63014 - protein, 305 aa, Antirrhinum majus
MEKYEKLEKVGEGTYGKVYKALEKSTGQVVALKKTRLEMDEEGVPPTALREVSLLQMLSQSLYVVRLLSVEHVDCAKNGKPLLYLVFEYLDTDLKKFIDSHRKGPNPRPLPPQQIQSFLFQLCKGVSHCHAHGVLHRDLKPQNLLLDKDKGVLKIADLGLARAFTVPLKSYTHEIVTLSYRAPEVLLGSSHYSTAVDMSSVGCIFAEMVRRQALFPGDSEFQQLLHIFRLLGTPSDEQWPGVSSLRDWHVYPQWEPQNSAPAVPSLGPDGLDLLTKTLKYDPADRISAKAALDHPYFDTLDKSQF

SEQ ID NO: 63015 - DNA, 945 bp, Drosophila melanogaster
  CDS (1)..(945)
atgaccaccattctagataactttcaacgcgccgaaaagattggcgagggcacctacggtatagtttacaaagcgcgtagcaactccaccggccaggatgtggccctcaaaaagattcggctagaaggcgaaacggagggtgttccttcgacggccattcgagagatctccctgctgaagaaccttaagcacccaaatgtggtccaactatttgacgtagtcatttccggcaacaatctgtacatgatattcgagtacctgaacatggatctaaagaagctgatggataagaaaaaagacgtgttcacccctcagttgataaagagctatatgcatcagatattagatgccgtcggcttttgccacacgaatcgtatcctgcatcgcgatctcaagccccagaaccttctcgtagacacggcgggcaaaataaagttggctgactttggcctagcaagggccttcaacgtgcctatgcgggcgtacacacacgaagtcgtcaccctctggtaccgagctccagagattctgttgggcacgaaattctactccacgggcgtggacatctggagtctaggctgcattttctctgaaatgattatgcgccgctccttgtttcctggagacagcgagatcgatcaactttataggattttccgtaccttaagcacacctgatgaaacaaattggcctggtgtgacgcagctgccagactttaagaccaagttccctagatgggagggaactaacatgccacaacccataaccgaacacgaggcgcacgaactcataatgtcaatgctgtgctatgatcccaacctgcgcatctcagccaaggacgcactgcagcacgcttacttccgcaatgtgcagcatgttgaccatgtagccctgcctgtagatcccaatgccggcagcgcttcgcgtctaacgcggctcgtctga

SEQ ID NO: 63016 - protein, 314 aa, Drosophila melanogaster
MTTILDNFQRAEKIGEGTYGIVYKARSNSTGQDVALKKIRLEGETEGVPSTAIREISLLKNLKHPNVVQLFDVVISGNNLYMIFEYLNMDLKKLMDKKKDVFTPQLIKSYMHQILDAVGFCHTNRILHRDLKPQNLLVDTAGKIKLADFGLARAFNVPMRAYTHEVVTLWYRAPEILLGTKFYSTGVDIWSLGCIFSEMIMRRSLFPGDSEIDQLYRIFRTLSTPDETNWPGVTQLPDFKTKFPRWEGTNMPQPITEHEAHELIMSMLCYDPNLRISAKDALQHAYFRNVQHVDHVALPVDPNAGSASRLTRLV

SEQ ID NO: 63017 - DNA, 1207 bp, Antirrhinum majus
  CDS (52)..(990)
aaagaattcgaggatccgggtaccatgggaaaaagatagaaagagcaaaaaatggcggaggagaaatcgaaatcttctgcaatggacgcatttgtgaagcttgaaaaagttggagaaggaacgtacggcaaagtgtacagagcaatggagaaatcaaccggcaaaatcgttgccctaaaaaagactcgtcttcacgaggacgaagaaggagttcctcctactactctccgcgaggtctcgttgctgcgaatgctctccagagatccacacgttgttagactgctggatgtgaaacaaggccagaataaggaaggcaagaccgttctctatttggtttttgagtacatggacactgacctcaagaagtacatccggagcttcaaacaaactggggaaagcatcgcacctatgaatgtcaagagtttgatgtaccaactctgtaagggtgtggctttctgccatggccatggtgttttgcacagggatcttaagccccacaaccttttgatggatcgtaagacgatgatgcttaagatagcagatcttggattggccagagcttatacattacccatcaaaaagtatactcatgagatattgactctgtggtatagagctcctgaggtgcttttaggtgctacacattactcgcctgctgtcgacatgtggtctgttgcctgtatatttgctgagttggtgacccaaaaagctctctttcctggagactctgagcttcaacagcttctgcacatttttagattgttgggaacccccaatgaagaaatatggcctggagttagcacgttggtggactggcatgaatacccacaatggactgcacagccaatatcctctgccgttcctggtcttgatgagaaaggcctaaaccttttgtcggaaatgctgcattatgaaccatcaaggaggatttcagcaaagaaagccatggaacatccttacttcgatgaactagacaagtctggtctgtgaatgcagctgatgactgatttaggcatttatcctaaatgttatcgtttgattcttccagttatgggagtaaatttggtgtttgctcccctcgagcattattatcgcacttagctaatgtttgtgaacattaactgatttcgaaagttatgtaataatagttcactctatgtagcctacgtactatcctacagacaattaatatgcttattctgtttta

SEQ ID NO: 63018 - protein, 312 aa, Antirrhinum majus
MAEEKSKSSAMDAFVKLEKVGEGTYGKVYRAMEKSTGKIVALKKTRLHEDEEGVPPTTLREVSLLRMLSRDPHVVRLLDVKQGQNKEGKTVLYLVFEYMDTDLKKYIRSFKQTGESIAPMNVKSLMYQLCKGVAFCHGHGVLHRDLKPHNLLMDRKTMMLKIADLGLARAYTLPIKKYTHEILTLWYRAPEVLLGATHYSPAVDMWSVACIFAELVTQKALFPGDSELQQLLHIFRLLGTPNEEIWPGVSTLVDWHEYPQWTAQPISSAVPGLDEKGLNLLSEMLHYEPSRRISAKKAMEHPYFDELDKSGL

SEQ ID NO: 63019 - DNA, 975 bp, Ajellomyces capsulata
  CDS (1)..(975)
atggagaattatcagaaaattgagaagattggagaggggacgtacggtgtggtctataaggctcgagatctcacgcatcccaatcgaattgttgcgctgaagaagattcgacttgaggctgaggatgagggcgtccccagcaccgccattcgcgaaatctctctcctgaaggaaatgcacgatcccaatattgttagactcctcaacattgttcacgctgacggccacaagctgtacctggtcttcgaattcctggacctcgacctaaaaaaatatatggaggcacttcccgtcagcgagggtggtcgtggcaaagcgctgcccgacgggtcgacactcgatatgaatcgactggggttgggagaggcgatggtcaaaaagttcatggctcaactcgtcgaaggtatacggtactgccacagccatcgagtcctccatcgcgatctgaagcctcaaaatctcttaattgatcgcgagggtaatctcaagttggcggatttcggcttggctcgagctttcggtgtcccgttgcgcacatacacccacgaggttgtcacgctctggtatcgtgcaccggaaatcctattaggtggccgtcaatattccactggtgtcgacatgtggtccgtcggtgctatttttgcagaaatgtgcacgcgcaagccgttattccccggagattctgagattgatgaaattttcaagatcttcaaactcctcggaaccccggatgagaatacctggcccggtgtcacttcattccccgacttcaaagcctcatttcctaaatggaagcgtgaagacactcgaaagctggttcccggcctggaacgtaacggtcttgatcttctagatgccatgctcgaatatgaccctgcacgacgtatatcggcgaagcaggcctgcatgcacccatacttccaagctggtagctcggcctattcggggcgagaaagattgcagccatatccatga

SEQ ID NO: 63020 - protein, 324 aa, Ajellomyces capsulata
MENYQKIEKIGEGTYGVVYKARDLTHPNRIVALKKIRLEAEDEGVPSTAIREISLLKEMHDPNIVRLLNIVHADGHKLYLVFEFLDLDLKKYMEALPVSEGGRGKALPDGSTLDMNRLGLGEAMVKKFMAQLVEGIRYCHSHRVLHRDLKPQNLLIDREGNLKLADFGLARAFGVPLRTYTHEVVTLWYRAPEILLGGRQYSTGVDMWSVGAIFAEMCTRKPLFPGDSEIDEIFKIFKLLGTPDENTWPGVTSFPDFKASFPKWKREDTRKLVPGLERNGLDLLDAMLEYDPARRISAKQACMHPYFQAGSSAYSGRERLQPYP

SEQ ID NO: 63021 - DNA, 1274 bp, Chenopodium rubrum
  CDS (53)..(937)
tatttctatcctccattgaagcagtttctgagtggtagagatacgggacgaaatggatcagtatgaaaaagttgagaagataggggaaggaacctatggagtggtttataaggcgcgggacaaggttacgaacgagactatagctttgaagaaaattcggttggaacaggaggatgagggagttccgagcacggcgatcagagaaatatcacttttgaaggagatgcagcatggcaacattgtcaggttgcaggatgtggtgcatagtgagaagcgcttatatctggtttttgagtatttggaccttgatttgaagaaacacatggattcatgccctgattttgcaaaggatccacgtatgattaaaaggtttctttatcagattcttcgtggtatcgcttattgtcactctcatagggtcctgcaccgagatctgaagccgcagaatctgttgatagatcgccaaactaatgcactaaaacttgcagattttggattggcaagggcatttggtattcctgtgaggacttttacacatgaggtggtgacattgtggtacagagctccagaaatattgcttggatctcgacattactctactcctgtggatgtgtggtctgtgggttgtatctttgctgagatggtgaatcagaagccattatttcctggagattccgagattgatgaacttttcaagattttcaggaccttgggtacaccaaatgaggagacatggcctggagtgacctcccttcccgatttcaaatcttcatttcctaaatggatctccaaggatttgtctgcagtagtaccaaatcttgatccagctggtattgatcttctaaataaaatgctttgcttggatccgagcaaaaggattacagccaggaatgctcttgaacatgaatacttcaaggacattggttttgtaccctgatttctgttcatcgccttccaggttatctcgtgtgaatattggaagttaaggaaaaaagattctgttgatttattttccgcgggtgaaatgtgtgcaattgttgtagattttttttgatgctatgcttaccattgttctttgccaggacttcatgtcgtgtaattgactgttctgcattgggattgagaactttgtgaagccccattgcgatgtgcaaattatacccgtcttccatatcactcctaaattgcttgaatgtgacccatctatgggcttctattatttaatcaagattgattttttctattgcaaaaaaaaaaaaaaaaaaaaactcgag

SEQ ID NO: 63022 - protein, 294 aa, Chenopodium rubrum
MDQYEKVEKIGEGTYGVVYKARDKVTNETIALKKIRLEQEDEGVPSTAIREISLLKEMQHGNIVRLQDVVHSEKRLYLVFEYLDLDLKKHMDSCPDFAKDPRMIKRFLYQILRGIAYCHSHRVLHRDLKPQNLLIDRQTNALKLADFGLARAFGIPVRTFTHEVVTLWYRAPEILLGSRHYSTPVDVWSVGCIFAEMVNQKPLFPGDSEIDELFKIFRTLGTPNEETWPGVTSLPDFKSSFPKWISKDLSAVVPNLDPAGIDLLNKMLCLDPSKRITARNALEHEYFKDIGFVP

SEQ ID NO: 63023 - DNA, 894 bp, Drosophila melanogaster
  CDS (1)..(894)
atggaggattttgagaaaattgagaagattggcgagggcacatatggcgtggtgtataaaggtcgcaatcgcctgacgggccaaattgtggcaatgaagaaaatccgcttggagtccgacgacgaaggcgttccatcaaccgcgatcagagaaatttcgttgcttaaggagttgaaacatgaaaacattgtctgtttggaggatgttttgatggaggagaaccgcatatacttgatctttgaattcctatcgatggacctcaagaaatacatggattcgctgccagttgataagcacatggagagtgaattggtccgtagctatttgtaccaaataactagcgccattcttttctgccatcgtcggcgagtacttcaccgtgatcttaagccgcagaacttactaatcgacaagagtggcctcataaaagtcgccgactttggacttggccgatcctttggcattccggtgcgcatttatacgcacgagattgttaccttgtggtacagagcgccggaggtgctactgggttcaccccggtattcctgtcccgtcgatatctggtccattggatgcatattcgcggagatggcaacgagaaagccgctattccagggtgactcggaaattgaccagttgtttagaatgtttagaattctgaaaacacctaccgaagacatttggccgggcgttacttcgctacccgactataagaacacgttcccctgctggtccacgaatcaattgaccaatcagttaaagaatctcgatgcgaatggtattgatctcattcaaaagatgttaatctacgatccagttcatcgcatttccgccaaggacattttggagcatccctatttcaatggttttcaatcgggcttagttcgaaattaa

SEQ ID NO: 63024 - protein, 297 aa, Drosophila melanogaster
MEDFEKIEKIGEGTYGVVYKGRNRLTGQIVAMKKIRLESDDEGVPSTAIREISLLKELKHENIVCLEDVLMEENRIYLIFEFLSMDLKKYMDSLPVDKHMESELVRSYLYQITSAILFCHRRRVLHRDLKPQNLLIDKSGLIKVADFGLGRSFGIPVRIYTHEIVTLWYRAPEVLLGSPRYSCPVDIWSIGCIFAEMATRKPLFQGDSEIDQLFRMFRILKTPTEDIWPGVTSLPDYKNTFPCWSTNQLTNQLKNLDANGIDLIQKMLIYDPVHRISAKDILEHPYFNGFQSGLVRN

SEQ ID NO: 63025 - DNA, 972 bp, Emericella nidulans
  CDS (1)..(972)
atggaaaactaccagaagattgagaaaattggcgagggaacgtacggtgtcgtttacaaggctcgcgaactcactcacccaaaccggatcgttgcgttgaagaaaatccgactggaggctgaagatgaaggcgtacccagcactgcgatccgcgagatctctttgctaaaggaaatgaacgacccgaacatcgtacgtctcttgaacatcgtacacgcagacgggcacaagctctacctcgttttcgaattcctcgacctcgatctcaagaagtacatggaggcactgccggtcagtgagggtggacgcggtagggctttgccggatggctctactctgagcaggaatctaggcctgggagatgcgatggtcaaaaagtttatggcacaattaatcgagggtatccgtttctgtcacagccacagagtgcttcaccgtgacttgaaaccccagaatctcctaattgaccgtgatggcaatctcaagctggccgattttggattggcaagggcattcggtgttcccctccgaacctacacgcacgaggtggtaactctatggtaccgctctcctgaaatccttctcggcggtcgtcagtactccactggtgttgacatgtggtcttgtggtgctattttcgcggaaatgtgcactcgcaagcctctatttcctggtgactcggaaattgacgagatctttaagatcttccggatcctcggaactccagatgagactatctggcctggcgtcacctcgttccctgatttcaaaccgaccttccccaagtggaagcgcgaagatatccagaacgtcgtccctggcctcgaagaggatggccttgatctattagaagccctgctcgagtacgatcccgctcgacgtatttcagccaagcaggcttgcatgcatccatacttccagcacggcagctcgtactattctggtcgcgctcgccgcaatggctttcactaa
